United States Patent Application Publication US 2019/0348154 A1 - sequence listing, part 25

SEQ ID NO: 93101 - DNA, 429 bp, Enterobacter aerogenes
atgttcaaaccagtcatgcttgctctggcctccctaacggcggtgtcattttcatctttgggtgccgaggccgaaggtatccgggtcaagatcaccgcaggtgaccaggtgatgacggcaacgttttatgacaatgccaccacccgggcgctggtctctcactttccgctgacgctgcccatggaagatctttacggacgcgaaatgtgctaccggttcccggatgccctgcctgcaaacgaaacgcagaccagcggttatgaagtgggcgatgttgtttactgggctccccgccacagcttcgtcatcatgtacgaacagaacaatgaacggataggtaaccttcagaaagtgggtcgtatccactctggagttgggattttcaggcatacgggtaatattgatgtgacatttgagatggcacattga

SEQ ID NO: 93102 - DNA, 1044 bp, Enterobacter aerogenes
atgaaattgcattcaaaaggaaaattaaaaaccctggccgcactgacgatactcagcgtcgctctgggtatgggggtaaacactgccgtcgcggcggatatgtcccacggtgcggataatttctataaaagcgataaagtgaagacggaaaccgtaaaattcaaaaatatttacggtatggaagttaccggcacgttatttactccccgcaatatggaagccggtaaaaaatatgacgcccttattgtcggtcatccttttgctgcagtaagacagcaggctgctgacctctacgcaaccaaaatggcggaggccggttttgttgcgctgtccttcgaccagtctttctggggtgagagtgcgggtacgccgcgtggtgccgtgctgcctgatgtttatgcagaaaacttcagcgccgcagttgatttcctcggaacgcgcgcatttgtggaccgtgaaaaaattggcgtgataggtatctgcggtagcggcggctttgccatcgccgcgacaaaaattgatccccgcatcagggcgctcgccaccgtcagcatgtacgacatgggcgaatattttcgtaccggtctgaaccatgagcggaccgtggaaatgagaaacaaggacctggcgattgcagcagaacaacgctacaaaactgctgaaaccgggcaacccgtttatggtcccgggcaaaacgatccggtgttcatcgaaggtaaagagtccaatgacttttatcagacggagcgcggtaaggtggcatccaacgatcgccgctcaacaccggcgacctatgcgaaattcatgaacttccatccgtttatcgatatcgagtccatttcaccgcgaccaatactctttgtcgtgggtgatgctgcaccatcccgcacctataccgatacagcttacaaaatggccgcagagccgaaggagcttgtggagattaagggcgctaaccgtatcgacctgtatgaccgcactgaactcatcccgtgggacaagctggtctcattttttaacaccaatctgaaatcagataaataa

SEQ ID NO: 93103 - DNA, 1209 bp, Enterobacter aerogenes
atgcctgtaaaacattctcacaataactccggtacccgggttttcgcagcactgatgccggtaatggctgcggtactggtcggttttattattatcggtgtggcacttcccgtcctgccgctgcatgtcaaaaatgacctgggcttcgggacgtttattgtgggcctggtcgctggggcacagtttgcagcatcgctgatttcccgggtgtggtccgggagttattcagacaagcgcggcgccaaaaagggcgtggtggccgggctcatcgctgctgccgtttcagggctactgtaccaggtgtcgctctggcttgtcggcatgccggtactgtctgtgggtgtattgcttgccggacgcgcgatccttggtggggcggaaagcttcatcattaccggtgccgtggcatgggggctggccctcgtggataaggagcatgcaggtaaggtaatcgcctgggtgggtaccgcgatgtttgccgctatggctctcggcggaccggtggggacgctgttatttgatgctttcggctttgaggcgatcgcattgctgacgttcctgcttccgctgctggtactggcgtatctcgcccgtatgcccgccgtgccgcctcatccacatgccgcacaagcctcctttggctccgtcatgcacgcggtctggttacccggcctgggtgcggcactggccagcacgggctactgtaccatcctggccttcagctcactgtattacagcgccatgaactggcagcccgtctggatggcattcaccgcctttggcgtcgcgctgattgttgcccgtaccgttgctggccatctgccagatcgctttggtggcgctcgtattgcgctgatatttgtgcttgtccaggccgccggtctgttccttatttggcttgccggtacgtccttgattgcgacggtcggagccgcgttggccggttttggctacttgctggtttatccgggcctcggtattgaagccatcaatggttcaacgccccagaaccgcggcatggtgatggggatctacacagcatttcttgacgtggcgatggcgatcggcagtcctgcgctcggctgggtaggaggacatcttgggctgaacgcgatatttctggccggcgcgctggcagtgctgtcaaccgctgtggtggcattcctgctgttaaaacacgcgggccagagtaaacaaaatccggcctga

SEQ ID NO: 93104 - DNA, 738 bp, Enterobacter aerogenes
atgtctcagggtattgaaaacaaaattatcgtcatcaccggtgccagtagtggcctgggggcagaaaccgcccgactcctgacaagactgggcgcaaaggtggtcctgggtgctcgtcgtatggagaagctggagcaacttgccggcgaactgggactggatgcccgagccatactgcgcaccgacgtgacagaccgcgcacaggttcagacccttgttgaccgggcggtagagttgcacggccgtattgacgtcattattaataacgccggcttaatgccgagttccatgctcgacaagctgaaagtggacgaatgggaccggatgatcgacgtgaatattaagggtgtactttacggtattgccgccacgttgccgtatatgaaagcgcagaagtccggacagtttatcaatgtatcgtccgtagccggacacaaggtgggacccggcggtgctgtatatgcagggacgaaatgggccgtccgggctatttcagaaggcctgcgtcaggaagtgaagccctggaatattcgcacaactattgtttctcccggcgcggtagataccgaactgactaaaaccatcaccgacgaagatattgcgaaaggtatgtcgaaaacctacgagaatgcaatcccggcagaggcttttgcgcggattgttgcatttgctatcagccagcctgacgacgtggatgttaacgaaatacttttccggccgaccgtgcaggtttattaa

SEQ ID NO: 93105 - DNA, 777 bp, Enterobacter aerogenes
atgaaaacttcaacggcagttgcgctggcgctttctctcggatcggctggcgccattgcagaaacgggggcacagcggggcccgctgtcaggcaccgacatagaggcagtatctcccgcactcgaacgctatgcgagcaccaggctggcaggagacctctggaaaagaaaggatttgtcgccacgcgatcgcagcctcgttactgttgcagcggttattgcccggaatcagaccttacttttaccggagcagctggagctggcgctgaaaaacggtgttaagccggatgagctttccgaaaccatcacgcagctggcgttctatgccggctggggcaatgccattgcggccgcagcggtaacgaaagagatattcctgcaaaaaagaattaatgctgaacagcttccttgcgcggaggaggcgctgctgccgatcgatgaaaaagctgaagcagctcgcgctgcacgcgtggaacagactatcggtagcacggcaccggggctcgtcagcgacaccaccgacgtgcttttccgggaattgtggctgcgtcccgggcttgcaccacgggacagaagtctggtgaccctgtctgccctgattgcaaacgggcaggtacagcaaatcccgccgcaccttaaccgggcaatggataacggcctgacccggcagcaggcttcgggcgcactgagtcaccttgcgtattataccgggtggcccaatgctttctcagctgcgccggtttttaaaacggtgtttgagcagcgtgaatcaaaataa

SEQ ID NO: 93106 - DNA, 459 bp, Enterobacter aerogenes
atgaaatcgattattgctgcagcagccatgtccgtactgggtgccacccaggtttctgccgaaagtatcgaaatccgtcgtaacgggcagaccccttcagtcatcggcaaggccgataacttctcggggcatgcggttgtcagcccgttgttgccgccaaacgagtccacgcgtgccaatctgggccaggtggatttcgccccgggtgcgcgcacggcctggcatacccatcccgccgggcagctgctgatcgtcacagcaggcaaaggctggattcaggaagaaggtaaggctcgtcaggatatagcccccggggatgtcgtctggatccctgcgaccgttcgccactggcatggtgccacggcgacgtcccccatgagccatctggccatgacgtatatggtggacggtaaaaacgtagactggcaggagcccgtctccgacgaacagtatcagtaa

SEQ ID NO: 93107 - DNA, 912 bp, Enterobacter aerogenes
atggctgatgataatctgaatgcccttgctgcatttatggtggtggctaaggaacagaatttcacgcgagcggcaaaacgtctgggtgtttcacagtcagcgctcagtcagactgttcgtgttctggaagcacaactcgggatccggttgcttaaccgaacgaccagaagagttgtcccaactgaagctggggaacgtttactcgcttcagtcggacctcagatagaggatattcagcggcagttaatggtgctgagtgaattacgtgataagccagccggtacaatacgacttaccgcaacagaatatgcagcagagtcaatactctggccagcagtgtcgcgtctcgttaaaaaataccccgatattaaagtcgaaattcttacagattatgggctgactgacatcgtaagagatcgttttgatgccggtgtacgtcccggagaaactattgccaaagacatgattgccgttcgtattgcgccagatatgcggatgacagtggccggatctccagattatttcagtaacaggcatgtgcccattactccgcaggaattgacagaacactgttgtataaacctgcgcctttccgggcatggaggactctatgcgtgggagtttgaaaaggacgggcgagagctgaatgtgcgagtagatggtcaactggttttcaatacggggagcatgatactgaaagcggcgcttgaaggtcgagggctagcctatctaccagaaggacagcttgaatcctatatagcatccggggagcttgttcgcgtacttgaggattggtgtgaaccttactctggatatcatctttactatccaagccaccgacaacccacccctgcatttagcctgctagttgatgaacttcgctattcaacacgcgagaagcaccagagttaa

SEQ ID NO: 93108 - DNA, 852 bp, Enterobacter aerogenes
atgctctacactactctcaacaacagcgttaaaatgcctttactcggctttggcgtctaccagatggtagaccttcacgaatgcgaagccgctgtttttaatgccataaaagcaggttatcgacttattgatacggctgcggcctatgaaaacgaagaggccgttggtgcggcaattgctcgcagtgacgtcccgcgtgaagcgttatttataacaaccaaagtgtgggttcaggatgcaggttacgaaaatacgcgcaaagcatttttccgctcccttgaaaggctcaaactcgactatctggatctatacctgattcatcagccctattcagatgtatttggctcctggcgtgcgatggaggaactttatgaagaaggtttaattcgtgcaattggcgtgagtaattttgctcccgaccgactaactgacttaataaccttcagccgcattgttcctgctgtcaatcaggtcgagacacaccctttccatcaacaaattaataatgctgaatttatgaaagcatctggcgttcagcctgaatcgtgggcgccttttgcggaaggtaaaaatcaaatattcacccatcctgttctactgcctatcgcccgcgcacacaacaaaagtgtggctcaggttgtgcttcgctggttaattcagcgcggaattgtggtcatacctaagtcagtaaagcccgtgcgtatgagtgaaaacttcgatgttttcgatttttctttgagtgatgaagaaatgcgttcaattcagtctctcgacacgggaagaacactctttactgagcataccgaccctgaacgtatcaggaacgtggcaacccgaaaattcaatacctga

SEQ ID NO: 93109 - DNA, 912 bp, Enterobacter aerogenes
atggatcccttttctgatatcttaaacctgctctctgctacaagttatacaactgccggtctttctacaggcaacaactgggcaatgacatttccggggtttcatgggttcaaatttattgttgtcagaaaaggatcttttttgtttcggctcaaggacgaactgacatggaagacattaggtgttggtgaaggggtcattctcaccagaaaaatgagatttgtgatggcaaccaaccaggaatgcgcgccattagaatctaccgaagagaaaagaccccgcgttcgcgaaactgtcaattacggcggagatgacaacatactgatcgctggaaaaatggagatcgatctcgtttcatctgagcttttactacaagaattgcctgaaacaatcttctttcaaacccagcctgatgagcctaccgggcttagcccactgatgaagttgttatttatggaaaaactttcaaaccgaccgggtgcatctcaggcatgtaatcatctgatgcacctgattatgattgaagcgctacgtgcctggtatgaaagcagctccacttcccataagggaattctcaaagcatataaagacccgcggattgttgcagcgcttaatgccatacacaacgaaccagaaaaaaactggcggctgcatgaattagcgtccacagccggtatgtcgagggctggatttagcaaaacattcagtggcctgaccgggcagaccccgattggttatgtaacaaactggcgcatgctgcttgcaagtaaaatgcttcgcttaggaaacagaagcgtcaaagacatcggtttcagtttaggttatcagtcagaaagtatttttagctcagctttcaagcgtatctatgggctatcgcctaaaacttatagagcaacaatgcgttgcttatga

SEQ ID NO: 93110 - DNA, 681 bp, Enterobacter aerogenes
atgactgtatatcttggtattgatattgccagtaagaaatttgatgtagcagaactctgtgacgggaattaccgatgcaaagcttttgaaaacacatccgctggatttttggctctctataaatggcttggtcagagcacaatgccagacattcacgcatgcctggaagcgactggtaactatggcatttcactcgccacatttttgtatgaaaataagataaaagtcagtgttgttaatcctacacgtattaaaggattcggtgcatcggaacattcgcgcactaaaaccgacaaagcggactcaaaacttattgcccggttctgtaaagctgctgtgcctgacggatggaaaccaacgcctgcaccagtgagaaagttgcaggccctcgtccttcgtatcagcgcgctcaatggtatgttaagaatggagtgcaaccgtcgtgagaatgctgacgcaaatattcaggcttctctggatcgcatcattagcctgcttaaaacggaaatcgagattgtccggcaagagataaaagatcatgtgagaagtgatgacgaactgaaaaaacaggatgcacttatacagtcagttcctggtatcggtgaggtttcgagcaatctgattttatcattcatgtccggtaaggtttcaggaaagcaaaagaagtcactgcatacctag

SEQ ID NO: 93111 - DNA, 1254 bp, Enterobacter aerogenes
atgaaaaaacgcattgtgattatcggcggcggcgtggtgggactggccaccgcctgggcattaattaagagcggacaccaggttcaactgctggagcgtaacgccgagccgggcagcgccaccagctttgccaacggcgggcagctaagctaccgctacgtcgcgccgcttgccgaccgcggcgtccccctgcagggaattaaatggatgggcaaagccgattcgccgctgaatatgcgcctgcaaatgtctttccagcagtggcgctggctgttgcagtttctgcgtgcctgcaatagccaaagtaacaaaattaacggcgatcatattttgcgcttatccctgctcagtcgtcaggtcatgcagtcgtggcttgatgaagataatcttgccgattttcactggcggcgtagcggcaaacttattatccatcgccgggaatatgactttcataaagcggcgaaaggaatgaatccgcagtaccagcatgcgctaagcgccgaagcctgcctgcagctggaaccggcgctgaaacacatcagccattcgctacagggcgggatttattcaccgggagatgaaacggcagactgccataaattctgtctcgccctgctcgacaaactcaatgccagtagcaacttcagcctgctcacccactgcgaggtgctcaagctcaataaacgcgacgggcgcatcagttcgcttgagaccagccgcggtacgataaccggcgatgattatgtcgtcgccgccggcaacggtagcggcccgctgctgggtcatctgggcgtgcgcgtgccgctgtgcgcgctgaagggatacagcctgacccttccctatcctaaagaggccgggatcgcgccggatatcagcgtgaccgactacggacacaaaatcgtttacgcccgcctgggagaacagttgcgcatcgcggcgatggtggatatcggctacgacggggatgaactacgtgatagccgcgttcaggcgctgaagaaaatcgtcgctagcagctttcccgatctacaggggctggatgaggccgaagcctggaccggtatgcgtccgtcgacgcccgcgggcccaccgatgctggggcgcgccggataccagaatctgtggatgaatctcggccagggtagccttggttttacgctcgcggccggcagcgccgtggtgctgggagcgctcctcgacggcgaagcgccggcaatttctttagatggtctgacatggaaacaatccgcatga

SEQ ID NO: 93112 - DNA, 3744 bp, Enterobacter aerogenes
atgagtaaatttctggaccggtttcgctacttcaaacagaagggtgaaacctttgccgatgggcacggccagcttcttaaaaccaaccgggattgggaggatggataccgccagcgttggcagcatgacaaaatcgtgcgttccactcacggtgtgaactgcaccggctcatgcagctggaaaatttatgtcaaaaatggtctggtcacctgggaaacccagcagaccgattacccgcgcacccgccccgatctgccgaaccatgagccacgcggctgtccgcgcggcgccagctactcctggtatctgtacagcgctaaccgcctgaaatatccgctgatgcgtaaacgtctgatgaaaatgtggcgtgaagcgaaagttcagcatagcgatccggttgaggcatgggcttctattattgaagatgccgataaagcgaaaagctttaaacaggcccgcggccgcggcggttttgttcgttcttcatggaaagaagtgaacgaactgattgccgcctcaaacgtttataccgtcaaaacttatggtccagaccgcgtggcagggttctcgccaatcccggcgatgtcgatggtttcctacgcgtccggcgcccgttacctgtcgctgattggcggtacctgcctgagcttctacgactggtactgtgacctgccgccggcctcgccgatgacctggggcgaacagaccgacgtgccggaatccgctgactggtataactccagctatatcatcgcctggggctccaacgtcccgcagacccgtaccccggacgcgcacttctttaccgaagttcgctataaagggaccaaaaccgtggcaattactccggactatgccgaaatcgccaagctctgcgatctgtggctggcgccgaagcagggtaccgatgccgcgatggcgctggcgatgggccacgtcatgctgcgtgagttccacctcgataaaccgagccagtacttcaccgattacgtacgtcgctacaccgacatgccgatgctggttatgctcgaagagcgcgatggctactatgccgctggccgtatgttgcgcgctgccgacctggttgactccctgggccaggagcagaatccggaatggaaaaccgtcgcctttgacgagaagggcgaaatgaccgtacctaacggttctctgggcttccgctggggcgacaaaggcaagtggaacctcgagcagcgcgatggtaaaaccggcgaagagattgaactgcgtctgagcctgcttggcagccacgacgatatcgccaacgtcggcttcccatactttggcggtgaaggttccgagcatttcaacaaagtcgacctcgaaaacattctgttgcacaaactgccggtgaaacgcctgcagatggccgacggctccaccgcgctggtgaccaccgtttatgacctgaccatggctaactatggcctggaacgtgggctgaacgatgaaaactgcgcgaccagctacgatgacgtcaaagcgtacactccggcctgggctgaaaaaattaccggcgtatcccgcgcgcacatcatccgtaccgcccgcgaatttgccgataacgccgataagacccacggccgttcgatgattatcgtcggcgcgggccttaaccactggttccatctggatatgaactaccgcggactgatcaacatgctgatcttctgcggctgcgttggccagagcggcggcggctgggcgcactacgttggtcaggaaaaactgcgtccgcagaccggctggcagccgctggcgttcgcccttgactggcagcgtccggcacgccacatgaacagtacatcgtacttctataaccactccagccagtggcgctatgaaacggtcaccgcgcaggaactgctgtcgccgatggcggataaatcccgctacagcggacatctgatcgacttcaacgtgcgcgctgagcgtatgggctggctgccgtcggcgccacagctgggcgtgaacccgctgcgtattgctgacgaagcgaagaaagccggcatgacgccggtcgattacaccgtgaaatcgctgaaagaggggtctattcgctttgcggccgaacagccggagaacggtaaaaaccatccgcgtaacctgtttatctggcgttccaacctgctgggttcctccggtaaaggtcatgaatacatgctcaagtacctgctgggtaccgagaatggcattcagggcaaagaccttggcaagcagggcggcgtgaagccggaagaagtcgagtggcgggataacggcctcgacggcaaactggatctggtcgtcacgctcgacttccgtctgtcgagcacctgtctctattccgacatcgtactgccgaccgcaacctggtacgaaaaagacgacatgaatacttcggatatgcatccgtttattcacccgctgtcggccgccgttgacccggcctgggaatcgaagagcgactgggatatctataaaggtattgctaagaaattctctgaagtctgcgtgggtcacctcggaaaagaaaccgacgtcgtgacgctgccgattcagcacgattccgccgcggaaatggcgcagccgtttgacgttaaagactggaaaaaaggcgaatgtgacctgattccagggaaaaccgcgccgcatattattccggtcgagcgcgattatccggcgacctacgagcgcttcacctctatcggcccgctgctggaaaccatcggcaacggcggtaaagggatcgcctggaatacccagagcgagatggatctgctgcgtaagctcaactacaccaaggcggaaggcccggcgaaaggccagccgaagctggagaccgctatcgacgccgctgaaatgatcctcactctggcgccggaaaccaacggtcaggtggccgtgaaggcgtggaaagcgctgagcgaatttaccggccgcgagcatgcgcacttggcgttgaataaagaagacgagaagatccgcttccgcgatattcaggcgcagccgcgtaagatcatctccagcccgacctggtctggcctggaagacgaacatgtctcctataacgctggctataccaacgttcacgagctcatcccttggcgtacgctgtccggccgtcagtcgctgtatcaggatcaccagtggatgcgcgactttggcgaaagcctgctggtctatcgtccgccgatcgacacccgttcggtgaaagcggtgatgggcgagaagtccaacggcaatccagagaaggccttgaacttcctgacgccgcaccagaagtgggggattcactccacttacagcgataacttgctgatgctgaccctgtcgcgcggcgggccgatcgtctggatgagcgaagcggatgcgaaagatctgggtatcgaagataacgactggatcgaagtatttaacgccaacggcgccctgacggcgcgtgcggtagtgagccagcgcgtaccggccggaatgaccatgatgtatcacgcgcaggaacgtatcgtgaacctgccaggctctgaagttaccggtcagcgcggcgggatccacaactcggtcacccgtattacgccaaaaccgacccatatgatcggcggctacggccacctggcgtacggctttaactactatggcaccgtcggttccaaccgcgatgagtttgttgtggtacgtaagatgaagaacattaactggttagacggcgaaggtaatgaccaggtacaggagagcgtaaaatga

SEQ ID NO: 93113 - DNA, 603 bp, Enterobacter aerogenes
atgctgcgcactggcgtcaagcaactgattagcatggcgccggacattcaagttatcggcgaagccagcaatggcgaacaaggtattgaactggcggaatcgctggatccggatcttattctgctggaccttaatatgccggggatgaacggcctcgaaaccctcgacaagctgcgggaaaaatcgctctccggccgcgtggtcgtattcagcgtctccaatcatgaagaggacgtggtgaccgccctgaaacgcggcgccgacggctacctgctgaaagatatggaaccggaagatttgctgaaagcgctgcagcaggccgcggcgggcgaaatggtattaagcgaagcgttaaccccggtactggccgccagcctgcgcgctaatcgcgccacgtccgaccgcgacatcagccagctgaccccgcgcgagcgcgatatcttgaagctgattgcccagggcctgccgaacaaaatgatcgcccgccgcctggatatcaccgaaagcacggttaaagtgcatgtgaagcatatgctgaagaaaatgaagctgaaatcacgcgttgaagccgccgtctgggttcaccaggaacggatcttctaa

SEQ ID NO: 93114 - DNA, 405 bp, Enterobacter aerogenes
atgctgaacaaatcaccggtggtgttgttattgttccctttactgctggcaggctgtcatcatcctcagcccacgtcgcacgcggcggcgagcgccaccgaagtcgacgatctgttcgccagctccccttcggcgaagccatcgagtcgggctacctacgcttatcagataatgagcgccgtcaaggccaaaatgcctgatttcgcggaatattccgggcaaagctgtcgggttcgtttgtcgctgcagcgtgatggcaccgggagttccgccagcgtagaaaaaggcgatcggcaactctgcgacaaggtattagctgcgatcaagcaagctaaaattcctgccgcgccggatgatgaaacttatcaaggatttaataatgtcacggtcgattttaaaccataa

SEQ ID NO: 93115 - DNA, 876 bp, Enterobacter aerogenes
atgaaaaacaacataaaaattaaagccccgccactcttcggcgttacggaagttaatgatatttactgtgatatcagtaggaatgtaccacgaagtgagtggttaggcgtcaccttaccttttgccttagtttttgtttcgctgttaggcctgtttattatcgtgcctttggttggttaccttcaggagctaatatttgttgtcccaatacttatcctgttgttatatagcgcaatacatgcactacgccttttcattagcaagcccaaggatatgataattcggctaaatcgccgtcagcagaaaatctatatccagaagcattgccataaccataatatttttgctaaatggcccgttgaaacgctagttttcgactggagtgacgttattcgccccagtttcagaaacggttccggttcggcaagttcacggacgtggtatgcctggcatattaatccacctgacagcccaaaggtcaaaattatcatcagcgatgataatatacctttatttttttacgcatcacgttacttcattagcattgaggatacgattattagctatgccgagtcctggcaatggtgtaacgattatatgaatggtataaattctcccgttactcttttgacacaacctcgcgccacctttaaatactgcgtaacgacgctgagcaatagattgttatcacgcgtcgatgatagcgatcgctggaccaccattttccctatccgtaatccattcttttggttgatatcatttctttttgtgccaattatattaatcgatgcgctggcgctgcgcagtattctgcgaagacttcccgatacactctggtctgatttcgcacagacggaatcgacgtcggatagttaa

SEQ ID NO: 93116 - DNA, 330 bp, Enterobacter aerogenes
atgcataacccgctgattatcgaagcgatcatgttgattgcggccattatcgtcggcgtatggagccagaacgctttacctatgtacgccgatagtcgaccgatcctcttcctgctgtgcctggtcattggtatcggcagcacattgtgcctgctactggatggcttagccctgctgttcatcggtcaggttgcaacaggtagcgtgcggatatatggccccatgctgctgctggtggtgctatggaaaccctttaatgcgatcttcggcatcattgaggattttttgcagcgcagagaagccagagggaaatcccggcgacggaagtga

SEQ ID NO: 93117 - DNA, 303 bp, Enterobacter aerogenes
gtgataaaaaaaatccacgccttagctgtgccatgtctgatgttgtcatgcttatttggctcagtgaatgccgcgccgaccggcggcgttgtcgccatttacgggcaggtcgttgacccttcctgcgaggccaatagtatgaatggtaagattgaaatggcctgcccgcggctgggtagccaggcgatttcgccgcaggtgctgacgacggggaatttcagtaatgacgccgtcggttcggcacaattaaagtatattgatccgcaacatacccgcgctatcctcgaagtgaattatcgctaa

SEQ ID NO: 93118 - DNA, 414 bp, Enterobacter aerogenes
gtggatgcattgaggagggtactggagcatctgaacatccctaacgccaacgcctgtgaagtggaataccttaccgagtgtcctgaatacggcattgtgggtaaatggatcgctgcgcccgatgacaacgtcattaaccgaatcgtcattactgtcgatatgcatgaagaagacagtgattcaaaaagtatggaaagcgcctgtgcgttttcgttcactaatcactatgtcagagtatcaggcgaaaagccggtatatctttaccagccgatgtccggcattgctgatgtagaagaaaagatcccagtctatctggaggttaagtccgttactgcgcctaaaacactgtggtatacaggattgcccagagtggataaatacccattattgcttttggcgccggtgtgtcattga

SEQ ID NO: 93119 - DNA, 123 bp, Enterobacter aerogenes
atgaagcagacatacacatcagggaccgttctggcggccatgcttatggtcgttggatgtcaggcgcaacaaccgccgacgcaggttattatcgtttcgatgaccaccgttatctggagctga

SEQ ID NO: 93120 - DNA, 1143 bp, Enterobacter aerogenes
atggctcagtttaatcactttgaactcgcgcttctgaaccccagctttgactcccctttggtcgatgcgctgacggaactggagttactccgacacctgcggctggaaaccgatgttcaccctatcctgtttgcgcagttgaaggccgttttccacatgctggagagtctgggctctgcaaggattgagggaaaccacacaacgcttgccgactatgttgaaagcaaggttgaaggaacgcagagttcgacggatcagctcaaagaaatcaacaatattgaagccgcgatggagtacatcgacgaatacctgagcaacggcgatgagataacggaatattttattcgtgagttgcatagtctggcggttgccgggctgcaacaggaaggtgataaaacgcccggcgcatatcggcaacataacgtcagcatcgctcagtctgaccatttaccgccggaccacatccgcgttgctgattatatggcggaactgactgcctttattaaccgtgccgataagccaaagtacgatctgatgaagattgcactggtacatcatcgctttggctggatacatccctttggcaacggtaatggcagaaccgttagattgctgacctatgcgctacttatcaagtatggttttaatgtgcaggcagggggccgggttctcaatccgacagcggtattctgtaacgatcgtgaacgctattacgccatgctctcgttagccgataagggaacagagcaagggctggaagaatggtgcttatatgtgctttcggggatttcctctgagctgaagaaagtcgatcaactgacgaaccacgctttcctgagtgaaaagatcctgtatccggccatcgatttttcgtcggagagagggctgataaatccgctggaatcgaaggttctgaaacgtgctgttgagctggggacgataaaagcgggcgatctacgcgccgttttgccggacctgaaaccgacgcaggtgacttatcagcttggtaagttgattgaacggggactgctccagccggtagaagaaggggctcgtacctatacggcgaagttttctaattcgtatctgatacgtggggtgattaaggttctgcgggacgaggggtttattcctgacttgtaa

SEQ ID NO: 93121 - DNA, 186 bp, Enterobacter aerogenes
atgggggccttcgtgggggcgctgtttgtaagaaataccaataaaaccaataacaaacagcatgttaatcgtggatatgattccgagtccgccgccaacacaaccgcgttaaagctgatgaacgacctgctgcagaatgcccatgttagcctggtccaatacccgttcatcccaccccatttctga

SEQ ID NO: 93122 - DNA, 216 bp, Enterobacter aerogenes
atgaataccggtttgtgtaccgggccggaaacgatacaggcaaaaattttcccgaaaccggcgtcagccgcttttttactgcgtaagcgcaaagaaaataaacgtgatttgctgcacagtgtaaatactaatgagaaccactatcaattcgatgtcgttttgatattattatgctcagtttttgtgattgacgtcctggagaaacagtgtgggtaa

SEQ ID NO: 93123 - DNA, 1347 bp, Enterobacter aerogenes
atggatacgcaaatcgacaaacaggctgtgccttccgggcaggcctctgatgatgttaatccgaatacgctgcacaatcccgctcgcgaaatggctaaaccgaaaagcaactatcgctgggtcatctgctccatgctggtgtttgccacgacggttaactatatggatcgccagatcctcggtctgctggcgccgatgctgcaaaaagatatcggctggacgcaaatggaatatagctggctggtcaatgcgtttaccgtcgcgtatggcgtcggcacgctggtatgcgggcgaattatcgacaaactgggaaccaaaatcagctatgcggcggcgatggtcgtctggagcgtcgcggcgatggcgcatgcggtcgtcggttcggtggcggggtttgcgctggttcgcgtcctgcttgggctaggcgagtccgctaacttcccggcggcgatgaaggtgattgccgagtggcatcctaaaaaggaacgcacgctggcgaccggcattcttggcgtcgcggtcaatatcggcgtggttatctcgcctgcgctgattccgcttatcgcagtgcattacggctggcacggcgcgtttttaattctcggcgccattggcttactgtggctgattccctggttcatcgcttttggcccggtgaaagcgaaagccagcgccgaagagcaggcgtggattgctcaggataaagaagaagccgtcagcgtttcggccattaaatggacgcatctgctgggctatcgccaactgtgggccgtggcattaggcaaaatgttgaccgacccaatctggtggttcttcctcttctggctgccaaaatggctcaacgaatcccgcggtatcaacatggaaggtctgggactgccgctgatcgttatttatctcttcgccatcgtcggcagcctcggcgcaggctggttacccggcaaattgatgagtaaaggatttagcaccgccagcgcacgtaaactcacgatgctgatctgcgcctgcctggtcctgccgattttcgccgccacccaggtcgaaaatctgtgggccgccgtcgcgctggtcgggttagctgcggcggcgcaccaggggtggtctgccaacattctgacctcggtatccgatctgttcccgagcgcagccgtcggttctgtcgtggggattggcagtaccttcgggatgatcggcagcgtgatcttctctacggtgattggcgccgtgcttgaagcctctggtaactattgggcgctgttcgccatcagctctgtggcttatctgctggcatgggcgattatgtatctgctgttagtgccgaagatggagcgggctaaattcgactaa

SEQ ID NO: 93124 - DNA, 1419 bp, Enterobacter aerogenes
atggtaaacctggttattgtttctcatagcgcccggctgggcgaaggtgtcggagaactggcccggcagatgttaatgaacgatggctgtaagctggcgatcgccgccgggatcgacgatcccgacagcccgatcggcaccgatccgattaaagtcatggaggcgatcgaatccgtcgccgacaccgaccatgtactggtgatgatggatatcggcagcgccctgctcagcgccgaaaccgccctcgatctgctcgatccggcgattgcggcaaaggtgcggctgtgcgccgcgccgctggtcgaagggacgctggcggccaccgtcagcgccgcctccggcgccgggatcgacaaggttatcgccgatgccatgaacgccctggaagccaagcgggttcagctgggtttaccctcgcacacgcctgacgccgccgccccaacgcttgctgacgacggcgacgctaaatcggtttcagtcattattaacaatcacaacggcctgcacgtgcgtccggcatcgaagctggtcgccgcgctggcgggttttaacgccgacctggtgctggagaaaaacggcaaatgcgtcaccccggacagtctgaatcaaatcgctctgctgcaggtgcgccgccacgataagctgcgcctgctggctcgcggtccggacgccgatgcggcgctggcggcgtttcaggcgctagccgccgataacttcggcgagtcgccggaggtgcagccgactgcggaacccgccatacctgtgcgtgttgaaggcgcggcgctgctttatccgctggcgccgatccaaccggcgctccccgccgccgccgacgttgctcgcgagcagcaacgcctgcgccaggcgatcgaccagacgctggccgatctcaatgcgctcaccgagctggcggaaaacaaatttaacgccgatatcgcggcgatcttcgccggtcatcacactttactcgacgatgaagatctgtttgatgccgccaacgatcgtctgctcaccgaacagtgctcagcggaatgggcgtggcatcaggtgctgatggagctcagccaacagtatcgccagctggatgacgcctacctgcaggcgcgctatatcgatatcgaagatattctgcagcgcacgctacgccatctgcagggtattaaggagacgctgccattcgccagtgagccgacgattattatcgccgacaatatttatccctcgaccgtactccaactggatgccagcaaggtcaccggcctgtgcctgcgcgacggcagcgaacaggcccacggcgcgattatcgcccgcgcggcggggatcgcctggttatgccagcagggcaacgcgctgaatgatattcagcctggcgaagccatcacgctcgatatgcgtcagcaacgtcttattcgtcgctaa

SEQ ID NO: 93125 - DNA, 1434 bp, Enterobacter aerogenes
atgtccgaatctgtacgtgccaaaatcggcaagttcgcgctgctatcgatggcctttaccgccgtctttaacgtgcgaaatatcgtcaataacaacattgagttagggctcagttccgcgcctatcttcttattcgccactatcgtttactttatcccattcgtgtttatcatcgccgaattcgtctcggccaacaaacactccgaatccgggatgtacgcatggctgaagcagccgctggggacccgcgccgcctatcttggttccttcctctactggtttgtgaacctgttctttttcctctcgctgttgccgaacgtggtggcctacgcctcatacgcgatcaccggttacgcgatccccttctcgccgatggtgacctcgcttatctccatcgtgctgttcgccatggctacccatatatccaccaaaggggcgacctggctgggtaaaatttccgaatgcgtagcctacggcgtgttcgctttgttcgcgatttacgtcgtcggcgcgctgaccgcgctgggttccggtcacgtcccggcgcagccgattaccctggcggcgatggagccgaccatcaactgggcgacgctcggtatcatgtgctggattttccaggccgcgggcggcgcggaaaccgttgccgcctacctcaacgacaccaagggcgggcagaaatcctttattaaagtcatcatcaccgccggagtgctgattggcggtatgtacgccttaggttcgctgctggttaacgtctttgtcgcccgtgaaaacctgacctacgccggcggaatggtggaaatctttaccggtctcggtgcctacttccacatttctgaagcgctgatgggccgcttcgtcggcatcatcctgtttatcgctatcttcggcagcatgatgatgtggaccgccgcgccggtcaaaatccacttctcggaaatcccgaagggtatctacggccagaaaaccaccgagctgaacgcccacggcgtgccggtacgcgccgcctggtggcagttcctgttcgttttcctgatgttgattgttaacggcttcggctccgccagcgtgcagcagatgatgaacaccgccattaatctcaccgccggtaccgccatgctgccgccgctgttcatcatggccgcctacttcgtcttccgctggaaacacgatgacacgccgcgcgatttccgtatgggctcaaggaaagtgggcatgagcgtggtatcgatgctgattgtgattttcgtggttagcatgaccgcttcggccttcccgccgggcgtcgatctggttaacgctttctttatcaacgtctttatgaccgcggtcttctccggcctggcgtggtggtggatcacccgctttgaaaaaaagcagcaacgtctgcgtgccgcggcgccggttaacgctgccgccgccggtaaataa

SEQ ID NO: 93126 - DNA, 2349 bp, Enterobacter aerogenes
atgaacctcaccactacgctgacgccgctggcctgcgcgctgatgctgagtttttccgcccacgccgtcaccgcgcaggcgtttaaaaacgtcatcgaccgcagcggcgcgccgcagtatatgcaggatttcgacgccgatgaccaccagcgcttcaaccccttttttgacctcggggcatggcacggccacctgctgcccgacggcccggcgaccatgggcggtttccccggcccggcgctgctgaccgaagagtacatcaactttatggccaccaacttcgatcgcctgacggtgtatcagaacggcaaaaaggtcgatttcaccctgcaggcctggagcctgcccggcgcactgaaacaaacgctgaccgcccccggcgtgaaggtagagatgacgctgcgcttcgccagcgcccatacctcgctagtggagaccaaaatcaccagcaacactccactgaagctggtatgggatggcgaactgctggaaaaactggccgccaaagagggtaaagcgctgtcgggcaaaaccattgatgaagctttcccggactatcagcgccgtctgagcgccacgcccgacggcctgacggtcagctttggcaaggttcgcgccgcctctgacctgatgacttccggcgaatcgcagtatcaaatccaccgttcgctggcaaccgagacccgtatcgacggtcaccgcttcaccagcagcgcggagatccgcggctccaccaccctctacaccacttattcgcacctgctcaccgcggagcaagcgcggcgggaaaaagcgcagatccgcgatattctggcgcgcccggcttactatctcaccgcctccgaacagcgctgggacggctatctgcaaaaagggctcagcaatccagacgctaccgccgaacagacccgcgtggcggtgaaagccattgagacgctcaacggcaactggcgcgcgccgggcggcgcggtgcattaccacaccgtcaccccatccgtgaccggccgctggttctccggcaaccagacctggccgtgggatacctggaagcaagcctacgccatggcccacttcaacccggatatcgccaaagagaatatccgcgccgtcttctcctggcagattaaagccaatgataaggtgcgcccgcaggatgccggatttgtgcccgatctgattgcctggaacctgagccccgagcgcggcggcgacggcggcaactggaacgaacgcaacaccaagccaagcctcgcggcctggtcggtgatggaggtttataacgtcaccaaagataaagcatggctggaagagatgtatccgaagctggtggcctatcacgactggtggctacgcaaccgcgaccataacggtaacggcgtgccggaatatggcgcgacccgcgataaggcgcacaacaccgccgacggcgccatgctgttcacggtgaaaaaagggcaaaccgagcagacgctttccggccttagcgcctacgagcaggtgacggccaaaggcgattacgacagcctcgaaatcccggcgcaggtagcggcatcgtgggaatccgggcgcgacgatgcggcagtatttggttttatcgataaagaacagctggataaatacgtcgccaacggcggcaaacgcagcgactggacggtgaaattcgccgaaaaccgcgaccgcaacggcaacctgctgggatattcgctgcttcaggagtcggtcgatcaggccagctatatgtacagcgataaccactatctggcgcagatggcgaccattcttggcaaagcggaggaggcaaagcgctatcaggcgctggcggcgaagctggcggattatatcaatacctgcatgttcgacccgcagactcgcttctattacgacattcgtatcgaggaacaaccgctggccaacggctgcgccggtaaaccgatcgtcgagcgcggcaaagggccggaaggctggtcgccgctgtttaacggcgcggcgacgcagcaacatgctgacgatgtggtttcggtgatgctcgacccgaaagaattcaacacctttgtgccgctgggcaccgccgcgctgaccaacccggcctttggcgccgatatttactggcgcggacgggtgtgggtggatcagttctggttcggcctgaagggaatggagcgctacggtcatcgcgatgaggcgctgaagctggcggacgccttcttccagcacgccaaaggcttaaccgccgatggccctattcaggagaattacaatccgctgaccggcgcccagcagggggcgcccaacttctcgtggagcgcggcgcatttatatatgttgtataacgagtttttccgtaagtag

SEQ ID NO: 93127 - DNA, 543 bp, Enterobacter aerogenes
atgccgtttttctccctctccccacaggggagagggaaccgtccgatgccgtttttattcattgcaccggcccgcttttctccctctcccactggagagagggaaccgtccgatgccgtttttattcactgctccggtccgcttctctcactctcccactggagagagggaaccattcgatgccgtttttattcactgctctggcccgcttttctcactctcccactggagagagggaaccgttcgatgtcgtttttattcactgctccggcccgcttttctcactctcccacgggagagagggaaccgttcgataccgtttttattcattgctccggcccgcttttctcactctcccacgggagagagggaaccgttcgatgccgtttttattcactgctccggcccgcttttctccctctcccctcgggagagggtcggggtgagggctcgtctcacaccgccggtaataggccgataaagctgcgtttctgccgcggctgcgacatcatctcctccagcttttcgacgcaggctaaatag

SEQ ID NO: 93128 - DNA, 897 bp, Enterobacter aerogenes
atggcgaaagagagagcattaacgctggaagcgttacgcgtaatggatgcgatagaccgacgcgggagctttgccgctgcggctgacgagctggggcgcgtgccttcggccctaagctacaccatgcaaaaactggaagaagaactggatgtggtgctgtttgaccgttccggccatcgcacaaaatttacgaacgttggccgcatgctgctggaacgcgggcgcgtgctgctggaagcggcggacaagctgaccaccgacgccgaagcgctgtcgcgcggttgggaaactcacctgaccattgttaccgaagccttggttccgaccaccgatctgtttccgctgattgagaagctggcgaccaaatctaatacccagctgtcgattattaccgaagtgctggccggcgcctgggaaaggctggagcaggggcgtgctgatattgtcgtcgcgccggatatgcattttcgttcatcgtcagaaattaactcgcgtaagctctattcggtgttaagcgtttacgttgccgcgccggatcacccgattcatcaggagccagaaccgctttccgaggtgactcgagtgaaatatcgcggcgtcgcggtggcggataccgcgcgcgagcgtccggtactgacggtgcaactgctggataagcagccgcgcctaaccgtcagcactattgaagataaacgccaggcgctgctggcagggcttggcgtggcgaccatgccgtatccgttggttgagaaagatattgctgaagggcgcctgcgggttgtgagtcctgaatacaccaacgaaattgatattattatggcctggcgccgcgacagcatgggcgaagccaaatcctggtgtcttcgggagatcccgaaactgtttgccggcagataa

SEQ ID NO: 93129 - DNA, 696 bp, Enterobacter aerogenes
atgtctttatttgcccaactaaattcgcgcatacgccatcatggcggattaattgtctcctgccagccggtacccggcagcccgcttgataacccgcagattgtcgccgcgatggcgctggcggcagagcaggcgggggccgtggcgctgcgtattgaaggtctgaacaacctgcaggccgttcgtccgttagtgacggtgcccattatcggcctgataaagcgcgatctgcatgaaagcccggtgcgtatcaccccgtgggtggaggatatcgtcgcgctggcgcagggcggggcggatattattgccattgacggtacgccgcgtcagcgtccggtaccggtatcggcgctattggcggaaattcatcatcagggaaaagtggcgatggcggattgttcgtctcaggccgatgccctgcagtgctggcagctgggcgcagaaatcgtcggcaccactctttcaggctataccgcagaagagacgccggatgagcccgacctggcgctggtgaaaagcctcagcgccgcgggctgcagggtaatcgccgagggacggtataatacgccagcgcaggcggctgaggcgatgcgccacggcgcgtgggccgtcaccgtcgggtcagcgataacccgcttagagcatatctgtggctggtataatacggcgttgaaaaaagccgtttctaatcgatga

SEQ ID NO: 93130 - DNA, 318 bp, Enterobacter aerogenes
atgagcattgaacaagaaattattgattatatatatactcatcatagccataagaaatactgtttttttggcgatcgtccagaagtcacgttagatactgaattaacaaagggggggctgaatatcatctgggaagatgcagaagatactttagattactatttcaaacaatggaatgtaaaaatgaatggcttcgaaattatctattactttgaacctgagtttttaggttccatgcctccagagaagccgcttaaaccgctaacagtacaaatgttggtagagtccgcaaaagcgggtgaatggctgtacgattaa

SEQ ID NO: 93131 - DNA, 501 bp, Enterobacter aerogenes
atgatggcgctttatgcaaggatcataagggattatgaagtggatactgttgaacaaattagtgggtacttctataaaggatactggaatctgaaaccagaggagttattcctgttgattctcatcgatgcgatgagtcagcatcttgaaattgaggcaacagccgcaactgctatcttaaccggacaaccctggataccaacgcgaactaaaccaggtacagcaattaaaggaacgagtattgtttcaataatgtctcgtaagctactcagtaatgtacgtttgccggttggtatttcgttgatcactcctatgggtaaaggtctgaaagactttcattggtcgaaaactaataagttaggcgcggttataggccgctacataccatggatagggtgggcaatggcattttattatgcgagagcaaaactaattgatactggtgaaaattttaataagattgttaaaccagaacataaagttgcatggacatacttctaa

SEQ ID NO: 93132 - DNA, 315 bp, Enterobacter aerogenes
atgtcgctttatgacctcagaaccgaagcgcatgcattacctgaagcctggcactctcatgtattaggccgtattggcactgcaaatcttaaagttgtacgaatggatgaacgctcagtagctgaagaagtacatgagtatgacgaggggttactggtcattaatggacaactggagctgagtgtgaagggagaaaaaatcactgtatcgtctggccagctttatgtggcaaaagctggcattcctcatacggtagatacgggcagctttggtatactggttatcattgatttacccgaaacggacgttgtctaa

SEQ ID NO: 93133 - DNA, 822 bp, Enterobacter aerogenes
atgttcaagttaacaccctggctaaattgctggaatctcattcctgatggcaccccatttgtcactcatacgtcacagttgtatccggtcaaaacagcaacgcatggtattaaagccatgttaaaagtcactgatgatactgacgaacaaaccggtaatgcactcatggtatggtgggaagggaacggcgctgcccatgtgattgcacatgaaaaggaagcaattcttctctcaagagccacaggttccgcgtctttatcagcaatgtctcgtggagataaggatgatatcgcttgtcgtattttatgtatgactgcgaaccggcttcattcattcgccaaaagaccattcccccggctaacctccctgcgtgaatggttttatcctctaaaaccagccgccttgcagtatggcggtatcctgacacgttgcgcagaaatttcagaagagttgctttcttctccacgagatgtggttgtattacatggcgacttacatcacggtaacgtgcttgattttgaaacgtccggttggttagccattgatcccaaagggctgataggtgaacggggattcgactttgctaatatttttactaatccggatcttggttatccggtacctgctgttgcgactgtaccagagacctttaaacagcgtctaagcatcgttaccaggatggcagacatggataaagagcgcctgctcaaatggataattgcatggtgcggtctttcaaccgcctggtcactctcaagtaacgaaacgacttcaataacaataaaaattgccgaactggcgattgctgaattggaatcgtga

SEQ ID NO: 93134 - DNA, 456 bp, Enterobacter aerogenes
gtgaatatttccgagatctacgagtggcgcaagaatagctacctggtcagtacagacagagaaaaactggatgttaaggctatccatcggtatctgacaaggtcgacctgggccaagggtatcaatctggacactgtcgctacatcaattgaaaacagccttaatttcggcatttatcatcatgatactcagataggcttcgctcgcctgattacggattttgctacatttgcctatctttgtgatgtgtatgtgctcgaagaatatcagggagaagggcttggaaggtggatgatggaatgtttgcataatcatcctttatttgaacagcttcgcagaattatgttattcaccaccaccgcgccctggctttacgaaaagttcggctaccagccagtaaaccaggaaaattacgcctggactattaccaggcctgatatttataccaagggataa

SEQ ID NO: 93135 - DNA, 492 bp, Enterobacter aerogenes
gtgaaaaaaatcgctacgcttgctgtttctctgctggccgttgcctgtgtttccaccagcgcgttagccgctgagcagccgttggagaaagtcgccccctatccgaaagcggaaaaagggatgaagcgtcaggtgattcagctgccgcagcagcaggatgaatccgcgttaaaagttgaactgatgattggccagacgctggaagtcgactgcaaccatcaccgcctcggcggtcaactggaaagcaaaacgctggaaggctggggctatgactactatgtctttgataagctgacgtccccggtttccaccatgatggcctgcccggacggtaagaaagagaagaaatttgttaccgcgggtctcggcgatgcagccatgctgcgctacaacagcaagctgccgatcgtggtttatactccggccaacgttgaagtgaaataccgcatctggaaagccgaagaaactatcggtaatgccgtggagcgttaa

SEQ ID NO: 93136 - DNA, 930 bp, Enterobacter aerogenes
atggaaaggactacccattccccacatgacgccgtgtttaaacacctgctgtcgcatcgggcgacggcgcgggattttctggatattcaccttcctgaacatttgcgagaattatgcaatctgcaaacgctgcagttggaatccggaagttttatcgatgaagacctgcgcgccagccattccgatattctttactcgctgcaaactcaggcgggagacggatatatctatctgcttatcgaacatcaaagctctgtggaccgtcatatggcatttcgcctgatgcgttatgcgatagcagcgatgcagcggcatctggataaagggcatacacaactgccattggtgatcccgctgcttttttatcatgggcaagtctcgccctggccgtatcccatgtgctggctggaaggatttgctcatccacaaaccgcgcggcaggtatacaatcaggattttcacttaatcgatatcacggtgcttcctgacgatacaataatgcagcaccgacgggtcgcgatgcttgagttgctgcaaaagcatatccggcaacgcgatatgatggaactgcaggagcaactagccagcctgttggcgctgggatacactagccgcagacagctcaggacgctgcttcactatttattgcaggcaggaaatgccgccgatccggtcgcctttttacgtaatcttgcgcaaaatgtccccagacggccgcataaggagacgctaatgaacattgcccagtttctggaacaacgcggccatcagcagggccttgagcagggcctgcagcaaggccttgaacagggagaacaattggctgcgcaacgtattgcccaggcgatgctggaaaacgggcttgacctggcgctggtggcgaagctgacggggcttgcgccggagcgtctggccctgctcgcccattaa

SEQ ID NO: 93137 - DNA, 1311 bp, Enterobacter aerogenes
atgagtcaggcattaccgcttatcacccgtcagggcgatcgcattgccattgtcagcggtttacgtaccccatttgcccgtcaggcgacggcgtatcacggcgttccggccgttgatctgggtaaaatggtcgtcggcgaaatgctggcgcgcagtgaagttcccccggaagtgattgaacagctggtctttggccaggttgtgcagatgccggaagcgcctaatattgctcgtgaaatcgtgctcggtaccggcatgaatgtgcataccgacgcctatagtgttagtcgcgcctgcgccaccagttttcaggcggtagccaatattgccgaaagcctgatggccggcacgatccgcgcgggcattgccggcggcgcggattcctcctccgttctccccatcggcgtgagtaaaaaactggcccgcaccctggtggatgccaataaagcgcgtacccttggtcagcggctaaaactcttttcccgcctgcgcctgcgcgatcttttaccggtgccgccagctgtcgcggaatactcaaccggcctgcggatgggcgacaccgctgagcagatggcgaaaacctggggcatcagccgtgaagatcaggacgcgctggcgctgcgctcgcatcagcttgccgcccgcgcctgggaagagggcaaattggccagtgaagtgatgacggcctatgtgccgccttatcgcgagccgctggaacaggacaacaatattcgtaaaaattcaaccctcgcggattaccagaagttacgtccggcgttcgatcgtaaacacggcagcgtgacggcagcaaacagtacgccgcttaccgacggcgccgccgcggtgatcatgatgaccgaatcccgggccaaagagttggggttaacgccgctgggctatctgcgtagctacgctttcaccgctattgatgtctggcaggatatgctgctgggccctgcgtgggcgactcccctggcgctcgacagggccggaattacccttgcagacctcacgctgattgatatgcatgaggctttcgcggcgcagacgttggcgaatttacaatgtttagccagcaatcgtttcgcccgggaagttctgggccgcgcgcaggcgaccggggaagtcgatgccagcaagttcaatgtgctgggcggctctatcgcttacggacacccctttgcggcgaccggcgcgcgcatgattacgcagaccttgcatgaactccggcgccgcggcggcggatttggtttggtcactgcctgcgcggcagggggtttaggttccgctatggttctggaggccgaataa

SEQ ID NO: 93138 - DNA, 1122 bp, Enterobacter aerogenes
atgaggccattacctgaatatccgccttaccaggttgccagcccgccatatggtgtgctctggctgtcgataagcttgatagtggtggtgttctcgggaatcggggagctaatacttcagcctgtcggaaacgttgtcggcatagtgtcatgcggcagtgcgatagtgatggtgatactgtggatgcttcgtctcctctattaccggctgtcggttcattacgctcaatactattaccggctggtcagtcagtatcagcaggagtggtgggcagagcatcagctgcattttacgttaagtgacgtagtgttgctcgggccgtctggatcaacgaatacgcattggtggcgcctgctcaaacatgaacagcgtcccgcagaggtaaaaaacgaggcgagcggcaaggcattacgagttgcccgtaccttggttgagcctgcgcatgaacgcgaggtacagctcgcgaaaatgctggtgctgcaatggaaggaacaacgcctccacgccgggttacctgatttacggtgctgttactggcagggttcgcgccgcgcctggcaggcattttgcgctcagatgcaggcgacatttcctacagtcgggttgcctgctgagccacggttgtggcgaggcgaacagagccttgcggaatttgctgcgataagcgacaccttagcgagcaatgaagcgattctggtggccgggtgccactcgctaatggcttccttttactcggtactgccagccggcgagtcggcggcattatggctggttggtaagggcggctccgtctgcctcactcgcggtgaagtgtacgatgttacagataaagaaacattatcagagacttgctctcgagcggagcggcaaatcgggctcgaagaggcgcctgacgcctgcatactgtttgcgcagcctacgctatctggctgcggctggaatattacccgccatcggcaggatgtttattggggcaactgtggcgagatggaaatgttaatagtcatcgcgcttgccgcgataagtgctgagtattttcgccgaccttgtagttggatagcccgcgatccgcaacatacgctggcacttgggatcgttaaaccgggtggggaagagaattga

SEQ ID NO: 93139 - DNA, 2445 bp, Enterobacter aerogenes
atgtccgcgataattagcgagcgggcatggtacccgcctgcgtttccggcgcaaggacgtttaccgacgcaagccgcgctggtagggcagaatagcctccgccaggagagccttgaaacggcctaccgacagcaattatcgctggccgtcgggcggcgcgtggagcccccctgttgcaaaacactgcatatcagcctgttttttgatggcaccggtaataaccttaatcacgatctttttgtcgccaatccgaagcatccaactaatattgcccgcctgttccgcgccactattggccagggttatgctggtgggttggcggataaagggcctgagctgctggatgccagcaacagtggcggcaataaatactacaaatattatattcccggcgtcggtactcctttcccggaggtgatggatctggatttcagcataatgggactcgccgcggcaacacacggcgaagaccggataaactgggggctgctacggctggtcgatgctctcaaacggaccatggataaggatgcgctctcggatggcgacagctggaaggcggtcaaaaagatggcaacatcgatggtttcctttggcctgaccggcagcgctaaccgctatgaaaccatccataatctgttgaatgcaatgtccgcagatctgcgcaaagcgctgctgcccgctatgcccggcaaacagaagctattaggcattaagctgtatgtgtatggtttttctcgtggagcggcagcggccaggacctttgttaactggctgagcgaactgctgccaaagccaggggagggagaaacaaagcccgaacagtgtctggcggtgggagagctgaagatcccattaagcgtggagtttctgggcctgttagataccgttgcttcagtgggggtcgcgcatattgcccccgtagcggaaggacatatggggtgggcggacggaagccaggagctgccggatgaagagttctacggcggatttatcaaacgctgtgtacatctggtttcggcacatgaacagcggctgtgtttcccgctggattccattcgccgcccggacggcaaatacccggcgaatagcgtggaggttatttatccgggggtgcactcggatatagggggaggatatccgccgggggatcagggaaaaggtgattctgatttagaattaatatcccaaattgcgctgaatgatatatacgctgcagcctataatataggtgcgccattaaaggtgaagctgcaaagtttacctgttgatttgcaaaaggatctttggcgcgttatgcccgtccaattagttcgtgactttgatatttctccagaagtggttctgcgttttaacagttggaggactttaactttaagtgttgaaagttacgccaaagatattagtaaagaactggccgccaaatatgacccacaacgtgctcccctctgcctggaacgagccctggaagaacagatcgcttggatcaccgcatggcgcattaatcgctatgccggcggtagctacaagacccagcgcttttacatcgattctgcggcaaatggactggataaagatagcgatccgcaggtcagaaaaaaatctgaagctgagagagaggaggcccaacaggcggtagaaaaagcacggcgtaaacgtattgttgagcaagatcaggagtccgcgtttctgatgctgccgcaagggccaaaagattttgatgccgcccttgggcagacgcaattgcgtcaggcggcagatgagtttcgggaggattatcatcgactatcgcgtacggataacggcaattggttgtttaaggccgtcgacgcaatgagtaatgcgattttcctgctaaatggtgatgatgaatacggtgagtggctaaaaataaaaaccacaggcgccgagcgagaaaaaatactttttccgccgcagggtgagagcagtaatgcccatctgccagcaggactggtacgggcgttgttcgacgagcaaatacatgattcccgcgcatggtttatgcacagcgctctaggagcccgcgagccgtgggggagttattttctgcagcggatgatctactttggcagccgaagtagtaaaccgctaactccactgatgattgctggtgcggtagttggggcagcgacggtcgcaggcggtgtcgccgttatcattaaacagaagcgggtaatgggtgagcttattggggtaattggcgctgcgggggctatttatctggaaactcaggcaatcgatctgctttctggtaagccattatcgatgctgaaaaacgccgcgcagttacagttgcccaccatggagcctggcctggtcgttgccggtcaaacccagatgattagtgagcagcggctggcgctgaagaaatcacaaatagaaaagcgttggacggaatcaatagcctcagcgctgctggtatag

SEQ ID NO: 93140 - DNA, 573 bp, Enterobacter aerogenes
atgaacctaacatttccgcgcgtgatactggtggcattgctgctgactgtcgccagccaaggggcgctggcgggaaccattaaagccatcaatcatacccgttgggcgattaacgctttcagcgtcgatggccagtcgggaatagacattatcgggccgtatcaggggggcggtggtggatgctgttaccaggtacctgcgaaatggagaccagggatgacggtaaaggtgaactgggaaacgggggtggcttttgccagcgatgttcctgatatcccagagcctgaacggcctgatacctctagaatgagtgaaaaagaatattatcaggcgtggcaaagttattcaaatgaaatacaagagtggtataaaaaaatcaatgcattaggtggacatcattcatttttagtttcggtaccggactatacgggacaggaaacctgcgggatcaccgtgcattttttgccttgcgatcgggccaaagtgaccaccagttgtgccaactacggcagtccgggataccccattaaggaacctataaagatgatggagccgaaattatgtccgcgataa

SEQ ID NO: 93141 - DNA, 786 bp, Enterobacter aerogenes
ttgagtatgcaatctataagtgactgggtaagcaagcttgagccgctttgtgccgaaatagaaacggcgtatcttgattttattattgaccagagcggtctcgattattccattatcccggcacttgaggagttttctccccctcttcaatggcagtccctttaccttggtctgccggaggaatctctgcccgaaatggcgccgctcctgattcgtatcgcacttaatgccccgctacagcggcagtggtttatcgaactggcgtataaaacgcaaaccagaacgccattactggcaatagggtcgcagtgggctttctccacgctagccgaatggctaactgactgcgttgatgcaacgcatgaggggcgatcaggcctttttcgctactttgacgctcgtctatttccgtggctattttccgatattctgcaacccgagcagcaagcgcagctacgtcgtcccgcactcttctggagctggctggatcttgatgccaggccggcactattgatcggtcacggcgctccgcttgggcttggtgaaaaatgccagaaaatcgctttcagtgatgagcaattcgaagtgatgatgtgtctttgcgacgttaggttatttcttcgccatcgaagtctgccggacagcttgttcagctcccaagaggaacgcttttcagcctgctttcgggcgatgttggatgcgacaaaaaatggaattttgctggacaacgatcgcgaggaatgggtgatgaataccctggtggaacggcactctcttgcagaatga

SEQ ID NO: 93142 - DNA, 864 bp, Enterobacter aerogenes
atgaataagatagaaagaaacatttggaagttgaacaatctcccaccgctggagtattgctctatcgctcgtgcgcaaaaactcttgcagtgcgaactggaagatttacttcactggcacgatatcggcgctatcagcctgtgcctgaaactgaaaaaaaatcgcggcactctcaatagcgccttaaccaggaatcaaggggttggcgattcgtcatacggctacggtggttttgatgacattaccaaagccaataaaccctggtctcagcactctaaaataaacaatatcatcaccctgaatgaaaatgtgtcggtcattgatgccaatcacgacagcgccatcgccaaaattaaactcaacgtttcagtttctggtttatggcacactcattcaagaaatctaatggatgtgctggagaatccggacaacattcaacaagaagattcactgagcattatctctccggctaaaaacgtcatctactgcaatttcattcctgataatgatgataagccgacgattgagctaagcaagctgtacattacctgtaaagaaattgagaaaatttacgagcacaccatcagtagtcgtccgctggaacattctgaagccgcgatgaattcatataatgaaaaaaccattaatgagccatccacgccgccgcagaataagctgctgctcgaattcattaattatatcattcaatctaatcccgcctttaaccgcgacctacttaatgcgacagaaagcagtaaacagctcgcttttaaatccatcatggaaaaactaaaaaaagaaggcatcgtcaccaacgaaaatcattcgatggcttcactctctgaactgattctcaattcatga

SEQ ID NO: 93143 - DNA, 804 bp, Enterobacter aerogenes
atgctcaaactatcccaatgccccatagccattctcggtacgcttgctttgtattgcggttccgctagcgctgaggtcgacctcggctcaatcgacattttttccgccgataacccgaatagcccggtgcctaaaggatgggttctcggcggcgccgccattagcggtaccgcacgctaccaaaagcaggacaacgaaacccactttattcccggaggattgtattttggcgaccagttaatgtatctcggcgatcgcgcccgctactactttcaccttgatgacaatatcgcgctttacggctatgggcgctggcgtttcggtaatttagatcccagcgacgatgcggcattcaagggaatggacgaacgtaaaggggaactggaaggcggtattggcgctacctggatcacgccatacgcgctgataagcgcgcgcatcagttccgatatcagcggtcgcagcaacggccaggagctgctgttatgggccgattttccgattgttaaagacaatctgctggtgatgcccggtatggggctgatggtgcgtagccataacatggcgaactactattttggcggcgtctcagcaggcgaggcgacgcccgagcgcccgcagtgggataccggtacgacggtatcgccaatggtcgccatcattaccagctaccgctttagcccgcattgggtcgctatggtagcggcaaactacgaacgctatgatgacgatattgccgatagccccattgtccagcacagcggagaactgtatggcatccttggcgttggatatacctggtag

SEQ ID NO: 93144 - DNA, 1059 bp, Enterobacter aerogenes
atgatttcgatgatttctcggcagagtattttattcattgtcgaaaaatattgggggcgtaacgaggctagcatgattccggattatttaacttttattcgtcgacaggatcgttcgcttttaccctatttgtactttatttgtacgatgctgattgcattctacgtgaaaaacagagggtatcttttgaccgtggaagatgcattccctgtcagcgccattttttcgttaactatgtttagctttgtttatgaacttaaagcgtattgggcttacaaatatgcgataaaaaatatcaacttttcttggtttcagggaaaaaagtattcgcaatgtgaggccatactatggcatccgcttgttgctacaacttgctgtttgctggggtgctatctggttgtgaagggatttctactcttcttttcaagcattctcgcgatggtctgtattgtcatctttgtgccgataatggtctatatgatgtgctggttcgccaggaattgttacgtaaaacagttacagcaggcaactgtgtatacgcttagataccgtaatctccatctctatgcttgcttaaatgttacagtaacttttatgaccagttttctggttatcagccccttagtcgcggatgaagatttttccttatccaatggttttttttctgcaaagttgatagttgctatgttgattctttgttcagcgatactggcggttaatttgatttttgctcacccatccaggcgttatacttttttaggacggctttttcagaaagagtttgatgtgaacctggctaaaactatcccatttaccgtaatgtataggaaatcgctgtggttgcggttagttattttatttattcttcaactgttatggatcgtaatctttagcctgttgctgaaattattagggtgggaaatatatttttatgtgtattttattttttgcatgataccggcaatgggatacttttatttacatgtttactggcgctggcatgatgattacatgacggcatgtgatatgtatctcagatgtggcgaaaataataaataa

SEQ ID NO: 93145 - DNA, 930 bp, Enterobacter aerogenes
atgattaagttatcagagcaaccattggtgcttattttcgccggtcagggaaatcctgtaattggaatgggagcagatttatgggatcttaacgcaaccaccagacaaatctgggattgcgctagtgatgtaacagggttggatcttcgtcggttatgtttgaaagggccaatgaatcgtctggtgaaaacgacgacacagcaggcagcggtgacggctatcaacgttacgctctatagtctttatgctgagcaattctctgacgctcacatcgtgggttcatgtgggcatagtgttggtgaatatagcgcactctacgcggccggcgctttaacgctggagaatgtgttcaaactaatatcagcgcgctcaactatcatggatgatttaagtcatattcgtaaaggcgcaatgctagcggtgagaggtgccgattatcaaacgataagccagttgattaacgattccggaagtccggttgtggtgagttgtgataatagtccctatcagcaggtggttggcggaacgctgccagatttaagcgaattcgccggggtacttatgggagctggcctggaaacggtaaagttgggcgttagcggtgcctggcacacgccactaatggctgatggagttcagcttatgcgagatgccctggaggtggtggaaatggtacggccaaattatcctgtactaatgaatgttaccgggtgcgaagaaggtgaccctgagataattaaaaacaacttatcgttgcatttgacccataccgtacaatggacagcatctatgactgcttttttacaacacactcccgtcgtcaggttcgttgaaatcagcaataaagcgtaccttggacaattactaaatgatttcgatgatttctcggcagagtattttattcattgtcgaaaaatattgggggcgtaa

SEQ ID NO: 93146 - DNA, 1389 bp, Enterobacter aerogenes
gtgaaattgcttcgggccgtattactatcaattctaacattaataccgttgttggggatggcagattgtcttaccgcggatgaaatacaacaaaatggtcaattggttttgatagggcaaacatcctttacacataaaaatgagtctctatggcgtatcagtggatctaacccgtataccactgataacgcctataataatatttcacttaacgtctctagctcttgcgatattattgatgatgtgttggctgtggatttttcattatatggctttggatatcatccgatgaacgaggtggggcttttcgaagaagatgatagtcgctctaaaatattaatcgataggctaaagctgaacgcaacattatctgaaaacgtcagtctcgaaggaggaaaacttagaccgcattccggcgcttttcatttaagatcgcctgcagcattgttgacgacttattatgccggatttaaacctaccagaatattcgaccctggatttaactccacctataatgagccgttttggggagggcggatctcagaagagttccgcgattatgcattctcgtttaccatcatacccaaattggcgagtattgatgaatattatgagtcatccagcaactggacggccaatcaacggggcaacagcagtgagtattatttattaagttactccgattatcgacttgctaatcatcgactggcagcagatgtgatgcttggcgattctccatcgttggccctcgcggatagctacaatataactcctcagtttgttgtcaacgtagaggcggctttacacaaaaatcaacagtggcggcatttttcccgtgaaaaacgagatgcagtattatctgggaaatatccttcatcgctttatgctcaggatgataaaaaaaattatgaattagccgttggcggccagtataccactgacctttttagtgtattaggtatcgaatactattatcagagtgaaggatactcaaaagcggcatggcgagagcagaccgactttattaaactattaagtaataaaactggcttatccagtttagataaaatatttgatgattataagtatctgatggggtcagaaataagtaatacaggaaataaagggatgttacaaggacgacattatattaattcgtggctaagtttacagaatacagatcattcaacttttcagccctatctggtgatgaacttagttgatggtagtgcattaattggcactcattatatcaagccggtaaaagggttgggcgaacgggtagagatttattcggggttttatagtgcattaggtcatcgtgattctgagtttgcactttttggcgagaccctcggaatttatgttggatttaaatactatttataa

SEQ ID NO: 93147 - DNA, 1311 bp, Enterobacter aerogenes
atgtcaagggatgtgatattcattaatggtattgtggcgttgttattgctatttgtagtttataatatcatcttcaactatggtgatgctaaattttcattccttaatttgctacggcatcagcgtagaaccctttctactatttttgcaattgttttaggtggtggcgctatatttctatatggcggttttatcaaatactctttttggatactcaaggagcagacgatacgaactaatgttggccatgtgcaaatttataataaatcctactttgaaacggctaataagaataaaagccttatttctgactacatttcactaaagcataatatattacaaaatgcctatttttctaatgcaatttcgacaatttcaggtcagctagagtttagtgggattatatctcactacgaaagcgaaacgtcaaattatttttcggcgcaaggcattgaaccattaccatctctgaagctaggagcatttgataagatagtctttggaagcgatttatctcgcgtaaaacataatgaaattaccatcggaagcggtttggccaaaacacttgatagccactatggtgactggctcgatatcctggcggtaaatgtggcaggaggacagggcgctatatcagtcaaactccgtggcatctttgagtcgggaattaaggattatgatgatgttgcactaaagatacctcttgataccgctcagcgaatcatgggtacgaatggcgtcagtaaaatagttatcttattaaaacatgatgatgtagcgccatttgttattaaaatgagagagtttatcgctcaacagaatttaccccttatcgttaaggactggaaggaaagctctattttttaccagcaagttgaaggcatgctttcgggtatctatttttttattaaagtcatagtagcacttattgtgatatttatgatcggtaattcaatgaccatgaatatcgttgagcggactaaagagatcacgacactacgagccatcggtttacagtccagtcgtgttacgcttttattctggttggaaggtatatatataggcattttgggggcaatcggtagccttgcttttggttataccattgctgcgattattaatatttccggcattgcaatgcctccttctccagggcagtcagttggatatactgcatttattaaaagcaatgacgcagagttaatttggtttaccttgatgttgccaattttaacgtcagccctggcttctatcattcctgcatatcgtgcatcgcggcttaatattacagatgcatttaaatcttcatag

SEQ ID NO: 93148 - DNA, 651 bp, Enterobacter aerogenes
atgattcagcgaagcaatctttgtagagttttgcttctgtgtttaaccacggttatattttcagcattcgctgaatcgatacccacacctgtttcggatcgtgttttacaggatgggttaccaggtgagccaaaagcattagcatcggtcacagcaaatttgcttaaagaatatgaacgcactaataacgttggtgtgctgatcttttattcatgggggatgctgcggcaagcagcttattacctgagtgttaatgatctgattcacgcctctgaatatgcaaagacaggattcttctatatggatgagtcggtagatgtcaatgaagataatttgctaatcagatatttgcgtgcgcgtgttgatgcctggcttccgggtaatttggggcggtgcgtgattacgattgaagataccgacttgctgatgaggaatagagataaattcagcgtcgagattgttcggaagattaacgagatgcgtttacgagctctccatcagtgccatagcaaaccacaagaagaacaattccttcagtatctgagaagcgtagggcaaaaccttaaaatcgattatgcaaataacaatccgccagcgtgggaaatggctgaagtcgtgcaggttgttgttccggttattaaaggtgattaa

SEQ ID NO: 93149 - DNA, 717 bp, Enterobacter aerogenes
atgcgcagcaatataacagaattacctgatatatctctgtacggtatacataaatcttatggtcctcaggataacattactattgcactgaatgatattaatctggatattgtaaaaggtgagttcgtagcattatgtggcccttcgggaagcggtaagagtaccttgcttaatatactttcaggtattgataaaccaacggcaggtaatgtttttttcctaggaaaaaatctaaatgcgctgtctgaaaagaatttagcgcgactccgtagtcatcatttagggtttatttttcagttttttaatttagtcccggtactaagtgtttttgataatgttttttatcccctgatgctaaatggacatttcaatgcaaaagaggcgaaagcacggagtctacatttcctcgatagtgtgggcttagcccacttagttgggcgaaagccaggccaattatcaggcggacaacaacagcgggtcgcgatagcaagggcgttagcgcatagtcctgaagtcgttgttgccgacgaaccgaccggaaatttggatctggccactggagaagcgattcttgacctgctgcttgacattaatcggtgcacagagacgacgtttattatctccactcattcgactcagctacaagagcgagctcgtcggagagtggaaattaaagatggagcaataatatatgattcagcgaagcaatctttgtag

SEQ ID NO: 93150 - DNA, 966 bp, Enterobacter aerogenes
atgaatagtaagatgtatttgtcttcatattcatttcttgaacctgaagaaccgtttaatttatattatccaaactggttaaatgtatgggagtcgcattcattcaataccgcgctcaaggtaacgggagcgaatggttggcgatttaaacgctttggcacacgtgccgaaatatataaccgtgaaatcacaaggcgaccagatcatataccctatattaatgccatggaaagagtgtcggacgatgctctacatagcttatcagcaaaagaacggatgctactcctgaaatcacgaaccgcctttatctatattgattcatggggggagtcaggcgtttttgaatacaatataagtagccttaacttatcaactattgatactttacctaagaatttgattaagaaattttctatcaacaacgtgacctgtaaaatacgaggtgaaaactatgctctatttcaggcaatggcattgacacaggattatcttgcttgggatgtgtttgattttgtcgttatctgcggaggttaccgtgcggtgccgttgttggcttttaccgcagaaagccttagccaaggcgaaaggaaaaagcatcataagcatgttcctggcgtgaatgtgtcaattgaaagagtgggctgctttatattcagtagaagagaaagtcatatgagagtgaactgtggtccatatatatctaatggtgtagaccgcttgtttgtatcacaatcagaaaaaaataatgatattgacttggttgcctatgccggtggtatcaataaattaataccaccttctaacaaaggagtcgatctcattactcgttatggttgtagcggctgcatgacccctgctttgagctggcaatacattgcacaccacgctttgcataatggctgtcttcgaaccgttatccctggggcagtcggtggctatgcttattttgatacctggtacgaatag

SEQ ID NO: 93151 - DNA, 1221 bp, Enterobacter aerogenes
gtgagcgggagagctattatttctggcttcagtgtatccttgccatatgctgagaatagttcgctgttaattcgaaatctgcagcaaggaaaacgggtacatttgtcgccatggtttatatcagataaccaggctagagaatgtggatttgcagagaatatattcattgcgaaactacaacgagaaaacgatagcgcttttgaactggtgtacaaactcattgatgacgccttactacaggctggtcttagtaatgacagcctgaaaggcaacagagttagagtatatattaccggaataggccctcgtgttgatgttatggattacaggaatttttataattacaatgatatggaagatgtttcggtaacatcttcaattaaaaatctttctgtaaaaaatatgtcgcaggataatgtctcttatacgctggggctaaagtatgagttgcaatatttgccgccaaatatgaactgtacaagtaactcatcattgacggctattcatttggttaccagggcaatagagagtggaggtattgacctcgggcttgttattaatatttcaaaaattaaatatcaggatcttgtattccttgcaagccagggaatgttggacagtaaaattgtccagcccttcggggtaaacagcaatggtgtgcattttgccgaaggctatagcgttatgttactggaaagtcaacaacaccgaatgatgcgcggaaaaagtccgggagtatgtattacttcggcatataagcaaattaatgctagtcgaagtaatgatgcatcctggcaaagcaccagcattttgaagttgattcattcattattaaatgatgctggggtgagaaaagaggacctttgtggattcatccctcacggtaatggaacctcatccagtgataaagttgaagcaaaagcgatcgctatgtttgctagtgaaaccccgcttcccgtattggcctataaaggacaagttggttataccgcaacgggttctggggtgatagacctaattattggctatcatttactgctcacgaatgaattgatttttcctgttatcaatgacgaaatcatagatgatgtcgcttgccatatctccgtagaaggaggtgtgaggaagcatgaaaaaaaccatcttctgaagaccgggttaggcgtcgatggttcagttgttgcgttattaatgacaaatttgaataagagttgtggttga

SEQ ID NO: 93152 - DNA, 2538 bp, Enterobacter aerogenes
gtggttattaccggtatggggattttgtcgtctctggctgacaacatcgcagacttcaggcaagcgctgctggagaaaaaaaatggcatcgctgatagtgcgcgtttctctaaatggtttgcaaacgcccgtgcggctgaaatgctgcatcaaattcattgtcccgaattatcgaaagaggttgtctcatcgctagataatgctgcactttgggcctacaaagttggtaaggaagcactagagcaggcagaactggcgacccatcgggagtgcctggaacagatggggctgattgtaggcgtttcttctgcaggcactgaagcattccttccgttatttgagcagcatattcaggacttttcgttacggaaggctcttttttcaggcagcttttcatcgtgttgttccagcgcatctacgttattaggcctgaaaggaggcgtggaactcgttgcaacggcttgtacggcaagcccgaacgccgtcggcatggcttttgattacatccaaaatggcaaaagcaaggctatgctggctattggaacagaacctatttatttacccacctttgccggtttttatgccctgaacgttatgcacccgcaatcgtgttcgccattttcggggcattcaggtatgtctattggcgaaggcgcaggggcaatagtcctggaagagtatgagcatgcggtcgcgcgtggtgcgacgattctcggcgaaattctctcgtacgccacctcgtgtgatgcataccatgaaacggggcccgacccgcgcgctagcggcgcagtgcaggtcatgcagaaagccatggcgaatgcaggtatcaaacctgagcaaattgattacgttaatgcgcatggtacgggaacgcaggctaatgaccaaatagaaactctggcgatgaagaaagttttctctggcgccgaaaatatattgatcagttctactaaatcgtattttggccacaatattggcgccgccggtattgtcgagctcatcgcttgtttagttacccttccgcagaagcatgttctgccaacgttgaatttttcgcagccgcgccctaactgcgatctggactacgtcgcgaatgagtttcgtcacaaagatatcaatatctttatgaagaataactacgcattcggcggtaataattgctgcatgattgtcagtaccaagccgtgttcagttcctcttaccgcctatgatgccaaacgtgttgttataactgggataggtgccgtatcggctattggacatacgcttaatgaaattcttcgctatatccatgaagatgccaggtcgctggagttgagcggcgtagtatttcctgatgacacgcttgaagaggctaaagcgctgttggatgttgtagaaaaaactaatcagtttgcggaaatatttggcgaagaatatcgagaaacggcctaccgacagccggagtcagaaaagcactttaaaacttaccaggtgaaaggcctcgaaccacgtaaacatttacgccgctatgacccacgcaaggcaacgcgcggcggtacgtttgcgctgattgcactttcagaagcgctgaatagggcgaaacgcaagattaaacgtgacggagaggagctgggcatggttctgggaatggcccgtggaccgcaagaaactacctataagtatttacaaagtttaaagcccgatccgcgcaaagtacgtacttcagagtttcctggttcgctgatgaactcgatgacgacattctgtgggatttcggaaggtataaagggatatacgactacgttagcgaccggtgaaaacgccgcgcttggcgcattgacttatggctatgaaattgttcgccagcaactacagccacaggtcattgttggtggggctgatgaatattttccatcgatgtccctgtatatggatgcggtgaccaacaagattcatatgacgtcaaatgtcgctgattatcagatatatgccaaagaggaacatggatatgttcctggtgaaggggcctgtatgctgttattggaagacgcgcgtgcagcagctacccgtggcgctgaaatattgggagaaattgcaggttatggtaagtcatgcagtaattcctactttgatgcgacgcagattgaggaaaaatctaccgcaatgtcgctggcgatcgctcgcgcgcttgccgatgcgggtattaccgcaaaagagattgatttagtgtgtggaactagtagtggcagcgaagttagctcaatcatagaaattaatgcaatctatgattcattccatagccataatccacatgttccagtggtgaattataacgcattttttggctttgttgcttcgtctgcagggcttttaaacctggcggtgattcttgattgtattcaaagacaatcggttcctgctattccatatacacaaaactttgccgacgcaagaattaactttgtaaagaaaacacgagaaatagctatcaaatacgctcttttaattggcgctacagaaggcgggaattattacgctatcgtgattaaaggataa

SEQ ID NO: 93153 - DNA, 1170 bp, Enterobacter aerogenes
atgaagttactttctgatctccattttaacaacaatgcggttatgggtatctataatcaccaatgcgtaccttcttcatatcatgatatttatgaagagtataaagctgtgcgtgaaaatgtcttgctgatagattattctcatatgtccattaccagtgtgatgggggaggatgcatgggcgcttgtaaactatttggtctctgctgatgtatcgatcatccgtgatgagcagggtatttactctttgctgcttaacgctgatggaactattcgcggtgatgcttatgttctgtgcgccgctgaaggctattatattctatccgagaatctgactgcacaagaagtgataaatgtcctgaatgaaatccttgttaaggcggatgatttagatattcaggagattccagaaataaaatcgatgggagaggatgactggggcgtcattatgctggaagggccttatgcctgggaagtaatggcagaggtttatggttttgatatcattggcctaccttactatgaatatatgaataccaatgatggacttatggtttttcgttgtgggaaacatggcgaattcgcatatcaattgattggtgcacaagcaacgcttgtcaccatgtggatgaagttacaagaaataggcgccaggtattcgctgaaaaccggtggcttagaatatcaacgtctggtgagaattgaaaatacaggatgggatgaaagtatttaccctcgctattctacaaatccggtggaactgcaaatgcagtgggctatccagtatgataaagaggactttattggtaagagtgcagtcgtggagttatcgcgaaatggcgcacaacgtaagcttattgggatctctccatgcgatgaatgttgtcagatcgattcagatgatcttgtgatggttaatggacaacaggtaggggttattattaatgcaacatattcgccggccaggcaagcatggattgcgttggcccttattgatgaatgttatgcgttagccgatatttcaggttttagccttaaaaccgcaaatggtgaaatcgctgcgaaaacacagaacttaccctttatttataacttgagtttgttggttaatcccacaacgcatagctttgttgatgcttcgaaagcaaagagcgcgtttgccacggtataa

SEQ ID NO: 93154 - DNA, 1647 bp, Enterobacter aerogenes
atggatattcgacatacattaattattacttctctttttttggttgcgcttcctgtggctgctgctgatgttcagttaggtcgtcttataaaagaacagcaaagtaacgataatgcgtccttacaagacagaaaaatagagcagaaagatgtatattctgatgccacaacaaagaaacatactgatagcacattcccgcaagaaacaccttgttttcagatcaatgaattgattcttagtgatgattttttagataataatgaattaaagaaaataaaaaatcaggtagttggtcaatgtctcggaatgaatgggctcaaaaaggctgcggtgctgttccaggattattatataaacgcagggtatattactaccagagttgaaattccaactcaggatttatcaacgaaaaaattaaaactgacagtagtgcctggaagaatttcagagatcgttgttgctggaaatgatataagcaagtggattttacctttttcagatggcgatattctgaacatccgagatctagaacaaggcctggaaaacatacagagaacccctgaggtggatgtaaagatcaacattctgccaggttccgaaaatggttcgagcaaagtagtaataaatacgcagcgcaaaaaaaaatggagcttaagggcttcctataataacttcggcgatcagagtactggtagtgaacttatcggtggaacaagttatttatataatgtcacaggcttgagtgactttttttatcttgcagggacaggtagccaaacgggtggctataagaacgtgagtacttattatagtgtgccattcggttattatgatcttagtctctattatagtaaaagtaaatcccatcaaggcatcgatattggtgcatatacttttgactatattggcaagacagaatacttcagtcttaaaggcaatagaatgctataccgcaatgtgaactcaaaattgtctgcaagcgctgaactgatcagacgtaagtatgactacacattgggtgggacagaactggtattgcaaaagcgtgatatgggtaatgtacggttaggcgtaaattataagagaaactttaccggggcagcactggactccacggtaacctggcagcggtttaccaaggcgtttggcggtaccgatacacctgatatgcgcactggcactgttagtaaagaaagtcaaattgtgaaccttaatgtgaattacgtgaaatggttaacaatgttgccagttaacgcctattatgaacttaattttggcgcccagtattcaccggataatttgacgttacaggatcagttcacgataggcgatcgttggagtgtgcgtggttttcaaaatagtgatgggatctatggcaataaaggtttctttttacagaacacgctaaatgcagtgacgggttataaaggtctcataccctatatcggtgcagattacggtcaaataattggtaagttaccttcacagaaccttagtggcaaaaaaataatgggtggtattttaggtgtcaaaggggctgtcagagctctggaatatgatgcttcggtatcagccccttttatctatcctaataatttggatgtcgatgaatataaattaaatttcaactttgcgtaccagatttaa

SEQ ID NO: 93155 - DNA, 267 bp, Enterobacter aerogenes
atgaaaaagacccgttataccgaagaacagatcgcgtttgcgctgaaacaggccgaaaccggcacccgcgtcagggaagtctgcagaaagatgggcatttctgaggccacgttttacaactggaagaagaaattcgccggtctgggcgtaacggaactgcgccgtctgcggcaactggaggatgaaaatcagcggctgaagaaactgatggcagacctgagtctggacaaggagatgctgcaggaggtactgaaacaaaagttctga

SEQ ID NO: 93156 - DNA, 753 bp, Enterobacter aerogenes
atgcagagcagaactgtctaccactggcagagccggcgtgacgatcgggcgataaccctgcgtatccgggaaatagcggaaacccggatacggtacggttgcccgcgtattcatatccagttgcggcgggaaggctggcagattaaccacaagaaaacacaccggatttattgtctggaaggcctgaatttgcgcagaaagcgcccccgcaggcatgtcagtgccgcacgccgccagcagcgcccggccctgacgcatatcgatcagtgctggagtatggatttcgtgtcggatagtctgtttaacgggcggcgttttcgggcgctgaccgtagtggataattttagtcgggagtgtctggcgatccatgccggaaaatcgctgaaaggcgaggatgtggtcagcatagtggaagcattacgggtgctggataaacgcctgccggtgcgtatccagacggataacggcagcgagttcatctcgaaaagtctggataaatgggcgtatgagcacggtgtcacgatggacttctcccgtcccgggaaaccgaccgataacccgtttattgagtcatttaacggcagcctgcgggacgaatgtctgaacattcactggttcctgtcactggaagatgcgcaggacaaactcgacaagtggcgcagggaatataatcatgagaggacgcatttatcactaaatgacatgactccggctgaatttatccggagtctgcaaaaagacgaagatctctga

SEQ ID NO: 93157 - DNA, 438 bp, Enterobacter aerogenes
atggatactacagaacaggtaaacggatattattttgatgggaagtcaaatttaagcgaaagcgaactgttattttggttactcatggatgagagttataaacagtttggtgatttgctggattactttgcgtggggctcaatgattcttagtctgcctttagtccctgtacgaggtaagattgattaccgccgtgcaaccaaaggcacaagtcctctatctcttgttttccgtaaggtgttcacaggctcttttgaaacacgtaaaaagacacttaccattaagtcgatactccgcaaggattgggcatacactaccagtattggcggctacattggacgttgggtaccgtggattggtgttgtggtcactgtttatgatattggtgtcattactactaatgttgttcaccgttatcgattaattacggggaaatag

SEQ ID NO: 93158 - DNA, 1161 bp, Enterobacter aerogenes
atggaaaaatacttcatgatgaaaaaatcccttacaggcgtactgctgctgggcgcctcattttcgacgtttgccgcgccgcaaacggcggagcagctgcgcgaactggtcaatcagagcatcaccccgttaatgaaagaacaggcgataccggggatggcggtggcggtgatctatcacggcaaaccctactatttcacctggggccaggccgatgtcgccgggcagcgtccggtgacgcgacagacgttgtttgagctgggctctgttagtaagactttcaccggcgtgcttggcggcgatgcggtggcgcgcggtgaaattaagctcagcgatccggcgcagaagtactggccgcagctcaccggccagcagtggcaggggatcacgctgctgcatctcgccacttataccgcaggcggtctgccgctgcaggttccggacgaggtgacggatgaagcggcattactgcgttactatcagaactggcaactgcagtgggcgccggggagtaagcggcagtacgccaataccagcattggcctgttcggcgcgctggcggtgaaaccttccggcatgagctttgaacaggcgatgagccagcgggtattgcagccgttaaaactgagccacacctggattaacgtaccgtccgcccagagcaaggattacgcctggggttatcgcgacggtaacgcggtacacgtttcgccggggcagctggacgctgaggcttacggcgtgaagtcgagcattgaggatatggcgcactgggtgctggcgaatatgaaccgcgagacggtgcaggataaaaacctgcggcaggggatccagctggcgcagtcgcgctactggcgggctggggagatgtatcagggcctcggctgggagatgctgaactggccggtgtcggccgaggtagtaattaacggcagcgataataaggtagcactcgccgcgatgccggtaacggcggtcaatccacccgcgccgccggtgaaagcctcgtgggtacataaaaccggctccaccggcggattcggcagctacgtggcctttatcccgcaacaggatctcggcatcgtgatgttggcgaataaaagctaccccaacccggagcgggtgaaggcggcgtatcatattcttgaggcgctgcagtaa

SEQ ID NO: 93159 - DNA, 324 bp, Enterobacter aerogenes
atgccgccggttgttcctccgggccccggttatgacctgtattgtctggtggtggctaacgccttatccggcctaccgttaatttgttcaccacgcagcctcaaaatccccggtggggctaccgcttaccggggctacagtaatgtgcagtttggtagcccggacaaggcgcaatgcgccgcctccgggaaaatccctgccagcgactggaccacaacagactctcagcgttatgagatgaaagcttttctcaagctaaaacagccgcaaaccgataacagtatctattcagccttccccgaaccgcgtttttccattcgatag

SEQ ID NO: 93160 - DNA, 771 bp, Enterobacter aerogenes
gtgcctggcttgaaaattacgctgttgcagcaaccgctggtgtggatggatggtcccgccaacctgcgccatttcgatcgtcaactggaagaagtgagcgggcgcgacattattgtgctgcctgagatgtttactaccggatttgccatggaagcggcgaaacaatcgatgccgcagggagaggtcgttgagtggatgctggcgaaagcggagcagaccaacgcgctgattgccggtagcgcggccttgcagaccgaacgcggcccggtgaaccgttttctgctggtagagcccggcggtaaaacgcacttttacgataagcgtcacctgttccgcatggcggatgagcaccaccattatgaggcaggtactgaacgagtggtctttgaatggcgcggctggcggattctgccactggtgtgctatgacctgcgcttcccggtatggtcgcgtaaccacaacgattacgacctggcgctgtatgttgctaactggcctgccccgcgttcgctgcactggcaatcgctgctggtcgccagagcaattgaaaaccaggcctacgtcgccggctgcaaccgcgtcggcactgatggaaacggccatcactatcggggcgatagccgtatcatcagcccgcagggagagattattgctaccgccgaaccgcatcaggcgacgcggctcgatgccgatctgtcgttggccgcgctgcaggagtatcgcgagaaatttccggcctggcaggatgccgatcctttcacgatcggctaa

SEQ ID NO: 93161 - DNA, 507 bp, Enterobacter aerogenes
atgtgcttacaatcccaccaccgactttcagtggatcgccatctgcaccttcaatcccgactttcagcatcgggtttatgtcaaagatcttatccttgctcagcgagttattctcaacaacaactttgtccgttgcgaagtctgccgccgcaacagcatttcccctgtactctcagcaggttacaacacatttttccggtgcattccgttgaaccggacgcaacgccccgatacgcggttttgctccccgtaagccacttttctccaaaactgttaaagagcctgtcttacaagattacctactattcccgcggcctcagacaacgactacgcctgaacgataagtggctggcagaagccggattttgcaccgattcgttggttagtgtgcctgttgaacacgggcaactggtgatccgtcctgcgactaaatggctgataaaagtaaaaattctgcccaactacggacgaaatttttactatacgcttatgaaagccactttttaa

SEQ ID NO: 93162 - DNA, 228 bp, Enterobacter aerogenes
atgactaaaaaagaacttgaaaaccaattggatattcttggtgtccatcctaatagttactcattgggaacgttgaaaaatagcgattgtttatgtgttattcacgaagatacacaatggaatgtttattacgttgaaagggatcagccatcacttatttcttcgtttctattggaagaaaaagcctacgattttgtgttagagcaatttaaaaagtggctttcataa

SEQ ID NO: 93163 - DNA, 9861 bp, Enterobacter aerogenes
atgaaacagcctcccgtccgctttgcctaccgcgtgctcagctatgtattaagcgtcctgctcgctggacaacctttgctacctgcgatttccgccacgctgacgccaacggccaatacctccacggataaagcggcgaatggcgtgccggtcgtgaatattgccacaccgaacggggccggaatttcgcacaaccggtttaaggattacaacgtcggcaaagagggactgatcctcaataacgccacgggtaagctcaatcagacgcagcttggcgggttgattaacggtaacgccaacctgcaagcgggcaaagaagcaaagggcatcatcaacgaagtgaccggcggcaaccgctcacatctgcaggggtatacggaagtcgcgggcaaagcggcgaatgtcatggtcgctaacccgtatggcatcacctgtaatggctgcgggtttatcaataccccccaggcaacgctgaccacgggaaaacctgtttttgacgccagcggcaatttacaggcgctggacgtgaaaaaaggcagcattaccattgaggggcaggggcttgatgccagcggcagcgatgcgttgtcgatcatttcacgcgcaaccgaagtgaatgccgccattcacgctaaggatttaaacgtggtggccggggccaaccgcgttggtacagacggcagcgtacaggcgcagcagggagaaggtaaagcgccatcggtggcggtcgataccggcgcactcggcggtatgtacgccaatcgcatccggatggtgtcgagtgagaaaggtgtcggggttaacctcggcaatcttaacgcgcgccagggcgatatcaccctggatgccagcggcagtctcggcgtacaccaaagcctcaccggcggtgcgctgtccgctaaaggtgaaaacctgaccctgacgggcgatcacaaagccagcggcaatatatcgctgagcagccagggcgacattgccctgagcaacggttcactcaatagcgacggcgacctggtactgaatgccaatggcgcgatttcaaacgctaatgaaaagctgactgccggacgcgatacgacgcttaccgcgaaaaatattagcctggatacctccagccagattaacgccgcccgccatatcgaggctaaagccagcgatacgctgaaaacgcaagggcagatgatagccgggcaaaacctgacggtaagcagcaacaccctgacggtagggggcaagctgctggcgcgtaacagcgctcagctgaatgccagcgcgctgaataatagcggttccgttcagggcgcttccctaagcgtgggcagctctacgctcagcaatgccggttcgctgctgagcggtagcgacctgaccgtcaatactcacgattttacccaaagcggcagtatcggcgcgaagggaaaagcggacatcaccgccagcgggaagcttatcaacacgggctcgctggtgagcgatgcggtgctggcattgaaggcgcaggatgtgacgcagaacggcgtgctgtccggtgcccaggggctgacgatcgctacgcagaatctgacctccggcaaaaattcgctgatccatagcgatgccgccatgacgctgaataccgccacggcgacgttggacggtgaaaccagcgccggaagcgatcttctgctgcagggcgacaggcttgctaccgcggcgggcgggcaacttcaaagcggtaataatctcagcctcagcgcgcgggaaatggtgctttcgggcacgcaggcggcacaaaaaaccatgacggtgaatgcccgcgaaaagctcaaccacagcggcaaaagcagcgcggccgaaatcaacctgaatgcgcctgcgctgaccaatagcggcgtactcgttgcttccagcatgaacacgcagtcgcaaaccctgaccaacagcgggctgatccagggcgccagcgcactgctgattaacacgcaagcgctggacaaccagctgaacggcacgctgtacagcgcggcaaacctggcgctgtctgtgccggatattcgcaacagcgggcttattagcagtgacagcggtctgataatgacggcggacgtgctaagtcattcaggcaaaatcatcgctgacacgctggacattcaggcgaccacgctgagcagtgacggcctgcttcagggccgtcacgcactgaccctttccggcgacagcctttcgcagggggcaaacggacgctggctgacggcgggtcatttatcccttgatgccaacacgctggtcaccggcgggataacccagggcagggatgtctcggttgatgcagaccgctggacccacagcggatcggcgttggcaacgggcgaacttgaaggcacgctcaccgcttccttgaacaataacggcgacctgatgagtcaggggcgtttcgccctgactgcgccggcgctgacgaaccatggtcgcctgcttgcatccggcgacatggcgcttagcggtaaccagatcagcagcaatggtacgcttcaggggaaaaccctgagcctgacccaggacgatatcagtaaccaggggaccattatcgggctgaacgcgctgtcgctgaacagcgctggcgcattcgctaatactggcgatttactgagtcaaggggagctgactctctccgccggcgatatcaccaacggcggacgaatacaggggcagaacatccttcttgatggcgcccggctgactaaccacggggccatccagagcgcgatcgatttagctctgaccctgagcgatgacatcactgccgttaccggcagtaaaatcaccgccctgggcgatgctcgcctgaccggtaaggcgttgagcaaccaagggcttatcagtgcgaaaacgctggaggtggaaggggattcgctcagcaacgacggtgaaatcagcggtgttaacggcctgagcgtcacgctgcatagcggcctgcagcagcagggcaaactgctgactggcggtaagctggcgctgaaagccggtaacatcagcaacagcgggcagcttcagggggctgatatccaactcagcgccagtacactgatcaacagcggtcgcattcagggcgatagcgctctgacgctcactctgctgaacgcactcaccaaccagacgaacggcgttatcctcagccaggatgcgctcagcatcactgcgccatcgctcatgaatgacggcacgattcagggcaacggtaaaaccacgctcagcgcggcaacgcaggcccgcaacgacggcaaaattctctccggcggtggcctggtattcaccacgccggactacagcggtagcggctggctacaggccacgaacctggtgctgaacgtggcgaagtttgccagcagcggtaccgtgctggcggcgaaccaggcgacgctcacaggtgacagtttgaccaacagcggtaccttccaggccgcacagctgaacgtaaacgcgcaattcgtcaacaacggcggcacgctgctgggtaatcaggggctgagcatcaacgccagcaccatcaataatgagaatggcaaattattcagcggcggtgacctgctggccgaaacggtctccctcagcggcgcgggccagattgtggcgctcggtaacctggcgctgaagctggtcaacagctggacgtcacagggggttgtggcctcgaacaaacagctttctgtcagtacccggggggatatcaccaacaatgccaccctgcagggtgacggcattaccctggacgcggcgggtaagctgacgaataacggccagcttacggcaggcggtggtaccgcttcgctttccggcagccagattgccatgaacgccagcggcactctgcaggcgggcggggacgtcagcctggccagccggggcagtatcatcctcgacggttttaccggcacggcgggcaatctgctcctgaacgcgacaggtgcgatcgtcaacaccgccctgctgtatgcgggtaataatctcgccctttacgccaacagcatccagaacctgcatggcgatatgctggcaggcaataacctggtgatgcagaaagacgccagcggcgcggcgaatgccgaagtgattaatagctccggtaatattgagactattaacggtgatatcaccatcaagaccgggcatttgctgaatacgcgggatgggctaacgacaaaaacaacgcatatcgatggtggacagagtattccggggatggggaattcgatgattaacgtcgatatcagccagcttgccgacggtacttatggaatgaccagccgggtggcagaaagacaggtggggccatgtaacggccatggagcctgtaactatgtccactggaatcagttttactatgcaatgtatgccggttcggcagagcaaaagttcatcagtagtcagacgcgaactgacgttaccagcaacggcggagcatccagaattggctccggcaaaaatctcacgatcgatgcaggctcactggagaattttgccagtaatattttggcgaatagtaatgtcagtctgaccgggggcacccttaataatcagagttggcagtcaggtacagttactgactggttcgtctatcagtacgattcacgccgatatggatacgcagtcgagccgggggggcgttatccgacggacggaaataagtatcatgatgttatgcctgaaagcacgtccattgcgtttacgcttaaaggacatgattcaagtacagagctcggcgaaatttaccgcgcggttattcaggcgggcggcaacgtctcagccaacttcaacagtgacatcagcaataccaatacgatgtctaatgccgacaagatcagcaacaccatcgttgccccaaacctgaatacgccttcagcgcaaagcatcggtagcgacgcgagccagcaggcgcttgtggaggctgcaaccccggctatcaccgctccagactggaaagacagtaccgccagccaaactatcggcgaaggtaccgtactcgcccccggcggcatggatagcaactacccactgccttccggtaataatggctactttgtgccgtcgaccgatccggacagcccgtatctcatcaccgttaacccaaaactcgacggtctgggtcagctcgatccgtcgttgtttggcgacctgtacaacctgctcggcatgaacccgggcacggccccacgtgagacgggtagccagtataccgatgtcagtcagttcctcggttcttcgtacatgcttggccgcctcaacctgaatccggacaaggattaccgcttccttggcgacgcggcgtttgatacccgctatgcgtcaaactatgtactgaaccagaccgggcagcgctacatcaatgggctggggtcagacctcgaccagatgcgttacctgatggacaacgccgccagcgcgcaacgcgcgctcggtctgacgtttggcgtggcgttgaccgccgaccaggtggcggcgctcgaccacagtattctctggtatgaaagcgccacgattaacggacagacggtgatggtgccaaaagtctatctgtcgccaaaagatgtgacggtgcagagcggtagcgtgattagcggcaataacgtgcagttagcgggcggtaacgttaccaacagcggcagtgctctgctggcgcagaatggccttaccatcgacagcagcaacagcattaacaacctcaacgcgggtctcatccgggctggcggcgggctggacctgagcgcgctggccgatattaacaatatcggctccgtcatcagcggtaagacggtgcagctggaaagcaccgatggcagcatcaacaacatcacccgtacgcagctgtggagcgtgggcggtgacagccgtcgcgaaagtgtccacataagtggcaccgatgtcggacaaaccgcctccatcagcgccagcgatggtctttatatggcagcggcgaacgacatcaatatcaccggcgcgaaagtaaacgcgggcggcgacctcgccatggatgccggcaatagcatcaatatcgccgctaaccagataaccgacagcagcagccgatcaggtgtttggggccagaaaaacaccagtacatcctccacctcaaatcagggcagcagcattacggcgggcggtaacgcggtaatgcaggcgggcaacgatctgaacgtgacggcgagcgctatcaatgcgggtaaaaccgcgcagctggtggcggaaaatgatctgaacctgaacgcggcggacagcgggcagaccagccgcacgggcggcagtgaaagtcatcagggcagcgccgacagaacaacgatttcagcgggcgacaacgtaacgctggttgtcggacgggacgtgaccagccaggcggcaggcctcgcggcggaagggaatgtcgggatccaggccgggcgcgacgttaatctgctggcggaagagtctgtgaccggcagcagctcacactcgaaaaagaaaaccgttatcgatgaatccgtgcgccagcaggggaccgaaatcgccagctccggcaacaccaccatcgtcgccggacgcgacgtcaacgccgaagcggcgcaggtgaccgccagcggggatatcggcgtggcggcaggccgcgatgtgaacctgaccacggcgacggaaagtgattaccactacagggaagagacaaagaccaaaaaagggttccttagcaagaaaacgactcacaccatcgaggaagacagtgcgacccgtgaagcaggtaccttgctttccggcgacagcgtcaccgtgcaggcgggcaacaacctgctggtgaaaggctcctccgtagtgggcgataacagcgtggcgctcgatgcaggtaataacgtcgatatcgtggccgcgaccaacacggatacctcctggcgctttaaggaagagaaaaaatccggcctgatgggcaccgggggtatcgggatcagtatcggcagtagcaagactacccacgatttacgcgaggcgggcaccacgcaaagccagagcttcagcaccgtcggatctacgggcggtaacgtggttatcgctgccggaaaccaggcgcacatcggcggcgcagacctgattgccgggaaggacatgagtctcagcggcagtagcgtcatcatcgacccgggccacgacaaacgtacccgcgatgaaactttcgagcagaagaaaagtgggctgacgctggcgctttcgggcactgtcggcagcgcgattaataatgcggttacggcggcacaggataccaaagaggaaagtgacggacggctcaaagcgcttcaggccactaaaactgtgctctccggtgtgcaggccggacaggcggctgaggcggctgacctgacggccgacccgaacgcgatgggcgtcagcctctcgctgaccacgcagaaatccaaatcgcagcagcacgctgagagcgatacgataacgggcagcacgctgaatgcaggcaacaatctctccattaccgcgaatggaaaaggtaagggcccgaacagcggcgatatcgttattgccggaagccaggtgaaagcgggcggcgacacgctgctggacgccaggcatgacgtcattctcagtggggctgctaacactcaacagttcagcggcaagaacagcagcagcggaggcggtgtcggcgtaagtattggtgcaggcaaaggcgccggtatcagcgtgtttgccaatgtcaacgcagccaatggcaaagataaaggtaacggtaccgactggactgaaaccactatcgacagcggcaagaccgtcaccattaagagcgggaatgacaccgtgctcaatggggcacaggttagcggcaataaaattgtcgccaatgtggggcacgacctgctgatgagcagccagcaggacagcaacaaatacgacagcaagcagagcagcgtggcggcgggcggcagcttcaccttcggcagcatgacgggctccggctatatctctgcctcccaggacaagatgaagagccgctttgactctgttgccgaacaaaccgggatgttcgccggtgatggcggctttgatatcaccgcgggcaaccatacccaactggatggcgcagtgattgcctccacggccacggcggacaaaaacagcctcgataccggtacgctgggcttcagcgacctgcacaacgaagcggacttcaaaacccagcactcaggcatcagcatcagcggcgcgggcagcttcggcgaccagttcaagggcaatatgccgggcgggatgattgcggcggcgggcaacagtgggcatgccgaaggcacgactcaggccgctgtggctgacggcaccatcatcattcgcgacaaggataatcagaagcaggatgtggcgaacctgagccgcgacaccgaacatgccaacgacagcatcagcccgatcttcgacaaggagaaggagcagaaccgtctgaaggaaatcgggatgatcagcgatatcggcggtcaggtggcggatatcgcgcggacgcagggggagctgagtgcgctgaaggctgcgcaggataaatacgggcctgttcctgcggatgcgacggaagaacagcggcaggcatatctggcaaaactgcgtgatacgccggaatacaaaaaggaacaggaaaagtatggcaccggcagcgacattcagcgcggcatccaggcagcaactgcagcgcttcaggggctcgcgggcggtaatttagcgggtgcactggcgggggcttcggctccggaactggcaaacttcatagggcacaatgctggaattaatgataacgatgcagcgaaagccattgctcatgccattctcggcggcgtgactgcggctcttcaggggaataataccgcagcaggtgccgtcggtgctgtgagcggtgaacttatcgcaggtgcaatcgcgaaggttttatatccggatgtgaaagacctgtcgaagctgaccgaggaccagaagcagacgctaagtacgctggcaagtatctcagcaggcatggcgggtggtattgcaggtgggaatactgcgggtgtggctaccggagcggctgccgggaagaatgctgttgagaataatcttctgggtggtaacgaagatacccagacgaagttcgtgcaggaacatagtaagaatatagcgtcctgtagaacggatccgggttcagcatcctgccagaaaggtctggcgatgaatgatgcgctgatggtggcgcttccggcgggtcttggcggtggagtactggcagcagcaacgccggaaatagcggcggcagcgagagcagtaatagcggcctgcacaagtaatgccgtcctgtgcctgaataatgccgggataatggcctcggaagcgatagtgccgggcggtgtgggggcaggcggtgcgataggtatcggcaagacagttgctgaagtgacaacggcgaaggcaatagccagtacgattaaggataatgttgcagccagtcaggcggccagagcatcatcgaattttgggcaatacagcaaagctgaagggacagttcaggaaagcttgggtatttggccgcctaatcgtggagcttatggtccaatagagaatgtaacgttgccaacaggaacaatgattgatcgatatggatatcctggaggtagttttgtatctccattaggagttccttttgaacaaagagctcttccatcttcatatgaaactacaaagccatattttcaatatgagattctgaagcctatagatgatgtctctcaggggaaaatcttgccttggtttgggcagaaagggcaaggtacgcagtatgagttaccaaaacctgttcaatggtatttggataacgactatatgaaaaaggcagataaatga

SEQ ID NO: 93164 - DNA, 1662 bp, Enterobacter aerogenes
atgaaggttttatatctggcagggatattgctggttctgagtcagccagttttcgcagccccgttatcgccagcagaccgcaacagcatcgaacagcagcagcagcaattgcttcttcagaaccaacagcagcgtgaatcgctggagcgcacagcgccgctggctcgcccctctacggctgaaccgcctgtgccagcatccgggccatgtttcaccatcaatcgcattgtgttggaagggaccacccttattgatgatcgcaggcagcgaaaactccttgcgccctgggtgaaccaatgcctgaatatggcccgtattaatcagcttactaatacagtttcggactggtatatcagccgcggatatataaccagccgtgcttttctgacggaacagaatttacgttctggtgagctgcatctggctattctggaaggtcggctggagaaaatacacatggatggcgcgcccgagcgtgagctgaaaatgacctttccagggctggaagggcgtattcttaatctgcgtgatattgaacagggtatggagcaaattaaccgcacccgtaccacgccggtgcagattgaaatattaccgggcgataagcagggatggtcgattgttcatttgaccgccacgccagaatttcctctttccggctcagccagttttgataatagcggccagaagaatacgggcgtcgggcaaattaacgcagggctgagcggtaacaacctgttaggtctggccgataactggtttgtttacggtggacgcagcagcgcgttttcgaatacaaaagatgcacaaaattttgctgcgggcgtcagcgtgccctacggctacagcctgctggactatagctacagctggaacaactatctcagcaccatcgataacaacggctaccgctggcgttcgaccggcgataccgaaacacaccgggtgaatctgtcacacgtgctgttccgcaacggtaatatcaagacgggtatctccctgggcctgagccatcgcatcaatcataattatctggacgatgtcctgttgcaaagcagcagtcgcaaactgaccagcctgctgtttggcctgaaccatactcagaaaatatttggtggcgtagccacgtttaaccctaccttcagccgcggtatgccatggctggatgccgacagcgacggcagtaaaaatggtgatttaccgaaagcgcagttccgtaaatggagcctgaacgccagcttccagcgcccgctagctgaaaacttgtggtggctggcgagcgcctacgggcagtggtcaccggaccgcctctacggtagcgaacgcatgaccatcggcggcgaaagctcggtgcgcgggtttaaagaacaaagtatctccggcgataacggcgcgtactggcgaaatgagctcaactacaccctgttcatactgccggtgataggccaggtcagcgcgctggctgctgttgatggcggctggctgcattccgacaagctggatcgctattcagctggcactctgtggggcacggctgttgggctcaataccgccaatggccacgtttccaccgcgtttaccgtcggactgccccttgtttacccggactggcttggcccggatcacgtcaatatttactatcgcgttgccgtcgcgttttaa

SEQ ID NO: 93165 - DNA, 2034 bp, Enterobacter aerogenes
atgagccactatcctcatctattcagcccgctaaccatcaacgggatgaccataaaaaatcgcattatcatgccgccgatgggtaccaatatggccaccctgaatggcgaagtctcgcaggagcagcttgaatactacgaactgcgggcgaaaggcggcaccgggctcattaccgtggaaaatatctgcattgattttcccttcgcctccaatggcacgacgcagttacgtatcgataacgatcaatatattccgcgcctgtttaaattaaccgaaaccctccataaacacggcgcttgcgtagcgattcagctaaatcacgcgggcgcttcggcttatgcttatcgcctgaatgggcagacgccgctttcggcatccagcacgccgtcgaaaaagcacggtaatattccgcggccaatgactcacgaggaaatttatcacgcggtagacaaatttggcgacgccgctgagcgcgtacgccgcgccggttttgactgcgtagaaattcatggcggccattcctatttaattagccagtttttgtcgccgctatttaataaacgtaccgacgaattcggcggcagtatcgaaaaccgcacccgcatattaagcctgattatcgataaggttcgcgcctgcgttggaccacgtttcccgataagcctgcgcatcagcgccgacgatttcttaaagggcggcaacacgctggaagattcgctgcgcatcctcgagctgtgccaggataaggtcgacattattaacgtctctgccgcgcagaacgataacctgaatttacaaatcgaccagatgtcgctggaagacggctggaagcgctacctctctcgcgcggtacgcgataaattccataagccgacggtcatcgccggcaacattcgttcgccaaaaatcgccgaagatatcctcgccagcggcgatgccgatctgatcgccattggtcgtggtttgattgccgagcctgaatgggtacagaaagtacaaagcggcaatgagcgtctgatgcgtaaatgcatctcctgcaatatcggctgcgcggatcaccgcatcgcccgttctcgtccgctgcgctgctcgatcaacccggacatcatccacggcgacgcttacaagcagcagcgtgtttcgcgcgaaaccaacgtcgtggtaatcggcgccggcactgcaggaatggaagccgcctgcaccgccgcggaagtcggctgtaacacctggctgctggaagagaaaagccacgtcggcggactggccagcaccattgcgctgctgccggagaaaaagcgcatcgccgatttcccgcagtttatgaaaaaccgcctttccgggctcagtaatctgatgctgcaggtcggtaaacgcgccgatgtcgcttcagtcgccgcgctgcatccacagctcatcgtcaacgccaccggctcggttcctctgctgccgcctatcgaaggcctgcgcgagaacattgacgccgaaggtggccgcctgttttcaataaccggcatgattgaacaccttgactcctttgccgatgccgcaggtaaacgcatcgtcgtggttggcggcggcgccgtcggcctggacgtcattgaatacttctcagcgcgcggcgccgagacggtgctgattgaaatgcaggacgcgccgggacaggacctcgacattattaccaaaaacgcgatgttgaccatgctggaagaacaccaggtggagcaacacatgcagacccgattaaccgccgtcgctccagaccatttcaccgttaataccgtcaacggcacgttcgacattcccttcgactatggctttgtatgcctgggaatgcgcgccaaccgcgcaggtctcgacgatatcgcccagtgggccgccgccaacaacgtaaaaaccatgaatatcggcgacagcctgtcggcccggagaattatcgacggcgtgcgcgaaggccgcaacgtgctggagatactcgaagacatgggcgtactcggcaatcgcgaagcgcaacagattccatttttaacatattga

SEQ ID NO: 93166 - DNA, 135 bp, Enterobacter aerogenes
atgagagagggttccattgttatcttaatgaaagataagagattaatggcattctcattgctgattttgagggggttagacaaaagaaaggataacaaagtgttaattaatcgcagggataaactagatagttaa

SEQ ID NO: 93167 - DNA, 1725 bp, Enterobacter aerogenes
atggagatgttgtcaggagccgagatggtcgtccaatcgcttgtcgatcagggcgtcaagcaagtattcggctatcccggaggcgcggtcctcgatatctacgatgcattacataccctcggcggcatagaccatgtgctggtgcgccatgagcaggcggcggtgcatatggctgacgggctggcgcgcgcgaccggcgaagtcggggtggtgttggtgacctccggcccgggagcgactaacgctattaccggtatcgcaacggcttacatggattctattccgctggtcattctttccgggcaggtcgccacctcgctgattggctacgatgccttccaggagtgcgatatggtcggtatctcgcgcccggtggtcaaacacagcttcctggtgaaacagactgaagatattcccggcattttaaagaaagcgttctggctggcggccagcggccgaccggggccggtagtggtcgatttgccgaaggatattctcaatccggcgaaaaagctgccttacgtttggccggatgcggttagcatgcgttcttataacccgacaaccagcggtcataaagggcagatcaaacgtgcgttgcaaacgctggtggcggcgaaaaaaccggtcgtatacgtcggtggcggggcgatcaattcgcagtgcgaagcacagctgcgtaccttggtcgaaaagctgaagttaccggtagtctcttcattaatgggcttaggcgcttttccggcgactcatcagcaggcgcttggcatgctggggatgcacggcacctatgaagccaacatgaccatgcatcattccgacgttatttttgcagtcggcgtacgctttgacgatcgcaccaccaacaatttggctaagtattgcccgaacgccacggtgctgcatattgatatcgatcccacgtcgatctccaagaccgtccctgcggatgtgccgatcgttggcgacgcgcggcaggtgctcgaccagatgtttgatctgcttgagcaggaagagagccagcagccgctggatgagatccgcgactggtggcagcagatcgaacagtggcgttcccgtcattgtctgcaatacgacacgcaaagcggcaagattaaaccacaggcggtaatcgaggctatctggcgcctgaccaacggtgatgcttacgtgacctccgacgttggccagcatcaaatgttcgcagcgctctattatccattcgataaaccaagacgttggattaattccggcggcctcggcacgatgggctttggcctgcctgcggcgctgggcgtgaagatggcgctaccgcaagaaaccgtcatctgcgtgaccggggacggcagcatccagatgaacattcaggagctttccaccgccctgcagtatgaactacctgtgctggtgttgaacctgaataaccgttacctcgggatggtgaagcagtggcaggatatgctctattccggccgccattcgcagtcctacatggaatcgctgccggacttcgtgcgcgtcgccgaggcgtatggccacgtcggtattcgcatcagcgagccgcaagagctggaagctaaactggcggaagcgctggagcaggtacgtaataaccgtctggtgttcgttgatgttacggttgatggtagcgagcatgtttaccccatgcagatccgcggcggcggcatggacgaaatgtggttgagcaaaacggagagaacctga

SEQ ID NO: 93168 - DNA, 1428 bp, Enterobacter aerogenes
atggcttttgatgatttacgcagctttttgcaggcgctggatgagcaggggcaactgctaaaaattagcgaagaggtgaatgccgagccggatctcgccgctgccgctaacgccactgggcgcatcggcgacggcgcgccggcgctatggttcgataacattcgcggctttaccaacgcccgtgtcgccatgaacaccatcggttcctggcaaaaccacgcgatttcgctggggctgccgccaaacacgccggtgaaaaagcagattgatgaatttattcgccgctgggataaattcccggtaacgccggagcgtcgcgccaatccggcgtgggcggaaaacaccgttgatggcgacgatatcaacctgttcgatattctgccgctgttccgcctgaacgatggcgacggtggtttctatctcgacaaagcctgtgtggtttctcgcgatccgcttgacccggacaacttcggtaaacagaacgtcggtatttaccggatggaagtgaaaggcaagcgcaagctgggcctgcagccggtaccgatgcacgatattgcgctgcatctgcataaagcggaagagcgcggtgaggatctgcccattgccatcaccctgggtaacgacccgattatcaccctgatgggcgcgacgccgctgaaatatgaccagtcagaatatgagatggcgggcgcgctgcgcgaaagcccgtatccgatcgccaccgcgccgttgaccggctttgacgtaccgtggggctcggaagtgatccttgaaggggtgattgaagggcgcaagcgtgaaatcgaagggccgttcggcgagttcaccggccactactcaggcggccgcaatatgacggtggtgcgtatcgataaagtctcttatcgcacaaaaccgatttttgaatcgttgtatctcggtatgccgtggactgaaatcgactatctgatgggcccggcgacctgcgtgccgctgtaccagcagctgaaggcggagttcccggaggtgcaggcggtcaacgccatgtacacccatggcctgctggcgattatctccaccaaaaaacgctacggtggttttgcccgcgcggtgggattacgggcgatgactaccccgcacggactcggctacgtgaaaatggtcattatggtcgatgaagatgtcgatccgttcaacctgccgcaggtgatgtgggcgctctcctcgaaggtcaacccggcgggcgacctggtgcagttgccgaacatgtcggtactggagctcgatcctggttcaagcccggcggggatcaccgacaaattgattatcgacgccaccactccggttgcgccggaccttcgcggtcactacagccagccggtgcaggatttaccggaaaccaaagcctgggctgaaaaactgaccgccatgttggccaaccgtaaataa

SEQ ID NO: 93169 - DNA, 447 bp, Enterobacter aerogenes
atgttcaaatataaaaaaaccgtaacgactgtaattgttttaatcgttgcatattgcatatggctggctgtcagaccaacaaaaattgtcagagtcgataatagtgctgtttttgtagaacacttaccaatgacaacagaaggaaaactaaaatggtggttgaaaaacaaagagctattgcaggaaaaatatcacatcattaataaaccgtataacttcacggttaccatcatgagctttgatggttatgacgaattacctaaaggaacaatggacggttctatcgatgattatacctgctttgatgatactaatggaaagcatgaaaaatgtgtttataacaatatagctataattgtcagaggtcaacttaaaggaaaacagttcataaacattgacggtaaaacatatatccagaaagatgatgggaaaattgaattacaatga

SEQ ID NO: 93170 - DNA, 819 bp, Enterobacter aerogenes
atgaaacgttggggaatactgcttgccgcactgccgctgttcgccagcgcggccgccgaacgggtgatttccctcggcggcgacgttaccgaaatcgtctacgcgctgaacgccgggcagcaactggtggcgaaggacagcaccagcacctggcctgccgccgcgcaaaagctaccggacgtcggctatctacggcaattaagcgccgaggggatcctctccttacgcccgcagctggtactggccagcgcgcaggcgcagccgtcgctggtgctgcagaaagtgcaggaaaaccaggttaaggtcgtcaacgtgccgggcggcgataaccttgccgctatcgataacaaaatcgccgttatcgccgaagcattagataaaactccggcaggcgacgtgctgcgccagcaggtccggcagcagatagccgcccttcccacacgccctatcgccaaacgggtactgtttatcctcagccacggcggaatgaacaccatggtggccgggcagcacaccgccgccgatggcgcgattcgcgccgccgggctgcaaaatgcgatgcagggtttcgaccattatcgcgcgatgtcgcaggaaggggtggccgcaagccaggcggatctggtggtgatttccgccgatggcctcaaagggatgggcggcgaaagcgggctatggaaactgcccggtctggcgcaaacgccggcaggccgccataaacagctactggcgatcgacgatatggccctgctcggcttcggcccgcgtacgccgcaggcgatcctcgaactgcggcaaaaagcggagcagtcaccctga

SEQ ID NO: 93171 - DNA, 381 bp, Enterobacter aerogenes
gtgcatggttactatattggctataaatatcaaaaagggttggaaatcgtcagcgccgcgaagcgcgaagagttgaaaaatttcgcctttgatctgctgatggatctgtacgataacgaactggcctatacccgcgaattgtatgccgacagcccgtggctcgacgacgtcaacgcgttcctctgttacaacgccaataaggcattgatgaaccttggctatgaggcgttattcccggcggaaatggccgccgtaaacccggcaattcttgcggcgctgtcgccaaacgccgatgaaaatcacgactttttctccggctccggttcttcttatgtcatgggtaaaaccgaagcaaccgccgacgacgattgggacttttaa

SEQ ID NO: 93172 - DNA, 621 bp, Enterobacter aerogenes
atgtctgtcatcagaagcttacttttctttctcggcgcggcggtggcttccgccatcgcagtactttgtttgtgggtggatatccgggtgtttggcaacgatattccggagatttcgcttaccgaggtggtgcaggagggcgtgctggcgataatcgtgctgattcacttcctgctggcgaaaaaatatgagctcctgcgctactgtaatatcctcgttggcggcttcttcctggcgatgctgatccgcgaactggacgcgctttttgaccttatttctcacggtagctgggtatggttcgcgctggcaacgacgatagccgcgctaatcgttccactgcgccattctcgtcaaacgctgtcgcaactggcgcaatacccccgcacgccttactacggcatgatgataagcggcctgctggcgattctggtcttctcacgattgttcggcatgcatggcttatggtacgccgtacttgatgagaactacgcgcgggtggtgaaaaacaccgttgaagagggtagcgagtcgttcggctacatgctttgtctgaccgcctcaatcggttactactgctatttccgctatcaggcgcgacagaaagcgccgtcgcaaagctag

SEQ ID NO: 93173 - DNA, 783 bp, Enterobacter aerogenes
atgtttatccgaccactgaaattaactcagcacgtcgatgtacagggcccagaaaatgcgacgacagtgattcttcttcactcgttaggaacggatatgcatctttgggatctgcaaatgccgcgattaaccgagcgttatcgagtagtccgcctggatattcgcggacatggactcagtgccgtcgacgcgttgcctttttcaatggaagatcttgccgatgatgttattgctgttgtcgatcatctgaacatcaatcagttctatgtcgtcggtgtttcaattggcggcacgatagcacaatggattggcttcaaattaccgcaacgcgtacaggggatggtgattattgatacttcgctggtgaatgccgctccgccctcgctatggcgcgcaagggcggaggatgttttccagcatggtcttgagcaccttgagagaggaattatcagtaattgggtcacgccgcaatttatcgactcgcctgaggctgacggtctgaggaaaatgctgcgcaatacaacggtcgaagctttctccgggtgttctttagctattgccgatactgatttgactaatatgaatatccatggagttagtgcggttatagtcaggggagcggaagataagctgactccgcaagactacgcgcaacgtctggcgaaaaagcgtaatgccgaattacatgttatccccggcgcttcacatttacctaatttagaaaaaccggatgcgcttaccgatgagatcattacatttattgagaaagcgcaaacacattaa

SEQ ID NO: 93174 - DNA, 564 bp, Enterobacter aerogenes
atgaatcgtcggttatttattggcggctgcctgggattatgtgcgggcgccgtcgcgttgcctgccgcgttaaaatggctaggttctgcagatgatactattgagatggagttggatagtggcatcgtcacgataaagttattttctgatattgcccctaatcatgtggcgcggattaagacactcgtacagtctaaattttatgatggtatgcctttttccagggttattgatgggtttatggcgcaaactggtgagccgctacaaaatacacggtttgatccccgcgtaatgccaaaactggctgcggagattaatcatttaccgtttgaacgcggcactattggcatggccagatcgcgaaatccgcacagtgcttgccatcaattttttatcacctcaacccgcgctcgatatttagatcaaaattataccgtcgttggtcaggttaccaaaggaatggaatgggtggataaactccgccgtggtgatgccgagttgggcacggtggttaatccggatgtgattaaacgcatgcgtctggtgactacccataccgtgtag

SEQ ID NO: 93175 - DNA, 327 bp, Enterobacter aerogenes
atgcccagtattactgtatctacatcagcaagatatcggttggattccgccgcctttgctgaattttcgattgccctggcaaatttagccaaagagatactgcaagctaaagacaataatatccacattacttatctcactgctgaaatcggctatggtacgccagtttatgtcgaggcaaaactcagacaagaaatatttcgtagcgagccggtgatgaatgaatttttacatcaggtagatttgttaattaaagagaggatcggcgttgtggcgagaattcgctgtttcctttatcaagccaataatattttcgctaaaaattaa

SEQ ID NO: 93176 - DNA, 837 bp, Enterobacter aerogenes
atgaatgaaaaattgccaatgaaggaccttggggatgtcttagtgactgcggttagcgatggctacttgcaggttgacttcgggctactggcaaatgtagatgaaacggagtgcagggccattcagcaaaaatcctgtcctgaggaaccaaattcagttcatatcaatacctttttagtgcaacagcaggggaagaatatcctcattgatagcggtgctggtggcattaaaggttgggggggcggtttagttaagaatttagctaaactgggcttacaaccagatgatattgatgccgttctactcactcatgctcatcccgatcatattggtggcctggtcaatgctcagggagaagctatatttcctcgcgcggagctattcatcagtcgtgatgaatatgattatctgcaagacgataaccagtttgcgacggtcagcgatcgcgttaaaggtaatttcctgttggcgcgcagcgtttttaaacagtatcaagatcggcttcagttaattgatgatggtgaagtgcttgccggcatacgtgctattcccttgaaaggccatacacctggacataccggctatagcattgtcgggagtcataacagcctattgatttggggggatattgtgcatttcccacatattcagctattaaagccggatgtcactatcgcctttgattatgatccacagttggcagcggagacgcgtgcgcgcatccttgagatggccagctccgatcaagttcttgttggcggtatgcattttggtcagcagggttttggttatattaaaaagcttaacacaggatattgcattattaccgatgagtaa

SEQ ID NO: 93177 - DNA, 1215 bp, Enterobacter aerogenes
atgagttctgtaataacaaaagaaatgagtagtgatgagctttacggtgaagcacatatcacgccagggatgcaaccaatagcggcaggagcattttcagtgcggcctaagcttccttccatcaccggaagcaggttttgggctgcttttttagtttttttatttcatgcatcattgcccagcgatctcgccccattcgctaatccgacgattcaacatatctataccgttattgtcggtaaagctggttggctgggagtgtcatatttctttattttgagcgggtttatcatggtatggtccgcgaaagatacggataccgttggtgatttttatctgcggcgttttgctaaaatttatccaacacatttcctgacatggttggttgcatttttaattggtgcagtcagtatttatcaatataaattatggtcgaccaatctgctgttggtgaatacctggtttaacgatgtacattactttttcgttggtaaccggccgagttggtctttatgcatcgaagcgatgttttatctctcttttccattcctttaccggattatgaagacgatcccgacaaagcatgatttatttgctctgttgttggtcacaatggcatcgttagcagtccaggttgcgatctatctgtgggctgaaccgaataaaatgatgggagcattccctatttctcaacatcatttctggatttcgtatattttccctccggcacgtatttttgagtttctggccggtatgtttgctgcacgactactcatcaatggccgggcaattatgttgtcgaaaacggtatcacttgccttactggtggcaacgtatattgcttctatgtatattccataccaatttagtatgagtgtcgtatttatcattcctgtttgcttgttaattacctcttttgccggcgatgacttgaaaaccaggaaaactgcattgaattcgccaacctcggtttggttaggagagatctcttatgcattctatatggttcatttcttagtactgttttattttttgaatttaacggcaggaagaaagtttgatttagctgaagggattgggcttatcgctgttgctctggttctgtcaattgctttcgccgcttttttatacaaatacttcgaagtaccaatgatgaaaacgatcctggcaaagtttcgggaaagaaggttggtcagcctgcgcgaaccctcgtga

SEQ ID NO: 93178 - DNA, 888 bp, Enterobacter aerogenes
atgaagctaagtgaacttcttgcgttcgtgacggtggtggagacagggaatataacccaagccgcagagcgcctgaatcgagtgcaatcaagcatttcccaccgaatacgaagtctcgaggacaacctggatgtcaccctgttagacaggaaaaccgaaggatgcactcccacagcgcaaggccagatactttatgagtatgcactcaaaattctgaacctggcggacgattgcaaaaacaacatttcctactctaaaagcagtcagttgacgataagagttggaataattgaatgtttacccccctatattattagttccttgattgatttaggccaggagctgggctggaacatcgacatatcaatcggcaacacaattagtttgctcagcgcctttgataaaaacgaatttgatgcggtaattattggcgccggattttccaatacacaacatgcacgttccatattgctctcaagcgagctggtaattatcaccgacaaaaatcaacctcctattactgatatctccagtctggatggcgaagtctttttgctcagtagtaaaaaatgtgcaacgtctacgcgcaacttcaatgtgctgttcaatgaaggcaatatcacgccaaaacgtgtcgttgaatgcggatcttatccagtgctgttctcaagcattgccgcgggtaaaggggtatcgttggtgttgcgctgttctattagtagtgaagttaagagcaagattaagattcatcagctctccgggcagttcaatgacttcaaaatagagttggtgtaccgaacagactgtgcctatctggatatcgccaaattcaccggtatgatgacctctgtgttccaggatcctcggctgcgcgatatcggttattaa

SEQ ID NO: 93179 - DNA, 1428 bp, Enterobacter aerogenes
atggcgcacgctgagtttgataaaataatgatcgatctggttgattatgcctacgagcaaacagcctttaataatgagacgctccggatggcgcgtttttgtctgctggattcaataggctgcgcgatagccgcctctacagatgccgactgttccagactcatgcgcagcgcgcaattcagtcgcaaccctcagggggtcccggtcatggggacgccattgcggttagggccaatcgaagcggcttttcaaattggttcgatgatccgctggcttgagtttaacgatacctggctggcgcaagagtggggacatccgtccgataaccttggggcaatcctggccgctgccgcgtggcggagcctctccgatagcgcccagccagaggtgagtatggcggcggttctgaacaccatggtcagggcgtatgaaattcatggcgtactgtgcctgtcgaactgttttaatgcgctaggtattgatcatgtcgtgctggtcaaggtggcttcggcgattgcagccgcacagatcatgggattatcgaaggatcaggcgctgagtgcgctttccaacgtgataattgatggccatgcgctcagaacttaccgacatgcacctaatgcaggcacccgtaaatcatgggccgccggcgatgccacagctcgcggactgcaattggcgctgtttgcccaggcagatgagatggggtatccgacggcgttaacggctaaacgctggggatttgatgatgcggtgctacgcggtcagtcgttcaacctgacgcgagatctctcagacttcgtcatcaataacatattgtttaaagttcccaatcctgctgaatatcatgctcagaccgcggtcgaggcggcaattaacctgcgtgaaaaaatacttgccgccggttattcacctgaatcaatcgaatatgttcgcgttgaaacgacgcgtccggcgattcaaattattgataaatcaggtgtgctgaataactcagccgatcgcgaccactgcctgcaatatatggtagcggtagggctacaaactggaaatctgacgattagggatttccatgagccattggcctgcgatccgcaactggaagccttacgccacaaaattacctgtactgaacgtccttcttttaccgaaagctactacgacccagaaaaacgcgcgatcccgaatgcgctgtacattaaatgtcgtggaatgacggaggagattgccgagcttattgaatatccgcttggtcacgtccgccgtcgtgaggagtgttttgacgcactgctaaccaaattccatctgaatctttcagacagcccgctacgcgatcgggcggacagactggccgatatcctgaccactggcccggcgcttgagactatgtctgttaatgagttcctgaaacttttttcctggcattaa

SEQ ID NO: 93180 - DNA, 1143 bp, Enterobacter aerogenes
gtgaaaaaggcaatactggttggctgtggtgcagagattggcgcaaatctgttgattcaaaacgatccgcagaatgatggtttcgtggtgcagaccgtagtaacgaatccgcctgctactgataaacactatccggagttacgtccgattgatggcattgtggcgcgtctggcgatggcgcaacctggcattcaatcccgggtcgagataatcaatgacgatacgctgcaaattgacggtcgtgaaattcatttcttctttggcgatttagccaaagtgtgcccacccgttaacgggcgctttgatatcggttttattgccaccagcaaacaggatatggatcagcacagtcctgtggctcgcaacatgcaggagctggccaatgtagtgctgggtgtcgctgaggctgatagcctaaaaagtatttatggctgccttggcgatctgacgagtgacgatatcagtacgattcagcgtaaggtagtaagttctggtatgtactgtctgggttcctgccagaccaatgggatgcatgcttcattacgtgttgtggttgaggcactaaatgctatccatggcaacgcttcgcaaattgtgtcggttgaaaccgatattgtgcatccagatacgccgaatggcgtacttggcactcgctcctttgaaggccgtatgcaggatgctcgcgacaatctgcgtcccagcttctcgcaaattgccatgagccagaaaaaagttatgccgtgggcgccgttggtgaatacggtgtcgcttcgcgcgccagttcatgcccctggctatcagattaaccgctttatcgtcgaagataacggtgctttaacgactggtttaattgaagccgctattgagcgcgtgaacaagctgcatcctcatgtagtgatggcctcgcggtcgcctcttgggggacgcgcttatgcttatgagcgccgctgttcgacaattctctctgacgctaaccatttactcattcttcgacccgcatatctggcgaagcagaatctgagcgaagtgattatccagtcctttgttaacaattcggtagggtataccgcagttgttcgcgccgttgcgcgcaatattgcccaaggtctaccggtggcgacctttcaggagattgaaaaatga

SEQ ID NO: 93181 - DNA, 981 bp, Enterobacter aerogenes
atgacacgttcccataccgttgattttttaaattctggttttgtggtgaaaaccgccatgtctcctgatttcaatagcaagctaaaggctgaggttgagcaaatccgcgcgttacatactctttatccggaactgatggtgccggtgttacatgagggggttgccgccggacgtcagttttatgttctggaaaagaaagcctcacttccgctatcggctatcgtgcttgatgaacaaaggacgctcgcggcgcggcgcaaaatagttctgaatgccctggagaacatccaaaccgcgattggactggagatagaaaaccaacctgcacgggtcagcgatatgccagccaggttgcaggaggagtgggaagctacgcgatttgcgcacgatctgtttgataaaccggttttactgaatggcgtccgttttagcattaccgccagagaggttatcgaaaaagcgatcgagatggcgcgtagtgaagaattccgatcggtagaaaaggctcatttcaattttcactttggcaacgtgctttatgacgaagaacgttcattgactcatttcatcgatcctgatttttccgtcagtggcctcgatccccttttcggcttttcgcgctttgctttttcgttctggcatgagctggcagccgaggttgaagacgcagtgaaaatggtaccgatgtctgacgcactcatgtttgttctggcgaaacaggattacggcaatattctcagcgaaattccggaaattggcggtatttccgggctgctgccgataatgggcgagaatatgcgtcatcgcttttatgtcctcaccgcttactgcttcctcaggagcatccgtattaatggcagcaagcagccgtggaaaacgccgcgctctccggttatcgcccggcctgaggaggtacttatgcttgggatgctgacctatctcgaaggggcgagcgtcgcgagcgaaagtctgtgcgcgtaa

SEQ ID NO: 93182 - DNA, 1383 bp, Enterobacter aerogenes
atgtcgttggtaagtagtagtactcttgatcaaggttttgaggcgccgaggcgctatttagccgccgcggccatattaattggcgtgctgatggcggcgctggatagctctattgtcaatatcgcattgcccaccattgccagtgcgttacaggtcgattcggcgtccagtatctggatcaccaacggctatcaggtagccagcgcggcgacgatgctgatttgcgcgtccctgggcagcagaatcggtgagaagcgtttttacacggcgggaatggtgttatttacgctctcttcgctgggctgtagccttgcgccgacctttggcgtactggttaccatgcggatactacaaggggtaagttatgcggtcatgataagcgtggggctgggattgtaccgggttatttttccacctcgcgcgctaggaacgatattcgggctgaatgcgctggcctttgcggttggcacggcaatcggtccggcgttgggcggacttatcatttcgtatctttcctggccgtggcttttctatatcaatatcccgcttggcggcgctgcgattattttctccctgatttcattaggggcggataacgaaaaggagaagggctttgattgggcaggggctctgagttcggcagcggcattgggcttgatggtggtggcagtcgatcaaattggccgctgggagagcctgacgcttatctattgcgcggcggcgtcagtggcgttatttgctttctttattatcgtccagacacgagcaaagcaccccttattgccgcttgatatatttcgttcacggcaatatagctttgcggtgctttcatccgtctctatgttcgtggctcagggaatggcgctggtcggcttaccgtttgtgttgcaacatagctatcactattcagtgcttgaatcggcgtttatctttacgccgtggccggtggctgtcgccttctgcgccccggtagcgggaagactgtcaaaccgttttaatccgacgcaaatttctaccgtcggggtggttatcttttgtcttggcttagggtcgttggcgctattgccgcacgccgcgacggtgaatgatttcttgtggcgcgttgccgtttgcggggtggggtatggcttattcctgccgccaaacaacaaggagatgtttgccaatgtttcagcaaatcgcacggtaacggcctccggcgtgctatcaacggccaggacgacagggcagtccatcggtgcggcgctggtggcgatggtcattgcgctgttgaacggcttaaccggcccgggcggcgcacagtttgccgtttatgtgtttggcttcgcctgcgctattgcggcaatatcctctattgccagcaccttacgcttgcatcgctaa

SEQ ID NO: 93183 - DNA, 1164 bp, Enterobacter aerogenes
atgagtaaactttcactggaacgctctggtaggcgaaaaattatatttatcgccttgctggttgggatcattattggcgtggtgttgctggccggcactgcgactattatgcataaaaccagcgataccgaattttgtgtgtcgtgtcataccatgcagcagcctctggcggaatatcagggcagcgtgcatttccagaacgataaaggtattcgcgccgagtgtgccgattgccacgttcctcatcagccgatcgattatatgctgaccaaaattggcgccctgaaagatgtctggggtgaaatgaccggcaaaattgacaccccggaaaaatacgaggcgcataaactggcgatggcccagagcgtctgggatgggttgaagaagagcgattcggcgacctgccgttcctgccacgactataaagcgatggatattctggcacagactcctgaagcccgtaagcagcatccggtcgcgatcaaagagggcgaaacctgcatcgactgccataaaggcgtggcgcatattctgccgaacatgagcggcctggcggcggcaggggccagcgagctcgctaactcggcggcgaaaaccccggcgaccgcgaccaccctttacaccattcagacccagccgttctggctgagcgagaaagcgggcgaccataacgacggtaacctgatggcctccactgaagtgaaagtggtgaaacgtgaaggcgacatggtgctggcggatgttcatggctggcaacaggatggcgttaccgaagccttctacgccgcgcgcggtaaacgcatcatgagcgcgctgctgggcgaagaagctcgcaaagcgttaaaagtgtctggctccgttaccgatgaagagactaaacaggtctggcatgaagtcgatctgcaggtctggctgcctgcgaaaaatctgattggcgatcagcaaaaaatctggagttacgcttctgaattaatggctaacaactgtaccggctgtcatggcctgaccgagttgaatcgctttaacgccaaccagtggattggggtggttaaaggtatgtccggccgtacttcactgactcaggaacaggttcgtctcctgacccagtacgtacaaaaacatgcgagcgacatgccagcagcggccaatcaggacaaacaataa

SEQ ID NO: 93184 - DNA, 324 bp, Enterobacter aerogenes
atgttctcacgtcttacccatatatgggataaaaacccgggccgtaagtaccctgccatacaggatatgctcactatttattttagtaacgagcacgatgattttggcaattcgattaatgagattatcgacagatatcgtgactatagtatttcatcaattgaagatgctaaattagaaatttcctctttattagaaatcgaagatgaagaagcgcttagctccattatgaagaaaattgcgaatgacaggttccatcccgaaccgtggggtgaaacatggcgtagcttcctggagaaaactctttttttattaaaacattag

SEQ ID NO: 93185 - DNA, 267 bp, Enterobacter aerogenes
atgcttgaactccgtcctaattgcgaatgctgtgataaagatctgcctcctgaatcgaaagaggcatacatctgttcattcgaatgcacattttgcattgattgcgtgacccaacggcttagtggcctgtgcccgaaccgcggaggggaactgctgcgacgtccaatacccccgaagcatctctcctgcgacatcctgcatccagtcagcgtaactataaacagtagagatgaaaactatattctctctttgcttattacgtcctaa

SEQ ID NO: 93186 - DNA, 1890 bp, Enterobacter aerogenes
atgaaatcagagccgcttaccgtcaatcaactcttccagaatcgtcggcagtattgcgttccattttatcaacgagcctatgtatggacactaagagaccaatggtcagctttattagaagatattatcgataaggctgagagcagactttctaaaacaaaaccaacgcctcacttcctcggggccatcgtgctcgaaccacaatccaaagacagtctattgggggtggatacgtcacacatcattgatggccagcagcgactcactacacttcagtatgttcttgcttccatccgtcttgctcttcgggcaacaggactttcctgcctggagaaaatcgtattgccttgtttacgcaacataaacgaagagactatgcgtaatgtagacgttgaacgtttcaaactttggccgacattccgtgatcaaaaagactttattaaaagtctcaacgttgactcagtcgaagctcttcgcgaggtctatccggaaaacttcacacaacacgggaccctgcgtaagtatttcagccaccccccctcactggaagcattatggttctttagtgacgcttttattcagttcatcaacgcggaagggcaccctgtagcctcaaatgcagaggctttgattaatgcagtcctgactgacctcaaaatgatcaacatcaccctggaggaaggagatgatgctcaaatcatttttgaaacgttaaatggccgtggggcagaacttcatgcaactgatctcattcgcaattacatctttatgcgcgctgtaagtgacgatattgatgctgcgatgttgtatgagaatgactggaagccttttgaagatccctactggactgaaaatcaacgccgtggtcgtatttataaaccccgactggaatggttaattcacgccacgctacaggctgaaaaacgcagtgaggtggatttgtcgcgcctttacaatgaattccgggactttgtgtctaaggatatgcctgcgcgccgcgccgatcagcaggtcgcgcttctcactcgctatgctaatcaatataaagaactgatcggagatagtggtacgactcctgtcgcgcgctttggccgtcgtattgcagcctatgacgtgacgactattcatcctcttgcgctcctgatttcagtcactgatatctctgataccgaaaagacaatcatgtttaatgatctagtctcatatgttgtacgaagagccgtgtgtgggctgacacctaagaactacaataacgttttcatggctgtcttacggcacctggctaaaactgccgtttccagtgttgagctacgctacagccttaagaatctgaatggcgaagcttctcgctggccgactgactcagaattccttaatgcctgtatcaccgcacagctttatcctggcaggcttgatacgccgaagatgcgtatgatgctgacagagcttgaaggggaactgcgccgtcaggttaaaacagaggaaccagatgttcctaaactttccagccttgatatcgatcaccttatgcctcaacagtggttctctcactggcctctcgaaaatgggcaatctgttacggatacagaagcatcagcggttgctcagatagttcttgcaggggcggagctgacgcctgatcaggaactggtgcggaaacggcagcaagtaattgcaactttgggaaatcttacgttacttaacctcagcgtgaatcgatccctccaacactcagattttctaaagaaacgcgatgcttttcttgcccataccagcctgcgtttgaacgtgcctctgaccgttaaagacagatgggatgaggaacaaattctctcccgtggtgcgttgctagggaatgccgcacttaaaatgtggccgcgagctgattaa

SEQ ID NO: 93187 - DNA, 1371 bp, Enterobacter aerogenes
atggaatattgtcattgcaagacgctcgaagaactcaaaatagttattaaacaatatgggccaggagttctctacagaggacaaactcaacattacctatcttcagatggctcgccctcaatgcccacgtcatttcagcgtcaagggtgcgtacccgatttgatgattatgtggacctattatgcaaagagagccttgcaacacttagtacgcggttggaatgataccggcgataatgcaaccaaccaagcaatccttcagcattatgggtttcgttcctttttccttgatgttagtggcgatccgcgtgttgctgcttggtttgcatgtaataaatttgattctaagtatgtggtcaatttggtagaggattgctttgaagatccagtttggttgcgtactctaaatgcttgtttcgctccatccgaagatattggccacatttatttaataagccagaagttactacgacaatacaatcttcaggctgttcatctatccgaaattgcgacagatcatggcgctccaagatatgtgcgacaggatgcgtacatggtggggcctttaattcgtgaagggttagatggagactgtattatttgtcatatcagcgctccagcagaggttctacgtaaatatgcggagggatatagtgttggctggctatttccagaaccatgtgaggatcctgtttatcgcgaacttttggcaatgccatgggtgaagatgcgacacctttcggatgaaggtcttgaggcgttcaagaggtcattggagttacctgagtattcctgtcaccttcaaaagcgcatgccttctagaagtgcaatgtatagacccttttggactagggaccttccgcctccggacggtttggccactatctcttcacaaatagttcagattctatgtggaagcgccctgtatcatggtgtaagtgacccttgttttgttcttcctgaaatcaacaagctattagaaaagtataatgagatatcaattgaacttgatggacttgtttaccatggtatggacacaagatatgggaagggcgttggaatagtaaaaatgcctgaaaatattgtatgtgtatttgaatatggtatcgatcatccagggttgcgtatcatgagtattggtcgcttctgtgggatgcactatcgaatcgatagtaacggctgttgggaacgtgttattcatgaggaagactgcaagtgtggttcagaacatattgacaatatatccttacttggccggattgatgtttccttgaggaacaagttactagaagatatcggttcagatttatatgttcagaaaggtattgacccgacctctgacaaattggctacatggggggaaccttactag

SEQ ID NO: 93188 - DNA, 366 bp, Enterobacter aerogenes
atgacctatggacaggcctatcttaaaggctggaaacaggcttttaatttcgttggacgctctgaccgccgtgagttctggtcattttttcttatcaacgccctgattgtggcaacccctttactcatctggtatctggctacgctttatgactaccggtatggcgttttgagtctgtttctcttcccgttggcttttgtgcttcatttaccgatgattatcccaatattggcggtaggttttcgccggatgcatgatattggccgctctggtttctggtttttaccggggatcgttttcccggtgtttattattttatctttggcaatgtgctgcctgcgttcagcgccggaaccgtctcgctaa

SEQ ID NO: 93189 - DNA, 300 bp, Enterobacter aerogenes
atgacaatgctgaaacctgttttgctggcgctttctctgctgctggtcgctcctgcgttggttcatgcagatgaaattaccctgatcccggcggtgaagctgcaaatcggcgaccgtgatgattatggacgctactgggacggcgatcgctggcgcgatcatgactggtgggcgagccattatgactggcgcgacgaccgctggcgtccgcatgatgattatcgccgccacgatcgcgatgacgatgacgatcaaggccatcatggtcatggccacgagcggcatcaccacgacgactaa

SEQ ID NO: 93190 - DNA, 264 bp, Enterobacter aerogenes
atgaaggccactctcaacatcaccgtcgatggccagcctctgacggtgccggaagggatcagcgtggcggcggcgctggcgttgaccggcgaccccaccacccgccaggcggttaacggcgagctccgcgcgccgttttgcggcatgggcgtctgccaggagtgccggatcgccgtcgatggcctacgggtgctggcctgccagaccctgtgccgggccggtatgcaaatagaaaggagccgcgatgaacacgctgcgctgtga

SEQ ID NO: 93191 - DNA, 768 bp, Enterobacter aerogenes
gtgatctactcggtaggtattgattccggctccaccgccaccaaaggtatcctgctggcagacggcgccatcgtgcgccgtttcctcggcccgacgccctttcgccccgccgatgccattcacgaggcctgggagacgctgcgcgcgggcctcgcggcaacgccttttttaaccctcaccggctatggtcgccagttggtcgatttcgccgataaacaagtcaccgagatttcctgtcacgggctcggcgcgcgtctgctggcgccgaaaacccgcacggtaattgatatcggcggccaggacagcaaagtcattcaactggatgcgcagggcaatctcagcgactttctgatgaatgacaaatgcgccgctggtaccgggcgctttctggaagtgatttcacggaccctcggcgccagcgtcgaacagcttgacgccattaccgaaggtgtagaaccgcacgccatcaccagcatgtgtacggtttttgccgaatcggaagtcatcagcctgcgttccgcgggggttgccccggaggcgattctggccggggtgatcaacgccatggcgcggcgcagcgcgaactttattggtcgtttatcggcgcaaggaccgctgctgttcaccggcggcgtcagccactgcgccgccttcgcccgcatgctggagactcatctcggcatgccggtcgcgacccatcccgacgcccaatttgccggggcgatcggcgcggcgctgatcggccagcgccagcggaggcgcggatga

SEQ ID NO: 93192 - DNA, 255 bp, Enterobacter aerogenes
atgagcaaatatctattcttattccattcaacagtgggcgtcgtgcggatgcgcaaagccctgcaggcggcagggataaccttcgaggtaaaggatattccccgccagctgcgcagcggctgcggcctgtgcatattgattgaggggagcgaagaagcggcgcgaagttggataatcgccgggcatactgcggcgctttatcagcaaaacggggaagcgtggcgctgcatcacccgcttcccgcaggaggattaa

SEQ ID NO: 93193 - DNA, 1065 bp, Enterobacter aerogenes
atgtctattaacaccctggcgcacgtctttactccgcacggcaatatcgtctacacggccaatgattttcgtcagacggtacgcattgccgtcgccgggaccatcgcgctgagtatttcgactttctacgacgtgcagtacggcgtgtttttcgtcgtttatccgttgatgctgatgtcgctggtgccggtgtttaaccgtcacgtcgcccgacagtttgtgttcagcgcggcggtgaattgcgtcgaaatggtgctcatcgtcggctatctgtcgcagtggccggtgataatgacgttagttgtctttggtctgtatgtgatgcgctttcgctttatgagccaagggccgctgttcctgctggggtcgatgggcgtggtgtgccagagcacgatgctcaattttatgagctatccctccagcaactggcacacgctgatgttctccaatatggaggcctgcgtgatggcggtggcgctgagcgcattgctccattacctgatcccggatgtcgaaccgcgtaagccgccgccgcgcattgagaaagacgccgcgcggatccgtcatgaatcgctgctttccggcacggttgcgaccattatctttgtgatcttccagatctgcgatctgagcgattcgctatcggcgctgatggccggggtgctgatcctgtttccgatgcactatcgcggcgcggtgataagctcgatctggcgtgtggcgggggtcgtgttggcttgtctttacattctggtggtgcagctgattatctatgatttcagcaaccacatgatcctgatgatgccgctgattggtcttggtctggcttttagcgcccgcctgcacgtgatggaaaaagtgggcgcgggcgtgggtttcgccagcattactactatcggtattatgtttggccagaacctgcatccgaatcaggatctggtgttcagcgacctgtaccgtattacttcggtcacggtctcgctggtggcgacgctgaccatggtgtttctggtccatcgggtactgaactgcttcgcgccgacgcgttttgtagtgaccgattaa

SEQ ID NO: 93194 - DNA, 414 bp, Enterobacter aerogenes
atgtcttcgaaaacaaaatgctggttatggatgctgctggttatcctctccgaaacctcggcaacctcgacgttaaaaatgttcggtagcagcgaaggcagcacaaaaatgctgctgctcggcctgctgattgcgctctactgcacctgctattactcgctctcaagggcggtgaaagatatcccggtcggcctggcgtacgccacctggtccggcaccggtatcctggtggtctcgacgctgggaatggcattctacggccagcacccggataccgccgccatcatcggcatggcggtgatcgccagcggcatcgttatcatgaacctgttctcgaagatgggttccgaagagagcgaagaggctgcacccatcacgccagtcgcctccatggataagaaaatcgccaactaa

SEQ ID NO: 93195 - DNA, 591 bp, Enterobacter aerogenes
atgatgaaatatattaagaagagcctcgtgttgagcgctatcatcaagaaaaaactggcaaccagcgatctgcaacacctggaacaactaaaggatcggttaaaaagccgattcggcgcggcgcctggtatacacatggccggtattcctatcgcgatcagcatgatacttgctatcttttgctacgcgatgccccagatttatgtatggatgctactctttcgctggttaggaatacctgaatacaaagtactgatgggcgtattttttgcagcgatcgtatattgcgtagtcatcatgactacaaccttactgactgctcgaggctctttaaacggatataaattacatttgattattatcacgctgacaggaataactagcattatctactttatcggttcctggttttcatttttattcggcactgtagacaattatacgccgcagataacatctgctttaggtttgatgtttttctgcctgaatatcatgtggatgaattcatcatcattttaccagtcgatcgtcttgacgttacataaccgcgtatggcgtaagcaattgaaaattgaaaaacagcatatgtga

SEQ ID NO: 93196 - DNA, 1395 bp, Enterobacter aerogenes
atgaacgatgaaagcaaaaaatatatctctgttatttttaaggagtggctaccgctgtatgacagcctgacgccagccgttaaggaggtacttaaaaatatcgcagaggagcaatcggaagcgttagcggcccggttttatgattttatttttcaggatccggatattgcccgccacctgacttatgatttagttcaggaaagactgagccgctcgctggcgctatgggtgaaggagatcctgaccagcgacaaagcgcagttgccggcgctggcggaacggcaatatcagattggcagcatccacgcgcggatcggtatcccggcggaggcggtgctgcgcggcgcccggcaaattaaggccgggcttattgagtatatccgcagccacgttaacgaccgccagattgccgtcgatgccatctattacgctattatggcgattaatatggccgttgagatgatgtgccatgcctataccttatcgcactatcgggcgaccaaaaacgaagaggcttatcgcctgtatagtttgatggacaatgtcccgatggaatatggcaaacagcaggcggcgctttccggttgggaaaatacggcaatttttaatattgttagcgaaaataaagcgcatactaacgctacgttattatctgaatcggaatttggtctctggttccgccataaatgcgtgcgctattttaacaaaaatagccagatggacgaaatcgccgcattaatttcgcaggtcgacgacttattaataggatggcgggcatcagcctctgccatggattataaaaatacacaaaacctgattcaggggatccatattcattgccagcaaatcggcagccaactgggcgtaatttttagcagcctgtcgcagatgcaaaacggcaaagatgcattaaccagcctgcttaaccgccgctatttgccggtggtgctgaagcatgaagtgacgctggcgatggagcatgagttgccgatgacggtggcgatcgtcgacatcgatcatttcaaaggcattaacgataactggggccatatggtcggcgaccgggcgattaaacatgttgccgaactgctcagcgacaatatccgttccagcgactatatcttccgctacggcggggaagagtttctgctggtgctggtggagaccggcgtgtcagaagcgtttaccatcctcgaccgcctgcggaagaaaattagccaactggcgtttaacgttggcggcgatacgcagatcccgatcaccgccagcattggctacgccgtgcactccggccatcccgattacaacctgctgttgcgcgatgccgataatgcgctgtacgccgccaaacgcgaagggcgcaactgcgtgaagatgcataaaggcagggtgtaa

SEQ ID NO: 93197 - DNA, 1188 bp, Enterobacter aerogenes
gtgaaaagcactcgctatttcaccctgaactattccggtttcaccacagcagcctctgaagggcaaacctatttgcgcctcattgctggcgagcatgtcttttataccaataaacgccattttagcgatcccacgctttttgaccgcctgcagcttaactaccccctgcacatcggcgcccgccgcttgcgtaacggttgctactggatccactggttgagcgacggcacaacgctacttgaacctgaccaattagcaaagccatgggcccggccgctgctgttggttagcctactggtcctcatcgcaacgctcatccctgtcatttacatcgattcagaatggggaaagatgggcttcggcattatcgcggtactggcgttaatcgcgctgctgtctggcctctgcgagctactgtttcgcccggcgttaaaacgcctccccgatatgcgcgatctgctggcgaagatgaatttggcgcgccgcggcgacttctcattttgtcaggcgatacaggcaacgccgccggtcgatcgtcaggcggcgctggcttttaccgaaacgcttccgcaacgctatgccctcaggacgggaaaaattagcaatatcatttttaagaagtggttcacgggaaccccaacgcgggaataccacggtgttgggatgcaatgcgatgctgcgccgctggctttcttctggcagatcggtttcgccaatttcggcctgcatccccttttttaccgccgtcaaccgccctttctcgctatcggcgatcggatagtcgccgtttaccaacgggaaaataacgacatccatgcgttatacaacgtcagcgacgggggcgcttttctgaaaaatcattcctgttatcccggcgaccggcaaatgtcgctactctataacctgttctatggcatcgcgctggtgctgtacttactcgtacttggcatggagttaaataacccctacaagtcaggcagggatttttggtggttgcttcgcgattcactggacatgttgtctctcttactactttgcttcagcggaacgctggtaatcctggagcttatcggcccagttgcccgctgtttgtcacaaagcgtacgtgactggctggcgctgcgaacggcggtaagaggttacctcacgcgagtcgccgccaacaccccattacaggagataacataa

SEQ ID NO: 93198 - DNA, 975 bp, Enterobacter aerogenes
atgattaccctcgcggtattcgtgctgggctatctctactgcctgacccagtttccggggtttgcttcgacgcgggtgatttgcaatatcctgaccgataacgctttccttggcattatcgccgttggcatgaccttcgtgatcctcagcggcggaatcgatctgtcggtcgggtcggtgattgccttcaccggcgtgtttctcgccaaaacgatcggcttttgggggatctcgccgctgctggcctttccgctggtactggccatgggctgcgcctttggcgcgtttatgggattgctgatcgatgcgctgaagatcccggcatttatcatcaccctcgccggtatgtttttcctgcgcggcgtgagctatctggtctcggaagagtcgattcctattaaccatccgctgtatgacactctgtccgggctggcgtggagcatccccggcggcggccgcctgagcgcgatggggctgctgatgctgctggtggtggtgctgggcattttcctcgcccaccgtacccgctttggcaatcaggtttatgctatcggcggcaacgccacgtcggccaatttgatgggcatttccacgcgtagtaccactattcgcatctatatgctgtcgaccggcctggcgacgcttgccggcatcgtcttctctatctacacccaggcgggctacgcgctggcgggcgtcggcgtggagctggacgctatcgcctcggtggtgataggcggcacgctgctgagcggcggcgtcggaacggtgctggggacgctgttcggcgtggcgattcaggggcttattcagacctacatcaactttgacggtacgctcagttcatggtggacgaagattgccatcggtatcctgctgtttatcttcattgcgctgcagcgcgggctgacggtgctgtgggaaaatcgccagaatgcggcggtgactcgcgtgggtggggcggtgaatcgctga

SEQ ID NO: 93199 - DNA, 243 bp, Enterobacter aerogenes
atggccacgctcaatgttcgactggacgataaactcaaaaaagaggcttatgccgtgctggagaaactcgatatgacgccaacggaggcggtacgcttgctgtttcaatacattgcggaaaatggccgcatgccggtgaaaagtatgaccatcagcgatggcgaagcggcgttgttacgcaccgttcgcgagcggctggagaacccacggccgggggttaaggtgagtctggatgacctatga

SEQ ID NO: 93200 - DNA, 285 bp, Enterobacter aerogenes
atgacctatgaactggagtttgatccacgagcctggcgcgaatggcagaagcttggcgagacggtcaaaaaacagttcaaaaataagctccagcaggttgtgcagaatccgcgaattgagtcggccaggctgagcgatttgccggattgctacaaaatcaagcttaaggcgtcaggttatcggctggtgtatcaagtacgagatagtgtggtggtggtttacgttattgccattggcaaaagagagaaagcggccgtttatcatcaggcgaataaacggctctaa

SEQ ID NO: 93201 - DNA, 504 bp, Enterobacter aerogenes
atgaatcttgctgcgccacagacctttactttacgccgcattacggcggcagataatgccgccatcgcccaagttatccgccaggtctccgcggaatacggcctgaccgccgataaaggctatacggtcgctgatcccaacctggatgaactctatgaactttatagccaaccgggctccgcctattgggttgtggagcaaaatggcgaagtggttggcggcggcggcgtggcgccgctctcgtgtagcgagtccgatatctgtgagctgcagaaaatgtactttatgaccgcggcgcgcggcaaagggctggcgaaaaagctggcgctgatggcgatggatcacgcccgcgagcagggttttaaacgctgctatctggagaccaccgcttttttgaaagaggcgattgccctttatgaacatctcggatttgaacacatcgacgggccgctgggctgcaccggccacgtcgattgtgaagtgcggatgttgaaaacgctgtaa

SEQ ID NO: 93202 - DNA, 1197 bp, Enterobacter aerogenes
atggatattactttagggaagaagccgcgtgctagtcattattttgtctttcacggacgggctcgcgcctatttctttatttgtttggtcaatattatactgtcagtaattactttagggatattcattccctgggcatgggtacgtagtcgccgttacctttgtgaaaatatggaggttaacggtaaccgttttgcttaccacgggaagggcttcacgattttacttagctggctgctaatgtttatcgtgctggttttactcagtctggcgcttgccattttctctcacggcagcgaagaatgggtgacgttagcatatcttatcctgctgccagtcatggtaatgaaggggttaagctaccacgcgaatatgacctcattcgctaatattcgtttcgggtttaaatgtaatctgctgcgcgcatggtggattatgcttgggttacctttgctgatagtcgtactaacggtgttgatcctcgctattcctggaagtcgtatctggttaggttcaggcataaatgacatgctagtgggtttcgttgtgctggttttactggcactgtgtgtgatggccgtcgccagcggggtggtttacagccactggcttgaactgatcggcaaaggcgcaagcttaggcaaaaataaatttaatatttatattagcactaagcgttgcgtcgtggcttttttatgggcaatggtaattctattgccatttattatactgtttttcgggtttttcgtttccgcattcatgcaaatgattacaggatgtatgttcggcttgtgtaatgaaaatacggttctgtttatggcattacggcatcttggaacggtggcaggagggaatttattcctcaccatcggcatcgtgttagccatgacgtatatccaggtagctttacgtaatcacgcgtggaataatttggtgcttggcgacagcattcattttcgttctactctgacgttttttggtcttgccccgcgtttattggctctgacgtttctttctctgctgacattgggtctggcgtacccctggttaaagattaatttgatgcgctatattgccgccaacaccgaggtaatgggtgacgttgaaacgctcgacctgcagcaagatgaggcccataaaccaccagtacctggcaaattgttcagcggttttttacctaacctgccgttcttataa

SEQ ID NO: 93203 - DNA, 1677 bp, Enterobacter aerogenes
atggcactaacagatcgcgctatagtccacgccaagccttgtggcaagccgtataagctcagtgactcgcatggactttacctgctggttaaccctaacggttcaaaacgctggtacatcaagtaccgctttgtaaacaaagagaaaaagctcgctttaggaccttatccgcttttgacgcttgcacaggcaagacgcatgcgtgaagaggcacaattattgctgatttccggcatcgatccgagtgcacaccgaaaggctgaacgtcttgctataacgccggaacatacgtttgagtctgtggcacgcgaatgggtcaccagcaacgtgaactggtcggtagaacataagaagcgggtgctgcgttatttcgagctttacgtctttcccacgaacggcagctgcgacatcaccaaaatgaaggtcaaagacctgctggtacccatcaaagaggtggagaaagcgggcaaactggatgttgcttcccggcttcagcagcgtaccgcctgcgtgatgcgctacgccgtccagaacggcattatcgatcataaccctgcatcagatttaaccggcgcagtctccacgcccaaagtacgccaccaccctgctttggatcttaatcttattcctgattttctggagagaatcgaagactacaagggacgtaaactaacgcaactggcggtaaaactggcgctgctgctgtttatccgctccagcgaactgcgctttgcccgctgggatgaaattgatctgcgtaacgccatgtggaccatccccgctgagcgtgagccgatccccggcgttaaatattcagcgcgtggggcgaagatgcactccccacacctggtcccattgtcgcgtcaggccatcgaactgctgcacgaagtgcggcagcattgccgaccgggaactgaactggtattccccggcgatcataactaccgcaaaccgatgagcgaaaacaccatcaacaaagcgctgcgggtgatgggctacgacacccagaaagacgtctgcggccacggttttcgcactatggcctgtagcgcgctggtggagtcgggcctgtggtcaagcgacgcggtagagcgccagatgagccatcaggagcgtaagcgcgttcgggcggcgtatatccataaggcgcagcatctcgaagaacgtcgggagatgatgcagtggtgggcggattatctggatgcgaaccgcttcaggcatgtggtgccgtatggctttaaaaagtcgccgggaggcacactcgaccatatgagcttccaggagcgtaatgaccggcagctagaggagctgaaagccagaatactggccgactcggaatggctgacagcgtctgagttatcggcaaaagcgggtttccgttccgccgatcctgatgctggtccgaaaggctggaaagcggccgggaagatattctcgctgaaggtcgacggggaggatttgtatccggattatgttctggatgagaaagcgcggcctctcaaggttgtccgtttgattctttcactgtttaaggagcgtaaaacaccgtgggggctggctatctggttcggttcggcaaaccgcaggttgagaggtgggaggccgaaagatttgttggtgtcaaagtcagagctggttctgctggcggcgcaggatgaggtggagtcggggggatag

SEQ ID NO: 93204 - DNA, 933 bp, Enterobacter aerogenes
atgcacagcgttaatttctattctttcagaattctcacccataaaggtagcaggaaaagtaagaaacttggagcattggggctaagcaataaaaaaacagcttataaaatacttgaagaatatttaacgttacataaatttagcccaatagaatacggagtgtctaagacaaaaatatctttggaaggacataagaaaataacatttgataacgctaaaagtttagtccatggttatataaaagtcggcaaatatggtgagagtagtgaaataaaggatattaaactgaaaaacactcaatatacgactaaagttgatgacgtcactttaagagaacgctatgttcttatttatttacccgattctttagaagaaggcattatagccttccattcctcagataacgttagcgctaaaggcactatgtcagatgtcttggtcgaatactttaagaaaaaatatcaacttgaagcgagaataaatcctctttgtcataagaaaattccgcagtatattcttgactctgaagtgaagcaaatcaaagctcttggatatgaagctccgagcgatatagctgattcctttggcacaaataaaaccaatgttaaaactgacttggtcataaaatacaaccaaggatatatgggtagctttagagacttacaaaacaaaaaaatatccaatataattgaagttgttgaagataaatgtgatgaaataaaggttacactacagttaggtagcagaaatgttgttttcaaatatgacacgataatcaaaaagggaatttctgttgaactggatgatagtacactcaatattgatgtttctactggcatcccagaattaccagcactccatgacacagtgcgctcattggctaatgatatactcttagagatccatagcggaaaccaaggagttacgatatga

SEQ ID NO: 93205 - DNA, 555 bp, Enterobacter aerogenes
atgaataaaataaatatatggcaggtactcctaaaacattataaaactatgacggaccaaagaggggtgacattaaggcaggatatatttattcactttttcctacctggaataatatccgttgttgtttgtatactttatgggacaatgaagccatctatttcagcagtttttgtaaattttggagctatcacgacggctttgctcatgagtgctgtcattatgatatatgaccaaaagcaaaaaactatttttaaaatagcggatattatagaaaacaaaaaaccaacaactaacctacctgcgttggagaataataaaaaagtatatgagcaattatgccataatgtagcatacgcgatattaacatcggtgatattggttattgcatctgtgattatttctttttttcctgagaaaaaagaaaccctcgaattactgtatttctcagttcccgccttcatactcagttttatagcttacgcggcttttttcaccacggtgataacctttttaatggttattaagcgattcagctttatacttgataactaa

SEQ ID NO: 93206 - DNA, 1920 bp, Enterobacter aerogenes
atgtggagtatacctacttggagtctggcagttgatggcttagtaacggcattttcaatggcagaggggaaagataaaaaactctctaaaacttactctctgagtggtaaacgaagcagatcagataaactgttaagcagaattctgggctctcttgcgggtgaaaacccgcaactaaatctgctaataaacctgtatcttgacgtgattcagacaggattgcgagagctccatacccagcaactgtatccagtcgtatcagacaaagtgtgtaacctagcattctatgaagtctgggttgtaccatttttgttgtccatgaaacaacacattgtcaatgaaggtcctgagtctgagcagttatgccatctgatatcgctacttctggaatatcaggccgtaagccataaacaaacggtagacagatttttaaataaacgggttcttgcgttgttacctcatggatgctgcgtcgacttcaaaatgcaaattcataaaaatcgtaatcgtagggtgttctcatttaatgcctcggctcagcaagagcaacttgcagcaatccgaagggagttaaaacccggagaaagtacagaagagtcgattggaaagctatcaatgctcttccgcagcgggggtattctacgctgtgtagaaaaatggcttggtggtgggaaatggacccgcagggtcgacgacgaacaacaggcgcgcactgcggaaaaaatcacgacttacgcagagagtgtgatcatcaactcgcaccattttctgaccaacttttctcaggaggttggtctgttctatcagctgactggccatgcagaaattgagcccgaagcacagttagcagaccctgatgatatgtccccagaggagataaaccgcttttggcatgcactattattaaaaaagatggagaacagttttcttgacagtagcgaagcattttttcttgaggacgttcaccaattctgcgtggaatatgcgccaccacacttgcagcaatatctgagcaccgaggaaatagaaacggtgatcagagaaagagactggtatctttatacgggtgctccacgcgaacaggtcattattcatcatgaccaagttcagcagatggcgtttcttgctctgaaaaaaatcgttgtcgatttgcatgccgaaagacagctaggactttatggtgttgcactttccagcacgcttatttcgcttgctttgtccaatacgtatcgcattactacaaatgagctcactccactgctcaatatattgatagagaatttacccacaaataacaatttatttattgactatccctatcagaccccttttaacacttttgagaccgcctcgcctggtatgcctcgaaagcagggacagggtgttgagaaagatgatgaagcgctgattttcgcgctggcatgtcgtctgcataatcttcgtatttttcgtctctatgaaaatattgatagattacactttctggcctcgccatttggaagaataaatgcgcttctggagcagttattctccagcagcaatgacgtaaaagcactttcaccgcaaatagtggaatccctcttccgggagcatggcatcagaagacatgagggggaaaacggcaatccttgctggcgacttagtgatgcaacaccttattatcttttacgtaaccttgaattgaacattcagcttattggactgatgtataaagactatgtctgccttgatacgggcattaaccattaccacagtttgatcaatacagataaaagacgtgtactcaagcttcttgatcctgcagcttatcgcagggatctcaaaaagtggtggcagcaaaaaaaaacacagagcagtggaaagtgtttctttgaagtagatggtgagcatttcgcgatttggactgactccacccgatag

SEQ ID NO: 93207 - DNA, 351 bp, Enterobacter aerogenes
atgactacatcatcaatcaacactatcaccctgtcaggcaacgtaacgagtagtcgttacaccgcagtgactggtgatgtctacctctaccgtaaagacgatcgtcagggggcaaattaccgcaacgggcgtcacacgaattacggttattcaggttattatctggcctcagtttatgacggagagaaatggcgtaagctgcagtttaacgatatggttgcctacgaaaaccgcagctatgaatatgcttacgaaagtgcatgcgtgtataactatctaattcgcatagtaaattcatggtacggacgtcgagtgcaatactgtagcgaacgtcgcgcatttattttataa

SEQ ID NO: 93208 - DNA, 252 bp, Enterobacter aerogenes
atgaacgttacttcacccaaaatgctggctcaggcagtgaggaatgctcgcaagcaacgtaagctgactcaacgtgaaactgcagaaagtataggcatgaaacaatcaacggtttcagagtttgagaatcatcctgaggggacccgcataggtacgctctttaagctgcttgccgctctggaccttaagcttcaggtcgtaagccgtaggggcgaacataaatcgtctgatagctgggaccagcagtggtga

SEQ ID NO: 93209 - DNA, 1077 bp, Enterobacter aerogenes
atgaactggaatcccgaagccccttacaacgctctgccaaagctgccgcctgatctgcagcagatagaaacacgtaatgtactaaaagcgtgtataaatgcgcgcgcggcaattgcagagctgaaaacggcgggtgagttgatccccgatcagggattgttgattaacattctcccgatgctggaagcgaaagattcctcacgcattgagaacatcgtaacgaccagcgatcagctctttcagtatgctgatcgtgcagacggagcagatccagcaaccaaagaagcattgctctatcgtacggcactttatgatggttatacccatcttgagacctatccactttgcacaaacaccgcaatcgctatctgtaccaaattacgcgcagttcagaccgatataagaaaaacaccgggcacggtactgcgcgatcagaataacagcgtggtgtatacgcccccggtgggtgaagatactattcgtaacttattggcgaactgggaacagttcatacatggcgatgatgatttagatccattagtgaaaatggctattgcgcactatcagtttgagtgcatccacccttttccggatgggaatgggcgaacaggccgtatcctgaatattctttacttgattcaaaatgaattgctttcactgcctatcctgtacctgtcacgctttatcctggagagacgtagtgattactacacgctattgcgtagggtaacagaggaaggagactgggaatcgtggatattatttatgctggaggccgtagaaaacacgtctcgatggacgactgacaagattgcggtcgttcgggcattgatggcagaaacgaccgagtatgtacgtgagaagctaccaaaaatttatacctatgaactcatccaggtgctctatgcgcaaccgtattgccggatcgataaccttgttgaacgaggtatcgctaaacgccagacggcatcagcatacctcaaacagttggtagatataggcatgctggaagaaatgagcgttggtcgcgaaaagctgtatatcaatactaggttggtgcaggaattgaatcagtaa

SEQ ID NO: 93210 - DNA, 267 bp, Enterobacter aerogenes
atgttaccccggacacaccgccagctcgtaagtgttgaagtgatgtggcctgcccagacgctaccgcttcctctgcaacaggtagtcgaagcattgaatcagggcgaaacgcccgatcagattattatccgcatgaaccaacagggcctgctggcgtggcgtgaggatgcatccgcgcaggatacacacgatatctttcagatacggctggacaatcagcatgaggcgcggtttctctgccgctacgttacgctaccgctgcactga

SEQ ID NO: 93211 - DNA, 654 bp, Enterobacter aerogenes
atgaagaagaaactgccagaccagctttccagggaatgcattattgcggctatgcgcgcctatgatgaaggtgtaccccaccagttcagcgagtcccggctgtatgatgtggtctttgcagggcgcagttatccaccgaaagcgatagtcggtattgctgctttaaatatgacaggcgttgagttttcccctgaagattttagtggtggtatcaagtcgaaatgcgtcaagttgcttaccgatcaagggtttcagatcgttgagaaaaatttgggtaacgagcaacctgccatcagtatttttcctgatgaactgccgccgcagagcgtatttaatgaaggtgcagctacgcaggtaacggttaaccgctatgaacgcgaccgtaaggcccgacaggccgcattagcctggcatggttgtctgtgcagagtatgtggtattgatatgatgaaggtgtatggtgagatagcaaaaggttttatccatatacatcacctgattccgctatcagacatcaaagagaattactctctggatcccaaaaaagatcttattcccgtctgccctaattgccatgccatgttacatcgacgtaatccgcctttttcgcctgaagaattgaaatcaattattgaatatcattcggctctttag

SEQ ID NO: 93212 - DNA, 1590 bp, Enterobacter aerogenes
atgctgaagtggctaaaaagaccatcccagagccagccacctgcgccaggcgctacgctgccagagggttggtttgcgccacaatccgcagaacaattgctggcgacgccgttacgccagtcctgtttgcaccagttacggcaactgaccccgctgccggataccctgttcgatagctggatcctcacggcgattcatcgcttcgccgcactggtgcaactgctacccgcctcccaaagtcatcaccactccattcccggtgggctactggatcattcgctggaggttgcctgcaacgctatccgactgcgccagggttatctgctgccaccggaagcgggtgcagaagaacaagcccggcaagccagcgcatggacggtcgcggtagtctgcgcggcattgctgcacgacacgggaaaaatcgccgtcgatatggaaatccatcaactgggtggcaccagctggcatccgtggcaaggtaatctgactcaaccttatcgctggcagtaccagagccacggtcgcgactatcatctgcatccggcggctggcgcaatgctgattaatcagttgataccctcgccgttactggactggctggccggatacccggcagcttttgcatccctgatttatcagcttaccggacactacgaacgggctggcgcgctggcggaactggtacagcaggccgataaagcctctgtcgcccgatacctcggcggcgatatcaaaaccgcgctggcgcaaaagccctcttcctttccccagcagcttcttaccgccttgcggtcgctggtacagaacgagtaccgactcaataatcccgaatgtggatccgatggctggctgacggaggatgcactgtggcttatcagcaaaaccaccgccgaccgggttcgcgcctggctgctccagcatggcgtatccagcgtgccggaaaacaataaccgcctgtttgacgaactgctgacgcatcagcttatcgttgccaatgaggataaagcgatctggcgctgcattatccgatcggataaaggctggtcgcccgttgaaccgctgacgctgctgcgcctgacgccgtctgcaatctgggaacagggagaacagcgtcccaccagctttgccggtgatgtgacaccggtgagtgaagccgaacccgcccctgaacttagcacaccgactcaaccgctgccggagatagaagacgacccgaggcttagtgacaataacaactttctgcagtggctgaagaaccacaccagcccttcaggcacggtgaatacccgcaacggcaaggtacatgtggtggagaaccatcttttcttgatttcgccggggatctttaagatatacgcctcagaaaccactggagtcaccagcgacggctggaagctggcacagcgaatgtttcaggagtcagggctggccctgcgctgtaatgatgacagttttatctggacctgcgatgttcacgcgccacaaaagaaaagtagtcagttgaaagggtttctgatggaggatcctgggctggtgtttggagagaaagtgcagatgaataatccgtggcttaagctgctgcgcgaatag

SEQ ID NO: 93213 - DNA, 372 bp, Enterobacter aerogenes
atgggcctcgatcttttctttttcgaacgggcgaaaaacgcgcccgatgaaagccagtacgacagagtgggttatttccgcaaggtgaacccgttactcaaatgggtggataaacacgttgggctggtgcgcaaccaggtgctgttagaagtcacaaaagcacacttgcaggcgcttttgagtgacctgcagaacctgacgccggataactgcggcgcggtttatcccacgattgatggctttttctatggttataccgattatggagagcactactggaaagatgttcgcgccgtcaccatctgggtgaaggagacgcttgagacgtttgattttgagcgagacaggttgatgttttatgcctggtggtag

SEQ ID NO: 93214 - DNA, 906 bp, Enterobacter aerogenes
atggacagaagcaacgatatctaccagaaagtcaccgaccagattattactgagctggaaaacggcaatgtgccgtggatccgcccgtggcgcgatggcgagccgccgttcccaatcaatgcgttatccggtcgaccgtatcacggcatcaacgtgccgcttctgtggaacagcgccgacaagcagagcttcgccagcgaccgctggctgacgttccatcaggtcagcgcgctcggcgggcaggtgcgccggggggagaaatcctctctggcggtgttgtatctgccacacacacaggaagagaccgatgcactcggccagccgttgctggataaagacggcgagccgaaggtgcggcatttcgggatcattcgtgaatttcggctgtttaacctgtcgcagtgcgacggcctgccgcagtcgctgtccgagccgtttacccggcccgcagaacctgtggagatggccgaagccattacgatgaacagcggcgtgacgctgcgccatcgccgccagtcgaaagcgtattacaaacccgcgaccgacctggtgatgatgccgcacccgcaacagtttgaaagcagcgaggcgtactacgccacgctactgcatgaactgacgcacgctaccggtcacgcttcacgcctcaaccgtcccggtattgctggagcggaacgcaccgaagcactctacgccgctgaagagttagtggcggagatgggaagcgccttcctgtgcgcctattgcggcattcagggcaggctccagcacgccagctatatcggctactggctggatatcctgcgccaggacaagcgggcagtgatccgcgccagcggtatggcgcgccacgccagtgaatggctgctcaacgctgtaccacaaccctgtcagcttagcgcctga

SEQ ID NO: 93215 - DNA, 291 bp, Enterobacter aerogenes
atgtcgcttttcgataaaaaaccgtcgttaatgccggtggttatcgcccctgatgtctggcaatccgctgtggaatttcccgccgacccgcagcaggtggaagaacggctgggcaatctgttgctcgccgtactgctgaccctgcgtaccgccgggacgtcccgcaagaaagtcacctttacgatctactgccagccgccgcagggcgatatgaaagtccctgtcgcattaccgctgtcgctcaactatcacggccactatgtgcaggtctcgatggctgaacaggcataa

SEQ ID NO: 93216 - DNA, 201 bp, Enterobacter aerogenes
atgaaccgacaagatataaacgcattgaagaattttgattttctggcgcgcagttttgcccgtatgcacgccttgggccagccagtggatatcgatgccgtgacaggtaatatgagtgatgaacagcaagcatggttccgggagcgatacgaccactaccgaaagcaggctgagcgggcgagagtgatagaactgcggtga

SEQ ID NO: 93217 - DNA, 1503 bp, Enterobacter aerogenes
atgaccgccaacagctatttcgagtacgtgctcaccctgctcggctggctggtgaacaacggcgtctggcagacgctgaccgccaccgggctgttcgccctgcccctgctggcaaaactgattgccctgtggctgaaggcgcgcggccagggggctgatgaaggcaacgtcgcccgccttctggtcgtctgggtggagcactcgctctacagcgccctgctggtgatcttcttcgcgggtgtgccgttcctcaatgtcgatatcaataccctcagctatgacagccagcgcacaaaacagtgcggctcgtcggtggtacagcccggtgattccggctatgcgccgctgatcaacgaacttagcggacagagcgcctcggtgccggtgtggtggtacttcacccacgcgctgggcaagggcatcaccagcgccgccgtcgcggtgctcccctgcaagccggacctgcgccagttgcgctttgaagtgcagcacacccggatcgctgatccagcgctggcacaggaattacaggatttcgttaacgactgctacgggccgtcgcgggcaaggctcaagcggctgggcagcgatatcagcgaggaacagagccgggaagtggactgggtgggatcgtctttttacctctccacgccgggctattacgaccacgatcattcgcgtgccccccacgccgcctggccttatgacgccagccgcgatgatggcctgagtgatacaggtggcggaggctatccagcgtgtaaagagtggtggtccgatggcgatacggggctgaaaaatcggctgctgaagcaggtcgataccacgctctggcagcaactgcagagactggggcagtcgaaagaggagtatgaagaagcggtactgcgctcgctggtgagcccgcgcaatatgcaagtgtcgcagggtgggctagtgtacaacgggtttggtgggagtgcgggggataatctcagccagacgcagttgctcagccgcgttggcgggatcatcggcgcggggctttcgagctacgctctgtttccggcgtttgataatgtccgccaggcgctgccgatggtgcaagcgttcctcgaaatggcgctggtaatttgtattccggtgatcctgctgttctcggcatgggattttaaaacggtcatcacgctgagttttgtgcagttcgccctgttctttctcaccttctggtgggaactggcgcgctggctggataactggctgatgcagatgatgtacgacagcgatacccactcgtacttcaacctctggggcctgcaaaacacctccgacgatctgattgtgaatatcattatgggcgtgatgttcctggtgttacccgctttctggttgggcgcgctgacgtgggcgggcgtcaggatcggcgcagcagtcgccggggtgatgggcagcgcggtcggtgatatccgcagcgctggcgaacaggtcgggaaaatgatcgtcagtaaaacacgcattccctga

SEQ ID NO: 93218 - DNA, 1362 bp, Enterobacter aerogenes
atgagagtcctttgcctggtcttactgtttttcgcctgggtttgcgtggcggcagacgactacagcttccgcacgcgaggcgcggttgacgacctgctttactaccagattggcggcggcgaggcggtcatgccgccccccgtgcgtcgcagtccttcaccactcagcgtaggcattggctggaacgccgatatgatgtgcggcaatttcgacatcgacaccacggtgcgcaaccaactcaacggtatcaccgatggcttccagcaactgatgggtaacgttatccagagtgccaccggcgcggttgccagcctgcccgcgatgattatccagcgcgccaatccgcagctttatgatctgctgaccaacggcgtactgcagggacggctggattttgataagtcgctgctgaactgccagaaaatggcggagaagatgaccgatttagcgacagattccgcctggttttccggagccaaagcggagaactaccagtccctcgccgccagcgataatgacgccatccgcaccgaccagaaagcggcaaaagaggccgccgaaaagggtaaacgctgggtgggcagtgaaaagcgcggtggtaaaggccagccgccaatcaaggtagtccatgacgccaccgccgcaggctggaatattctcaaccagctgcccgccaccagcaccacgtctcttactgcctccgaatgcgatggggaactttgtagcacctggacatcccctgaagaggccgccggatggatgacccgcgtggtcggcgagcagaccatcagcgtggcgcaggtcaccgacgatccggatgcacgctccggcgcacaggcggggatcggtctgcatccgctgatcgacgaagaaaaggcgaagatcctgcccctcctgacagatctggttaatggcagtcagaagccaggtttcgataacctggcgaaagcctcaggcggatccatgcaactgacccgtggcgtggtcgaggcgctgcgcgacgacccggatgttgccgtcctcaccgaacgactggcgggagaactggcgttggcccgcatcaccgagcaggcgctgctggcccggcgcacgctgctcgcgggcatgcgcgaacccaatatcgccaacgtcaaagaggcacaagagagcctgggtaaaaccaccgcccaactggatgaagagctgaaccagctgaagctggaactcgatttccgccaggcgctgacgcgcaataccgccagccagatcctgcaacgcaaacagcagcgcgaccagcttcaggggcaggcagtggaagtgccggacgacagcgaccgccgcttacatcagttgaataacccgcagccggacagcccgcgatga

SEQ ID NO: 93219 - DNA, 933 bp, Enterobacter aerogenes
atgccagaccgctcttctcttctgttgctcctgatgctgtgcgccgctttcccgctcagagccattaccacgccggaaattgccgcttccgccctgtcgccggactgcgtgaactaccgggtggtcggtctgtgctactggctgtactgcacgccgttcggctgtacggtgcgcacgtcggtgaaggtcagtcatttccgcccggatctggtggtatcggcttacagcgtcaccgggcaaaatccgtggacggagatgtcgctgctcagtccggcgttacccggcattgccgaaggcggcggcgacaccaatccgcgctcggccaaccagcacagcaagatccgttttaaaaacgccgatgccatcggctttccggcaggcgatgaactggcgaagtttttcactcagtttggctatatctgctccccgtcatcgcaacctttccagccttactttctgagtcaactcgatacgccggcatggcgcagcggggtgccggaaatgacctacccggaggcgctgacgccaggcatgcgggaagtcggtcagaacggcgatatgtggggcaatatctacccgcgcgccggagccatcagccaggcgcacgactataaagccgccgccgttatcgcccagcgcgtggccgatctggtgacgcgtaccgggcaaccgcatatctatacgccgctgacggcgtcctcccgcgccgggtactggccgccctccccggttatcgaaggcgacagcgataaccatcgctggcagatgctcacgccgaaaaaatccgccgcctgttcggtgttctcggatggcagcaccaccgacacttacgccgacaaggtggcggagaacggcgcgtacgcctggacgctgtggcggccttacaaatgctgtccgcgtcgggggcaaaccttcctcggcagtacgggttag

SEQ ID NO: 93220 - DNA, 591 bp, Enterobacter aerogenes
atgccagtaaaacgaaaacatctgacccgccatgaagtggggcagatactgcttgcagcggacagagggatccattttgagcgtgattactgcctgattcagatgtgttttttacacggtctgcgggtcagtgaactgtgtggaatgcgcctgtcggatatcgatttggtcggtggttcggtgtatgtcaggcggctcaaaaatagcctgtcaacacagcatccgctgttcgatgccgaattgcccgcattgatgcgttggttaaccgtgcgccgtcgctggcgggatgctgactctgactggcttttcctgtcgcagaaaggggggccgctgtcgcgccatcaggtccggttattgctcagacgttacggcgaactgggcggcgtcagtatttcagcgcacccccatatgctgagacacggatgcggttacgcgctggcggatttagggcgtgatacacgtctgatacaggattacctagggcaccggaacatccggcatacggtgatttatacggcgacaaatacgcagagatttatgaatgtctgggggaatatgagagaaaaccacacaattagtgccagaatgtaa

SEQ ID NO: 93221 - DNA, 513 bp, Enterobacter aerogenes
atgaaaaaaacgatgttaagcgcgtgttttatgctggcggcggctaatgccatggctgccgacggtaccatccatttcaccggtagcattactgaccagacctgcaagatcgacactggctcccagaatctaccggtgaacctcggcaatgttgcccagaccgcccttaacggggcgaaggggatgagagcggcgccaacgcaatttaccatcaacgtgagcgagtgcccggaaacggtcactggtgcaaatgtgaaatttgacgggacatccgataacaacgaccagagtctgctggcgctggacagtggcacgggcatcgccaccggggtcgggatccagatcgcagataaaaacggcacggccatcccgctgcactccgcttcatccgactacaccctcgcagaaggcgcaaacgcgctcgactttgtcgcccgctatgtctccacaggcccggcggtcaccaccggtacagcaaacggtacctctgagttcaccatcatttacaaataa

SEQ ID NO: 93222 - DNA, 681 bp, Enterobacter aerogenes
atgaacaggtatgcagacattttgctggcgctattgctggccgtatttaccgtgcaggcacaggccgggattgtcattggcgggacacggatcatttataacggtgacaaaaaagaggcctccgcttctatacgtaaccccgacagatccggcgtctggctggtgcagagctgggtagacagcgggatgaagggaagtaaaacgccgtttatcgttacgccgccgttgtttcgtattaatccaggcgaagagaacatcctgcgcattgtgcgcactggagggagcctgcatgaagaccgggaatcggtgttctggctgaacgtgaagtccattcctgccaccgacgacagcgtgccgcatgacaacgttctgcaggtggtggtgaaatcccgcctgaaactcttttaccgcccggcggggctggaaggactgccggagacggcttaccaccatctgtcggtctcccgtagcggcaatcgtcttacggtcagcaatcccacgtcttactacgtcactttgttcaccttaaaggtggacgggcaggagatcaaagaggccgatatggtgccgccgaaaggcagcgtcagcttcacgctgccatcggccacggcgtccatggtgagctggcagtcgatcagtgattacggcggcgtcagtcagaccgaaagccgtaagctctga

SEQ ID NO: 93223 - DNA, 2508 bp, Enterobacter aerogenes
atgaataactcgaattcccgactgatgatcttcctgctggcgctgttgctgattatggtgctgctattgggttatctgcgtcatgcggaagcccgcgagaccttcaatacccacgcgctggagctggacagtccgggccagccagttgtggacttatctgcctttgccgaagccgatggccagctaccgggaacttaccgggtgacggtgtacgtcaacggcgagcagcagggcgaggcgcaggatattgccttcgttgccggaccggataaaaaactcatcgcacagttaaccccggcgatgctgaaagactggggcgtgaataccgctgcgtttcctgcgctgaccgcactgccagcggacaaaccgctggaggatatcggccactatatcccgatggcttccagcgagctgcgtttcagtaaactgcaactgaacctcagtatcccgcaggcggcgatgagcgctaccgcgcgcggctgggtggatccgtccgaatgggacgagggcgtacctgccgcgctgctgaactataacctcagcggcagcaatacctggcgcgacggagaaaatggctccgatgataactactacgctaacctgcagagcgggctgaacctcggcgcgtggcggctgcgcaactattccacctggaattacgacgaggataacggcagccactgggattcagtgaacacgtatcttcagcgggatatccagcgcctgcaggggcagctcacgctcggcgacagctataccccgtcggacatcttcgacagcgtgcagtttcgcggcgcgcaactggcgtcggatgacaatatgctgccggacagcctgcgcgggtttgccccgatcatccgcggtattgcccagtcgaatgcccaggtcactattaagcagaacggctacaccatctatcagagctacgtcgcaccgggggccttcgccatcagcgatctctacccgacatcgggcagcggcgatctggaggtaacgattaaagaagccgacggcagcgagcgaacctttattcagccattctctgcggtaccgattatgcagcgtgaaggccgcctgaagtatgccctcactgccgggaaataccgcagcggcaacagcgacagcgatgagcctgagtttggccagataacggcaatttacggcctgccgcatgccatcacgatttatggcggcacgctgtactcggaggactatcagtccggggcggcgggtctggggtttggtctcggcgagctgggttcggtttccgccgatatcaccgctgcacacaccacccttaataacgatgaaactcacgacggccagtcgtaccgggtgcagtactcaaaagattttcaggccaccgataccagcttcaccctggcggcgtaccgctattccacggaagggttctataccttccaggaagcgaacgacttacgctcggacagcgatgatggctggcggctgacgtacaacaaacggcagaaactgcagctcgatctcacccagagtatcggcagctacggttcgttctttgtttccggctaccagcaggattactggcatgaggacggttacgagcgcaccctcagcaccggctggaacggcaacatcaacggtatcagctacagcgtttcctacagttacagtgattatccggacagcacccagccagccgaccagcagctggcgttcagcatccaggtacctctcagccgctttatgccgaacgcgtgggccagctacagcgtcaacaccgcgaagcacggcgacactcgccagcaggtgggcctcaatgggacggcgcttgccgataacaacctcagctacagcctccagcagagctacaccaaccacggtacgggtggctccgggaatatcaacgccgactacaaaggcgggcagggggaaatcaccggcggctacaactatgacgacgatatgcagcaggtgaactatggcctgaaaggggggattgtcgtccatccacatggcgtcaccctttcccagccgcttggtgactcacttgccatcgtgaaagcgcccggggcggatgacgcgaaggtgcagaataataccggggtctataccgactggcgcggctatgcagtcgtgccgtacgtcaacgcttaccggaaaaaccgcatcgcactggacaccagcacgctcggtgatggagtcgatatcgacaccgccgtgcagacggtgacgccaacgcagggcgcagtggtaatggcggacttcaacacccgcgtcggacggcgcgtactgatgacgctgctttaccgtgggttgccggtgccgttcggcgctcaggcgaaaatgaaggaaggcggcagcggcatcgttggcgatgacggacaggtatacctgacgggcgtcccggatgaaggtgatatcacggtgaactggaacggaaagcagcagtgcgtggtgcattatcggctaccggagagtgccgcaaacgcgccggtaacggaaactgagcaggagtgtcgggaatga

SEQ ID NO: 93224 - DNA, 954 bp, Enterobacter aerogenes
atgaaacttattcgctacattgtggcccttacgagtgtcatcatgttttctctgccagtgatggtctgggcgtcatgcgcctttacgggcggtgcaacctcagaaattagcggctatgtcacatttggcaatgtgtctgttcaacgcgatgcgccgataggcagcgtgcttgctacgtcgacaaccgggacttataacggtgggcaggcgattgctggatgttctgaaccctggacttatcgctgggaactgagcaaatggagctcgttgagttctcaaggcaacaaagtctataacaccaatattgcaggagtggggatccggctaacaaacactgcatccggaaagttgcttccttatgaccagagtatgggaacgggcagcgtcattattaatgctgatggtattaaagctgaattaatcaaaacgggcgatattacgggcggaaccctggataccggtatgctggcgcgggcctcggtggcaaaccagttttattttgccaatgtcacgttgaatggcacaaataccattacctctgaatcctgctccgttaccactaacccggttaatgtcccgctgggcgaccatgacaaaagtgagttcagcggtccgggttccgcaacagcctggcagacattcaatatcaatctgagttgtattcagggtgcgcggattaatgtgcgtattgacgccacagcagacagcgacgcaggcgtacccggcgtcattaaactcgacagcgatcccgttaatgccagcggtgtcggcgttcagctctggtatcgctatgaagacagcccggtacagttcggtcaggagcggtattactatacctcgccatcaggtggtaacgaatatgttcagcttcaggcgcgctattaccagacaacgcagagcatcacggccgggaaagcgaacgccacagcgacattcacgctgagctacaagtaa

SEQ ID NO: 93225 - DNA, 960 bp, Enterobacter aerogenes
atgagaaaagttatatgtttcatgctgttgatgctggtggtttcaccgatcgcccgagccagttgttcattttacagcggcgtgtccggagaagtgccgggttatctgaacttcggcaatgtggttgtccagcgcgatacaccggtcgggagcgtgctggcaacaaccgtaaccggggcttataacaatggcaatgccatcgccggatgtacccgtgaagcctggaccgctcgctgggagctgacgcaatgggggacgctgagtggctatggcaacggcgtctacaataccaatctttcgggcgtcggtttacggctgagcactgctcaatcgggcaaagtattgccgtatgaagccagctatccctacaatgccgggggctcatgggcctccattccaggagatggaatcaagggggaactgataaaaaccggggatattaccagtggcaccttaactaacggggtactggcgcgcgcttcggtcgtcaaccagttttactttgctaacatcacgctaaacggaaccaacaccgtcacctctgccgcctgctcggtaacatcggtggatgagccggtccagcttggcgagcacaacaagcgggagttcagcggcgtcggctacaccacggactggaagggatttaatatcgtgctggactgcaataaaagcgcgcatatttatgtgcagattgatgccacccgggatgcgtcgaatgcgccaggcgtgatggccatcgattccgaaagcggcagtaccgcggcgacgggcgttggggttcagctttacttcgcgccggacaacagcgcggcgcagttcgggcaggtaaaggattattatacttcgccaaatggcgggatggagactgtgcagctcaaggcgcgttattaccagacggcttcagcggtgacggcggggcccgccaatgcgacggcgacgtttacgctgacgtataaatag

SEQ ID NO: 93226 - DNA, 327 bp, Enterobacter aerogenes
atgacccaatattggtggaaagatatttttgatcgcaataataactggcagggtctggagctgatactcaagagcagccagaggaccgacgtggcaatggaaatgctaagtggtcggtatgggcgaatggcgctacaggtctccgggaagacattattctgggcatcaatgttgaaagatcattccggcgtctggttggtgtttaatgccgatcattctgcttgccagacattattatcggctgtcacatctgaagatattgagggtattaaaagcaaaggcgaatgggcctggacaggtgaatggtgtcgctatttttcccggtaa

SEQ ID NO: 93227 - DNA, 711 bp, Enterobacter aerogenes
atgaatgcgccagtgcctcttctgtctcctcgccgatggctgataaggccgatggaggccaaatattcattaccaaaattatccggacagcgtgttcctgtaaatagctggcgttttgatgccccagaaagcagcgggaatatcggctgtagctggacgctctacggcgaagattttcctgatttggtcaatcctgacaaagtcagattagtggattggtggtggggaggtagcctgctacttgggcgttacccgatacaacctgatgccggaaggttgaaatggtggcgtaaaaaatgccgtgagggtgcgctgcctccagtacttgtctggtatatagcagggctgggatcatttgttattcttgatggtcattatcgtttacaggcagcgattgcagaagagatccctccttcatttctggtactcagcgaattgcaggaacgggattttgctaccgatcaagaccatcgggcccgtattgtccgggctttagaacagcagctcaaaaatcctaagtgcaaaatcgacggtgtaaatcagacgctgattaatctttatgatacacgctatctttatgcctcaacccatagccgcgcgacgctcggtgaaggaacgcgctgggtacaggagttagaaagctatctgcaacggcatcagttggaagactatcgggacaggatacttaatggtgttaacgatgaatgttga

SEQ ID NO: 93228 - DNA, 546 bp, Enterobacter aerogenes
atggcggcattctttagggaatacagagatacccttctcgcctttactggaattattatcgcgctgctttccctgtggtttacctggtcgcaaagccaggagcaaataaagcataaccatatttctgttgagccgcggatgaacgcttatttttcaaatgacgggcgggcgaacaaatcgggtatttacatcatcaataatggaatgggaacggcatttgtctctgctatatctgcaacggtcaatggcaaaaaagttgaacctgttgctgggaatatttttgtcggagcagtgcaggcgttaggcctggatatccagtgctttgtgattggcggacccagaccaaatgattcatttaaagttggcgaggagattttcttaattgaagcaaggggaactgacggtcgctgctctggcgattcacttatccttcgctctgcggctttagactctgcccgcctggattttgtcttggatattgaatcaatatacggagacagattccggtatgtttattctcagaataaacaaattaagcgtgattaa

SEQ ID NO: 93229 - DNA, 627 bp, Enterobacter aerogenes
atgcgcattaaggctgagctggagaagccggaagccgggcgtatcctgcgcggccatatcagcatggatgacgtgattagcgtaccgacggagtggctggactgggcgggcgcaagctccccggtttggtttctcggttcccactgctttgacctggtgcgtcacctctccggccaggaagtggtgtcggtgtatgccgtcgggcagaagcggctgatggccgaatgcggcctcgacaccttcgacagcgtgcagagcctgctgacgatggccaacggcagttcgtgggtggtcgagaactcgtgggtgctgccggaaggctttccgaaggacaacgacgggcgtatcgatattctctgcgaagcaacgtatatccgcagtacttcacagcatcgcgggctggaaatcaccacgccggacatgacgctcacgcccaacagctatttcatcaactaccgcaacggtgttgccagcggttttggtatcgacccgatcaatgactttgtgcgggcagtcagacataaagccccctacccggtcaccgccgaagacgggctggcggtaagccggatttgtgaggcggtacaccagagtctcgagagtcaaaaaccagtgtcattaaaatag

SEQ ID NO: 93230 - DNA, 273 bp, Enterobacter aerogenes
atgcggtcaccggcagcgcatgttgtccagccagttggtcaaaatagtgtcggaactaaaccagtattatcaaacatggtatctttttattgccaatttctccagttagccatctgcaggcgttctggtatcggcgcgggtgggctgtggggatcagagcggaaggagctgattatagcgggcaatataatcttttggcgtgatctccagttctccgccatcgcgatggatggcgacgaaagtacgcagcacgaatccgcttttacgctctga

SEQ ID NO: 93231 - DNA, 1428 bp, Enterobacter aerogenes
atgcataagctgactattcaaccctctgatgttattaagagggagaaagtgctattcaattttttcatactttcaagcattaccgttactttatatctggtgggaaaagccatacgccatagcgatattgctttgttctggccactgaatgcagtcattgtcggattatttatcaggcataaggcgttacgttataaaaaatacgccgcagttgttttagccgtaatgctattatcaagctttgctacgggcgagcgaggagtcaatagcattctggtggatttctccgatgtgctatttatgttaataatgtactggctgataatcagagaagagaaggcagatgaagataatttaaaaataaccatctttcgaatttacagctattgttttatctccgcgttattatgttcagccctggggagttatatttattcctgcggtattcacgctgaattctggcaaatctatcctgtttggtttagcgaggagtttaccactagtgtgctcattctaccttttacgctgttgtgtcagaaaaaagagttttttagcccattgactttgcggcggttagtaccggttggcatgttaatggcctcgctgctggtctctattctcagcggagtaacgggaagtatgggaacgctggcgatgattcttccggcgttaatttggtgcgcgctaaactattcattatcaacaacctgcttgctaactttgtgctccggtatggtggaaatgatgctgatcgaccggcacgctattgaatcgaacatgacgtcgtttctgcctatgattatctccacgcgccttggcatcgcatctattgccattagtccggttatcgtcgcggtcagcgtggaggcggtcaacaagatggtgaaacagctatcgcgacaggttcgctacgattacctgacccgggttcattctcgttttggtctttatgaacatctgcgggaactggaagtaacggacaatgagacgtcgctaaacgtgctagtgcttgatattgaccattttaaaaaaattaacgacacctggggccatgattgtggcgataatgttttgatgactttcgcccggcgggtcaaaaacactgtagccgatcgaggggtgattgcccgactgggcggtgaagagtttgccgtggtgatgacgggcaaagcgggtgaagatggctatcgtttagctgaagatattcgtcaggcgattgaagagatgaatattgcctggcaaagtgcgaatttatcgctaaccgtcagtattggtcttagctacgggcaggtgatgcgctggaatattgttgacagctttgatcggttattatctgaggcagatagctatctttatcagtctaaaaaaacggggcgcaatcgtatcagcgcctctcctctaataaataacattgttaccggctcatag

SEQ ID NO: 93232 - DNA, 1194 bp, Enterobacter aerogenes
atgagcactttactgaacccgtatttcggcgaattcggcggtatgtacgttccgcagatcctgatgcccgccctgcgccagctggaagaagctttcgtcagcgcgcaaaaagatcctgagtttcaggccgaattcaccgacctgctgaaaaactacgcgggccgcccgacggcgctgaccaaatgccgcaatctgaccgaaggcacccgcaccacgctgtacctcaagcgtgaagatctgctccacggcggcgcgcacaaaaccaaccaggtgctgggccaggcgctactggccaaacgtatgggcaaaacggaaattatcgccgaaaccggcgccggccaacacggcgtcgcctcggcgctggccagcgccctgctcggtctgaaatgccgcatctatatgggcgccaaagacgtcgagcggcagtcgccgaacgtgttccgcatgcgcctgatgggtgcggaagtcattccagtacacagcggttccgccaccctgaaagatgcctgtaacgaagcgctgcgcgactggtccggcagctacgagaaggcgcactacatgctcggcaccgccgctggcccgcacccattcccgactatcgtgcgtgaattccagcgcatgatcggcgaagaaaccaaagcgcagatcctcgagaaagaaggacgcctgccggacgcggtgatcgcctgcgttggcggtggttctaacgccatcggcatgttcgctgatttcattgatgaatccggcgttggcctgattggcgtcgagcctgccggccacggtatcgaaaccggcgagcacggcgcaccgctgaagcatggtcgcgtcggcatttatttcggcatgaagtcgccgatgatgcaaacctccgacgggcagattgaagaatcttattctatctccgccgggctggatttcccgtcagtggggcctcagcatgcgttccttaatagcaccgggcgcgctgagtatgtgtcaattaccgacaacgaagcgctggatgcctttaaagcgctctcccgccatgaaggcattattccggcgctggagtcgtcgcacgctctggcgcacgcgctgaagatgatgcgcgagaatccggataaagagcagctgctggtggttaacctgtccggccgcggcgataaagacatcttcaccgtacacgacattttgaaagcgcgaggggaaatctga

SEQ ID NO: 93233 - DNA, 921 bp, Enterobacter aerogenes
atggatttactcattattctttgctatgtggcgttggcctatggcgtatttaaaattttccgtatcccggtaaataaatggacggtacccacggcggtccttggtggggtgtttattgtcggcgcgctaattctgactatgaattataatcacccgtacaccgaccgggcgcaaaaaatagctctgtcgatcccgattgtgccgcaggtgtcgggggccatcgtagaagttaccgataaaacgaatgtgttattacgcaaaggcgaggtactgtttcgtcttgatgatagccgctatcgcgcgcgactgaataaactggaggcggatctcagcgccgccgaagcggatatcagaacccggaaagcggcattaagtgaatccgccgctaacgtccagcggatgacggcggaatatgaacgtgcccgtcaggattatcaacgctatgcgaaaggcgcggccatgccggttaaccctttttccgagcaggacgtgaatcacgccgagcagcaatatcaggcgcaatccgcggccctgcgggcggctaaggcacagtatcaacaggagttagaaagactttctgcgcgtttcaatggcgaggatgcgcaaatcgccagcctgaaatcgcagattgccgaggcgcgttatgaccttgaacagacggtattccgcgcgcccagcgatggttatgtcacccaggtgctggcgcgaccgggcaccacggcagttcgtctgccgttcaaaccggtgatgatttttattccgcagcagaaacgccaggtggtggcggtatttcgccagaacgctatcctgcgcctggagcagggggacgaggcagaggtggtattcaatggtctaccggggcaggtgtatgccggcaaggtcacaaaagtattgccaactattcccgacggcagctactag

SEQ ID NO: 93234 - DNA, 2184 bp, Enterobacter aerogenes
atgagaacgaacaccgcattccccctcgctccccttaccatcattatcgccagcttcttttcagcggagagtttggccgaagaagccgaacaggatactgaaaccatggtggtttacagcaccgctgaagaagcgttaaaacaacagcccggcgtttcgattatcactgccgaagatattgccaaagagccgccggttaatgacctgtcagaaatcatccgtaaaatgcccggcgtgaatctgaccggcaacagcgccagcggtagccgcggtaacaaccgtcaaatcgacattcgcgggatgggccccgaaaacacgctgattttgatcgatggcgtaccggttacctcacgaaattcggtacgttacagctggcgcggtgaacgcgatacccgcggtgatagtaattgggtacccgctgaaatggttgaacgtattgaagtcctgcgcggacccgctgcggcccgctatgggtccggcgcggccggcggcgtggtgaatatcattaccaaacgaccaaccaacgactggcacggctcactgtcgttcttcaccaatcaaccggagaataacaaagaaggcgccaccaaccgggccaactttaacctcagcgggccgctggcaggcgatgccctcaccatgcgtttgtacggcaacatcaataaaaccgatgctgacgcctgggatatcaaccatgcgcagaatggctcatacgccgccggtcgcgaaggcgtgcgtaataaagatattaacgccctgctgtcgtggaaaataaccccacaacagatcctcgatttcaactatgcctacagccgccagggcaatatttatgccggcgatacccagtacagtaacggcaaccttagccccaatggcctggttgattcactctacggccatgagaccaaccgcctgtatcgccagtcgtgggggctaacctataacggaatttgggattggggacagtcaaaagccggcgtttattatgaaaaaaccaataatacccgcctgcaggaaggatcaaccggccgcgtcgaggggatgatcaatagcgatgaatacgccaccagccgtctggaatcatggcgctccacaggcgagttaaacattccgttctactggttggcggatcagacgttgacgcttggcatggagtggaaccgcgacgaactcaacgatccggcgtcgatgcaggccactgacgtgagcggtgaaaccatcgccggcaccagcggcaatgccgccgatcgtagtagcaaaaacagcgccacgttaaccgggatctacctggaagataatatcgaggccacgccgggaactaacatcattcccggcctgcgtttcgattaccacaaccagttcggcagtaactggagcccaagcctcaacctggcgcaggcattaggtgagtggtttaaagtcaaagccggtattgcacgggtatttaaagcaccgaatttatatcaatccagcgaaggctatctgctctccacccgcggcaacggatgcccgaacgccattgcaacaggcagttgctatctgctcggcaacccggatctggatccggaaatcagcatcaataaagagcttgggctggaattcaacgccggcggctataacgccgggatcacctggttccgtaatgattacaaaaacaaaatcgtctccggcaccgaggtgcttggctacacttccagcggcaacaacattctacagtggcagaacggcggcaaagccgtagtagaaggactggaagggaccgtgctgatcccattgattgccgacaccctaaactggcgcaccaacgcgacctggatgattaaatcggaaagtaaagataccggcaatccgctgtcggtgatcccgaaatatactatcaataccatgttcgactggcaggtaaacagcaaactgtcggctaacataaactggacgatgtatggccgtcaaaagccgcggcagtacgcggaaattcgcaacgagactggggttctcgccaccaatgaagtcggcgcttattcggtagtagggatcggcggcaactatcagttgatgaaagatattcgcctgaacgccggcatcagcaacctgtttgataagcagatttatcgcgagaacgccggtgcgtcaacttacaacgagccggggcgcgcctattacgccggcgttaccctaagtttctaa

SEQ ID NO: 93235 - DNA, 537 bp, Enterobacter aerogenes
atgacgtatcaacaagctggacgcattgcggtcattaaacgcattttgggatgggtcatcttcattccagccgtgctgtctacgctgatttccgtactgaagtttatgtacgagcatagcgaaaagaaaccgggtattgatgcggtgatgatggatttcgcccacctgatgattgagatggtgcgtttcaatacgccgttcctgaatttcttctggtacaactcgccgctgccggagttcaaacatgcgttgaacatcggtttctggattatctacgtgctggtgtttgtcggtatggcgttgcaggcttccggcgcgcggatggcccgccaggcgaagtttttacgcgaaggcgtggaggatcagttgattctggaacaggctaaaggcgcggaaggcctgtcgcgcgaacagcttgccgaacgtattgtcgttccgcgtcatactattctgaagcagtatttcacgctttacgtgctgccgattgtggtgattgtgatcggttatattttcttctcgctgcttggctttctttaa

SEQ ID NO: 93236 - DNA, 720 bp, Enterobacter aerogenes
atgatggcaaacgatccaatggacagtatcctcaaaatcagatcggtcagcactatggctgaactgcaacgacacgtcagaaacgtgatgtccgcttttggctatgaccggatcgtactattttctatttccccactacgtactccctatattgaacgcatttactggattgaagggcactggtttgacgatgaggtagatgaacaaacctacctgcagcgctgcccggtcaaccagcatttcatccatacctcccggccatttttgtggcgaaaaacaggtagtgacacggccagcggtgagtatcaaattgtcgactttcccctgaaaggcgcgcttcatggcatgcagatccccattttcggccgcacggggattgaaggggcgctgagccttggcggcatggccatcgacgcttctccacgagccgaaatgctgctgatgttactgggcatagaggcatttcattgcgcgcggagattgttgagctctgttgaggaaggtaacgcaaccgtactgacccggagagaaatcgaagtactcactctggtagccaaagggcttaggcagggagacattgccgccgtgctggggatctctgaacgtacggtggagaatcatttgcgccatgcgcgcggtcgcctgagagtggtgaccacggcgcaggccgtccaggtggcgatgctgaacggtgaaatatcgccgccacacagtgaataa

SEQ ID NO: 93237 - DNA, 468 bp, Enterobacter aerogenes
atgtttgatttttctgcagaaataaaatcatttcattcgttaggcgatgtgctgttaaatacaaatatatctgtctatcttgctgaaatgtatgctgaccattgtgttgagtacaaagagtatcttctacctgatgcgagtaagagatttgcctatgtattggatgatactttaactatatcaaccgaacctgatggaaatatattttctattggatgcaatcaaaattacaaagggttatacaaaaacttattatatgccggtcaagaatttggtgagataaaaaaactcacttatcggcaaagaatatttaatggttccattattatagacgaggattttggcattcaatttatattaccctcaccattttatgagatagctgacagtatagataacattccgtccgacttgaaattgaatgaaatatatataggggatttttcattttggaatccatgtaaataa

SEQ ID NO: 93238 - DNA, 786 bp, Enterobacter aerogenes
atgtttcggatagaatcgtcagcagtggaaagtccacaagttgtggttgaatattataagtctaatgcggaatttacgtctggggaaggcatcctgtatacagagtttatgggggaaattgccacaagacagataagtgttttggatagcttatattacccatcagcctcgttgagtgatgaaaatgataaaataggtttccttctttatgatggaaaaaaaagtgaattagaactatctgattcacagattatatcaaaagacgaatttgaggctgtgtggttaatagctatgaatgatcacaaagaaaaagaaatcattcaatatgtaactggagatgctgctgtcccattaagttctgccactatcattgctcatatagttaataacaaaggtaaatgggggaaaggatttgttttatcattatcaaaaaaatacccagcagccaagaaggtttatttggataaatattctaacacatcagatttaactttgggtgatatacagttcatatctgtagatgaaaaggatagaatatttgtggctaatatggtttctcaagatgggataagaaaaaaccatgctgataaaaaacaatatttatcatatcacgcacttgaggaatgtcttgaaaaactatcggagtttgcattgattaatcgattggttgtacaaatgccaaaaattggagctggattaggtggcggagattggaagcatattgagagtttaatacaaaaacatttatgttataaattaattaaatgtactgttgtgatattgtga

SEQ ID NO: 93239 - DNA, 258 bp, Enterobacter aerogenes
atgactatcgatgagacgcaattacgggcggtgattacaggagcgaaaaccgaagtgtcggccgctgaattggcggtggagttgctggcggcgcggcaaaaaattagcgagctggaacgtcaactggcgacgccgattcgcttgcctttctccagcgcgagcccggtatgtgaaattgaagcgggatatgctgcaggagtcagcgattgccgtcaggctattcgtgaagccggttttcccattgagggggaagattag

SEQ ID NO: 93240 - DNA, 2778 bp, Enterobacter aerogenes
atgaccagtaacgaacgaattctgcagccatttactttaccgaatgggactgaactgaaaaaccgtttgctaatggcgccaatgaccacctgcaccggttatttcgatggtaccgtcaccagcgagctcgttgaatactatcgcgcccgcgccggcagcatcgggactatcatcgttgaatgctgctttattgatgattatggtctggccttcccgggcgctatcggcatcgataacgatgaaaaaatcgccgggctggcgaaaatcgccgaagcgattaaagcggaaggctcaaaagcgattttgcagatttaccacggcggtcgcatggttgacccgcagttgattggcggtcgccagccggtggcgccgagcgccattgccgcgccgcgcgacggcgccgctatgccgcgcgccctcagtggtgaagaagtcgaaggcatgatcgccaaatttggcgacggcgtacgccgcgcgattcttgccggtttcgacggcgtcgaaatccacggcgccaacacctatcttatccagcagttctattcgccgaactccaaccagcgtgacgaccagtggggcggcagccgtgacaaccgcgccagattcccgctggcggtactggacatcacgcataaaatggcccgtcagtacgctgacgatgcctttattatcggctatcgcttctcgccggaagagatggaagtcccggggatccgcttcgacgacaccatgtatctgctggaaaaactggccgcccgcggcgtcgattatctgcatttctcagttggcgcgacgctgcgcccgtctatcgttgataccagcgatccgacgccgctgattgaaaaatactgcgccatgcgttctgaaacgctggcgcaggtgccggtgatgggtgtcggcggagtggttaacgcagccgacgccgaacagggcctcgatcacggttatgacctgatggccgtcggccgcgcctgcatcgcctatccggactgggcttcacgtatcgccgccggcgaagagctggaactctttatcgacagcacccagcgcgaggcgctgcatattccggaaccgctgtggcgtttctcgctggtggaagcgatgatccgcgacatgagcatgggcgacgccaaatttaagccggggatgtttgttgaaaccgttcaggatgacaccaatgaactggtgatcaacgtcagcctcgaaaatgatcatattgccgatatcgaactggcggcgagcccggtgcagaccgtcgagttcaccaccagcttcgaagagatccgcgaacgtattctgaccgccaacaccccgcacgtggacgccatttccggtgccaccagccagagcgaagcggtgaaaaaagcggtcgccaaagcgatgctgaaatccagcaaagcgctggccgcggaagagggcggcaacgataccgcgccgaaaagctatgacgttgtggtggtggggagcggcggcgccggtctggctgcggcgattcaggcccacgacgaaggcgccagcgtgctgatcgtcgaaaaaatgccgactattggcggcaataccatcaaagcttccgccgggatgaacgccgcggaaacccgcttccagcgcgtcaaaggtattcaggacagtaaagagttgttctatcaggaaaccctgaagggcggccacaacaaaaacaacccgcagctgctgcgccgtttcgttgaaaacgcgccgcaagccattgaatggctggcggaccgtgggattatgcttaacgatatcaccaccaccggcgggatgagtatcgaccgtacccaccgtccgcgcgacggatcggcggttggcggctacctgattagcggtctggtgcgtaatatcaccaaacgcggtatcgatgtgctgctggatacctcggtagaagagatcctgatgcgcgacgacgaagtgagcggcgtgcgtcttatcaacgatgaacaagagatcatcgaagtgcagaccaaaagtattatcgtggcgaccggcggcttcagcgccaacagcgcgatggtggtgaaatatcgtcctgacctcgaaggcttcgtgaccaccaaccataaaggggcgaccggtagcggtatcgcgctgctggaacgtattggcgccggcaccgtggacatgggcgaaattcaaattcacccgaccgttgagcagcagacctcgtacctgatttccgaatcgattcgcggcggcggcgctattctcgttaaccagcaggggaaccgcttcttcaacgagatggagacccgcgataaagtgtctgcggcgattatcgcgctgccggaacactatgcttacatcgtcttcgacgagcatgtgcgggcgaaaaacaaagccgccgacgagtatatcgccaaaggcttcgtcaccagcgccagctcgccgcgtgaactggcggagaaactggggatggattaccatgcgttcctcgctaccctggaatgctacaacggcgcggtggaaaaacagcacgatgaagcgtttggccgcacaaccgcgctgcgcgcgccgattaacgaaggcccgttccacgccattcgtattgccccaggggtacaccacactatgggcggcgtgaccattaataccgatggcgaagtgctgaatgtggcgcagcagccgattcgcggcgcctacgccgcgggtgaagtggttggcggtatccatggcggtaaccgcatcggcggtaacgcggtcgcggatatcatcatcttcggtaccctcgcgggccatcaggcggcgaaacgtgccagaggataa

SEQ ID NO: 93241 - DNA, 1506 bp, Enterobacter aerogenes
atgaaagagaaaaagacaaccataccgcctgccggtgccgcgtctaacgcggcgtataaacgtctgatcatgatggcgttgcccattatcgtcgccgtactgctgctgttcgtcccggtgcctgacggcttaccgcctttcgcctggcactattttgctatcttcgttggcgtcatcgtcggccttatcttcgaaccgctgccgggcgccgttatcggtatcaccggggtggtggtgattgctttatgtagccagtggctactgttcagcccggaacagatggcggcgccaagctttaagctggccggcgcgtcatttaaatgggcggtgagcggctttggcaactctaccgtgtggcttatcttcggcgcgttcatgttcgccgccggctatgacaaaacccagttcggccgccgtctggcgctgattctggtaaaatatcttggccgccgcagcctgacgctgggctacgccattaccttcgctgacctgctgctggcgccgtttaccccgtccaacaccgcacgtagcggcgggaccatctacccgattatcgctaacctgccgccgctgtacggttctaaacctaacgatccgagcgcacgccgtattggctcttatctgatgtgggtagccattactgccgcctgtatcactagttccatgttcctgtcggcgctggcgccgaacctgctggcgctggcgctggtaaaaagcatcgttggtatcaacatctcctggggtacctggtttatcgccttcctgccgctcggtatcctgctgatcctggccatgccgctgctggcgtactggttctatccgccagaagttaaaatcaataacgaagtgccgctgtgggccgctcgtgaactggagaaactgggcaaactgtcgcgcaatgaaatcctgctgctggtgttcgtctgcttcgcgctgatgatgtggatcttcgccgccgactggattgaaccggcgctggctgccctgctggttatcgtgctgatgctgtggaccggcgtgctgtcctggagcgatatcaccaacaacaaagcggcgtggaatacctttgtctggttcgccacgctggtcgcgctggctgacggtctctcctccactggtttcatcgcctggttgggtaaagaaggcggcgcgctgatgagcggtatttctccgggggttgcgaccatcgtcctgctgctggcgttctatctgctgcactacctgttcgccagtaccaccgcgcacactaccgcgctgctgccggccatgctgaccatcgcttcgactatcccgggaatgaatatgcaagtcttcgtcctgctgatggtgacctcgctgggcgtgatgggcatcatcaccccgtacggtaccggtccgagcccgatttactacggcagcggctatctgccgaccaaagactactggcgcctcggcaccatcttcggcgccatcttcctggccgccctgctgctgattggctatccgtggatgtccatgatgttctga

SEQ ID NO: 93242 - DNA, 1617 bp, Enterobacter aerogenes
atgaacaggatccaggcgttattaacggcgtgttttctgctatggctggccttcccgctttcggcggcagaaccgcgtcagcagcccaccgctcgcgagcaggcgcgaaccgtcgctattttccatcaaccgatcgttatgctgcaggccaccttcggccagaccacgccggaagagcgggttctgcgcatccgcaatacgctacgcgcctttaccgaggccgatatcagccagccgctacaggtggtgccagtcacccgctacaaccagccgggacggctgtttctgatgaatggcaaacctattatgttgctaagccaggccgacctcgatgaaggcgacgatcttaccctcgatcaggcggcgcagcgcgttcttgcccgtatggaagcgcagcggacgtcgctgcgcgaacagtacaatacccgctatctgctgctggcggcgctaaaatccgccgccggcgcgttgctcctcgccctggcctgctatctcgctttccgttcgtggcggcgagtgaggcgctttttccatctgcggatcctcgaaaaacgcagcatgatcccgcataactggcggcgttttctcggcaacattgaaagccgattatacgcgctgctggtcatactgcttggggtactggcgggttatgtctggctgagttgggtattcagcctgtttccgtggacccgggtatggggagagtcgctcggtgagtggtcggtaggggtgattcgcgatatttcgctgtccatcgtgtcggcgctgccgggattgatgatcgtactgcttatctttctgattacgtggtttatcatccgcctgctgaaggtggtgttggatcaggtcgccgccggacgtctgcagatccccggtctgcatccggaaaccgtcggcgccacgcgaaagcttatcgccgtggttatctggctttttgcgctctccgccgcctatcctttcctgcctggcgcaaactctctggccttcaaggggattagcgtgttcttcggtctgatgttgacgctgggctcagcgggggtgatgaatcacgccatgagcggcctggtgctgatttatacccgcgcgctgcacaaaggcgactggatccgcatcgccgataacgaaggccaggtcagcgagatcggcatgctggcgaccaaaatcctgacccgcgaaaactatattgtcaccctgccgaacgcggtggtggtcagcggtaaaatcaccaatctcagcgccagtgacccgcaacagggaatcaacctcaccaccggcgtgaccattggttacgacacgccgtggcggcaggtacaggcgatgctggaactggcggcccaccgcgcccagggagtggatcatcaggtgccgccggtggttcgcaaactgggattgctcgactggtatacgtcgtatgaactgcaggtgcgactgttacccgaaacgacactgccggaggggcgcaacgcgctgcacagcagcattatcgatgtatttaacgaatttggcgtgcagattatgtcgcccaattttgtcatgcaaccgaaaggcgcggtggtggtcgccaaagaggattggtataccgccccggcggtcgcgccgcaggagcgcgacaggtaa

SEQ ID NO: 93243 - DNA, 531 bp, Enterobacter aerogenes
atgttttccgtggcgcagggagcgcacagagggcggccaatcgccgccgccccctgtacccccggactctggccgccaaaatcgccacttcgtggtaccttcgacttatccctgcaggcttcgggtcgggccgaggcagcgtccttgcaaaacacggccctcagcccgcatccatgcgggctgccccggccttccgggaacgtctcagcgattttgaggccaccaacaccggcagttgcagccagcatggggaataaattaaaggcaggctgcacggaccgtaggccggataagcgcagcgccatccggcattgcctgatgacgctgcgtcggcgtaggacgacgttacctgtcgcgctcctgcggcgcgaccgccggggcggtataccaatcctctttggcgaccaccaccgcgcctttcggttgcatgacaaaattgggcgacataatctgcacgccaaattcgttaaatacatcgataatgctgctgtgcagcgcgttgcgcccctccggcagtgtcgtttcgggtaa

SEQ ID NO: 93244 - DNA, 390 bp, Enterobacter aerogenes
atggaagataaacaacgttaccagcagggaatggaggttcgccgcaaggtattaggcgatgctcacgttgaccgtactctgcagaatctgacgccgctgaacgaggagtttcaggatttcattacccgttacgcctggggagaaacctggacccgtccagggctcgatcaccatacccgcagcatgatcactattgcgatgctgattgcgctgaaccgcgaggcggaacttaagatgcatctgcgcgccgcctttaataacggcgtgacccgtgatgagctgaaagagctgattatgcattcggcgctgtactgcggcttaccggcggcaaacgccacgttgcacctcgcgcagcaggtgtttgccgagatcgacgccgcgcaggcgtag

SEQ ID NO: 93245 - DNA, 1131 bp, Enterobacter aerogenes
atgtctggaggattagttacagctgcatacattgttgccgctattctgtttatctttagccttgcggggctgtcaaagcacgaaacgtcgaagcaggggaacctgtacggcatcgccgggatggcgattgcgctgattgccaccatttttgggccggacagcggtaacgtcggctggatcatcgtggcgatggttatcggcggggcgattggtatccgtctggcgaagaaagtcgaaatgaccgagatgccggagctggtggcggtgctgcatagcttcgttggtctggcggcggtgctggttggcttcaacagctatctcgaccacggaccgggcctcgatcaggtgctggcgaatattcacctgaccgaagtattcctcggtatctttatcggcgccgtaaccttcacgggctcgatcgttgcctttggtaagctgcgcggcaaaatttcgtcaaaaccgctgatgttgccgaatcgccacaagctgaacctggcggcgctggtcatttcctttctgctgctggtggccttcgtgcgtaccgacagcaccggaacccaggtactgtgcctgctggtgatgaccattatcgccctggcgttcggctggcacctggtggcgtctatcggcggcgcggatatgccagtcgtggtatcgatgctgaactcctactccggttgggcggcggcggcggcgggcttcatgctcagcaacgacctgctgatcgtgaccggcgcgctggttggttcttccggtgccatcctctcctacattatgtgtaaggcgatgaaccgttcgtttatcagcgttatcgccggcggtttcggcaccgatggcggcagttccagcggcgatgaagaagtcggtgagcatcgtgaaatcagcgccgaagagacggctgaaatgctgaaaaactcgcattccgtgatcatcacgccgggctacggtatggcggtggcgcaggcgcagtatccggtcgcggaaatcaccgagaagctgcgcgcgcggtatcaaggtgcgcttcggcatccaccctgtcgccgggcgactgccggggcatatgaacgtgctgctggcggaagcgaaagtaccttacgacgtggtgctggaaatggacgaaatcaacgatga

SEQ ID NO: 93246 - DNA, 174 bp, Enterobacter aerogenes
atggtaatgaccacgctatcccccttagtagtgacgcgttggagtgaaagcccggcggtgcaggaactacaagatacccaattgctgcggccttgggcaaaagccaccgcctgctgtcgtagcaagaaagcgtggaagaggcgttatgtcactcgccagaaacaggccgaataa

SEQ ID NO: 93247 - DNA, 618 bp, Enterobacter aerogenes
gtgcgccgcataccctataaccctgacctgtacatcccggaaaatacctcgatcccctgctcactggatcgccgctttgtatctgaccgggcggggaaacttcgctgcacggtcactactgacatctggagcgccagcggcaacacgaagctgatagagaaaggcaccacggcatcattactttaccgcgccatagcggaagaaggtatgaagcacgggcaagggcgggcattcatcattgcgacgaagctacgcacccgccagccgccttatctcgatatcccgttggttgataccagcgcggctggcgatctgggcgaggctggcgttgatggctggatagattcgcacttctgggaacggttcggcggcgcgttaatggtcggcatgatccccgatattggcgcatgggcatccaacagtgcgggtaaaaaagaccgcaatacggactatacggaaaacagccgccaggctatggcagatatggcgcgtaccacgctggagaacagcatcaatattcccccaacgctctataagaatcagggcgagatcatcaacctgatcacaggcgaggatattgatttttcaaacatttacacactgaaaatcaaacaataa

SEQ ID NO: 93248 - DNA, 714 bp, Enterobacter aerogenes
atgtttatcgttaccaacagctttcacgatctcccctttattcagcacgccgaatgcggctatcttcgtgctgacccggcgttgacattttgtcgggtacgtttcgccagatcgcaactacaggacgctctttttagccagtacgccatcccgctccctccttctcttactggcgccgtcgcaaaacgtaaagccgaatatctggccgggcgctactgcgcgcgctatttgctgcaacaatcaggttgtttcgaaccggtgttaaccgctacggatcgtgcgccaatttggccggcaggctggcgaggaagcgtctcgcacagcgaagatattgccatcgcggtggttagcgccgaggacgacggtttgtatcccggggtcgatatcgagcatctgcaaccggggatcatgctggaaagcgccgatatgtttgtctcgagaccggaacagacgttactttcctgttgtggtctggataaggagtgggcgctgctgctggctttctcggccaaagaaagcctgttcaaagcgctttatccgcgcgtacagcagatgtttgattttgatgccgccgctatggtcgcactcgacccggcaaatcagcgtttcacgttgcgccttaataaaaccctcagcgacgagttgcccgcaggtagccagttcagcggcgaataccacttccgtgaaggcaccgttcttacctgtctacgctaa

SEQ ID NO: 93249 - DNA, 240 bp, Enterobacter aerogenes
atggaatggtgggtaaaaaaagtacggaaaaattcatctccagcaagaacttgcgtggttctacagagcggtcagatcgtggtgattgctgaaatcgaaagccgatgcaaactgcaggaaggcgataagttaacgcctggtcctaatgcgctttattacatcaacaataacagcgcggcgacattaagagtgataagcgcaagtaattttagcgccgaacgctgggcacagactgcctga

SEQ ID NO: 93250 - DNA, 1356 bp, Enterobacter aerogenes
atgtcgagtaataattattatgatgtaacagagtggagtgaaggtaacccttttgaagatatcggttttgtgattaatagtattattgctgatattaaaaaacggcagactgacacagatgttaatgatggcgggaagccgggggccgtgatctttattccacctggagactatcatttgctcactcaggtagtaatagacgtcagttatttgaaaattaaaggggacggacatgggtttacctcttcaagtatccgttttaataccccggaaaatgagtgggcaagctggcatgaattgtggccaggcggtagccgtatacttgttgatataacgccatcagctacgactccggaagcggaaggggcggctttttatattgagcgtggcggtgacccaagaataagctcagttgagtttgctgatttttgcattgatgggttacattttgtagatgatggttcgggaaataacgaccctgaaaacacctacctcaatggtaaaacgggtatttatattgccagtgcgcaggactcattccgtattagtggaatgggattcgtatatcttgaacacggcatcactatatataatgccgatgcattggcgatacataataactttattgccgagtgcggtaattgtatagaactccgcgggtcgggacaggcttcaaaagtaactgataatttgataggtgccggttatagaggatattctatttatgcagagaactttggtggccttctggttacagcaaacaacatttttccccgcggtaaaagcagtattcatttttctggtgtcgtccgttctgcagttagcagcaacaggtttcattcattctatccagggatgctggtttttgagaaaagctgttcagaaaacctggtgacggcaaaccactttttccgtgaacatgaaccttgggaacctatgcaggcgtatagtaatggtttagatgacttgtatgggttgctatatatagagggtgagaataattcgatcattgctaaccatatttctgaatcgattgataaacagtatatcgttcccgttggcgctacacctgtgataatacggttggcatcaggagatagtaactatatttctgacaatcatattgttgctaccaccgatacatcatcgttaaaaggtcatgcagaatcttgtttctctacacaagttagagcgctgctggcattaaaggggttggaagttctcgacgtgacgaccgtacaggtcgacgcagcatctcaacgtaataccatacttgattccggaagtgacgatcaggttgtgcttgataaagcggtcaatgcgtttagagcaacgccggtacccggcttgtcataa

SEQ ID NO: 93251 - DNA, 1434 bp, Enterobacter aerogenes
atgtctgcaaactcaatcgaaaggcaaggtgtttacggcaaactgcatttaaaagaaaaaattggttatggaatgggagatgctggttcttgtatgatttggagtgtactggcgttatatctaacatggttctacacagatgtttatggcttagctcccggtgttgtcggtaccttgtttctggtcattcgtatttttgatgcctttagcgatccggttatgggggcgatttgcgatcgtactcgtagccgatggggtaaattccgaccatggttattatggatggcattgccatttggtttgggagcagtactgatgttcacaacgcccgatttaagtatgaatggaaaaattgtttatgcctgggtgacatatcttgtgatgtcattgatttatactgctatcaatattccatattgctcagtagctggtgtgatcacgctaaaccagaaagagcgtttaggctgtttgtcatggcgatttttcctcaatggattggcgacgctaattgtctcttcttcaattttacccttaacagactggttaggtaacggtaacagagcggctggttttcagttgactatggtaatcatgggaggcgctgcgacactaatgttcttcttttgttttgccagtatcaaagaacgtgttactgcaattaaagttaatgactctttaataaatgatctaaaagatatcatcaaaaacgatcaatggttattgatgatatgtattactttccttaatgtttttccggcatttattcgtggtgcagtgactatttattatgctacctatgttatgcaagcctccgtcggatttactacgttttttttggctcttggtgttgcatgtaacatgctaggtagtgttatagcgaaaccactcaccgatcgttttgataaaattaagctgttccgttcgattaatatcgttcttggcttcctttctttagctctatggtttgtcgatcccaggtctttgctgccactacttacactctttatcatcattaacatcctgcatttaattcaatcaggcccaatattatgggctatgatgtccgacgttgatgactacggtgactggaaatacggtaaacgccttaccggtatttcatttgccggtaatttatttatgttaaaaatgggcctggcagttgctggtgcgattgttgcgtggatattatcattaacgggttacatcgctaataaacctcaacaaaacacagagactatcgaaggtatcattattatgttttctttactgccaatgattacctattttcttagtgcatttgtagttagatactttaaattgaataaccactttcttgagcaaattaaagtggaactcgctaagcgtgaacttaataacggttcttcaccgcatcatgacatcgggcgagatacgaccacagtggttaatcattag

SEQ ID NO: 93252 - DNA, 894 bp, Enterobacter aerogenes
atggatttcttatgctatgtgcccagcaagagtgcgtttcaattgagtgggaaatgttctgggctgattgctgttgttctgccaaaccttgtcaacccacatttttgtgaactgctggcgacatttgaagaagaggcaagatacatcggtaaaacggttatcgtcaaaactcatcagaatcaaccgcagctagataagcaaataatatatacgcttattagtatgggtattgacagtttgctatgggtaccaacagaagccgaaagcgaacttgcagaatggctcatcgcaactaatatccccgttgccgtggttacgctggtatcgcgatttttcaattctgtttctatcgatcaaagtaaaggggcggaagttatagctgagcattttattcagaccggtcataccacgtttggatttgtagcgcaggaaggcgcagataaccgaaaggttttttcatgggcaaaacgaattaccggccagggattgtctatagataaagaaaatcagttttggatagcgaaaggtgagggtgagaaaacgtcagggcatattagtatactcgatgatattattgtcaggctagccgcgagaataaatcattgctcatctctctgggtttataacgatgtggctgctagttatattattgatgggttaaaagaaaaaggaatatctgtgcctaaagatattgccatcgctagttttgataatactttactggcacaaactaaaaaaattaccagtgtggcgcaaccgataagtgaaatcgcccatctggcatttcaaatgattaacaacgaaacgaagcaaggcagtattgaaatgcacgaaattgtctctcggttaattattcgggagagtagtgtgagtattaatattactttgttttaa

SEQ ID NO: 93253 - DNA, 573 bp, Enterobacter aerogenes
atgagtatctattctaatcagcacgccggtggggcaacaatttgcgtagtcccgttcacgcaagctatcgcgctaagtggcgtattcgcggcgggggcgctgctattgagcgtttcctccatgattggcgctatcggtactctgtcgtctctgctgacgctggtgggagcttttgccgttggctatgcaatcgcgcgttggcagccgtggccagcacgttttagcgttagggtatcgtgctacgcctttgtgctgtccgctatgggctggttaatgttactggtgctgtggaatagcggacacggttggctatctcaaatgccggggatcgcctttggtggattaggtctgggcatcgtctggcaaaacaatgctacagcaagatattcgtcgggaatgatggcgaacatcccgatgatagcaggtatcgttattattatcctggcgactctgctaaccaatcactatgcggattcgggaaagggaggttttgtctacgcactggcggtcctggtggatctggcattgctgggagcggtgctggtgaaaattaggcagcaggaaatgtcgtaa

SEQ ID NO: 93254 - DNA, 345 bp, Enterobacter aerogenes
atgtctatgaacagtgaaaataaaggttattcattagcgatagtcaatggcaacaatcacgaaaaatatgagaaagtttatttaaagccgatggcgctctatgttcctgatatcgcggctcaggccgtagcagaattactctctgggatttcgagcgataatttacagggtaaaggggttagtctgacggtaacgaataataataatggcgtgtcggtggataaagactttgactcgcttgactccttacaggacccgcagatcgccgctgacgcggtgaaagagctcatcaatattgtgcgcggctatgagtctgacgaagagactaacgtctgcggctggtaa

SEQ ID NO: 93255 - DNA, 1176 bp, Enterobacter aerogenes
atgttattactcaatgatggtggaaaaatgcatcaaaataaaaactggtctcctgagcttgatggcttgcgaggctatgcttccttgtgggtcctgctcggtcacatttgtattttgacacgatgcaacatccctatcctgagtaacccggattttggtgtcgatcttttcattttgctgtccggctaccttatggccaagaattacatagagaggcagcacgtcgaaccctggatgtccgttaaaacggtaatttcattttggacaaggcgctttttccgaatcgctccgctttattatgtccttctaattgtggcatttattttcggtgaaacctttggtcactaccgggatgctatcgcgctggcatggcctgaaacgcaaactgagaccgcgagatataccgactcatcaatggcgaacgtgttaacgcacatctcattcacctttggtttccttccttattattcattcaggacagtccttcctgactggagtattgggcttgaaatgcaatactatgccattttcccgtttatcatgatgctggtcatggggattggtttcattaggacttgcctggcattgattgtaatgtgcgtaatggctgcatttattttccctggatatttcgcagcattcccgatgccctcgatgattttattcaagctacctttatttatatcaggaatgttgctctataaagccgtagcagagaaccgtaagatctacgttatggttgcattactttctccactcgctgcatttttgatgggttactttacttcacctatccgtatgatcattgaagttatgataatccttgggatgtcgattcttctgatgcctcatagcgataaatcgccactaaaaggtattgtcttctttagcagaaagttactttccgcccgcttcagtcagttcctcggtgacgtatcatattcggtatatctgttgcatttgatgattgttattccaattatagggatacttgtcaagtataatggatttgttgatttggccgccccattacgtagtctacttgttgccgttatttcattaccaattgtttacatgatctcattaggtctttatcaatacattgagaaaaaaggaattatgcttggaagaaaaatcattaattccaaaaaaataacaacaagtgaagtaatgtaa

SEQ ID NO: 93256 - DNA, 1263 bp, Enterobacter aerogenes
atgatgctcaaagtaaagtatgcatcgtttatcatgttcatctgtgcactaggaagccagctaactgacgtgagtgtgggggtactgaagctatgggagttgatggcgattatcattttcccatttttcatgactaaaatacacaaaaagacattacctttcgtattgttctttttttctctattagtgatatcattagctacacagctttttacagatgttttcttctggaattatggcggcctaaaacaaaaatatgtaatatcagtagttcgtttcgctgaacttatgctatgtatctcaaccgctattgtaatgctcaacgctgcacgaaaatataaagttgaacttcccgagttgattagtaaattcattacttataatttctatatgacattatttgtacttgggttattaacgattgatatagtcgctgggacacatattgttagttattatcagatccatcgattgaagggattctatgttgaaggtggaccttatggtttatatttagcgtctctgatatttcttgagtttctttacaagaaaagaaaattgatgatgtttacatttgcaatagcacttgcgttttcacagtcgaaagcaggaatatgtgcaattgcgattttcctctttgttagttttatgatgaaaaacaaatacttaagtggattccttaaaccagggaacttcataagattttctttcttcatagcactgagtatttctatttcggcattcgcaatttttaagattgcatataactatattgatgattatcagaatgtatattcattaattaaagggcgtgcaggtgatccaagtttgattatgggtcgaattgctgcatcccacattggcccgaaaattttcgaagacaatcctatatttggcgtgggcctcggtggttattcgttagtaagaaataacttagaatacagggaaggtttccccgttgtatctggatgggatctaactggccttggaggatttttcaatttaatgattgaaaatggtatatttggcgtgttgggtttcattattattattttattgacttacaaaaaagatcttccaggcatgtgctttatgatgctatttattattccttttatttttggcgcgcagttatatatgttctatccttgggtatttcttggattctactttgtatatcgttatggcgacccaaagttgagtgctgatcaaaaagccactgtcgatagtgcattaacggctagtcaggcaaactctaattaa

SEQ ID NO: 93257 - DNA, 1680 bp, Enterobacter aerogenes
atgattttttcgcgaaggaattttctaagatatatacttccatccgcctttatcgtggatgcaacccttaacaaatcagaagcttctccagttgctattgctaacgataacactcatttagataataatgcagtcctttcggcctccccattacattataaggcccaatatagtagtcagccagatgatacggctgcggttcttactgcgattaacgattgcattaaaaacaataaatatcttgatcttaggggaggcccgtggaaaatatcgaaaactttagatctgacaggcgtcaaatctattatcacagactggtcaggtcggctgattatcaataccggtaattttcaagcaactaataatagtaattttgctgtaattatcggaaacccggactctgattataaaactgatcgagcaaattatacaacggtcaatggccttttgtgtattattgctgaagaccgaaaaatacctttaaatggattgtttataaaaggctcacttttaagcttcgattctattcgagtcataggatttaatggttccggtatagtattatcttcagtatgggatagttcttttaaaagtctgtcaagcgagctttgtggcaatgtccataaataccaaatagcaataattagcgggggagatacctcaaattgcctttcaatcgataggatacagtcggaaagagcatttcataaatgtttatatataaacgcgatccgttcaacactaaacactctacatgcagagagaactacgattttaactagagatgatggctcaatcctttcatcttccttgaaatataccaatgtttctataacattgagtaattgcgttctaaatcaagttattcatgacacgtccgcaaaaagcaatgatcttagcaaatcagagaaaattgttgcagataaatcatccgttgtcttaaatttagttgatactattcttaattctgctcatttaaatggatgtgttctatcaacctcaatggcaataagatctcaatttaattctgttttctgcgaatcatggttctttgaggatatccagtcaatagataattcttcaatcgactgctcaaacattagtaaaacgcttgtaatcactcgaaatctattattacaaaactcaaatctggcatcactcactatgccagagaatgctcatgacatacttattgataaatgtaaaatcagcaacgtttctataagtaaaaaaattaccggcaatatactatttcgttcctgcctattccagccagagatggaattattagaaacaggcagccaaagtgatacaacaccacaaatttcactttcagcaaacatccctgtttcttttaatgattgtatattccttggcaaggttaaaggaatgcagaactcccaagcaatttttaaaggggggtttattaatgatgcagacatcgcaagtggatttgttggtcaattctataatgtgcaaattaaaaaattcactttctctggagaagcggcctttattaccaatcaatgcattattgaggatgttatttcatggagtcctcctaagaacttaatcgcgccattaggtgtaaaatctgaaataatgagtgttcaaaatggacattctcaatattactcgcccggaaacaatggtcagtggttattaaaacaaaaagattaa

SEQ ID NO: 93258 - DNA, 1344 bp, Enterobacter aerogenes
atggtcatgtcaaccttcggggttggcctttccgtttcattaggtaccgtacaaacctttggtctaaaatttctggtaggttttcttttcatactttttgcactttcgttgttatcgattaaaataccaaaagcacgctattctgttaaagaacgtgttattttgactattagtcttatccttattctttcaaagcctgtgatagatggtgttagtttttgggggactaaattctttatcaataatatcgaatattcaccaacttttatttcgcagccatacatcgatcagtacaagattttttttggacctcttgtttcctcagtgtcgattatcgctgaaaatatagttgatgatgttaaatacaaaaagatagagcataaagaatatcctgattatattaaaaaagagactgaaggtagccagaacattatatatgtgattggcgaatcatctaaccctggccgctatggtatttacggctatggaaaagatactacgccaaacttatcgcagatggatagagatggacaaatatgtgtcgttaataacgttcactctccggctgcgcaaacacgacttgctgtaccgatgctggtttcttttgaaacgcccttgcagcgtggcaacttgtttaaatttaagaatcttatcgagatggcacaattgcagggctaccatacgtactggttcgactctcagatgcaaaacaacatgtggaacaagcctttcggttatctggcaaaatatgctgaagtactgcaaactccggaagataataatacccgtttcccagttaacgaggggcaggacgaaaagttattaccggcaatcaagcattattttaagcaatcgcaagagagaaatttttacgtcattcatctgatgggtaaccatttgccttattctgaccgtagaggggaagcggacaacccgatggttgatgattatgatgcgtctatttataacgtcgatgataccttaaagagtatttttacccttgctgatacctatcttaaagattacaagttggtttatgtatcagaccatggggaagttgtggggcagggacatggttttccatccagtgataatgaaatgtataaaattccattgctgatgaatgatgcgtcctggtgtgcgaaggctgaacaatttcgcaacaacaaccactacttctcatctgatttaaccaaattcctggtgttagaaatgatgggttatgctgtttctgatgagcatatgaaagacgcggtaaaaaattctgatttcgtgctgaatgaaaaagaagacgctattcgtttctctgaattaagggatgtgcccttaccgcaacatccttaa

SEQ ID NO: 93259 - DNA, 1269 bp, Enterobacter aerogenes
atgagtgcaaagttaaaagccatacgtggtatgcgcgacgtactgcccgccgaaacgccaatctggcaatggcttgaaaataaattccgccgtctgacctaccgttatggctaccaggagatccgcttacccctgctggaaccggtcgccttattcgaacgtgctgttggcgaagccacagatatcgttgccaaagaaatgtacaactttacggataaaagcggtgaacagattacgctgcgtcccgaggggaccagcggctgtatgcgtgcggtgctggaaaataatctgtgttacaacaaaacccagcgcctgtggtatcagggcccgatgtttcgctatgaacgcccgcagaagggacggctgcgtcagttcacgcagtttggtgctgaagccttcggcatggccgggccggacgtcgatgctgaaatgatttttatggtccgggatttgttccaggagctgggcctgaccccgcatgtcaggctggaaattaactccctgggcacgccggatgagcggcgggcccataaggccgcccttgttgactggtttaatgctcatcgtgagcaactggatgaagatagcctgaaacggctggaaaccaatccattacgtattctcgacagcaaaaacccgaccatgcagcccatgctggaacaggcgccgcgattgctggattacctgttcgaagactcccgtcaccatttttcgctgctctgcgaactgctcgataaggccgacatcccctataccatcaatccgcgtctggtgcgtgggctggattactacacccgcaccgtgtttgagtgggtgactgatgaactgggctcgcagggcaccgtctgcggcggcggccgctacgacggcctggcggagttattcaatccgaaggcgttgccagcctgcggttttgccatcggtatcgaacgcctgctgttactgattcagaccgtcagccagaaagataatccgttgtggcattttcaccctgacgtggtcattaccagtgaatgtcaggatgatggcctgcgggcccagatgctggcggagcttctgcgccaacgtattgaaaagttaagcgtgatggtggattgcagcggcaacaaacttaaacgccagcatcagaccgccctgcaaagtcagtgtcgcgcgattatcacgctgaataccgacaatgagatacggctgtgggacctcgccagctcccgtcaaatgtcgctcgaagagaaagcgctcattgactggctgcaacagcactgccagtaa

SEQ ID NO: 93260 - DNA, 1992 bp, Enterobacter aerogenes
atgtcctcacgtaaagagcttgccaacgctattcgtgcgctgagcatggacgctgtacagaaagccaaatccggccaccctggcgccccgatgggcatggctgacattgccgaagtcctgtggcgtgatttcctgaaccataacccgcagaacccgtcctgggccgatcgcgaccgcttcgtgctgtccaacggtcacggttccatgctgatttacagcctgctgcacctcaccggttatgatctgccgattgaagaactgaaaaacttccgtcagctgcactctaagactccgggccacccggaagtcggctacaccgcaggcgtggaaaccaccaccggcccgctgggtcagggtatcgctaacgcagtcggtatggctatcgcggaaaaaacgctggcggcgcagtttaaccgtccagggcacgacatcgtcgatcacttcacctacgccttcatgggcgacggctgcatgatggaaggcatttctcacgaagtgtgctccctggccggtaccctgaaactgggtaaactggtggcgttctatgatgacaacggcatctccattgatggtcacgttgaaggctggttcaccgacgataccgcgaaacgctttgaagcctacggctggcacgtggtgcgcggcgttgacggtcacgacgctgacgccatcaaacgcgcagtagaagaagcgcgcgcggtcaccgacaaaccgtccctgctgatgtgcaaaaccatcatcggcttcggttcgccgaacaaagcaggcacccatgattcccacggcgcgccgctgggcgacgctgaaatcgcgctgacccgcgaagcgctgggctggaaatacgctccgtttgaaatcccgtctgacatctatgcgcagtgggatgcgaaagaagccggccaggcgaaagaagccgcgtggaacgagaagtttgccgcctacgccaaagccttcccgcaggaagctgccgaattcacccgccgtatgaaaggcgaaatgccgtctgacttcgacgcgaaagctaacgagttcatcgctaagctgcaggcgaatccggcgaagatcgccagccgtaaagcatcgcagaacgccatcgaagcgtttggcccgctgctgccggaattcctcggcggttctgccgacctggcgccgtccaacctgaccctgtggtccggttctaagccgatcaacgaagacaccgccggtaactacatccattacggcgtacgtgaattcggtatgaccgcgattgccaacggtatcgcgctgcacggtggtttcctgccgtacacctctaccttcctgatgttcgtcgagtatgcgcgtaacgcggtacgtatggcggcgctgatgaaacagcgtcaggtgatggtctacacccacgactccatcggtctgggcgaagatggcccgactcaccagccggtagagcaggtcgcttccctgcgcgtcacgccgaacatgtccacctggcgtccgtgtgaccaggttgaatccgcgattgcgtggaaatatggcgtagagcgtcaggacggcccgaccgcgctgatcctctcccgtcagaacctggcgcagcaggagcgtaccgcagagcagctggcaaacgtggcccgcggcggttatgtgctgaaagattgcgccggccagccggaactgatcttcatcgctaccggttcagaagtggaactggcggttgccgcgtgggacaaactgaccgccgaaggcgtgaaggcgcgcgtggtctccatgccgtccaccgacgcattcgacaagcaggatgcggcctatcgtgaatccgtactgccgaaagccgtttctgcccgcgtggcggtagaagccggtatcgcggactactggttcaaatacgtgggcctgaacggcgccatcgttggcatgaccaccttcggtgagtctgcgccggctgagcagctgttcgaagagtttggtttcaccgttgacaacgttgtcgctaaagcgaaagcgctgctgtaa

SEQ ID NO: 93261 - DNA, 693 bp, Enterobacter aerogenes
gtgggacagggatggtatatgaaaagcatgccgtattacggttttattatcggtgtattactattaagcggctgttcgcgcccaatagcaaacaatagttgcgcagcgcgcccctctgtggccgcccctcatgaagagaacgacctgcgctcaacgattaaacacaggtccgcggaacgcatgggtcgttaccctgacgaaatggtatcgattgattattccggcccgtatcaaactggttttgatcaacagtataatattcatccaggtgacctggaatatacggtacgtgatgctaattataattttcttcctatcactcgtagttataatcatgatacgggcgaatggcaatatgccattgaggcgtataatggtacgcagtatcaattatacgtccgcaattatagccgcagcatggattatgaaattgtcgccacggtagatggtcttgatgtgctgagcggtaaggccgcttcgctcaataatagcggctatattgtgccggctggcggctcgctggcgatcaaaggttttcgtaaaaacagccgcgttgaaacggcatttgagttttcaaacgtctcagcgtcttacgctgtccaatctgcccaggagattggtcgcaacgtcggggcaatcggttttgccgcttttgccttacgcggaaaagcgccggcgccttgtcaaaaataa

SEQ ID NO: 93262 - DNA, 462 bp, Enterobacter aerogenes
atggctacgatccccactcaaacacacccgttacttgctattccattcaacgctgccacggacttcactgtccttgccagccactgcgaaaacttcgccgaaaccctgattgaaaacgacgaccccacgctgaaaatggcgctctgcggcagactcaacgccgctctgacgctgctccagcccacgctgttagaacccgtcccgccccatcttgttgaaagcctgaccgtcgataccctccccgcaaactcccctcagtttgggcccgaatgcaccgagctttgtagttattgccttgccctgacgcagacgctggcggggcaggggttttcctcagaaacggagaaattccttagttggctgctgtatgacctgatcaactactttgcggcggaaatgaaagccccgcgttggctacgcaccgccgacggtgtgaagtttattgacggggtggcggcatga

SEQ ID NO: 93263 - DNA, 894 bp, Enterobacter aerogenes
atgttgctgcccatacgagtcaacaagcgattcttgaatttatttaggacacttacattagacaaagcaccacggcaatctaccgtaaacttacatgttctaaacattgaaagtaacagttttgtttataataaattggttgaggaattaagagacttaatagtttgttacgtacattcaaatagaagaatagctgagtttgaaaaagattatccatcttttagtcccaaaccatatttagaagcaatacagaaatttcgcacttatacatcaaatgaaggtgagttaggtgagctactgttatacgcatttcttgaatcaggtttaaatgcacctaaattgttatccaaaatggagttaaagactgatgcaaatgattatatcaaaggctccgatggtatacatttattagagatcgataataattatcaactaatttttggtgagtccaaaatgtactcggacttactggagggggctcgtgaagcatttgactctattgctgactttaaagccaacggattaggatttgaacgaggcttaatagatactcatgtaataaatgaaatggttactgaagaaggatacgaaacaataaaatccatactattaccttcaggaaatgatgggccaaaccttgatctatcttttggcattttcctaggatttgagttgccggtcagtgatacacaattatctatgaaaaacaatgaatttcgagagtgggcatattcatttgtaaaaaataatgcgtctcgtgtaattgatacgatagaaaaaagaattataaagcataaactctttggtcacgactttcatatatacattgtccctttcacagacatagatatcactcgtaaaaaattaatccaagaaatgctaacaattggataa

SEQ ID NO: 93264 - DNA, 1923 bp, Enterobacter aerogenes
atgaacgaaaaagatgtagcaagaaaaattccattagcacagcgtctttcgatggacgcttatacaagtagctactttaaagagatctataattatatatcagttttatacgacaattttttgtttaataataaccacactcagaagcctgtatttgttgacacaacaaaaatagagaaagctttacgttttgctgatatcctatctcattcacctgttgaaactcatcgaacaaaatcatttgaaatcataagtaaaatagctgcatttcattcagatgatccttattttaaaatgataggctcagcggtcataaatcgtttgggtatatttgcagcagataatttaatatcacagggagtacatttaccgttagaccgagaaatagaatcatccataaaaaaatcattccaaaaaactagtatagatggattattttttacagacaaacaatatgaactttatcaatccctaattacctcaaacactctaagctttgccggccctacgtcaatgggaaaatcgttcgtcataaatgaatatataaaaaatattgtttttggtaatgctaaaaaaaatatagtgctcatagtcccaactagagcattaattagccaaagtacattaaaattaaaaaatgaactaagagatgaaattgatggcaatcagtataagatagtaacaacatcttacatgctcagaggaggtattgatcatagtaaagggtatattttcgtattgactccagagagattggttagtttaattagttcatctcctgatataattattgattatatttttgtcgatgaagcacaaaaacttactattaaaaatgatacacgaagtctcgtaacctattccgcgatcgaacaaacattaaatttaaattcaaacgcaaaactatttttctcatcaccaaatctatccaaccctgaaatatttaatgatttatttaatcgggaccatgctaaagtttatcgcagcattgaaggcgctacagctcagaacttgtactttattgacttattaaacaacaagtttagttatgttgataaaaacaaattaattgatatagataatgttaatcagacttatacatctgctaatgatcttatctttcagattaacaaagggaaaagtaagattatttacactggaggtatcgataacacattatctcgaacaagggatttcctacgttacataaagaaattacaaagtaaaaagaaacctcaaaattttgatctagcatctcaggtccgagaatttgtgcataacggctacgaacttgctgaagctatagagtatggagtagcatttcatttcggaaacctgccacaagcaataagagatcttattgaacaccactttaaaataggtaatatagattacttgttttgcacatcaactcttcttgagggggtaaatttacccgcacgttcagtatttattttgacatccaaaaagggtactagatattttgaacctgtggatttttggaatctcgcaggcagagcaggaagactagccatagagttagctggtgatatattttgcataaaagatgaaagtggaacttggaatgataaagcggtaaaaaaattaatcctatccaataaaaatgaaattgaactgactcccagcttttatcttaatgattctaaaaggattaaagaactagaacaaataataaaaactggttctactgaagggattcaaaatagcgaatttctcagaacactaagtgatatggtaaggattgataccctacgaactgacaaagccaataatttaccacttatcaattatttcagaaataatggaaataacgatatattacattatgccttgaaaagcatagataacattaacactgtctcttatacacatctgacgctgccgacgaagaggatagtgtag

SEQ ID NO: 93265 - DNA, 291 bp, Enterobacter aerogenes
gtgaacaatttaatcaatttcatctctgatttatccccattgtcctttatgggttaccatatattatcaaccacggtgatatatattctagtgatgattatcatctcaaagactcgtccttctgagaaaaacacgccgataccaccaccttactccatatctccgtcgtttcttgcctggctacggggcagagccaccgtcgttattcaattagccatgttcaggctattaagaaaaaactacgtaaccattattcattgcgctgagaatatcgaactttgcgccaactag

SEQ ID NO: 93266 - DNA, 543 bp, Enterobacter aerogenes
atgactcgtgtagaaaaaatactctttgaccatttttctacaccaaaacccagcgcccagaatttacccctttctctttacgtcgccgataaaaaccattggtcagacgatccccagtgttggggcctgatgctcagtccggcgcaacatacgtggaatatgatcctgatcgtcgttccttcattaattttaatcggtacatatctgtggaaaacgtttttcgatagtagcacgcttatccactccagcgtattaagctggctcatgatgcttatcgttaccgggctttggttgttactttggctcatcattaccttaaatgccacccggatggaccgtgaggggatctcaattaacattgttcataattatgtaaatagattaaaggatactctcatggctgaggccaagacaacaacggatgaaacagctgattattacgtcgccatcggtaaaacttccctgctacccgagaaatatcgtgaatttataacgatcatcaagccaataaattatgcattttctgttgaacggcttgagtag

SEQ ID NO: 93267 - DNA, 822 bp, Enterobacter aerogenes
atgtggactcttattatgcatatgcatcctttactgtttctcggctgtattatcgttgtcgtcccggctatttatctttctatcggaatcattatcgccctgacgcggcctgcggctaaagcccagcagttaacgaccgggatcgacccatggcttcttgcctggattgacggcggcggcacgcgggtcattcagttagcaatgttcagtttgttacataaaggatatctgtgggtccccgaacccgggcagatgttggctaacggacgttatgcaagcaatgaaatgaacgtcattgaaagaattttatttgaccattttgaggtacgaaaaccatgtcatgaagatctgcctactagcctgcatatcaccaaccttaacatctggcaggatcagcaaaaaagcccagagctggccttaagtatgctacgccgccgatgcaattttctgttgttcagtatcccctcactcatcttagccgtaatattagcttgtcgaatatttatctacgtcgatgtcgctgaaaacactttttgttggatattgatggttacaggaagcctgttgtggttcacagcatggggttgcaacgtctgggatcataatcgtctggatttgaatggggtctcacataataattctcaggcgcttatcggattattacgcgaaaaattagcccagactggcgatgaaatggatgaggccacggctatgctggtggtggcggttaatggaatcgagtcccttcctgaaagttaccgggattacaaagagttgattggtcccgtcagctacatcagttcaattagccacgaaagttag

SEQ ID NO: 93268 - DNA, 951 bp, Enterobacter aerogenes
gtgacggacaatagcctgcattcatcatgcacactgcagcaacgctcaaatttgattgccgatctcgtaatggggcgtatcacgcctgcgccaatctggcaaaaacgcaactttcggctcaaattcttgttgcgtacggcattattttatcagccgacccgagaaatgctggacaccctttcggcacgtagtgatttccgccaactgttggctgcgcaggctacgcttccaggtaaagtacatcgtcagtatttagtgcgcgatctaaacgcgcgtcagcgttcccaggccatcatcagccactatcagtacgtcgactcgttgggcgaaaaccggctggcgatggccatgatatcgccgtcagaactaccgttactgaccctgtccgctaaagatgatgcggcctttacgctctttgcctcgtcagccgggaaagcagagcgggaaggtgaaaccaccctttggcttcgcgatagccatcaccagttgttggccagcgccacgtttagcgtaatccgccaccaagggcagtggcaactggtcatcggcggcctgcaggggccccgccgccatgtttcccatgaggtgattaaacacgcgacccgcgcctgttacggcctgttccctaagcgcctgctgctggaattcatctggctgttggccggccaaagcaatattcaggctatttacgccgttagcgataatggccacgtgttccgcgcgctgcgctatcgcttaagcaaaggccggcacttccatgccagctatgatgagttctggcaatcaattgaaggtgtgcgtgaggatagttaccgctggcgcttgccgctgaaactggaaagaaaatcgctggaaagtatcgcaagcaagaagcgtgccgaatatcgccgccgtttccagctaatggatgagatggccgtacaggtggctaatctgctaagtgtaaaataa

SEQ ID NO: 93269 - DNA, 951 bp, Enterobacter aerogenes
ttgaaacatctatttttactgtgcgcgctattctttctgctttgtgcaacggcgcgcgcggatattagttgttcatttcagctctcaaacgatgcaagttttggttctgttgactcctttacgctggcaaacactcagcaaacggtcaaatcggggtctggtttttcctgttccggcagtgccctatcgctactcagtacaaatacgataaacgccaggattctttcctccgctcatccctcgggcaccacaccccaaatgatgagcaccaccggtaccgacgtggttccttacaacatctgctcagataccaattgttcggaaatttacaatattggctataccaaaacatggagtatcacttcactcatcggcctgcttgggttatttaatgccagcgacggttcgctgcctttgtatttgaagatcccggccggactcaacgtacctgcgggtacttatactgacaccattagtattcattgggattaccggatttgcgtttccggcattattacctgcaactatgccaccggccagcaaaccgtcacgctgaatgtgaagctaattgttaccaatttctgttacatcgataatgctcctgatgtcgcctttactccggcgtcaattccttcaagctttaccacgcttagcaacaaactttccgttcgctgtactaaaaacgcaacctataccgtcaacctcaccagcgccaatgccctcgctggcggatggcggcagcttattgcgagcattaaccaggtgaattacgggttgcaatatcagttttatcagccttcaggcagtgcatggacgccaaccaataatctgagcgtcagcggcaccggcgcatcacaggatgtaaactacacagtacagataaatcccagccagaccagtaaacccgcaggagtatatacggatatcgtcaccgtcaccgtgacctattaa

SEQ ID NO: 93270 - DNA, 981 bp, Enterobacter aerogenes
atgtcatctgtaactacacccagcgctgcccgatcctctttcagtttcggccgaatctgggatcagtttggtatgctggtggtcttcgccgtgttattcatcggctgcgtgatctttgttcccaattttgcttctttcgtcaacatgaaagggttggggctggcgatttccatgtcgggaatggtcgcctgcggaatgctgttctgcctggcttcaggcgattttgatttgtcagttgcttctgtgattgcctgcgccggtgtgacaacagcggtggtgattaatctcaccgaaagcctgtggattggtattgccgcaggattactattaggggcggtcagcgggctggtgaatggttttgttattgcacgtttgaagatcaacgcgctaatcacgaccctggccaccatgcaaattgtccgcgggctagcctatattatttccgatggtaaagcggttggcattgaggatgaacgtttcttcaccctgggctatgccaactggttaggtttgccggcgcctatctggctgacggttgcctgcctgatcgtctttggactgctgctgaataaaaccacctttggccgcaatactctggcaataggaggcaatgaggaggctgcgcgtctggcaggggtaccggtggttcgtaccaagattatcatcttcgttctttcaggtctggtatcggcggctgcggggatcattttggcttcgcgcatgaccagtggtcagcctatgacctcaattggttatgaactgattgtgatctcggcatgtgtactgggtggcgtatcgctaaaaggcgggatcggtaagatctcttatgtggtggccgggatcctgattctgggtaccgtagagaatgcgatgaacctgctgaacatctcgccattctcgcaatatgtggtccgcggggtgatattgttggcggcggttatcttcgaccgttacaagcaaaaagcgaaacgttcgcattaa

SEQ ID NO: 93271 - DNA, 1515 bp, Enterobacter aerogenes
atgcaacaatctaccccttatctctcatttcgcggcatcaccatgacgttcccgggcgttaaagcgctgtctgatatcagctttgactgctatcgcgggcagatccacgcgctgatgggtgaaaacggcgccgggaagtccaccctcttaaaaattctcagcggtaactacattccgactgccgggtatctgcaaattgatggtcagcagatggcatttagtaataccaccgcggcgctaaatgccggcgtggcgattatttatcaggaactgcatcttatcccggaaatgaccgttgccgaaaatatctatcttggtcagttgccgcataaaggcggcattgtgaaccggtctttattgaattatgaagcgcggctgcagttagaacatctggggttggatatcgacccggaaacgccgctgaagtatttgtcgatcggccagtggcagatggtggaaattgccaaggcgctggcgcgtaacgcgaagatcatcgcgtttgatgagcctaccagttcactctccgcacgggaaatcgacaacctttttcgcgtcattcgcgagctacgtgaagaagggcgagtgattatttatgtctcacaccgtatggaggaaattttcgctctcagcgatgccattaccgtgtttaaagatggccgctacgtgcgtaccttcgatgacatgcggctggtggaccacgacgcgctcgtgcaagcgatggtgggtcgtaatcttggcgatatctacggctggaaagcgcgtgaatatggcagtgagcggttgcggctcgaagaggttaaagcgccgggcgtcagaatgccaatcagtttatcggtacgcagcggtgaaattgtcggcctgtttggtctggtcggcgccggacgcagcgaattaatgaaggggctgtttggcggcagcagaattaccggcggtcaggtctatatcgatggtcaggcgataaatattcgcaaacccgcgcaggcgattcaggcgggaatgatgctgtgtccggaggatcgcaaagccgagggcatcattccggtacattcggtgcgcgacaacatcaatatcagcgcccggcgtaagcatattcatgccggctgcctgattaacaatgcctgggaagcgagtaatgccgaacaacatatcaaatcgctcaatatcaaaaccccaggagctgagcagttaattatgaatctctccggtggtaatcagcagaaggctattcttggtcgctggttgtcggaagagatgaaggtcatcctgcttgatgaaccgacccgcggcattgatgttggcgcaaagcatgaaatctacaacgttatctatgcgctggcggcttctggcgtggcggtcgtttttgcctccagcgacctgccagaagtgctcggcgtcgccgaccgcatcgtcgtcatgcgcgaaggtgaagtggccggtgaattgctgcatgaagacgcgaatgaacagcaggcgctgagccttgcaatgcctaaagtcagccaggccgtagcctga

SEQ ID NO: 93272 - DNA, 1086 bp, Enterobacter aerogenes
atggaaagaaaaatatggattatggagggactatcctcccaacgcgatatcattttcggcattaatggtttcacaataaataataacgaacatcctataaccacctacacctcacacagtcaaccccgacatgaaatattatcaacggcacatttttcattaagtgaacccaccgacatcaattcacggatgccatttatttcatcaatagtaaaagagtatggcattgccgcaattcaggttggcaaagcgtgccgctggtacgaacagcaccgacggcagattgaagcgctgggcgtgactctcaccacgggcgcccgccaggtgtccacatttgatattgccgatgacaaagtcaactttgcaaaagccatgcaagcatgtgggcttcccgtggtgccatccatacgagtcaatgatgccaacacgctggaatatctactcaaagcttcgcctttccccggcagccgcctatgtgtgaaacccgttaccggcatttatggcgcggggttttggctatttgatgagcacgcgctttctacaggtattattaatcatccggaacagcgacgtatccgcccggaacaatatattgaagccgttaagaccagtgagacgtttactccactggtactcatgccctggcttccaggtccagaatactctgtcgacatgctgcttagtcatggcaaagtactgacagccattggcaggcgaaaagaaggtgcattgcagtatctggaaaataaaggagcggcgatcgaacttgcctgcgcctgcgccgaatcactgcatgctgatggtctggtaaacgtacagactcgtcacaatacagagggcaaaccgcttttactggagattaatctacgcccctccggtggtattgggtatacccgccacagcggcgtgaatttgcccgggttgttcaccgcgcagcggctgggtttactgacggcggatgacattgtgcggcgcgtagcgcatcaattcacccctgcaaccatcagagtcatgacagagagctgtcaatatcctcagcaactcaataatgcgcttgcgccttcgcataatgcggaggtgaaatga

SEQ ID NO: 93273 - DNA, 1131 bp, Enterobacter aerogenes
atgatgaaaaacgaaaactgctacctccgtcagctctcaagtggcgaattacgcgtgtttcaccacggcgaggaaaacgaacttcatgcactgttcgacatcgctgaacggcgcaaccctaaaagggcgtttctctttgtcagccatgttttaggtcggcatattcctgtttcgcccgcaaccatgcgtgcagtttaccagcggcttgccgtaagtttccccgccgacctcgccggtccggtgttgttcgtcgggatggctgagactgccgttggtctcggcgctggcgtgtttgacgaactccgcaaacgcgttgaccgggcaatctatctcacctctacgcgtcatccgcaagaggcggaactactgtgcgaatttaaagaagcgcacagccatgccacggaccatttgatttatctcccccacgatcgagagatgcgccgacgggtgctggaagctaaaactctggtgctcatcgatgatgaagccacgaccggcaataccttcatcaatctcgtgtccgcgttacacccgcacctgacacatttgcaaagtgctgtctccgtgacgcttaccgactggagcggcgatgccttcgccaggcgttgtaacctgccggtgagccagatcgcgttagttaaaggacgttgggaatggcatccgctgtccaacgctacgcctcccgacatgcctgccgtcaatatcacctcgcgtggggagtatgctctttcccggcgccagacgtgggggcgtctgggaatgatacgtcccgcggcagaccttggcatcgagatcaacgcaaccacaggagagactatcctggtactgggcagcggtgagttcgtctgggaaccatttttgctggccgaacgccttgagcaacaaggcgccactgttaagttcagcgcgaccagtcgctcgccgattgcgcctggcatggcgatccaatcgctgttgtcatttaacgataattacgggctgggcatcccaaactttgtctacaacgtcgcccaccagcgtttcgatcgcattattttatgtatagagacccctacgaaaagcgttgatccccacctggtccacgcgctggagtcgctttgttcgcgactggagattttatcttatgaataa

SEQ ID NO: 93274 - DNA, 774 bp, Enterobacter aerogenes
atgaataagccagtagtattttccgatctcgacgatacgctatttcagaccagacgaaaaatggtcaatgaactttctgcggccccctttcgttgcgccgcgctggacagggaaatgcgtccgcgcagctatatgaacgaagctcaggccatgttcgtcgattggttgcttgaacacgccgaactgatccccgtcaccgccagagggagcgaagagttgacgcgggtgcaaatcccatttcgctcatgggctataaccacccacggcgcagtcatcatgacgcctgaagggctaccggataccgagtggcaacatcatatggtagctatcctggcgccctatgctgacagacttaaagccatgcaacacgacataactacccagatggctattcaaggtatcgacggctgggcgcgcatcaacgaagagtatgacgacgtgcccgtttacctggtgatgaaacatcgcgacagcaccagaatcgccgagctctacgcttttgccgactggctgacgcagcgtttcacgctgcaggggttttatcttcaccgcaacggcaataacgttgcctggataccggagcctgtcgataaagggctggccgtcggttggctaataaataaattgcaggcccagcgcggtacgttcccggtgctcgggtttggcgacagtcttagcgaccatcgctttttgcaactttgccattggtttgccgtcccccagcagagccagtttgccacagctatcaatcaccacattttcgcaggttcttaa

SEQ ID NO: 93275 - DNA, 1074 bp, Enterobacter aerogenes
atgcacaagctccatcacttttccggcgcttttgcgcaaaatgacgtccgctttttgctcaatcctgtgaatatcgccatgacgtcggttgatgaaaaagaggctttgattcaatcgggtaaagcgcattattccgacttgctaagccaggagcccgcgccaagtcagtggcatcttaatctttttgccaaagccctacagcgcgaaacgccacgtatggctaacgaagtgcagcagctcagtcacacgctcatcgcgcagttcaacaatacgcctatcatcctggtgagtttggtgcgtgcgggtgtcccgctgggggtgatgctacagcgggcgctgcgcgacgcgggtaaaacgtccttccactacggtatcagcattattcgcgatcgcggtattgatagcgccgcacttgaatggattgaaaatcgtcacggtacgcaaggtatcgtatttgtcgacggatggaccggtaaaggcgccattcgctcacagctgcagcgttcgcttcacggccgaaaaggctaccctcccgaaccaaagctggtggtgttagccgacccctgcggctgcgcatggttgtccgcgtctgacgatgactggttaatccccttcggtatcatgggggcgccggtatcgggtctgatttctcgctcactatggtcaccggtcggctttcacggttgtgtgcaatgcgatcatttagctgattttgaatgcggccaactactagttgataccgttgataattatcgacagacgctagtttctgccgcgcagattaaacccgatttagcgcagaaagccaaacttcgacgcaaaagcgaagcggtagtgcttcatctcgctgaacgatatgccgtcgacaatcttaaccgcatcaaaccaggcatcgcagaagcaacgcgcgcggtgcttcgcagggtacccgatcatgttctggtgcgcgccattaacgatccggatgttgcgctactgatggcgttagcccgcgataaaggtattcatataagcgaagttggcgatgaaattggccaataccgcgccgtcactattattaagaaggtattttaa

SEQ ID NO: 93276 - DNA, 939 bp, Enterobacter aerogenes
atgaaaacacgtctctcggcatggaatctgggagcgaccctatacatgcccgccactcgccacgatattgcctccactattattgacggcaaaattaaagggctacgctcattagtgatctgtcttgaagattcggttaacgaaagcgatatcaaacatgctctggtaaacctcaaaaacctctgtatacagctagcccgtgccaaaacaacgcaagagcatcattactggccgctggtatttattcgcccacgacatctaaccatggcgaaactgctaattaagaactttgatttaacggccattgacggtctggtcattcccaaatttacgcatcattcattggctggctggtggcgcgcgatcggcagcacgcctttgagcataatgccaacgctggaaaccgaagaggtgtttgattgcgagaaaatgcgccagcttgccggagagctcagcgcccatccatgtcgggccaggataattgccttgcgtatcggtggtaacgatctcatgaatgttatctcgcttcgtcgttcgcgtaatctgacgctgtatgacgggccaatgggatacgttatcaaaatgctggtatccgttttctctccctatcattttgccctgacagcaccggtctgcgaacatatcgacagccaggagatcatggagcgggaattgcaactggatatggcccacggcctggtcggaaaaacagccatccatcccaatcagttactgactattgagcgtgcgctaatggtcacgcccggcgaacacgctgatgcgctacggatccttaactccagccaggcagtgtttaaatctcagggaacaatgtgcgaaccggccacccatcgcaactgggcagcggcaattctggccagagcagcctattacggcattgttaatgatttcgcccctgatgctttagcccaaggttag

SEQ ID NO: 93277 - DNA, 468 bp, Enterobacter aerogenes
atgagattaaatagtaaacaagagcgcatttttaaactggcgcttattctcggcaacgggcaaccggtatcctcagcggaactgctggaaaagctggattgttcggatccaacgttatcaagaacgttgaaaacgttgcgggacacctatgaggcggaaataaaatatagtaaagccgcccatacctatcaacttgtcgccagtggctccttgactaaggatatgatggagcgaatggcagaagcgctccgtgtcaatagcggcctgaaaatgccgatgccatcaggtaaagtggtattgaataaggatcaaaaaaaggctatttcgctgtcggttaaacgctcagtgctacgtaaactggaccgcctggcctgcctggcgatgcttacccgtagcggcgctgtagagatgctggcgcagaagtttattgatgaattaattgattccttttacaagcagaagcgctga

SEQ ID NO: 93278 - DNA, 627 bp, Enterobacter aerogenes
atgagtagcgagatgtcgcccttgttggcacagcttgatctcatcgcccaggggttaagcgaaaccttcgcgccgttttgtgaagtggtcgtccatgacctgacgcatcctcaacaggccattttatcaatccacaataatctctccggcagagaggttggtcagccggcgaccgagatggggttagcgcggattgccagcgccgagttcccggccgtcgttgccaactatgtcaatcagtttgctgacggacgtgcggtgaaaagtacctccatcggtattaagggcgataacggtgaatatgttgccgccctctgtcttaacgtcgatatgacgttgtttcgcggtatgcagagcgcgttggcgcgctttaccgccacggaaagcgccacggtggttgaacatcttgaaccgggcggcgcagcggccattcgccaacgaattgatgcattcgccgccgcgcgggcgacaacagccagggcgctgagtgcggcggatcgtaaaacggtgattcgacaattgcgtaaagaggggctattggatctgcgcaaatcaatggaaatggtcgcgcagcatctcggcatttcgcgggcgaccgcctatttatacgcccgacaggagagataa

SEQ ID NO: 93279 - DNA, 978 bp, Enterobacter aerogenes
atgactctacaacttcccgattatcgcgacgtggcagcggccgcccggcggattgccggttacgccaactctactcctgtgatgacctcccggaccctggatgagcaatactcagcgcagctgtttttaaagtgtgaaaattatcagcgcatgggggcatttaaattccgcggcgcgatgaacgcgttgcaacagtttagcccaacgcaaaaacgggccggggtagtggcgttttcttctggtaatcacgcgcaggccattgcactagcggctaaactactggacattccggcgactatcgtcatgccacacgatgcgcctgtggctaaagtcgccgccactcggggctacggtggtaaagtcgttttttatgaccgctacacggaggatcgcgagcagatcggtcgcgatctggcgcaacagaatgggttaacccttatccctccttacgatcatccgcacgtgattgccgggcaggggacggcggcgaaagagctaatagaagaggtcggtccgctggatgcgctatttgtctgcctcggcggtggtgggctgttgtcaggctcggcgctggcgacgcgtcatctgtctccagggtgtaaaatctatggcgtagagccagaagctggcaacgacggccagcaatcttttcgttgcggcagcattgtgcatattgagacgccgaaaaccatcgccgacggcgcgcagacccagcatcttgggcaatatacttttccgctaatacagcaacacgtcgacgatatcctgaccgtgagtgacgatgaattggtcgcagcgatgaaatttctcgccgagcggatgaaaatggtggtcgaaccgaccggctgtctgggcttcgctgccgcacggagcgccatggcgcatctgcggggtaaaaaagtcggcattattatcagcggcggtaatgtggatatgagtcgttacagcgctttattggccaccgggaacgaattatga

SEQ ID NO: 93280 - DNA, 759 bp, Enterobacter aerogenes
atgaataaaattcaccgtctgacattgattggtattataattaacttagccatgtttcttttggtgctcaatgaggtcaactcgctttcagattattatggctacgatcgaacgctgcgtttgattaaagatttggtcacaattgtacttccccttgctatagttgttcaggtggtaagcgtttttttattaccgaaagccccgcgtgttggtattgtgtttgcttatatcggtgggattgctatggtgccgattggtttgttgtttttaatcggttatatttttagctacgaaagatactgcaatgcaaaccttgatgtttataaccctgaagcagaggttgatatatctaagcctgaagataaaaactataaattaacatgcgatacatcccgatttgcgcctactggtgctattgctttatgcatgggagttattgtgctggtgatgggcgtgggaattggctatttattggtcgcagtaggcattctcaatatctggaatggggtacgcctcaaggagagcgttatgattggtctttctggtgataaattgatagttaaaccaaaattgtactcagatacttttatcgtaccgctgaatgaaatcgtattaacaggaaaaggtgttactaatgacactgtctccctaaaattcttacgtacaggccgggcgtttagcgtgcggaagaaaatgctggcaggtgagaatattgatgaatcactcgaatatattatttcaaaaatccccaccgcctga

SEQ ID NO: 93281 - DNA, 234 bp, Enterobacter aerogenes
atggacaacatcatcatttcaggtgtccggatctacttccctaagccaggagaaaggctaccgcagcctccagataccatgcctacttttgctatccggggaacagttgattcccgttgttgtctgcttggtttcctgcagaattcgtggatggtgttgtcccttccggagtttgaacattcaggcaaagcaataatggctgctgtcagacaggggaaaaaattatggcgctaa

SEQ ID NO: 93282 - DNA, 708 bp, Enterobacter aerogenes
atgcgcatcattcttgatacggtttttaataatgatgatttaccgattattaatcctaccgttgggctattaagagattctctgattgctggttatcagatgatggataaccaggattttagcggtaacaaaaatcattttagctggaatggtacctttgatagcaagggcgctgttttacaaaatgatgctgatcatatcattacgactccggtgatggaggcgaacgagatgacagtgattttatgtctaaacattccgtcttccaatgctaaagggtcaattctaaacaacctgaacgccagtacgtctccaccccaggggactcggttaacgaagctggctgatgccgggtcaatcgttggtcagtttgatattgccaaaaacacaacgggctttaactcatttgggctggatatcgctaccggatggcttgtaaaagcttttgcatggaaaggcgataaccttcgagttttgaacaaaacgggttataccgatttcgcattcacaagtagaacaaagggggtatccaaccctttcagattgaatggtgtgccggatgggatcggtggtggaagtttcaccaatgggttttcaggcaatctggcgttcgccctgttttatggtgaataccttactccaagccaggtggttgactatatgaacctggtcacccagatagtacagccaagaggcatcgtcgtttag

SEQ ID NO: 93283 - DNA, 1833 bp, Enterobacter aerogenes
atgtctcaatacaatacggggaattcggtcccgtcttcagacatgcgcgatgcctgggataataacgccactcttgataatttcctgaataataatgaattaaccgttacaacccgtacaggtattgagcgtgactcactggctggaattcaaaagaaagcagaagaccaacgggaacaaattgctgtagatggcgcggcagttgtagaagatacacgccagaatctgatccctctgagccgtcagtacatgacactggcagacgcacaggcggatattgctaatatccctgaaggttcgaccacgtattaccgtagcccggatgatagcgcactggctatcgaggtcattaacaacgagggagttctctctcccactggcagaagtatgccgtcgcagatggttgttgcgagtgttgtacaacaggcaaatgcgactgacttacgtaccgatggtctcagaacatccgcagaatcggcgtatccatatgaggtactggataacgaaggtaagttggctttttacctcgatgaaaatggcggaacaaatatgccgggcggcgctaactcacctgaaatttatgctggcactttattctcacccaatttaagcgccgttaaagagtccggagatcagttcgatgttgcagaagttgacagaaatggccgggttttctttgctactgatttagccagagggattaagatctatctcggagaacctttgcataatcaccgggggcctctgcctggtgatttttttgcaataggagactcaattactgcgtatggggttgcacactccggcgctaacgctgacggctcttcttatgccccctgtgttcgcgatcagtcatggcatgcctgggcatcattgtttactaatgggcggctacggttagcggggatttcagctactggcgggtataccgttacgcaaatcctgaacgttcatgtgccggttgctgttcaggctggctcgacgttttgtgtcgtcatgggggggagaaacgacatcgtacaggggattaatttagatagcgttactattcccgcttttatacagattttcagaacgctacggcgcgcaggaataatacctgtcgtctgtaccatgtccgcccagggcaattcatcatcaaactcccgtcgtgttgccgaacataaacttaatggctggttacggggctacgcaaggcgttattcgctgccgctagttgatttacatcgctacaccgttaatcccctcacaggggactggttaccgggattaaatcaggatgtttcacatccaactggcgcgggtgcaaaaataatgggtaaggcattagtcgcaggaatggaaagctggacggctccagtctggccagctcgtgctgatgagcagattgctacaggtttgtcccttaaccaaatcccgaatccattattcctgaataatgatggaaataacccagatggctggactatcactcaggccggagtttctgcagttgcgcctgattcatcggtaagcggaaatttctggagcatgaccaaccagaaggcataccttacgttggctgtaacaccaggcgacagattgcagttcggtttaatgctgaagaaagaagggagttcaggatttgcctgttatctggttagtggtgattcgtcttctgaaaattatctggcaggaatcagagactggaaagagtctatagatgatttcgcttatttttcctacgaattaaccgttccgaataacgttaactcagtgacggtaaacatatcagctggtgcgtctcagctttctattgcgcagctcagccttatcaaacttacagaggtataa

SEQ ID NO: 93284 - DNA, 411 bp, Enterobacter aerogenes
atgatttatgcactaatcaaagatgcgatcgttcaaaatgtcgtagtttgcgacgatgattattcggctaaagaactgtttgctgattttactgtagttaatatagatggcctcgatgtggggattgggtggggttatgagggagattctttcattgcaccgcctccgcctgaaacgccacctgaagaaattgcagcagggagacttaataccgcgcaagctgaatatgaccgcgcaacggatgaaatcaataaacgtaatgaacaaattgatgattcagattatgaaggaacgacagaggatgccgtaaaggccgagttagccgaatggacacagtatcgaaaagagttgcgctcatatattaaaaataacgatggcacagttaatttgccttcttctccagaaaaataa

SEQ ID NO: 93285 - DNA, 891 bp, Enterobacter aerogenes
atggcgactaatgattttataccttttgcaacgggtaataatgcaaacgttacttctcaagctgactggatagcattaccagcggtatcaagcggtttcgtttcaggcaaagcatcatcggctcaggttaataaagcactgagacaaggaaccttcgttacttctgccttagctaaatttatctcaaatgcattaaatgctgacgtaaaagataacggcgattcagcggggtttgttgagcaattaacgcaggccgtatccgggcgacttatcgcagttcaggtattcaaatcatccggtacctacgttcctacgcctggcgcacggaaaatttatattcgcctctggggtggtggtggcggtggcggtagttccgtagcctcttcaacgagtgcaggctccggttcatccggtggttctggtggagtgtatggggaagcgttcattgatgttactggcaacctccctgtaacggtcggtgctggtggtgctggcggtacctcaaacggttatggtcagaacggtggtgaatcctctgttggtactaccgtaagggttagcggagggaattacgggaaaagcgctacaactggaaatcctgcagatggcgctgctggtgctggtggttcagcaggctgtcgatggatagtgcaatcaagtcctacagcagcatcctatccaattggtgggctgagttctgcctttttcggtactggcggatcggggtcgttcggttcttcattatccgcaatcactgtagctgttgggttctcagggcaattcccaggaggtggcggcggtggggccggatcttacatcagttcaggtggctcctatcagaatggcggtaaaggtgccgatggcctggttattattgaggaatatgcttaa

SEQ ID NO: 93286 - DNA, 777 bp, Enterobacter aerogenes
atgagcaaatacactgaccggatatcaaactatcacgccggaaagccgaaattctttgctcatgtggatctttccacgcggccccttattgatatctcacagacgatgacaggaatgatatcggcctttgatattgatacggcagtgggtaagcaactggatattcttggcgagtgggtagggcgaaaacgcagggtgagcacgccaatctcaggcgtgtatttctcctgggatactgaaaagctcggatgggatcagggtgtatggcagggaccatttgacccggatgatggctttcttgacctgagtgatgaagtttatcgcctggtactgaaggtcaaaatcgctattaaccactggaacggtcagaacgacacattaccggacatcctcgacagcgctcttgctggttccgggctccgcatagcaattgttgataatcaggatatgtctatatctatctggatattgcctgattactcaattgtgctcaatgagactgaccgtctgatattcgatagcgctgttaacaaaggaccatttgtcgtaattcctgaaggttatgttccatcccgatacgatttaaatccgattgaccaggttaactcagagttgtggtgggctatccagaatggatacctcactgtaaaggccgcaggcgtaaaagtaaaagaaatgcaaatgccgtctgaaggtggttataccttctttggcttcgatgttgataacgaatatatatccggtttcgattccggagcatggggagtagatatttaa

SEQ ID NO: 93287 - DNA, 408 bp, Enterobacter aerogenes
atgccaaaaaacagtcttctaccaacaagtgatcagtttcgcgccgatttccctgaattctccgataaaacccgctacccagattcatcggtaaatttctatctcaaccgggctgattgtcttctcaatcaggacgtctacggttgccagttcgtatatctcgcagagctattcacagcccattacaccgagcttagaggtcgcgcacttgctggcgcggctgctggtggggtaagcagttcaggtggcggcgttttgacttctaagtcggtggacaaagtcagcgccagttatgacgtttcagggattatcgatcctgatgccgggttctggaataacacggcctatggtcgtgaattctactggtggtggtcaatggctggcgcgggagggagacagttgctatga

SEQ ID NO: 93288 - DNA, 369 bp, Enterobacter aerogenes
atgaagtatctcgttaattctggtgtgacgttgagcctggatgatggttctaaatttgaaatcaccaaaggtgttcacagtggtgcagactttccggaaaacgtgaaatctcactgggcattcgcatcttatgcgaagcagatcgatgatgcggaagcggataagctggaagcagccaatgctgacctgaaagcctatgtagcctctctggagactgtcaatgcctcactgctggcacagattggggaaaaggataaggaaattgcagatctgaaggcggtggcagcaaagcctgaagataagcctgtcgctggcgaagaaaagcaggagactggcaatgccaaaaaacagtcttctaccaacaagtga

SEQ ID NO: 93289 - DNA, 948 bp, Enterobacter aerogenes
atgtatacagttgacagagcgactatcgactctaccggcgcttttgttgtcggtgagctggagcgcatggaccagacgctgaacatgccgctggtgtccgttaagtggacccgtgacatgccactgcgcagcgatatctccatcgcagatgaagtgtcatcttttaccaacactgatttctccagcgtgggcggccctaatccgatcggtaaaaactggatgggcaagaagggaacggcaacgccgggacctgaagtggatattctcccaacccgtaacaacctgactccttgggctacagaagtatcatggaccgttcttgaactggcatctgctcagaagctcggacgtcctatcgatactcagaagtacgaagccatgaagttaaagtggaacatggataccgacgagcaggtgtacatcggtgactctgttcttggcgtagctggcctgcttaatttgcccgatatcacacctctggcggcagcagctgcatggacagctacgaccgacccagacgttattctgcaggatatcaacctgctgctgaccgatgtctggatgcgttctggttatgcggtttgtccggcaaaaattggtcttgcaccggagctgttcggcctgcttaccatcaaaaaggtatcctcggcgggtaacatttccgttcttgagtacgtgaaaatcaacagtatcgcgtatcaggaaaacggggaaccgctggagatcgtctccatcaaatgggcctcaaaacgtggtgctggtggttcacaccgcatcgtcgcgtacacccaggacgaaaaatatattcgtttcccgatggtgccgctgctgaatactccacttgagtatcgcagcatgcagcaactgaccgtgtactacggaaaactgggacaggttgaagcgccgtattccaatacgatctcttacctggacgttcctgcatcctga

SEQ ID NO: 93290 - DNA, 504 bp, Enterobacter aerogenes
atggctggaaatgcatatttaacccgcatgcctcttgggtttgtgggggcagtaacgcgtccgcgtgatctgactattgagccagttgcactggaccacaccaaacttttttcaacctacggcctgccgggtaagtacgtaaacgatcagttcgtaccgctggtggacggcgacactatcgacaaggtgaagggtattttagttcgcccgttcccaatcacctccgcgcctgatctggcctatctcggaatcacagctaaccaggtgggtgacaacctgaagcgtggttacatctgcgtgaaggctacggcgggtaatgccactaccgcgaaaaagggtgacccggtatatgtgcgcgttaccgctggcacctctgcaagccctgtcggttcttttgtgctgactgctgatgctactgcagaaaatacacctcagctgccaaatgcagaggtaatgggaccgggtgaagccgacggtcgtatcgaaatcgcatttaacatctga

SEQ ID NO: 93291 - DNA, 1287 bp, Enterobacter aerogenes
atgaaatatttcttcactacgcgcctgggggaaacgcggtatatccaggcggatggctcgttgttgtgtaaagacgtcccgatcgccagaacgggaacgcaggtttatctacctgaagaaatagaccttgaaccagacgccagcggcaccgttacggtatggcgaactgaggatgaagtcttttctcctgagacgatggcgagctttgaaggtgttgctgtcacgttgggccacccagaagacgaacagggcaatatcgtattcgttaacccatccaactactcagaactggctcacgggcacatacagaacgtcaggcgcggtacaggtgagcaatccgacttattgatcgccgatgttctgattaagcgtcaggaggccattgatgcggttaacgctggtcttcgcgacgtcagttgcggctatgacgcccagtacaaacaactgtccccgggtcggggtaagcaatatcagatcaccggaaatcacctggctgttggcattgaccgcggccgggctgggggccgatgtgcaataggggactccatcccatcacccaaaggaaaaaaaatgaaacaaccaacgttactgcagaaactggtagcggccattcgtacgcgtgatgacgatgcgttggctcgcctggctgatgaggctgcggcagcagatttaccctctgatgcgatgggctctatccctgggccaacaatcaatatcaacgtgccatctcaggctaccgctttgccgacagagaaccggacaactacggatgaaaatccgggagatgatccggataagaaagagaagactggcgatgatgatatccctgcttgggccgtcgcgctgattgcccgtctggacaagctcgaaggtaaaacaggtgatgatcttcctgatgatgtcaccaccacggctgatgaagacaaagaagaggattcgaaggtcactggtgatgcggcatttaagcgcaacatcatcgccgatgccgaaattatttgtccgggcttccagcctaatggcgataaagggctcaagcgtcagattctgaaccacgctctacgcactggtgacagcctgaaagcatttggcgttagtgatttcgctacagctcctaaatcgacggtagatgccgtttttaaggcggcagtcgaaatcagtaaagcaaaaaatcacctgcaaccgctgagcaacctcgtcaggaccactgatagcagcactagcaccaaacacatgtccccggctgagctgaacaagatcaacgccgatttctggaaaaatcgcaaataa

SEQ ID NO: 93292 - DNA, 534 bp, Enterobacter aerogenes
atgtttctgcaggttgagcgtgaagagtggcagcagtggcgatcggtatctgaggaaatcggcgctggcctgcgtgatgtggtaggtaagacgccagttggtcaggtagcgcaggatatcgtttatcggcaaattcagttaatgaaatcgctaccgctggagtcagccgacagggttcgcgatatccagacccgtgccattgaagcgatggtaaacggtgagcgcccggatcagctctacgagatgatcatgcagactggaggcgttgctgccagcagagcaaaaatgattgcccgtactgagataggcagagctaccggagcattgacgcaagcgcgagctctggctgtcggttcagaggggtattggtggagaattgaaggtgcaggtaccagaccatcacaccgcaaaatgaaggataaatttgtgcgctgggataaccctcccactcttgacggcatgaccggacacgctggatgcctgcctaactgtaaatgctggcaggatgtgcagattccggagcctagaaagtaa

SEQ ID NO: 93293 - DNA, 1509 bp, Enterobacter aerogenes
atgtatgggccgcactggctggagcttaatatgtcccgtaagaaacgccacaacggcgcacaacagcccgttaggaccgctgacgggtacaacaatttcccggctaagctcggggctcagacaaaaaatattcagacaggcggtacgtatctaccaggctacctgacgcgaaaccgtgttgagcttgaatttgcgtatcgttcatcgtttttggtgggtgcagccgttgacactatggctgacgatatgacccgcaaaggcgtcaacatcagctctaaacttgaccccggacagaaaggcaaggttgagacgttctgggatgaggtcgctatctgggatggtctgaacgatacgctgaaatggtcacgtttatacggtggcgcaattctggtggtactgatcgaaggacaggacatgtccacgcaattaaaactggaccgtatcaaacaagggcagtttaaaggtgttatagcactcgatcgttggatggttgcgccgtcctacgtcaatcttgtcactgactatggtcctgagttcggtaagccaaagttttataaagtcactactaaccagcaggggatccccccctggaaaatccatcacagccgaataatccgcatggaaggcgattctctaccattccagcaagcccagacggaaaacggctgggggatgtcggtagttgagcgcattttcgaacgtatccaggcattcgatactgcaactgtcggaacgacacagcttatccataaggcacacctcagaacctacagcatagaagggctgcgtaagattctggcgatgggtgatgacaaccctatggttactggcttgatgaaacacctcgatatgatccgcgagttccagaccatcgaggggatgaccctcatggataaaagtgatgaatttcagacgcacagttattcatttgcaggtatcgccgacgtcattctgcgatttgctgagcaggtttcgggtgcaaccggtattccgttggtccgtttgttcggacagtctccagcaggtttcagcactggcgatggtgacctggaaaactactacagccgcgtcaactcccttcaggagcgccgtttgcgccgtcatatccgctggttgatggatatcagctggcgttcattgtttggtgaaccgctgcctgatgacttcacatttgagttcaataagctctgggagatgtcagacaccgatcgggcaacaatggcgagcaacttcaccactgcgttggctacggctgtacgtgatttagaaatgccgacttccgcagcacttagcgacctgcgcaacatgtctgatgtgatcggtatcggcggctctatcaccgacgaggatattgaaaatgcgaagtcccagtggtcggaggatgaacctgaaaccagccctccgtcgccgttcggagatccagtaccgaaaaagcctgttggcgatagcgaaccagataggggaaatagtaaatggtatttacgatggttcccaggagtcagcaaataa

SEQ ID NO: 93294 - DNA, 300 bp, Enterobacter aerogenes
atggcgcgtgatgctctggttactgcgtttgagttctatttcgaggatggcgaacgtgtacctgcccccggcgatattaccggagactttatagaagtcccggcaagcatcgctgcaaaggtgcttatgcttaacgcattcatcgactcaggactgagccaggttgaattggctacccgtatgggggtaaagaaacaggaggtaacccgcctctttgatctgcaccattcaacaaagattgacacaatacagcgagcgttggcggcgatgggcaaaagactcttgctctcagcttcctga

SEQ ID NO: 93295 - DNA, 174 bp, Enterobacter aerogenes
atgaagcaaagcgagttcaggcggtggcttgaatctcagggagtcgaagtttcaaacggtactaaccacctgaaactgagatacaaagggaaacgtagcgtaatgccacggcatcccggaagtgagataaaagaaccactaagaaaggctatcatcaagcagttaggcctttga

SEQ ID NO: 93296 - DNA, 603 bp, Enterobacter aerogenes
atggctcctaaaaaaagcttcagaaaagcctacgtcggtatcgttatggacatggcattagcccgtagcaaaatcagcaatcggatggttgctcagcgcttaggtgtggacgagacgacgatccgtcgctggcgaaaagagaatatcgatttcgatcgtgctttcactgaggctcgcgaagctctcagagagaagattaaccgtgtagccggtaaaagcctggacgtcagaaagcggaaggtcatcaccacatcatcggatggcaccaaaaccactatcgaagatgtcctaccaacgcacaatgatattgctgtattcgccaagtctcttggtctggggacgagtatttacagcgaggaagagcggcagcgcgatgttctgcgtgaggtgatgaagcataaagtggctgggaaatatactgcgcttgaagcagcccagttacttgaggctgaagggataaaggttccggctactctgctattggaactggagaaccccaaaaaaatcgaaatctctggtccgggtggcagcgctatcaaaaccgagacgacgaacctcaccccgcaggaagcagcagagctctacaaaaaaatcatgggctga

SEQ ID NO: 93297 - DNA, 267 bp, Enterobacter aerogenes
atgcatacaccaccagataagcgtcggggtagtggctgttctattcaagtggggcagtgtatggggatgaacggtagtgtggctaaccttggtcagttgtctgttccattaaaagcaaaaatgccaacgccaaacgaagttttttcaatcgtaaagcaggttgaaaatgaaatgactggtaagtcacttaatgccgaaacagctttttctttcgtagaggaagtaaaaaagcgagtggctgacctgattatcattgaagtggcttag

SEQ ID NO: 93298 - DNA, 519 bp, Enterobacter aerogenes
atgattacatttaaagacataaaaaataaaaagagccaaattaaggatgaaaaggccaagtctagagaggcaattaaggaatctataaatgaatttcttaaaatatatgttgattcactgcaattacctgccgaaacatttaagttcaaggacggacgtgatcacccttacgtattcgttgtgaataaggttggatttcaaactattaatcttaccttagacgatctagaagtagatacaattaatggggcatcgttcgtattaaacacagttgttgacgatgaacctccattccccagacccgtccaaacttatattagtgcttatttcgttgatgggaatctggagtactcaatgaaaactgataacattaacaatactgtgtttttcccagtcaagaatgaatccgatcttcggacattctgcgaacttgttaaaaagtcaattattgagaagattgaaagtgagcaaatcggcaaaaagtcggcaaaagacgaatcaattaatctttgggattaa

SEQ ID NO: 93299 - DNA, 975 bp, Enterobacter aerogenes
gtgaaaacagcagaagcggcgaaaggccgctggccagaaattctggaacattacggactaccgccagttaccgggaaacatcactacaaaggtgaatgtcctgtttgcagcgcccgtggaaaattccgaatagatgatcgtgacggtgccggaacgtggatctgcgtatgtggcagcggcgatggtatgaaacttctttcactgacacagaccgggaaacctttctcagcgctctgtgctgaggtggataagctcatcggcaatgactatcagcgagagaagatccccgtcaatagctcggctgcaaaaatgcgccagaggacgaccagcaaattttcgaagctgctacctctgcacggcaccccgggtgctgggtatctccgtcaacgcggcatcagtaaattacccatggatgctattaaattctgtgaaaggcaacgtcacaacgggaaggtatatcacgcgctctacgctctcgcgacagatgataaaggggagctgtgttatctccatcgcactctgcttgagggtgaacagaaagcccctttgggtgaaagtgctaaacgccagaaatctctgcaggaagataactatctcgaatatgcccgttcagtggcgatccgcatgttcccggtatccacaacgctggggatagcagagggcatcgaaactgctctctcatgccatcagatttatggtgtgaatacctgggcggtaatgaacagcaattttatgaagaaattccgtgcgccggcaggcgtgaaacacctgattgttttcgctgatatggataagcactcagccaccggacactcggcagcgttcgaatgtgctcacgctaacctcatggcgaaaaatgacattttgaaagtcacaatccgctggcctgacaacggggatttcaatgacatgcttatgaacggcgatcaggttcgtgagctggtatttacgaaaaaacagcaggtggccgcatga

SEQ ID NO: 93300 - DNA, 1620 bp, Enterobacter aerogenes
atgctgaatatcaaaccgaattttgcacaggaacgcgcactaaacatgttgcgccgggactggaagtcatattcatctttcatgatgtatatgccgactggaagcggtaaaacggggctggccgctttcgtttctgccgggctggtaagtcgtggtatgcgcgttctgttcgtcgccccttacaccattctgattaaccagactgcacagcgttttgctcagtatggcctaccggaagatcagctcagttttatctggcgcgatcatcccaattatgacccgtcgcttcagattcagattgccagtgctgacacgctgatccgtcgcgaattccctcagaatattgatctgctgatcatcgacgaagctcatctgagaaagcgccgtatcctcaaggaggtggaacgactcacctcagagactaaagcgaaggtgattggtttgtcaggaacaccgttttcaccttttctcggtcattactatcaacgcctgattaagccgaccacgatcggcgagctgatccagcgcggcgacctgagcaaatacgagtttttcgcaccaacgaaaccggatttgaaaggcgtaaaaacgaaagtatcaatggaatatggcagcgactacgacgaagcacagctggcggagattatgtgcggctctgatctggttggcgatatcgtcgataactggttgcgtaacggccaggatctgccgacggtagcgttctgcgtcaataaggcccacgccaattttgtgaccatgcagtttaacagggcaggtgttaatgccgaggtgatggtcgctgaaacaccgcatgaagagcgccagttgatgatccaccgtttcgagacaggagcgacaaaaatcattgtcagcgtcggtgtactggtggccgggtttgacagtgatgttcgttgcgtcatttatgccaggccgactaaaagcgagattcgctggctccaggcgcttggcagaggcttacgtacggcaccgggcaaggatgcctgccttatcttcgatcacagcggtaccgttcatcgcctgggatttcctgatgccattgagtacaacgaattaccgtccaaaaatgacggtatgaaggaagccgccaccagccagaagcaagaacgcgaggagaagcttccgaaagaatgcccggaatgccacttcatgaaacctgcaggtgtctacgtctgccctaagtgcggatttaagcctctcgtgggagaggacgtggaaactgacacgcagcgcaatatcaaaaagctcagtaagggcgccacggtttacacgaaatcggacaaacagtcctggtggagccagattaaattttatcagcgacagcgcacgtcaatgggaaaaccagtcagtgatgggtggtgcgcccataccttcagggaaaagttcggtgaatggccgaatgacctgagcgacttccctatggaaatcaccccggaggtaagcaattacatccgacacaaactcatcagatttgcaaagggaaaggaaaaagaggcgctgaagtcctcgaatcctgcccctgattcagaaacacaccgggtaatcagagctaaaaaccaggtagaaaatattcgcagtatgctggggagaagaacagcgtga

SEQ ID NO: 93301 - DNA, 708 bp, Enterobacter aerogenes
atgtcgaaaacaacgtttgctgaaagattggttgaatcaatgaaggctgcaggctttacccaagcctcccttgctgctgccgtaggaatgtcgcagtccagtatctggaaactaacttctggcgcggcatcaggttcacggaaaactgtagagttagctaaagcactacatgtcaggcctgaatggctcgcctctggagagctgcccatgaatgatagtgaatccaatgatctcccaaccgtctacagacaacaaagacctgttgatcatggaatttacagagtcgatttgcttgatgtccaagtgagtgctggtcccggcgcatacctatcttctgagtttatcgagaccgtgcaagccattgaattcactgaagaatatgcaaggagtatgtttggaagtcgtccagcatcgtccatcaaggtaatcaccgtgcgtggtgatagcatggaaggtacgattgatccaggtgattacatcttcgtggatacatcagtaaatcactttgaaggtgatggcatttatgttttcgtgtttggcaaaactattcatatcaaacgtctgcaaatgcagaagaatagccttgtcgttctgtcagataacaagctctacagtccctgggaaatagacgcatgcgacgaagatcagtttcacgttctagctaaagtactggtcaaacagtcagcagcctttaaacgattcgcataa

SEQ ID NO: 93302 - DNA, 255 bp, Enterobacter aerogenes
atgcgcatgattgaattccgtggggtgcttatccctgccccaccaccaatagtgcaattaagttgtgagcctggttttacagggcgcgttgttgtcgagttaaaagacggtgaattcgtaaaacaatatccggtacgcaaagaagagatgttttgttcttttgaaacgcttttagagatcgcaaagcaagctggctatcaggtaattccaccaacatcggagataagtcgtgctgacagctatacgaatacctga

SEQ ID NO: 93303 - DNA, 795 bp, Enterobacter aerogenes
atggaaaaacaaatgcaggtaattaacggtgttccgatgatgggcagccgcgcgatagctgaagttaccgggaagaaccacgaccatgttaaacgcgacattctagcgatgcttgcacagcttggatttcattctccagatttggaggttgatgattttaaaggttttttcattaaccgcaaacaataccagggacgcaatgttatcgatgaaattttcctcaatgaaaacttgtcgatgactctggtaacaggctatgacgccgtgcgccgactggctcttattgagcagtggcagggtatgaaaaaggagcttgagcaaccgggcattgcagcacagttgtcttctcaatcaccagacatgctctcgctggcacgcgttgtggccgaagcgaccgcatccgcaacgatgaaggccgtggtggaggttatgggaaaccctctaattgcggcgactcgctcagaacctgtactaccccatgttgatcatgcctaccaagagactccgaaagaaaccaaagagccagaatatgtacctgttcacaaagtctcatgggctaccggattgtctgatccaacctgccgccggctagtcaccttttgcgacctgccaaattgccagctcgatggcgttcgtgggctttgcgtgcatcgtgaatttttcatggctgcggtcgaggtcctgattaaagaatccacaccaccagcaaaaggccgcaagcgctggcaacatccagagtttggcggttttgagctacgcaaggatccgaaagagatcttcggggaggttgaataa

SEQ ID NO: 93304 - DNA, 363 bp, Enterobacter aerogenes
atgtcagtaactactcaatcagaaatcatgaactacgacccgaacatgacgttatgcggccgcctggcaaaacagaccgttctcctgacctttggacaatggcactaccgccagacctatgaagtggtggtaggtggcaacctgactggtctggatgtcatcacctgtgcagttgaaagtctctacgcatcattaccttatgattattttgtcgatgacgcaggacaaaaacaggccattgcgaccatcgtgatcggcgagctcgaatgctctgacgatgaatgcctgggtgaacaatggctgggagaaatgctcgtcgcagctcaaatcatcagtattgagccggatggaataatcgcatga

SEQ ID NO: 93305 - DNA, 225 bp, Enterobacter aerogenes
atgaagatcgaatatcaggactacggatccgttgcaaacattgtggtcaccagcactgtgtttgaattccgccggcataaccgggcgattgatgttgctctctttttggttcccggcattgtcagcaatagcagcggatttttcatcatgaaaacggtgctgagcggccagacaaaacacgcgatgcgagcctacaagcatctgatccgagaggtagcacgatga

SEQ ID NO: 93306 - DNA, 537 bp, Enterobacter aerogenes
atggcaactatcgctggtaaaaattgcgccacattgctgcccatcactctcactgcagccttaaccggctgcggcctgacgcagagcgtaaaagatggagccgtctcagtgacctacgctattttttataaacagatcaaaacgctgcatttggatattcgggcccgggaaggggtgaaccacaatgcgcaaggggcgtcattgacaaccgtagtgcgaatttaccaactcaaagagcgcaaagcgtttgacgccagcgattatccctcgctatttgctgacgatagccgggcaataccaagcgattggctggcccaaaaagatatccgtctacacccgggggaatccgtggcgctggatatgccgctggagacggcggcgcaatacgtcgcggtggcggggatgtttatcgcgccggatcgggtcaaggacagctggcggttagtgttgacccgcgacgacctcgaccccgacaagccgcgtattatcgaagccggtcacaaccggctgacgctgcaaccgttaaaaggtaactaa

SEQ ID NO: 93307 - DNA, 570 bp, Enterobacter aerogenes
atgataaagcatacccgtattttgtccacagggctggcggtactggtcgccgtttttctctgtctattgacggcctgccgcgatcacagtcatgacggcatgagcggcgctgatatagccgtattaaaccacggacctgatgccatcgtttcggtgcaggttgatggctacggagggcccagggcgaatccctacggtggcggtggcggattctgctgcgtgatggtgcctgatgtctggcgcccgggactgacggcaaaaatcacctggacctccgatcctaatgcctggatgaaatcgagtgagatgcccgatgattatgagactcactatcagaaacatgggccgattactgtccccattgaacgctgggagaaggggcaggcgtgcggttttgatgtgcatattttcccctgcgataaggtgcggatagtccgttcctgctacggtcgcgcagatccgaaatacccgatacttcctcatcctgatgaggataaaaaagcagataacgttattttcaaacatatcaaggaggagatcgtatgtccgacaccgcagactccacgctga

SEQ ID NO: 93308 - DNA, 711 bp, Enterobacter aerogenes
atgacgaataacccatccactgtggaaaatgcgaaagagaaactggacctgtggttaaagcaggggctgacggtatcgggtggaaaattgccgtccgagcgcgagctgggcgagttgctcggtatcaagcgtatgaccctgcgccaggcgctgctcagcctggaggcggaatcaagaatatttcgtaaagaccgtaaaggctggtttgtcgcccagccgcgttttaactatagcccggagctttccgccagctttcagcgggcagcgattgaacagggcagagaaccgtcgtggggttttatcgaaaaggtacggacgacggagtatcccgacgtcgcagaagctcttgttgccacctgtcctgcgcatgatttatatctgataaccggctggggggcattagaaggacataaagttttttatcatgaaacgtttatcaacccgaatgttgcgccggagtttattaccaggctaaagaaccaatctttttcttccgtttgggagaagaattatcataaaaatgttgttattaaaaaattagccttcaggccagtaagaatgcccggcgatgtaagtaaattcattggcggctctgccggtatgcccgctattctgatagaaaaacatcgtgccgatagtgcaggtaatatcgtgcaaatagatctcgagtattggcgatttgaggctgtggatctctttattaacttgtag

SEQ ID NO: 93309 - DNA, 981 bp, Enterobacter aerogenes
atgctcactaaagataacgctgagaagatcctttctcgcattgataatattcctctttatcttcatgcatatgcatatcacctgaatatgcggctggagagaattttaccggctgatttactgaaaattgcgaatagccatcatttaaaaggtgtgaaaattcatgtcctcgatggcgagcgttactctcttagctgtatggataatatgcagttggccgcttttggcgagcaggcaaaagcgttacggttggatatccatatagaaaccagcgcctccgataaagagaccatcgatcaagccgtcgctatcgcattaaagaccggggcaacctccgttcgtttttatccccgttacgaagggcctttaaaggaagttctggcaagaattacggctgatattcaatatattaaagaggcgtatagccaatctggactcacttttaccattgaacaacatgaagatttaaaaagcgccgagttggtcaatctgattaaacaaagcgagatgccgtcgctatcgctgctttttgattttgccaatatgatcaatgccaatgaacgaccgcttgaggcgttggcagtgatgtcaccctatgtcactcaggttcacattaaagatgcctgtatcattgcggaaaacggtgggcttgggcaccgggcctgtaactcaggtctgggtgatatgccgtttaaggcgctgctgactgagttaatttgtctgggccaggagcaaccacaggtgatggcgtacggactggaagaagaagttgattattacgcgccacctttccgctttgcgactgaaggcgataacccgtggatcccgtggcgacaaatgagcgaaacgcctctgcctgatacaacgcaacttgaaacccggctggataaagaaaaacaggatgcgatcgcccagttaaattttgtcatggacactttacgcgatataaaaaatgatgcactgaaagttcttgcacgctaa

SEQ ID NO: 93310 - DNA, 1260 bp, Enterobacter aerogenes
atgctcacaagaaagaaatgggctatatttagcctgttaacgctttgtggtggtaccatttataaactgccttcattaaaagacgcattttatataccgatgcaggattattttcatttgaccaacggtcagattggtaatgccatgtcggtaaactcagtagtgacaaccatcggttttttcttgtcaatttactttgctgataaacttccgcgtcgctacaccatgtcattttcactgatagcgacgggattattaggtatctatctgacaacgatgcctggctattggggcattctatttgtctgggcattatttggcgtcacctgcgacatgatgaactggccggtattgttaaaatcggtgagtcggttagggaatagcgaacagcaggggcgtttatttggcttcttcgaaacggggcgcggaattgtcgataccgttatcgcattttccgcattagctattttcacctggtttggcagtggcttactgggttttaaagccggcatttggttctatgccattattgtcattgttgtaggcatcttgctgtttttcatgcttaagcaaaaggatgagccgacgcccgccgctgatgaaggcgccacaaagcaacaaaccagcatctcttcggtgctgaaagacaaaactatctggctgattgccttcaatgtgttctttgtttacgccgtttactgtggcctcaccttctttatcccgttcctgaagaacatctacatgctgccggtagccctggttggcgcctacggcattattaaccagtactgtttaaaaatgatcggtggtccaattggcggtttaattgccgataagatcctcaaatcgccaagtaaatatctcttttataccttctgtatcagtacgatggctttagtcgcgttaattctgttaccgcacgaaagtatgccggtctatctgggtatggtgtgtactctcgggttcggcgcaattgtttttacgcaacgagccgtgttttttgccccgattggggaagcgaaaatcgctgaaaaccagacgggcgcggcgatggcgctggggagcttcattggctatgcaccggcgatgttttgctacagcctgtacggctacattctcgatctcaatccgggtctggtggggtacaagatagtctttggcatcatggcctgcttcgcttgcgccggcgcgttcgtttcggtgatgctggttaaacgcatcaaccgcagaaagaatatgttggaaaccgcattggtctga

SEQ ID NO: 93311 - DNA, 846 bp, Enterobacter aerogenes
atgacgttggaaaaaggtattgcttcgctggttgaggagtttattgctgcggggcggccatcagcacgagaacagagtattgatgaccggagaaacggctatctcgccagcgccgttctcgcaggggaaacggaaacgcgtgtgcaggttgaagacatcacgctcgatggcataacctttcgcgtcgtctcgccgccaaaaagcaacggcttgctacccaccatggtgtattaccacggcggctgttttgtgagcggcggctttgccacccatgacaaccaattgcgccagcttgcctggtgcagtgggtgccgggtgatcgccgtgcagtatcgcctggccccggagtacccttttccggcggcgcacgatgatacggaacgaggcgccaacattatccatcggtatgcgcggcggcttggcgttgacgccgcgcgcatcacgctggccggcgacagcgccggcggccacctcgccctggtcacggctctgcgcctgaaagcggcgggagcatggcaacctgcgcaggttatcctgatttaccctatgctcgacgctaccgccagcatggcaagctacgccagcaacggcgaggattacatcattacccgggatacgctgcttagcggctacgaaatgtatttagcggccacacccgctacccatccggaagccagtccgctgtggcgcgaagattttagcgggctgccgccggttcatatcctgacggccgaatttgaccctttgcgcgatgagggagaagcgctgtaccagcggctaatagcacagggaatagaaagcacctgtcagcgctatctgggcgtcattcacggtttctttcaataa

SEQ ID NO: 93312 - DNA, 603 bp, Enterobacter aerogenes
ttgcgtgaaatactctatttcctcagctttatttcgataccatggctactatatcgaggatttcgcatcctgattttagcccaaccgccctatgtccttgctgcgtcattacgcttaggagcagctttcattatatttatcggcgcggtatctcttccacgtaacgcagcgacctttgaaaaggaatacaaagaaatcgttggctatccatcgacccaagtgacactgcaatttgcaacgctggacgattcgcaaaaacaacaaattttgcgagagatggcagaatacttttcagataccgaaaagatgataaaagttacacaaaagaaagcgacgggaaaaggcgtcaagacatggggtgaagcgactaatccccagagccaatacagaacctggcacgatacgctccctacgcgctaccgctggcaagaaaatcggctggagatagccaccggcagaccacttgaagatgaagaaatagatactttagaaacggtgttaagattaacaatcgcgcaagaaaatcattctgttttttctgagctgttaagccaatcgctagaaaattatcatttgcaacgcaaggttcaatttcgcccttga

SEQ ID NO: 93313 - DNA, 1017 bp, Enterobacter aerogenes
ttgaagaaagtcagcattatagatgtggcgaaactggccggcgtttccgtttctacggtctcgctggtattacgtcagaagggaaaaatttccgacgccaccatcgaaaaagtcaatgctgccatccaggagctcggctatgtgcataacgtcgccgccgccaaccttcgcgccaacaccaccaatctaatcggcctgattcttcgcgacttcaacgacagtttttccatcaaagtgatggccaacatcgtgcaggaactggagaaacagggctatatggtatttctcggccagccgcttaacgatagcgactatctggatcgctgcctgctgtcgtttaaacaacagggcgtcgccggcgtgatttatcttgatgccgataccacccgcgatacgctgcctgcagcgctgctgcggtgcccgctaccgctggtggccgtctcgcaaacgccgttaaccggcaaccgcgatcaggtggtccgcgataatcgtcaggccgccagcatcgccgcgcgttatctgatagagcgtggtcatcgctatattgcctacatcggcggtcaggaagacgatcttattcgtcagcagcggttgctcggcttttacagcacgctggagaaaaacggcatgacggtacgcgaagagtttgcgcccgcctgtcacgacaatacccaagccgccagtatcgccactcgtcagttactggaaaagaataatgccattaccgcgctgctctgccattcaccggatgcgatgattggctgcctcaatggtattcatcaggtaggacgaacggtgggaaaagatgtctttcttacccaacaagtggcgctggtgggcttcgaagatatgatgcatgtgaatttgacttcgccgtcttttacctatgtctcttccgccagcgaagagaccggccgtcaggccgccgcgttaattatccgcaagatcaaagaaccggctctccctacccagcgtattaccctttccggacaactggtgacgcgggagtcagcataa

SEQ ID NO: 93314 - DNA, 1500 bp, Enterobacter aerogenes
atgagtctgtggtcagggttcataaaatcattatcaaaactgtcgatgatcggccgcgccttgatgctgccgatttcgctcctcccggccgccggcctgttgttggccttcggggataaattccatttaccgctgatgatgaatgccggcggtattattttcgataacctgccgatgctcttcgctatcggctccgcagtcggcctcgcgtcggaatccggcatcgccgcgctatcggcagcggtctcggtcttcgtcaccaacatcaccatcggtaccgtactcggcattacgccggaaatggccgcacagggcggcaaatacgcgatggtggtcggcatcccgacgttacagatgggggttttcggcgggcttatctgcgggatactcgccgcctggtgctacaaccgctttcacacgctgcaattgccggaattcctcggtttcttttccggtaagcgttttgtggcgatcgccaccgccttcctgtcgttcatcctcggcctgttgctaccttacatctggcagcatatccaggccggtattgattccttgtcgatggtgattaacggcgataaccaggccgcctccacctttattttcggcctcgttgaacgcgcgctgatcccgcttggcctgcaccacatctggtacccttccttctggtactccttcggcgattacaccactcaggcgggccagatgatccacggcgaccagaccatctggtttaaaatgctggaagaaggggtgaaatcttttagcaccgatagctatcaaaacgcgggcaaatttatgcagggtgaattcccgctgatgttgttcgctctgccggccgcctgtctggcgatgtatcacgaagcgcacactaaaaataaaaaaatcgcggccggtattctgttctccgccgcgctgacctgcttcctgaccggcatcaccgaacccgtcgaattcacctttatcttcgtggcgccgattctgtacgtctttaacgccattatggcggggctctcgtacatgaccatgtacctgctgcacgcgcatattgccaaatcgttctccgccggacttatcgactatatctccttcggtattctgccttccatgaacggctatcagacaaacttcctcagcgcggtgattgttggcgtgccgatggcgctgatttattatttcaccttccgtttcgtgatccgccgcttcgatgtgaaaacgccgggacgtaccgatatcaccgtaacggccaatgataaaaccgacgccgaactggcaactgaaattgtcagcttactcggcggttcacagaatattgactcggtgggcgcctgcatcacccgtctgcgtctggaggttgccgaacgcgatgcggtagataaagacggcctcaacagtatcggcgcgcgcggcgtagtcttcgtcggtgataacggtatccagataatttttggcgccagggcgcaatttatcgctcaaaccatgtcggggatgattggcaaataa

SEQ ID NO: 93315 - DNA, 2013 bp, Enterobacter aerogenes
atgaatattttgggttatctacaaaaagtcggccgggcattgatggtgcccgtcgctactttacctgccgccgctattttaatgggcatcggttactggatcgatcccaacggctggggtagttctaacgcgctggccgcactatgtattcagtccggtgcagccattatcgataatatgggcgtcctgtttgccgtcggggtagcctacggcatgtcgaaagataaagatggcgccgccgcgctggccgggtttgtcggctttctggtattaaccacgctctgttcgccggcagctgtcgccatgatccagcagatcccaatcgagcaggtgcctgcggcctttgcgaagattaaaaatcagtttatcggcatcatggtcggcattatttcagcggaactctataaccgctttagcagcacggagttaccgaaagcgctctcgttcttcagcggacgccgactggtgccgatcctcacttcattcactatgattgtggtggcgtttgtcctgatgttcatctggccggtggtctttagcgggctggtcagcttcggtgaacatatccaaaaactgggctcactgggtgcgggtatctatgcttttttcaaccgcttgctcatcccggtcggcctgcatcacgccctgaactcggtattctggttcgacgtcgccgggattaacgacatcccgaatttccttggcggcgcgcagtccatcgcctccggtaaagcggtggttggcatcaccggtcgttatcaggcgggctttttcccggtcatgatgttcggcttgccgggcgcggcgctggccatgtaccagtgcgcccgagcggaaaataaagcgaaggtgatgggtattatgatggctggcgcgttcgcggccttcttcaccggcattaccgaaccgctggagttttccttcatgttcgtcgcgccggcgctatacgtcatccacgcctttttaaccggcgtgtccgtcttcatcgccgccagcatgcactggatcgccggattcggcttcagcgccggtctggtcgatatggtactggcatcgcgcaacccgctggccacccactggtatctgctcattcccatggggctggtgtacttcgcgatttattatctggtcttccgcttcaccatcacccgcttcaacctgctgacgccgggccgcgagctgtccgttgccggcagcgccgccgatggcgaagatgtgaacctgagcgccgcgaaacagcaggatatcagcgcgctggcgcgccagtacattgccgctatcggtggttccgataatctcaccaatatcgacgcctgcatcacccgcctgcgccttggcgttaaggatgcaacgctggtcgatgaagcgctggcccgccgcctgggagccagcggggtcattcgcctcaacgccagcaacgtgcagataatcgttggcttcgtggcggaaaaaatcgccaccgccatgaaaaccgcgggtcacgtcgatgccgcgcaggcgctgcccaatgcggccgtaccggccaacacgagtccacgcaaggcagcaaattcattgcgagttatcgagctcgtcgccccggtgagcggcgagctggtcgcgctggagcaagtccctgacgaagctttcgccagcggcgccgttggcggtggtgtcgccatcctgccggccagcaacattgtggtttcacccgcggcgggtactctcatcaagattttcaacaccgatcatgccttctgtcttgagaccgaagacggcgctgagatcgtggtgcatatggggattgataccgttgcgctggcgggtcagggctttacccgtctggcggaagaaggcgctactgttgtcgcaggtcagccgattctcgaaatggatctcgtgtacctcgaagctaacgtgcgttcgatggttagcccggtgctctgcagcaatatagaggagttcgcgcagctggaaatcaaagcgcacggtcaggtgaaagcgggtgaaccgctgtaccacattaagggataa

SEQ ID NO: 93316 - DNA, 1143 bp, Enterobacter aerogenes
atgataatccagagcgaacgagtgtggcttgccgggggtttttacccggcgcaaataaccattgaaaatgggcttatcagcgcgatcacgcccggtcttagctcccgcgtggataaggatttcggggcgcggcgcattataccaggccttatcgatagccatgcgcacggcgcctgggattacgataccaacgaaaacgacccacaggggctacgccgctgggcctcccgcctaccggaagaaggcgtcaccgccttttgcccgactaccgttaccgatgaaaacgcgacgctactggcggcgctggacaatatttcccacgttatggacgaaggatatagcggcgcggaaattctgggcatccatctcgaaggcccgttcctgagccaactttaccgcggcgcgcagccggaaaaacagattcgcccagccgacgtcacccagtttcaggctttcgaaaaggcggcgcgcgaccacattatcgccattacccttgccccggaagaagaccatcagtttgcgctgacccgctactgcgcgaagaaagggattgtggtcaatatgggccattcggatgcttctttcgagcaggcgctggcggcggtcgccaacggcgctaaaaatgtcacccatgtctataacggcatggcgaaatacgtcaatcgcgagcccggcctgcttggcgccgccctgaatcttgatggcctgtacggcgaggtgattgccgacggtatctttgtcagcctggtttccgccgcccacctttatcgcagcaaaaatgataatgacatcatcatgataagcgactcgatgaaggcgaaaggttgtcctccggggcgctatatgttcggcggagagccaatggtacttggcgatgatggcgcaaccagacgggataacggcgtcctggtcggcagcacgctacagctcaatcgcggcttatataatatggtcgaaagagcaatggtgccgtttagcgcggcattaaaatcctgcaccattaatccggcacggttattaggctttgatagtcgaaaaggaaaattacagcgcggatacgatgccgatattgttgtccttgaagataattatcaggtgaatacaacctattgtcgcggtacggtagcctggtcaataagttaa

SEQ ID NO: 93317 - DNA, 738 bp, Enterobacter aerogenes
atgttgaactttattattaccgacacctacgaaaaaatgagcgccctggcagcacaacatattgcccaggagctgaataaaaaaccggatttagtaatggccttaccgactggcggaacccccgtcggcctcctggccgaaatgagccgaatggcgaaagatggcgaagccgatttctcctgcgccctctcgtttaatatcgacgaatatatcccgctggccaaaaacgatccgcaaagttattattacttcctgcaacagcacttttatcagcatgccaacatggctgaagaaaataccttcgtaccggatattctggcgcccgacctgcaggccgaatgcgctcgctacgaacgcctgattcaaagccatggcgatttcgatattaccgttcttggcattggtcacgatggtcatattggtttcaatgaaccccatgctacccatagcccggtatgccatatcatcgaccttaacgaagagaccattgcggcgaacgcccgcttcttcgccagccaggacgaagtcccccgacaggctatcactttgggcatgggcaccatcttgcgcagcaaaaagatcgtgctgattgccaacggtaaatcaaaagcggaaattatcaagcagttgcaccaatgcacacacatcgatccgcaattccccgcctccttcttactgatgcatgcggacgtcaccatcatatgcgaccgtgacgcggcatcgcttatcagcgcttaa

SEQ ID NO: 93318 - DNA, 915 bp, Enterobacter aerogenes
atgagaactggcctgatttcccgaattcaacgttattccaccaaagatggtccaggaatacgcagcaccgtctttatgcagcagtgcaacctgcgctgccagtggtgcgcgaatccggaaaccatcgggccaggccataacgttttctggtttaaagaacgctgccgccagtgcggtacctgcgtacaggcggcgaacaaccacgccattacccttgctgaacctggcaatggcgtcaatatagaccgtagaaattgcagcaatctcctggatatggtcgatctctgcccctacgacggttatgaaaaagtcgctaaagagatgacctcgcaccagttggcggaattactactgcgcgacaagacattttacgactcaagcactggcggcgtgaccttttccggcggcgagccggcgctgcaggcggagttcgtcaaagaaacagcgcaaatattgaaagcgcagggcgtacacgtatgtctcgatactgcaggcaatatccgctgggaaaagctgcgcccgctgattgaaacggtcgatctggtctcttacgactttaaagctttcaaccccgagactcatcttgcctgtaccggcgtagacaatcggcggatcctcgataatgccaaagcgatcgccgctatgggcaagccgatcctcgcgcgaatggtgatcgtgccgacgcgtaacgacgatccggaggatattcgccagcgtctcgactttattcgtaaactcggtccggcgattttacaggttgatattctcgaataccatatttatggcatcgggaaatatcaaaagcttggtatgccctattttctacacaacattccgacatgccaacgcgacgtaacagaacaaattaaacaatacgctgaagatattggattaaaagccaccattggcggttaa

SEQ ID NO: 93319 - DNA, 2424 bp, Enterobacter aerogenes
atgaacggattactgagcttcaaacctaccaacgacgattgcgacttcgcgcgtatcgctaaaaaacaggatcagatgttccatcgcgtggcgacgctatgcccggaacgagcagagatcatcaccgagtcgtttaaacgctccgaaggccagtccattgtgattcgccgggctttggcgttagccgatattctggagaaaatgaccatctatatcgaaccggatatgctgattgtcggcaaccaggcgagcgccaattttgccgcgccggtgttcccggaatactcctttaactgggttatcgatgaactggacgaatttgataagcgttccggtgatagcttccgcgtgtccgaatccaccaaagcccgcttgcgtgccctgcaggattactggcaagggaaaacccatcaggatgaagtgcttgccaacctaccgcaaattaaccgtctggcggaaaaacagggcgtgctgcaccgcggcggcatcagcatgtccggcgacggccatatcattccgaaccacgatttcgtactggaagttggctatggcggtatgcgcgatatcgccaaacagcacctggaaaatgacgacaccctgaccgacgagcaaaaagatttctatcaggcggtcattattaccatggaggccgcgcttaaatactgcaaacgcttctccgcgcttgctaaaaccgaagcggcaagagtgtccgatgctaaacgccgcgacgaactgctggccatgagcgacatgttcgcccatctgatggaaggcaaagcccgtagcttctatgaagccgtggaaaccgtctaccttacccatttgctgatgatgattgaaagcaacggccactctttctccttcggccgcttcgaccagtacgtctggccgtattacgaagccgatatcaaagccggaaaaatcagcaaagaaaaggcgctggagatcctgacccacttcttcatcatgaccaacagcctgaacaaagtacgcccgtggggccatactcagtacagcgggggctatccgctctattccaacctgatggttggcggcatgaagcctgacggcagcgacggcaccaacgatctttcctatctgtcgctggaagccatggcgctaaccggcctgccggaaccaaacctcagcgttcgtttctcaaaagataccccgcattcgctgatgcaggatgccgcaaagctcattcgtaaaggcttcggtatgccgtcgatcttctgcgatgaagtggttatccctgccatgatgacgctgggcctgacagaagaagtcgcccgcgaatatgcttcaatgggttgcgtagaaaccgcgatcccaggccgctgggggcaccgcgccaccggcatgacctatgtgaatttcggcaagatccttgagctggtgatgaacaacggctgcgatccggcgaccggcgtgcagttagtgaaaatcaacggtaaagaaggccgcgaaataaactaccagtcttacgatgaagtatgggcggcgtggaaccagctcctggagttctactccgatctggcggtagattgcgatctggtctgcgaccgggcgctgaaataccacgatgccgatgcctttgcctccgccacgattaactgctcactggaacgcggtaaaacgttgaaaaacggcggtgcggaatatgacttcgtgagttcctccaacattggcccatccgtggtcggcgatagcctggcggcagtgaaaaaactggtcttcgacgataaagtcctgacgcttcaacagctacgcgacgccatggatagcaactttgaaggtctggaaggcgcgcgcgtacgcaaactgtgccgcaatgcgccgaagtttggtaacgatatcgactatgtcgaccatatcgtcgccgatgtcttcgagtcttatctcaaactgttgccgaaatacaaaaccgatcgctatggtaaggggccaaaaggctgcggttataccatgtcgacctctaatattacttcatacgtgccgaatggttttgacgtcggcgccacgccggatggtcgcctggcgacgctgccgctgaacgaaggcgcctctccgtgcctcggcgcggataaagaaggcccgacggcggtcattaactcggttgcgaaactgccgaaccagaaaatcgccggcggccagctgctgaatatgaagttcacgccaagcgcgctggaaggcgacgacaatctggagaaatttaccgcctttatggaagccagccgtgagaaaaacatcttccataatcagttcaacatcattgattccaatattctgcgcgccgcaaaggcgaatccgcaggattacccgaatctgatggtgcgcgttgccgggtattgcgcgctgttctcaacgctgatgccggaagcgcaggatgcgattatcgcgcgcaccgaactgagctggtaa

SEQ ID NO: 93320 - DNA, 750 bp, Enterobacter aerogenes
atgagcatttacgccattctgcaacaggacaaaaaagtcgttgtaaacgaactggccgagaagttcggcgtcaccaaaatgactatccgccgggatctgtcattcttcgaaaaacagggaatcgtcaaaacgacctatggcggcgcctacctgaccagcggcgccagcgtcgagccaagttttcagcttaaatccgtgcagatggttgacgataaacacctgattggccgtaaagcggcagagctggttgaggacggcgacactatcatcattgactgcgggaccacgctgctggcgctagcgcaatcaattttcgataaaaaaatcatggtgatcactaactcagtaccggtagtgaacctgctaaaaggaagaaaaaacatcaagttaatcgtcgctccgggagaatatgaagatgatacccaggggatgatctctttcagtaccgcagagttttttagcaccattcatgccgataaggtctttatcagcacccagggtattaaccaccacggcgagctaacggtccctaaaatgaccgatgcccacgtcaagcgagcgctgctgcgcgccggacggcaaaaaatcctcctcgccgataaaagtaaattcgagcaaactttccttgccggccatgcccgactggacgattttgacatcgttatcagtcaggatggcctcccagccgatatcctctccctgcttactgcgcaaaaaaccgaactgttgctggccgacagcgcagcataa

SEQ ID NO: 93321 - DNA, 1104 bp, Enterobacter aerogenes
atggatcgcattattcaatcacccggtaaatacatccagggcgctggcgccatcaagcgcctcggcgaatatctcaaaccgctggctgaacgctggctaatcatcggcgacaagttcgttctcggcttcgccgaagagcagctgcgtaccagcctgagcggcgctggtctggtggccgaaatcgccccgttcggcggtgaatgttcgcaaaatgaaatcaaccgcctgcgcgatatcgccagcagcgcccaatgccatgcagtgctcggcatcggcggcggcaagacgctggataccgcgaaagcgctggctcactatatgcacctgccggtggtcgtggcaccgaccatcgcctccaccgatgcgccgtgcagcgcgttgtctgttatctataccgacgatggcgaattcgaaagctatctgatgctgccgcacaacccgaacatggtggttgtcgatacgcagatcgtcgcaggcgcgccagctcgcctgctggccgccgggattggcgatgcgctggcgacctggtttgaagcccgcgcctgctcgcgcagcggcgcgactacaatggcgggtggtaaatgcacccaggcggcgctggcgctggcggagctatgctacaacacgctggttgaagaaggcgaaaaggcgatgcttgccgccgagcagcatgtggttaccccagcgcttgagcgggtgatcgaagccaacacctacctgagcggcgtcggctttgagagcggcgggctggcggcggcgcacgcgattcacaatggcctgaccgccatcccggacgcccatcacttctaccacggagaaaaggtcgcatttggtaccctgacgcagctggtgctggaaaacgcgccggtggaagaaattgagaccgctgcggcgctttgtcacagcgtcggtctgcccatcacgctggcgcagctcgatattaaaggcgatatcccggccaaaatgcgcacggtcgcggaagccgcctgcgccgaaggcgaaactatccacaatatgccgggcggcgccagcgccgaccaggtgtacgccgcgctgttggtggccgaccaatatggacagcgtttcctgcaagagtgggaataa

SEQ ID NO: 93322 - DNA, 1173 bp, Enterobacter aerogenes
atgacggaacaacaaaatcaatccgccgtggttgaagagaccagggaggccgtggaaaccacgccacagccagaaaacaacgagaagaaaaaggccggcaacaaaaccagcctggcgctcagcgcgattgctatcgctatcgccctcgccgccggtattggcctgtatggtttgaataaacagcaatccacgcgccaaaatgaaaccagctcggaattatcaagccagatcgcagcgctgcaaaaagcgcaggacagccagaagagcgagctggaaggcattatcaaacagcaggccgatcggttgagcgaagccaaacgcgaacaggaaaccctgacgaaacagcttgatgagctacagcaaaaagtcgccgtgatttccggcagcgacgccaaaacctggctgctggcgcaggctgatttcctggttaagctggcggggcgtaagctgtggagcgatcaggatgtgacgaccgccgccgcgctgctgaaaagcgccgatgccagtctcgccgatatgaacgacccaagccttatcggcgcgcgccgcgccatcaccgatgacatcgcttcgctgtcggcggtaagtcaggtcgattacgacggcattatcctcaaggttaaccagctggcgaaccaaatcgacaatctgcgtctggctgataataacgacgatgattctccgatggatgccgacagcgacgagctctccagctccattggcgaatggcgcgttaacctgcagaaaagctggcagaactttatggatagcttcattaccatacgtcgccgtgacgaaacggcggtgccgctgttagcgccgaatcaggatgtctatctgcgcgaaaatatccgctctcgtctgctggttgccgcgcaggcggtgccgcgtcatcaggaagaaacctataagcaggcgctggaaaacgtctccacctgggtacgcgcctattacgatactgaagacgccactaccaaggctttccttgaagaggtggataagctcagtcagcaaagtatcaccatgagcgtaccggaaacgttgcagagccagagcctgctggaaaagctgatgcaaactcgggtgcgtaatttaatggcccagcctgcggcagccgctccgacgccgacgccagcaccgaccgcgccagcccctgcgccgcaaggagaataa

SEQ ID NO: 93323 - DNA, 2631 bp, Enterobacter aerogenes
atggtgacggttcttgttgaaatactgaaatcctccgtactattgtacgtcggatttttgaacatcaggcgatatgtcttgtacctctatattgagacactgaaacagagactggatgccatcaaccaactgcgcgtggatcgcgcgcttgctgccatgggacccgctttccagcaggtttacagtcttctgccgacattactacattatcatcacccgctgatgccgggttaccttgacggtaacgttccccgcggcatttgcctctacacgcctgatgaaacccaacgccactatcttgacgaactcgaactgcatcgcggcctgctaacgcaggagccgccgaaaggcgaactgccgattaccggcgtctattcgatgggcagtacctcttccgtcgggcaaagctgctcttccgatctggatatctgggtatgccatcaggcctggctggataacgaagaacgccaactgctgcagcgtaaatgcagcctgcttgaaagctgggcggcgtcgctcggcgtcgaggtcagtttcttcctgatcgacgaaaaccgcttccgccataacgaaagcggcagcctcggcggcgaagactgtggttcgacccagcatattttgttgctcgatgagttttaccgcaccgccgtgcgtctcgccgggaagcgtattctgtggaatatggtgccgggcgatgaagaagaccattacgatgattacgtgatggggctgtatgcccagggcgtgctgacgccaaacgaatggctcgatctcggtggcctcagttctctgtcggcggaagagtacttcggcgccagcctgtggcagctgtataagagcatcgactccccgtataaagcggtgctgaaaacgctgctgctggaagcctactcgtgggaataccccaacaaccgcctgttggcgaaagatattaaacagcgcctgcacgatggcgagattgtctcattcggtctcgacccctactgcatgatgctggagcgcgtaaccgcctatctgcaggctatcgaagacgacacccgtctcgatctggtacgccgctgcttctacctgaaagtctgtgaaaaactcagccgcgagcgcgcctgcgtgggctggcgtcgtgaagtcgtcagccagttggtgaaagagtggggctgggatgaaaagcgtctgatgatgcttgataaccgcgctaactggaaaatcgatgaagtgcgcaaagcgcacaacgaactgctcgacgcgatgatgcagagctatcgtaatctgatccgtttcgcccggcgcaataacctcagcgtctccgccagcccgcaggatatcggcgtgctgacgcgtaagctgtatgccgcctttgaagccctgccgggcaaagttaccctggtaaacccgcaaatttcaccggacctgtcggaaccgaatctgacctttatccacgtgccgccgggccgcgctaaccgtaccggttggtatctgtataaccgcgcgccggatatggaatcgatcatcagccatcagccgctggaatataaccgttaccttaataagctggtggcctgggcctggtttaacggcctgctgacctcacgcacccgtctgtttattaagggcaacggtatcgtcgatttaccgaagctgcaggagatggtggccgacgtgtcgcaccacttcccgctgcgcctgccggcgccgacgccaaaagcgctgtacagcccgtgcgaaattcgccacctggcgattatcgtcaacctcgaatatgacccgacggcggcattccgtaatcaggtggtgcatttcgacttccgtaagctcgacgttttcagcttcggcgaagagcaaaaatgcctgattggcagcgtcgacctgctgtatcgcaactcgtggaacgaagtgcgcacgctgcactttaacggtgagcaggcgatgatcgaagcgctgaaaactattctcggcaaaatgcatcaggacgccgcgccgccggatagcgtggaggtgttctgctatagccagcacctgcgcggccttatccgcacccgcgtgcagcagatggtctccgagtgcatcgaactgcgtctctccagtacccgtcaggataccgggcgcttcaaagcgctgcgcgtctccggccagacctggggcctgttcttcgagcgcctgaacgtgtcggtgcagaagctggaaaacgccattgagttctacggcgctatctcgcacaacaagctccacggcctgtcggtacaggtagaaaccaatcacgttaagctgccggcggtggtggatggcttcgccagcgaagggataattcaattcttctttgaagatgcggataataatgacagcggctttaacatctacattctcgacgaaagcaaccgcgccgaggtctatcaccactgcgaaggcagcaaagaagagctggtgcgcgacgttagccgcttctactcgtcatcgcacgatcgcttcacctacggctcaagcttcattaacttcaacctgccgcagttctatcagattgtcgaagttgacggacgcacgcaggtgattccgttccgcagtcaggcgattgcctccgcggtgccgccgggccaggaagcggtcgcctcaccggtgctgcagcagcgctactcgtag

SEQ ID NO: 93324 - DNA, 906 bp, Enterobacter aerogenes
atgagaaaagttatcgctctgtttaccaccctgctgctgatgggctggtcgattaacgcctggtccttcgcctgcaaaaccgcagccggcgcaactattcctataggcggcggctcggccaacgtatatgtcaacctgacgccagcagtgaacgttggacaaaacctggtggttgacctgtcgacgcagattttttgtcataatgactatccgcaaaggattaccgactatgtgacgctacagcgcggatccgcctacggcggcgtgctgtcgagcttttccggtaccgtaaaatataacggtacctcttatccgttcccgaccaccacggaaacttcgcgggtgatctacgattcgactaccgataaaccctggccgaccgtactctatctgactccggtcagcactgcgggcggggtggcgattaccgccggatcgctgattgccgtgttgatcctgcatcaaaccaacaactacaacagcgactccttccagttcgtgtggaatatttacgccaataacgacgtcgttgtgccgaccggcggttgcgatgtctccgcccgcgatgtgaccgtgacgttacccgattatccgggctcgatggcggtgccggtcaccgtccactgcgcgcagaaccagaatcttggctattacctttccggcaccaccgccgatagcgccaactccattttcaccaataccgcttccgcttcgccggcgcagggtattggcgtccagatgacgcgcaacggtagcgtcgttccggccaacagcaatgtttcattgggaacggtcggcacttcaccggttaatctcggtctgaccgctacctatgcgcgcaccagcggtcaggtgacggcgggtaacgtccagtcgattattggggtgacgtttgtctaccagtaa

SEQ ID NO: 93325 - DNA, 2634 bp, Enterobacter aerogenes
atgtcacatctcaaatatggacaggaccgttttggttcccgcagcgcctggctccgcccgcgcgctattttgaccatggcgaaatttcccgtggcgctctgttttgtcctgcaggcgggtcacgcgcaggctgaactctattttaacccgcgttttttggctgacgatcctgcggcggtggccgatctttccggttttgaaaacggtcaagaggtgccgcccggcacctaccgcgtcgatatttaccttaatgacggctttatgaccactcgcgatgtcacatttaaccgcggcgaaaaaggccatgggttaagcccgtgcctgacccgcggccagctggcgggcatgggggtcaacaccgcggcggtgaccgggatgaacgccctcgccgccgacgcctgcgtgccgctgaccgaacttatcaccgatgccacgacgcgcttcgatgtcggccagcagcgcctgtacctcaccgtgccgcaggcctttatgggcaaccgcgcgcgcggctacattccgcctgaaatgtgggatgacggcatcaacgccgggctgctgaactataacttcaccggcaacaacgtccataacgataccggcggcagcagcaattacgcctatttaaacctacaaagcggccttaatctcggcgcctggcgactacgtgataacaccacgtggagctacagcagcggcggcagcagttccagcaatgagaataaatggcagcatgttaatacctggcttgagcgcgacatcacgccgctgcgctcgcgcctgaccctcggcgacagctacaccaacggcgatgttttcgacggcattaacttccgcggcgcccagctggcgagcgatgacaacatgctgccggatagccagaagggctttgcgccggtgatccacggtatcgcccgcggcaccgcgcaggtgtcgatcaaacaaaacggttatgagatttaccagagcacggttccgcctggcccgttcaccattaacgatctgtatgccgcaggcaacggcggcgatctgcaggtgacgattaaagaaaacgacggcaccagccaggtctttagcgtgccgtggtcaacggtgccggtactacagcgcgaagggcatacccggtacgcgctgaccgccggagaataccgcagcggcaacgatcagcaggaagagccgaagttctttcagagtaccgtgttacacggcctgcctgcgggctggaccctatatggcggcactcagctcgccgaccgctaccgcgcctttaatctcggcgtggggaaaaacatgggcgatttcggcgccgtctcgctggatgtcacccaggctaacgccaccctgcccgacgacagcgatcaccaggggcagtcgattcgcttcctctataacaagtcgctgagcgatgtcggcaccaatatccaactggtgggctatcgctactccactaaaggttattacagctttgccgatactacctaccgccggatgagcggttacgacgtacagacccaggatggcgtgatccaggtgaagccgaaattcaccgattactacaacctcgcctataacaagcgcggcaaagtgcaactgagcgtgacccaacagttggggcgtaccgccacgctctatctgagcggcagtcatcagacctactggtcgaccggcaaggcggaccagcagctgcaggccgggctcaacgcggcggtggacgatatcaactggacgctgagctacagcctgaccaaaaacgcctggcagcagggccgcgaccagatgctggcggtcaacgtcaatattccgttcagccactggctgcgttccgacagcaaatcggtatggcggcacgccagcgccagctacagcatgtcgcacgatcttaatggccggatgaccaatctggcgggactttacggcaccctgctggaagacaataacctgagctatagcgtgcagaccggctatgccagcggcggcgaaggcgatagcagcggcaccggctacgcggcgctgaactaccgcggcggctacggcaacgccaacgtcggctacagccgcagcgacggctttaaacagctgtactacggcgtcagcggcggcgtattggcccatgccaacggcgtgaccctgagccagccgctgaatgacacggtggtgctggtgaaagcgccgggcgccgacaacgtaaaagtggaaaaccagaccggggtgcgtaccgactggcgcggctatgcggtactgccttacgccaccgaatatcgcgaaaatcgtgtcgcgctggataccaatacgcttgccgataacgtcgatctcgatgacgcggtggtcagcgtcgtccctactcacggcgctatcgtgcgggcggacttcaaagcccacgtcggggtcaagttactgatgacgctgacccataacggcaaaccggtgccgtttggcgcgatggtcacctcgggcagcaatcagagcggcagtatcgtggccgataacggccaggtctacctgagcgggatgccgctcgccggcagcgtgcaggtgaaatggggcgaaggcgcgaacgccagctgcgtggccagctatcgcctgccggaagagagtcagcgacaggcgctgagcctgctatcggcagagtgccgttaa

SEQ ID NO: 93326 - DNA, 195 bp, Enterobacter aerogenes
atgacaaaacaggtatcacattacatttacacatgcataaattatcgccacgcgataattcttatttttatctattttattgtttaccacaatagagccacgccaggtcgctggcaggtgcataaaatagcaaggaaaaaagttaatgccagctatttattgaacggaaaacatgtgctgaaaggattaatttaa

SEQ ID NO: 93327 - DNA, 246 bp, Enterobacter aerogenes
atgaaaaaaatgatcctgcctctgcttaccgccgccctgctgctgccgacgctcaccgcgcacgccacctaccgcgcggaaaaacgccaggatgcccgtgatatccgtcaggatgcgcgccagagtggacgcgaagaaaaacacgactgtgtgagaaacgatcaacagagcaacatgagctgtcgcgtagataaacgcgacaaccgccgtgagggtcgccagaacgcgcgtgatgagaaatggtga

SEQ ID NO: 93328 - DNA, 999 bp, Enterobacter aerogenes
atgaaatggataattttgctggtattaagcttatgctcttttttagcgcgagcggggaattgcgatgtcacgccaaatgttaattctttgacgattgacgccagcggtaattatacctttaagccactggcggccagcggtgatttgaatgtcagaaacagcgatattcagtctgagggatttcactttatctgcaacagtacgcaaaatgtcagcgtctcggtggcgtcgtcgccccctgaggataaagacttctatgtagtagtcggcagtaaaacctacgtgatggagttttctctcgatcctgcgaaactcaacgctcttgcggatggtaacatccgcaaaaatcagagttataacttagcggatatttttaacagcgtaatcggcattcgttatgtgattaaagaaggcgccgcagtcgggaggcaggttcagcctggcgaatcattcccgttggtttactcgatgcgctttgagtactgtaaaggcaataaagattgccatgtgataaacatcaattacacctttaacgtgaccctgcagattaatatcatgacctgtggttttaacgtcccgaaccgcctcattaatatgggcgattacagctactttgatattaaagaagacaaagcgcaatatcgcatggaaagcgtcaatatcgattgtagccaggacgagtcggcggtattcgaattgacgccgggtaaaattgattattactttgtcgccgcctccggctttgccggcaccagcaaaatattgaagaatgacgatcaggaggccgccaccggcgccggcgaagtcggttttcatctgcgcgatagccagggcggggaactccagtacggcagcggtttcctttatcactccgacgaggaggcccggcatggcagcaacaacccgatctatctgcaaatcaaaccgatgaaatatggcgagaatatccgcggcggtacgattaaaagccgtgtcattatcgtggtgaacaataactag

SEQ ID NO: 93329 - DNA, 240 bp, Enterobacter aerogenes
atgagaaggcggggaaaagcagtgtgggggaagaaaattcagaataaaaaaaacctgcgcatccgcgcaggtcggtgcaagataatcagtacgaagtgcgtacttaagaaactcaccaatcaatacctctgggaccctgattgtcgcgtttttacccacgaccgcgccagcgcgaaaacgcaagggaatgagcctaagtgcaaccaggtattgcgattttcgctgtctgtaacaggctga

SEQ ID NO: 93330 - DNA, 306 bp, Enterobacter aerogenes
atgaaaaagaaaactaacgccattactaaaaacatcaagaaaattactgccgtaatctcgatttacccttgggtcttactgctcttaaccatgatgagcagtggaccagcctatgctgcctttgccgcaggccttatgacggtctttttatttgttattttatctatcgtcaaccttattatttcagtggtagttattgttattgctgacagatcaacatcacagacgcccataagttatgtcgcctatttttttgccatgaactcagtctcttttctctggctgttacttttatttgcttactaa

SEQ ID NO: 93331 - DNA, 321 bp, Enterobacter aerogenes
atggataagaaacctaattggctagtcagacatattaagaaaataaccttcgcagtatcaatttatccttgggttattatcattgcattattttgggattgctatcaacatcccataagcggttatgcagcgatagccgtagccgaagctatattactattagccaagatattatcttcctttaactttcttatatcaataatcgtcaccatctataccaatacatcaaaacctccgatcgccaaaggttcaacaacttatttcctcgctatgaattcgatttcagcatcatggataattctcatgcttttatggcgataa

SEQ ID NO: 93332 - DNA, 372 bp, Enterobacter aerogenes
ttgaaatactttcgacaggaagaaaaatttaaacaaaatgacccgacaacggtaaaagcgttcgccaaacactggctgatagatatcgttgaaaaaagtaaccgcgatccgcgaaacgttcctcgcgttatcgagaaggacgtcattcccaccatcggaaagctggaactcgaagaactcacaacctcccacattcaggtcgtgctcgaccgcatcaagcaacgaggttcgaatcacgtcgcgctactgacgcgaaacgtgcttaaacgcatgctggcctatgctatttccaggggaatcatattcaacaacccggcagccgctatcgagggccgttatatcgcacaagcaacaagcccgacgtggcgctaa

SEQ ID NO: 93333 - DNA, 504 bp, Enterobacter aerogenes
gtggcgctaacagcagaagagatcggcatcctgcgacgggggatctacacctctaacatgaaccgacgccacaagctagctttgcacctgctgatcatctgcatggttcgtaaatcggagatgattgaagcgacatggagcaaagttaacttcaacgtgctggaatggcgtatacccggcgaaagaatgaagatggataacccgcatattgttccgctgtcaaagcaggcgttggcgatgttcgaagagctaaaatttctggccggagattccacttacgtcttccccagccgaaacgaccaccgacgcccgatctccaaaacaacgcttaactgtgcggtgcgtacactggaactgaacgtcagggattttgttattcatgacttccggcgtactgccagcacattgctacatgagcaaggctacaactccgactgggtagagaaatgcctcgcgctaagatcggcggcgggcgcggcgtctacaaccgtgcgcagtacctga

SEQ ID NO: 93334 - DNA, 888 bp, Enterobacter aerogenes
gtgctaaatcctacgcaactctcagcgctatcacggatgttttcttcgtcagtaatttccgagatagcaaaaaaaggtcagtcacctcttttttcaaggttactgtctgaggcatctgttttcgaatttgatgacgcagataatgtaactattggtgatgcctttgatacagcattttctttgctcagacgctcaggtttgagaaacgagtatgtctatcgttctgcgttaattcgaaatgtattattaggccgtcattctttgcgtaccgccagcatgcttactgaatttagaattggctctagcaaagcagacatggttattcttaacggttgtggaactgtatacgaaataaaatcagatagagattcgcttgccagacttgagagccaacttgagaattatagaaaagcattcagtaagatctacgtcattgcaggaactgcacatatccaagatatcttggaaaaaacatcagaagacgtaggggtgatgagtttggttcgatggaatagaattagtattgtacgagaagcaaaagagaatactgattatatttgcactgcaactatttttgattcactaagacttagcgaagctattgatatcctaaatgagttaaatattgacattcccgatctacccaacacattgatgcgtaatgcaataagaggtatttttaccaaactaaatccaattgatgtacagagctgcatgataaaaactttaaaaaggacgcgtaatcttgctccattaagtactttaattgcaaacttaccaagtgcattgcaaagtatagccctaatggttcagttacgtagtaaggatcgagatcgcttagttgagacgttgaataaacctcttaatgaagcatttaaatgggtttaa

SEQ ID NO: 93335 - DNA, 933 bp, Enterobacter aerogenes
atgtactatccatattttagaggtaagcagtttgagttaatagcgattcgtgaaacagcagagacgatggctcaggctggtttcattccaattattgaaccagttaaagaaaccctgaatggattagaaaaaacactaaaagctatctgtgaagctaaaggtaaagctattgtaatagtaaatccttcatatggtgaccattcaacaaatgggcataatatctcgcaattattgaaagatagttttcatggacatgaaaacatttttgcagggatactattaaatgaagggatggatgaagaagatataatagagttgctggatgaacatgccgaacatcaaccttgtttcatccactctggattttctgagccccgctctttatcagaaaaaacaaatggtcgagtatccaaacatatcttcttagaactttactgcggtaaactctataggaaacattttaacggctgcgaaagaatattaattcgcgatggttttaaaaagagaaaaaatgctgattatcctcctattgaagagttttcagaccttcatataaccttcggggaagaaggaatggatggatttggcgattttttaatcgttggggatgactatactgaaggtggtggtccggcatatgcggtagcaatacatctcacgttcttagaatctaaaaaagaaaatgttatgtatatttatcactttgtttcaacgacaagagatacaccaacagaccctgcggggaaattcggtcaggcacttgaaaaactcattacaacaataaatgagaataattctcctgtattggagacctcagctattttagaatttcgagcgttgcatgcaaaaggccatttccctggattgggaaccgtcaaaaaactctcaatgaggcaccatgttgaaacattagctaattattttaggggctag

SEQ ID NO: 93336 - DNA, 1029 bp, Enterobacter aerogenes
atgattagaatgtgttgtgccgaatgtttcaatgatatcggattgcgaaataatataatccctacattgatgccacaaaaaggaaactgttctttttgtaatagtcaagatgttgatattattgatcctaaactcttgttggattattttgaactgctgataaatatttatgaaataaatcctgaagggaaaaatcttgttgaatggctaaaagaagattggtgcttattttcccatccaacaatggacaatgctcatgcaaaagagttattgggagaaattctcgatgacggagatgtagtacgaaagaacttctctccctccgaaaattataaaagcacaggccttgcgcaatgggatacattacgagatgaaattcttcacaaaaacagatacttccttgatgaaaaaattgacactcaaagattacaggaattactcaaccatttaaaagcatttaatatcccgcgaatatggtttagagcaaggataaatcaaactgatactccatataaaattgaagatatgggggcacctccaagtcggtatgctagtcatggacgagcgaacccaacaggaattccatatttatatttaggatcaatgccagatacagcgatctctgagattagaccacatacaggtgaaatagcaacagtagctgagtttgaaataccagaagaactaattattgttgatttaagagagccgagaaaacatgtttctccttttgttctatctgatgcacaagaaataggaaaaatgcgggcagacataccttttttagaaaaattaggagaagaactaactcgtcctgtgttacctcgaagtgctgccattgattatatccccagtcaatatttatgtgagttcataaaaaaaattggttttcatggtgtaatttacagaagttctgtaagcgagggaataaacttagccttattcgacccaacattagcaacccctatttcaacatcacaatatgacgtttctcgcgtaagtgttgaagtacaagcaaagcagttataa

SEQ ID NO: 93337 - DNA, 405 bp, Enterobacter aerogenes
atgtcgaaacttacaaaacacatggaaaaactcgccctgctggctggcggcagttttaaaacagtccatgatcgcctccgcatcgccgggcgtttaagccagcatctgcacaagctgaatatccagattcaggatctccagtatctgaaatcgtcacatatcgaaagctacgtgatggcgcgccgggaagcaggaattacgccacgcacgctacaaaacgagatggctgccctgcgcaccatccttgctcagtctggacgtcaaaaatttgcccaatcggagcgcatcagcaataaagcgctcgggctgggtaacgttgccatcatgatcgaagctcttgcaaaatcttacgagtatgaagcgcagatgcatgatgaagatggattatggaatcaagaatcatga

SEQ ID NO: 93338 - DNA, 960 bp, Enterobacter aerogenes
atgaagaaatccctgtcgagtctcgatcttaatctcctgctgtgcctgcagcttctgacccaggagcgcagcgtcacccgcacggcgaaacggatgaacgtttcgccgtcggcggtgagtaaatcattggccaagctacgcgcctggtttgacgatccgctatttgttaaaaccccactagggctggcgccaacgccgttaatgagcagcatggagcaggatctcgccgactggatgcagatgggcaatcagatcctcgataaaccgcaccacaccatgccaagcggcctgaagtttgagctggcggcagaatcgccgctgctgatgatcctgttcaacaccctctcccagcaaatttatcaacgttatccacaggcgctgatccgcttacgcaactgggattacgactcgctggatgcgatcattcgcggcgaggtcgatatcggtttttgcggccgggaaacccatccccgttcgcgcgaacagctgagcctgctgccgtggtatatcgattttgatatcctgtttagcgacctgccgcaggtgtggctgcgcgccgatcatccggcgcttaatgaagagtggaatctggaaacattcctgcgctatccgcacatcaacatctgctgggaacagagcgatacctgggcgctggatgatgtgctgcatgacctgggccacaaacggaccgttgccctgaccctacccggctttgagcagtcgctgtttatggcggcacagccgaatcacaccatgatagccaccgcgccgcgctattgtcagcactataatcagcagcatcatctgccgctggtatcgcgcccgctgccgctggagccgcagctactggaaaaaatgcgcgtgccgttcaccctgctgtggcacaagcgtaatagctataatccaaagatcgtatggctcagagagaccctcaaacagctctattccaatacgctgtag

SEQ ID NO: 93339 - DNA, 315 bp, Enterobacter aerogenes
atgattacgttgttatccagctgcaggcgatcgtcgttcaccctctcaccgttgcgcatgtatgggcggatgaataaaaaaacattcaatacatggtggaataatgcgaaaaagcaagccgcggtgaaactgggtcgccctgttccgggtacgttccacgatattaaagccaaagcaatttcagtctatgaaggtagtagcaaagagaagcagatgtttagtggacacaaaacagaaagccaggtagtaacttacgataggatagtgaagctatcaccgactttagacgtcccaccattagataaggaagattaa

SEQ ID NO: 93340 - DNA, 1164 bp, Enterobacter aerogenes
atgaatcaacaacagttaaagcagcagcttatcgcctggcgccatcacctgcatgccaatccggaaagcgcctttgaagaagtcaaaacctcgcagtttatcgccgagaaactcgaagcgatgggcattgaggttcaccgtaacataggtaaaaccgggctggtgggcgtgttgaaatgcggcgacggtaacggtgttatcgccatccgcgccgacatcgatgctattcaattgaacgaacagggtgaacggccttaccgctccacgaccgctgaacggatgcacggctgcgggcatgatggccatacctgcattgcgctgggcgcggcgcagttgctattgcagcggcaaaactttaacggcaccgtctgttttgtttttcaacctgcggaggaacccggttatggcgccaatgcgatgatgacggacggcgttatcgagcgtttcggcatcaaggagatttacggcctgcacaatatgccgggtatgaaggccggtaccatcgccacccgtgtcggcggcattatggccagcgaagataactttattatccgtattaaggggcagggggcacatgccgcccggccgcatatggcgaaggatccgctggtgattgcggcagaaattattctggcgctgcagaccatcgtttcacgcaatatcgacccgaacgtgccggcggtgatctcttgtacggagcttcatactgacggtatccgcaatgcgatccccacgcatgtggaaattaaaggggatacccgcagctactcggctgacgtacaggcgctgctggaagcgcgcatgcggtccatcagcgaagcgatttgcgcgatgcacggcgcacagtgcgagtttagctatacccatgaattcgccccgacggtgaactggcagcaatgcgttgatgtcgcggtcaatgcggcggtgaacgtcgtgggagcggaaaatgtcgacggcaacgtcgcgcagatgatgatttcggaggacttcggcgccttcctgcaggagatccccggctgttttatctttttaggtaacggcgatgcgtctgatactcagggcaatacgccgctgcataacgcttgctacgactttaatgatgaaattttactgaccggcgcggagtattttgccgaggtgatcaggacgagattgccgcagtag

SEQ ID NO: 93341 - DNA, 1239 bp, Enterobacter aerogenes
atgagtcatgatctacagataaacggccagcggctgatcgattccctgtttgcgcttggtgaatgcggcgcattggaaggcggcggtgtctgccgccttgcggcgaccgcggaagataaagccggtagggactttgttgttgccaggatgaaagcgctgggcctgactatctatatcgatgctatcggcaacgtcaccggtgtttatcgcggagaagaggcgctaccgatggtgatgatggggtcgcatatcgacactgtggctactggcggcctgtacgatggcaactacggcgtgatggccggtctcgaggtgattgccacccttcaggatgccgggattcgtccgcgacgtccgttagccgtaaccttctttaccaatgaggagggggtgcgcttccagcccgatatgatgggaagcgtggtgtttgccggggagtatccactgacgcaggccctggcggcaaaagaccacaacggcattactcttgacgaggcgctgcgggagattggctataaaggcgaacatcagccgggcaatctgctggtagatagctacgtcgaactacatatcgaacagggacctatcctcgataaggaacggattgatatcggcgtcgtcaccggcgtgcagggtatttcatggcaagaatttacgctaacaggcgtgtcgaatcacgccggtacgacaccgatgtccatgcgtcacgatgccggcctggcggcggcgaaaatcgctgttttcgcccgtgaactggcgatgagtctcggcggcaatcaggtgtctaccgtcgggcatatcagcgttaaacccaacctgattaacgtcattccaaatcacgtagtgatgtcggtggatttacgcaataccgataacgctatcttaattgaggcggaacggcgcttagccgagtttgttgtcacaacggcgcaggaagagggggtggagatagccagccgttcactggtgcgttttaacccggtcatttttgccgatgaaatcgtcaatgccgttgaagcggaggcgaaacgtcaagccctcagttatcagcgcctgccgagcggcgccggccacgacgcgcaatttatggcttcggtatgccccgcagggatgatttttgtcccctgtgttgacggcattagccacaacgtcaatgaacatagcgaagccaaagatctcattgccggcgccaatgtgctgctgcaggtggtattacagcgcgcgcagcgtgcggcataa

SEQ ID NO: 93342 - DNA, 1290 bp, Enterobacter aerogenes
atgaatactgaaaatgctgtgacagaaagaggatgttgcgatgccgcaaagtggcatagcgaagataccgtgtgggtgctaggcctgttcgggacggcaattggcgccggggtgttgtttctgccgattaacgccggaattggcggtttttggccgctgcttatcgtttttgctctcgcttttcccattacttatctggcgcatcgcgggctggcgcgatttatttattcttccaacacgccggaaagcacgatcaccgatgtcattggcgagcattttggcgcgctagcggggaaggtgtttaccgttatttatttcttcgccgtgtacaccattttgattatgtatgcggtagccattacgaatactgcgcagagttttatcatccatcagcttgggctggcggagccgccgcgggcagtggtgtccatcgtgctgatcctcgggctgatgcttattgtccgccttgggcagcgtttgattatgcgtgtgatgagcactctggtttatcccttcattatttcacttatttttatggcgctttttttgatcccgcattggaacggcgcgattttgcacaccgtgagctttagcacaatgggcgatgggggtggcattttattgacgctgtggatgacttttccggtgctggttatgtcgtttaaccactatccgatcgtctctccgatggtggtgcgccagaagcagcgctacggactcgcgcttgccgagcgcaaatgcgcgcagatccagcgctatggcatcctattaatgaccgtggtggtgctatttttcgttctcagctgcgtgttgagcctgtcaccgctgcagttagcggaagcaaaagcgcagaatttgtcgatcctgtcgtaccttgccaaccagtttgaaacgccgattattgcctggctatcgccaatcattgcgtttgtcgcgattacaaaatcgtttcttggtcactatatcggcgcttatgaatcgctgcgcgatctgattatcgaggctgccgccgcgcgggggaaaaaaccgacaatccgcgcagttgacgccgttattctggtttttatggtcctcacctgttggttcgccgcctataagaacccaagcatcctcggcattattgagtgcatcagcggcccgaccggggcggcgattctactgctgttgccgatgtatgccattcataagttaccggtgctggcgccatatcgcggcaaagccagcaacgttttcgtcaccctgattgggttaattaccgtatccgccattttttacggcatgttccagtaa

SEQ ID NO: 93343 - DNA, 1215 bp, Enterobacter aerogenes
atgacggacacgattaaatatcaactcaacgcccggcatctgccgtatgaacagggggtggacctcagtctgctcaatgaaaacgttggcgacgaagtgctggcattccatcaaaaattccccgcctatcgggtaacgccgctgcgcaagttggattatttaagccagcgtctcgggctgggatcgttgcatataaaggatgaagcgcagcgtttcggccttaacgcctttaaaggattaggcggttcttatgcgatgggaaaatatctcgctgaacagcttgggcgcgatattaatactttgagctttagcgatcttaattcaccagaaattaaagcccgtattaaagatattgtgtttgtcaccgccaccgatggcaaccacggccgcggcgtggcgtgggcggcggagcagcttgggctacgggcggttgtttatatgcctaaaggttcctcgccggtacgcgcgcagaatattcgccagcatggtgctgagtgcacaataaccgaactcaattatgacgataccgtccgtctggcggataaaaccgccaaagagcaggggtgggtactgctgcaggacaccgcctggcagggctatgaacagatccctacctggatcatgcaaggttatatgacgctcgccgttgaaacctggcagcagttggcgcaaagcggcgccaggatgcctacgcatctgtttttacaagccggcgtcggctcttttgccggcagcattatggggtatttcgttgagaagatgcagcaggatgcgccgacgatagtgatccttgaaccgcataaagcgaactgcctgtaccgttcggcaaccatcaatgacgggcaaccgcacagcgtcggcggcgacatggcgacgttaatggccggccttgcttgcggcgaacccaatatcaccagctggccgatgctgcgtgaccatgcccgttgttttatctctgccgatgattgtcttgccgctaacggcatgcgcctgctggccgcgccgcggccaggtaccgatgaaccctttatctccggcgaatccggcgccatcggcgcgggagtgctttatgcgctgatgacccagccggaataccgcgagcttgtcgaagcgctgcgcctgaatgccgatgcgcaggtcctgttaatcagcacagaaggagatacttccccggatgtctatgaagacatcgtctggtttggccgtaatggctaa

SEQ ID NO: 93344 - DNA, 462 bp, Enterobacter aerogenes
atgaaactggatagttgggataaaaaaattctcaccctgctacagcgcaacaatcgcctgtcgcagcgggaaatcgccgatcgcgtcagtctttccgcttcagcggtcaaccggcgaattgccgcgctggaagaggctggcatcattaaaggcagcgtgagcgtggttgatgccagtaaagtgggccgcccaaccaccatcatggtgcaggttacgatcgagaatgaacgccttgacctacttgaagaggataaacagcggtttgtcagttgcccgcaggtgcagcaggtttattacgtcaccggcgacttcgattttctactggtgatcaacgtccgcgatatggcggaatacgaagccttgacccgtgagctcttctttgcctcggggaatatcaaatccttccgcaccatcgtatcgatgcaaaacgcgaagcaggaaatgacggtcattatcgaataa

SEQ ID NO: 93345 - DNA, 1080 bp, Enterobacter aerogenes
atgatgaagcgcaatattctggcagtggtgatccctgccctgctggtagccggtgcggccaacgctgcggaaatctataacaaaaatggtaacaagctggatttctacggaaaaatggttggcgaacatgtctggaccaccaatggtgacaccagcagcgacgacaccacctatgcccgtatcggcctgaaaggcgaaacccaaatcaacgaccagttgatcggttacggccagtgggaatacaacatggatgcgtccaacgttgaaggttcccagaccactaaaacccgtctggccttcgccggtctgaaagcgggcgaatatggttcattcgactatggccgtaactacggcgccatctacgacgtcgaatccgcaaccgatatgctggttgagtggggcggcgacggctggaactacaccgataactacatgaccggccgtaccaacggcgtggccacctaccgtaactcagacttcttcggtctggttgacggtctgagcttcgcgctgcagtaccagggtaaaaacgatcacgaccgcgttgttcgtaaacagaatggcgacggcttcagcaccgcggcaacctacgcgtttgataacggtatcgcgctgtccgcaggttacgctaactccaaccgtagcgttgaccagaagcgcgacggcaacggtaacaaagctgaagcatgggcaacctctgctaagtacgatgctaacaacatctacgccgctgttatgtactcccagacttacaacatgacgccggaagaagataactacttcgcgggcaaaactcagaacttcgaagctgtggttcagtatcagttcgatttcggtctgcgtccgtccctcggctacgtgcagactaaaggtaaaaatctgcaggctcgcggcggcttcggcggcggcgatgcggacctggttaaatacattgaactgggtacctggtactacttcaacaaaaacatgaacgtgtacgcggcgtacaagttcaaccagctggacgacaactcctatactcgtgaagcaggcgttgccaccgacgaccaggctgcggttggtatcgtttaccagttctaa

SEQ ID NO: 93346 - DNA, 756 bp, Enterobacter aerogenes
atggtaacgaacgcgctacaaaaaaaatcaggaagttcatttattgagtacgcaaacgcaactaatgaccccatattatcgaattattggaacgatagttctcagacattagaatatgatctattagttaataactacaataatcaaagtgcaaatattggtaatgacactgtattaataattggaaatttctataccgatttcaactcagattatatacttgacaaaataaaagaaagatatgaaaaaattgagaattttaaaaactctggattaatttggttcacaagcacacaaaatatcagttggggaaaaagcagcgcactttcaaacttcttatccaaaataaaatttttatttgataagaaactaaatacttccgaatctgttctggtaatgtcctgtaaaagtaagcaagaagcatatgaattgaataagttatatggtcgtttagatgctaagttactaggttgtactaatctgtatgctggtgaaaaaggagaggtattgctaattccaaatgtaatggtagcatgcctttatcattctcctattgatgacactcgaagcataccattcccggttggctatataagcttcaataaaaaaacaataaatgatataagtaagaaaatatctaaatggggttattcacaaaataacttcaacaactatatggataaaaaggatacgaaggaaaatgatggcatatttgaacgtttgttcatccctataatcaaccaaagtattgaataa

SEQ ID NO: 93347 - DNA, 1254 bp, Enterobacter aerogenes
atgcttaccgatatccagcttagaagacttaaaccgcaggaaaaaatctacaaagttaccgatcgtgatgggctctatgtggccgtatcgcccactggaactcgctcatttcgttacgattatcggattaatggccgtcgtgaaaccctgacatttggacagtatggcgctgacggtatttcactggctgaagcgcgtgaacaactcattgccgccaaaaagctgatcaagtcaggcgtgtcgcctgctgtgaagaaacgtgacggtaaaaatcagattagaaatgcggaaactttcgcaaattttaccgtcagctatatgaagcgtgcctcactggctgacagtacgagatcgatgaagcaggccgtcattgaccgggacattattcctgctctgggtaataagcatatgacggagattacgccctcgatgattcgaactctgtgcgatcgcattgtggatcgtggtggcaatgccacagcagtccaggcgcgtgagattatcagtagcgtttatacgtacgctaaaaatcggggacatgattttaagaatcccgctcaggatatcaaggccagttcgatagccacatttcttcctcgtgacagaaccctttctctgccggaaatatctaccttctttaaaacgctggatatcgttgctggcatgcccacgctaaaactggccctgaagctgattttccttacgctggtgcgtaaaagtgaatttactcaggcgacctggaatgaagtgaatttcaatactaatgaatggacgatacccaaaggccgtatgaaaggggggcgggctcatgttgtctatctttcccgtcaggcttgcgatctgctggtggcgctgcaaatgtgtgctggaggaagtccttacttacttgccgggcgctacagtatcaacaaaccgctgtctaatgcagctctcaacggggttattaccacgaccgtaaaaattgcgcagtcgcaggggaagtcgctggagcatttcaccgtccatgatatgcgacgaaccgccagcactttattgcacgaggcagggtatccatcagactggatagaaaaatgcctcgcgcatgagcaaaaaggggtgagggcaatttacaacaaagcgaaatacgcgcagcagcgtgcttacatgttgcagcagtgggcggatatggtagatgggtggatctccgggacgttggtgaggcttacaccgttttcgccgagtaagtatgaggagtgggttaagatagtaggatag

SEQ ID NO: 93348 - DNA, 651 bp, Enterobacter aerogenes
atggccttttcattacagaacctcatggatgtcgtaaaaaagcacaatcgcaatccctctcctaaacctatgccggaagatgaggtggagcgcctgcgggtcaggaaataccgcgatccgcaaaatagcgaaaccgtggcgcttccggacagtttgaaagcgctgttggcctacgattgtcaactgaaaagcccccacggtcagttggtgctggaatcggttgtggactcaattgatgaacatggcgtcctgctttccgactcgctggatgaagatgcttattacatgaatggtcttgatatggccgggctggactttgaagagctgacgccaatctggaacgacgatccgcgtcttcctgccctgattcgcatcagccattccggcgatcagcaggtatttatctatgtcaccgagcgtgatgaacagggtgaatatcctgtcgtccgcttcgaaggtaaagagaatgacctctggctggcggaatcgtcactgattgaatatctgcaaggggtctttaccgatgaggaagagagccatgacgaatggcagcgccagcgggccctcaacgaggcacgcgatggcgccttgctggagctggaatatattcatgaggatctttacgccaggcttgaaggctgccctgactaa

SEQ ID NO: 93349 - DNA, 843 bp, Enterobacter aerogenes
atggcattagtctccaccccacattctgctgattcatctcgcctgccctggctgggaggcataaccggcctgctggcgggcggcatcattctttatttttggccggaatggaaccgggcatggttaagcctggttcctgcgccggtttccgtttatacccgctttctcggagtcactctggaacaagttccgttgataacctatttccatcaggcgctgctgggttttttgatggtgctgcttgctcccggatacggtaaatcgacccttgccgcatggatgctgcataacccatcgccataccgccgctggccgggcgagatattacgcgcctggagcatgaaatttggcctgctggtcattgtcttttgcaatcttttctttttgtccagggtcggctccgggactctggcgttatatatcttttttctccagcacgttagcgttgccgctgcggtggcatcaggcgtactgctgctgcgtgatgcccgacgcctgacccgcacgtctcatgctcagctggcggacctgcaccttctcatgatactcacgctggggtgccagacgattttgcctgcacagatcgcgctaatgagcgcccgcggcgtgaacacaccgttaggctggtacattgttatcgcgcagatggcaggcgtgttactggcgttaatactggtcggcgggctggtggcagcgatacgttctctgttgggcgaaaagaggtgtcgggcctggcgcggtgatatggcactcttcaacggcattgttacgctgtgcgtgacgggattccttatctataacatggtgtcagcctatccgcggatctttgccgccctgcattga

SEQ ID NO: 93350 - DNA, 4020 bp, Enterobacter aerogenes
atgtcacatttattgataaaactgatgaatcattttatttctacgcaaacggtttcgtcggggctcaggattctctataatggcggccgtttccccctggctcaccttgaaagcttcgaagacgagagacttatgatggatattttgcgtggttcacctgcactgtcggcattccgtatcaacaaactgctggcacgttttcaggcggccaacctgccggttagcaccttatacgcggagtatgttcactttgccgacctgagcgccccgctaagcgatgaggagcgcgaaagactggtcagactgctcaaatatggcccaagcctcagcagccatacgccaaccggtaaattactgctcgtcacccctcgccccggcactatctctccctggtcctccaaagctaccgacatcgcccataactgcggtttatcgcaggtcgtgcgtttggaacgcggcgtggcgtactacgttgaagcacagggtctgagcgatgcgcagtgggacgccgttgcggcggaactgcacgatcgcatgatggagagcgttttcactgagctggaagagggagagaagctgtttgttcaccatcagccgacgccagtgaccagcgtcgacctgctgggccagggacgtcaggcgctgattgacgccaacctccgtctggggctggcgctggccgatgacgaaatcgactacctgcaggacgcattcgttaaacttggccgcaatccgaacgacatcgagctgtatatgttcgcgcaggccaactcggaacattgccgccacaaaatttttaacgccgactggattatcgacggccaaaaacagccgaagtcgctgtttaaaatgatcaaaaacaccttcgagaaaaacccggaatatgtgctgtctgcctataaagacaacgctgcggtaatggaaggttccgaagtcggccgctatttcgccgactatcagaccgggcgctatgacttccatcaggagccggcgcacattctgatgaaagttgaaacccacaaccacccgacggcaatttcgccgtggccaggggccgcgaccggttccggcggcgagatccgcgacgaaggcgcaaccggacgcggcgcgaagccgaaagcgggtctggtcggcttctcggtttctaacctgcgtattccgggctttgagcagccgtgggaagaggatttcggtaaacctgagcgtatcgtgaccgcgctggatatcatgaccgaaggcccactaggcggcgcggcgtttaacaacgaatttggtcgtccggcgctgaatggctacttccgtacctatgaagagaaagtgaccagccacaatggcgaagagctgcgcggctatcacaaaccgatcatgctggcgggcggcattggcaacatccgcggcgagcacgtccagaagggcgaaatcaccgttggcgcgaagcttatcgtgctgggcggcccggcgatgaacattggtctcggcggcggcgcggcatcgtccatggcttccggccagtctgatgccgatctggatttcgcctccgtacagcgcgacaacccggaaatggagcgccgctgtcaggaagtgatcgaccgctgctggcagctgggcgatgcgaacccgattctgtttatccacgacgtcggcgcgggcggtctctctaacgccatgccggagctggtgagcgatggcggccgcggcgggaatttccagctgcgcgatatcctcagcgatgagccgggcatgagcccgctggagatctggtgtaacgaatcccaggagcgttacgttctggcggtcgcgccggaacagctgccgctgtttgaagagctgtgccgccgcgagcgcgcgccttatgcggtgatcggcgaagccacggcggagcaacaccttagcctgagcgacagccactttaacgatcggccgatcgacctgccgctggacgtcctgctcggcaaaacgccgaaaatgacgcgtgacgtgcaaacgttgaaagcgcagggcagtgagctgaatcgtcaaccaatgacgattgccgatgcggttaaccgcgtgctgcatctgccgacggtggctgagaaaaccttccttgtgaccatcggcgaccgcaccgtgaccggtatggttgcgcgtgaccagatggtggggccgtggcagatcccggtcgctaactgcgcggtgaccactgccagcctcgatagctactacggcgaagcgatggcgatgggcgaacgcgcgccggttgcgctgctcgactttgccgcctcggcccgtctggcggtcggcgaggcgttgacaaacatcgccgctacgcagattggcgaactcaaccgcgtcaaactgtcggcaaactggatggcggcagccggtcacccgggtgaagacgccggtctgtatgaggcggtaaaagcggtcggtgaagagctgtgtccagcgctgggcctgactatcccggtgggtaaagactcaatgtcgatgaaaacccgctggcaggaaggcagcgagcagcgcgaaatgacctcgccgttgtcgctggtgatctccgcgtttgcccgcgttgaagacgtgcgcggcaccgtgaccccgcagctctctacggaagataacgccctgctgctgatcgatctcggcaaagggcgtaacgcgctgggcgccaccgcgctggcgcaggtctatcgtcagttaggcgaccagccggccgacgtgcgtgatgtcgtgcagctgaaaggcttctgggacgcgatgcaggcgctggtggcgcagcgtaagctgctggcttaccacgaccgctccgatggcggcttgttagtgacgctggcggaaatggcttttgccggtcactgcggcgtaactgccgatatcgccgcgctgggcgacgaccgtctggctgcgttgttcaacgaagaattgggcgcggtgattcaggttcgcgccgcggatcgcgaagcggtagaagcgctgctggcgatgaatggtctggcagattgcgtgcactacttaggccaggcgacggcgggggatcgttttgttatcaccgccgacggtcagccgctgttcagcgaaagccgcaccacgctgcgtatgtggtgggcggaaaccacctggcagatgcagcgtctgcgcgataatccggagtgcgccgatcaggagcaccaggcgaagtctaacgatagcgacccgggtcttaacgttaagctgtcgtttgatatcaatgaagatgttgccgcgccgtatattgcgaccggcgcgcgcccgaaagtggccgtgctgcgcgagcagggggttaactcccatgttgaaatggccgccgctttccatcgcgccggcttcgacgccattgacgtgcatatgagcgatctactggcgggtcgtaccggtcttggcgacttccatgcgctggtggcctgcggcggcttctcctacggtgacgtactgggggcaggtgaaggttgggcaaaatcgattctgttcaacgaacgcgtacgcgatgagttcgccactttcttccaccgcccgcagacgctggcgctgggcgtgtgtaacggttgtcagatgatgtccaatctgcgtgaactgatccctggcagcgacctgtggccgcgcttcgtacgcaaccactctgaccgctttgaagcgcgtttcagcctggttgaagttacccaaagcccatcgctgctgttgcaggggatggccggttcgatgatgccgattgccgtttcgcacggcgaagggcaggtggaagttcgtgatagcgcgcatctggctcagcttgaaagcaaaggcctggtggcgctgcgcttcgtcgataacttcggcaaagtgacgcaaacctatccggcgaacccgaacggctcggtgaacggcattaccgcagtgaccagcgaaagcggtcgcgcgacgatcatgatgccgcacccggaacgcgtcttccgtaccgtcagcaactcctggcacccggaaaactggggtgaagacagcccatggatgcgcatcttccgcaacgcgcgtaagcaactgggttaa

SEQ ID NO: 93351 - DNA, 297 bp, Enterobacter aerogenes
atgaaagacgaattatttgccgatctgctggccagtgcagaagaaatggtgagaattgaaaaaggtgagcaaacccctgagccgcagcatgttcacacttttagcccgatcgatgtgaaagcgattcgcgaagcgacggggttaaaacagcaggattttgctctcgccgtaggcgttagctatgacttagttaaaagctgggaaactaaacggcgtcagccaaccggggcgccgcgaaaattgctgcttttattacagctcaatccttttattatcaatcagctcaaaacaatctaa

SEQ ID NO: 93352 - DNA, 318 bp, Enterobacter aerogenes
atgtacacttttattgagctgcagggtttcagtaaacggcgtcaggcgcttctaccggatgacgagtttcgcgtttttcaggaggtgttgattgaggatcctgaggctggcgataccatcgcagggacagggggatttcgaaaaattcgctggagccgaccggggatgggcaagcgtggcggggtgagaattatttattacaatgtgacgcgtaaagggcgaatttacctggcattggtctatcccaaaaatgagctggatgatttaacggaagaacaaaagaagatgctgaaacagttatccgctatgctggaataa

SEQ ID NO: 93353 - DNA, 201 bp, Enterobacter aerogenes
atgagactagctaacggcgtgagaaatcgcgtgccccagcccctggatatcctcgccaataccgcgggcggtattgcatccagtaagcagcgcgccgctgagcagcagcaaggcaagaagtttgagcatctggttcatgttagttctggcgcgaaactgaaggcgcagcagcaaggctgcgcccaccgtctcaaagcatga

SEQ ID NO: 93354 - DNA, 687 bp, Enterobacter aerogenes
atgttaagcaccgtatttaaacttttcattcccttttttttattgattagcggttttgcacatgctggcatcgtcatcgagtcaactcgctatctctacaaagagggtgcccgcgaaatcaccgcccagatagagaacaaagacggtattccttacttaattaagtcctggattgagacaccaaaagggcaaacaccatctttcacggctactccgccgctattccgacttgaagcaaaacagcaaaataccgtgcgtttgttttcaaccaataatgtcacagcgccaaccgatcgtgaatctgtattttatttcaacgttatggctatcccgccagcggatgagaccaacgccaaaaacaatacgattcagctagctgttcgccaccgtatgcgtctggtgtatcggccaaaatcgctgtttgatatgaaaccgaatgaggaagcggcaaaactccaatggagtaaatcaggcaataaattgttcattaaaaacccgacacctttcttctattacttcaacacaataaaaattggcagtgccgaaataaaaaatgaagtaaacacggtcccaccgatggaaacaaaagaagtaacgttaaagggaaatataaacgcatcaagcgtgacatggaaaatagttaatgattatggtggggctggatcgctctattcatcaccgttgtaa

SEQ ID NO: 93355 - DNA, 372 bp, Enterobacter aerogenes
atgaagcaattaacagtatttgagatggaagagatctccggaggctattcatgggatttctcttctatttcttctaccgtgacatctttacttggtaatgcggctgaagccgcaggctccgcaatcctcggttccgttattgtcggtgcaattggtgcctctgttggaggaacattaggtgggacaaatggtgggcttttaggtttcggcctgttgggtaacttggttggattatttgctggtgcagccgtcggtgcaattgcaggtgctgtcggcgccgtggcagtaggctgggataagtgcattgattatttaggtcaacttatcgacgccgggcttgatggtacctttgtaccttggccatcatcgtaa

SEQ ID NO: 93356 - DNA, 834 bp, Enterobacter aerogenes
atgcaagagaataacggaataagaatggctctttctcccgtacaacttgccgccgttctggccgataaatccgtcagtgagggggaaacacttagtaatcgcctctggggtggtctaggattggccaacggtctggttgaaatgtttggtgccggagtcatgtgcatagcccccgaaccaacaatgctcactaaaatcgggtgtgtcatcgtaggaacccacagcctggatacgatacaggcttcctttcgtcaggtatggagcggtaggcaggtcagtaccgatacatacaattctgtagtatctctggccgaaagtctgggttccgatcaccaaactgccgtgaacgttggaatgactctggatcttgcgattcctatgggatttgcgctgacgatgggtgctatccgcgttgcttctatacgtggaggacggataaaactggctgaacatgaatttttgaggagtcgctcatcaggtggccatactctccaaaatcatgttggcaaaacgccagaagggctgagaatgagactggatactactccccgattaaagtctgtcagtagtttcaaaagtaccagtgaagctgagcgcttagtatctgccgttattcaggacaataagactcagatagagatgtgggtaagacatctaccaccagggatgaatgcaaaaatgcagttggatcgcatgtttgcaaaccaaacaggaatattattattcaaaggtgcgaaagaagtaactacttgctacaaagtccgggtggtcatcgagtttacgcactggcatggaaaaccctattttgtattgacagcctttcctctaccctga

SEQ ID NO: 93357 - DNA, 480 bp, Enterobacter aerogenes
atgaaatgtgcaaaaatgtcgtgctgcgcctcgctggtgctgctttcttttaatgctctggcgcaatgtccggatatgacgggtagctaccgctttagcggtgctgatagcccgttttacctggtcaaaatctcggggcagtcaacctatcacgcttattttcccgccggttcggataaatatgtgcactctcgcagcgtcgatgtgcctgcggaaaaacgcaaagaggagcaaattcccgcgtgcgccctgttgctcaaaggggcaggaatgctggtaaaaatggagaagggaaagaaaattaacaccatgagccagtcacaaaactatatgacggagaaaactattactaccgattatggcttaatggtgtattccggctttgcctcagactttatcggtgtcgataaactgagcgcccatgtgccgaaagaagcgctaaacaataccctaccgatagctaaagagatggctgagtaa

SEQ ID NO: 93358 - DNA, 1116 bp, Enterobacter aerogenes
atgacattgaatggaaaacgcaggaaagtctggtggctgttggcgctggtggtggttattgcggctatctggggatggcggattctgaacgcgccgttgccgcagtatcaaacgctggtggcgcgtaaaagcgatctgcagcagagcgtactggcgacgggcaagttagatgcgctgcgtaaagtcgacgtcggcgcgcaggtcagcggccagttgaagacgctgcgcgtcaatattggcgataaagtacagaaggaccagttactgggggttatcgacccggagcaggctgaaaaccagattaaagaagtcgaagcgacgctcatggagctgcgggcgcagcttaaacaggcgcaggccgaacgtaagctcgcgcaggtaaccttagcgcgccagcaacagttggcgcagcgccagctggtatcacgccaggatctggataccgccgccaccgatgtggcggtgaaagaggcgcaaatcggcaccatcgaggcgcagatcaagcgcaaccaggcgaccctcgacaccgcgaaaaccaacctcgactatacgcgcatcctggcgccgatgtccggcgaagtgacgcaaattaccaccctgcaggggcaaacggtgattgccgcccagcaggcgccgaatattctgaccctggctgatctcagtaccatgctggtgaaggcccaggtttcggaagcggacgtaatccatcttaagccggggcaaaaggcgtggtttacggtactcggcgaccccctgacccgttacgaaggtacgctgaaggatattctgccgacgccggaaaaggtcaatgatgccatattttattatgcgcgttttgaagtccctaacccgcaggggatcctgcgtcttgagatgaccgcgcaggtgcatatccaactggcggaagtgaaaaatgtgattactattccgctcagcgcgctgggcgacgccatcggcgataaccgctacaacgtgcgtctgctgcgcaacggggaagtgaaagagcgtgaaattgttatcggcgcgcgtaacgataccgatgtggcggtggcgaaagggctggaagagggcgatgaggtcattatcagcgaaagcacgcccggagcggcaaaatga

SEQ ID NO: 93359 - DNA, 219 bp, Enterobacter aerogenes
atgccttacccggcctacggtccgtgcggcctgcctttaatttattcaccacgctggctgacactactggtgctggtgatctcaaaatcccccggtggcgctagcgcttaccggggctacagcacgatgcgatttggtagcccggagaaggcgcaacgcgccgcgtccgggaaaacccttaaaaagttgcaaaccgataacagtgcggcctgcctttaa

SEQ ID NO: 93360 - DNA, 1002 bp, Enterobacter aerogenes
gtgatagatcttcgcagtgataccgtaacccgccccgggcgcgccatgctggaggccatgatggccgccccggtcggggacgatgtgtatggcgacgacccaaccgtcaatgaactccagcgctatgccgctgagctcgcaggtaaagaggcggcgctgtttctgcctaccggcacccaggccaacctcgttggcctgcttagccactgtcagcgcggcgaagagtacatcgtcggccagggcgcgcataactatctgtatgaagccggcggcgctgcggtgctgggcagcattcagccgcagccgatcgatgccgcggcggacggttcgctaccgctggataaagtggcggccaaaattaagcccgacgatatccattttgcccccacccgcctgttaagcctggagaacacgcacaatggcaaggtgctgccacgcggctatctgcaagaggcctgggcgttcacccgccagcgcaatctggcgctacacgtcgatggcgcgcgtatcttcaacgccgttgtagagtacggctgcgagctgcgcgatatcgcgcagtactgcgattcgttcaccatttgcctgtcaaaagggctcggtacgccggtcggttctctgctgctgggcaacgaagcgtacatccgccgcgccattcgctggcgtaaaatggtcggcggcgggatgcgtcaggcaggcattctggccgccgccggtctgtatgctctgcagaataacgtttcccgtctgcaggaggatcacgacaacgccgcgtggatggcggaacagcttcgcgccgtcggcgctgacgtgatgcgccacgacaccaacatgctgttcgtgcgcgtcggtgaggagcaggctcgggcgctcggcgaattcatgcaggcccgcggcgtgttgatcaacgcctcgcctgtcgtgcgtctggtcatgcatctcgatgttaaccgccagcagttgacggaagtggtcggtcactggcaagcctttttacaacgctaa

SEQ ID NO: 93361 - DNA, 222 bp, Enterobacter aerogenes
atgaaaccaaaaagattctcttcaagctatgtttgtaaaaagatctgcattcatgcaatcaatatgtttgaagccatcggaacgggcagcttctctatcgccgcttttgtttgttttgttgctctggatggctggttattcaagctgggtggtttcgccatctgttttacgctggtgtgcttgataagctttatcgccgattatttaagaggggatatttaa

SEQ ID NO: 93362 - DNA, 186 bp, Enterobacter aerogenes
atgaaaaatatcgccagcccgcagtccggcatgaaacgaatatttatatttcgtttatgtttcaatgagattacaaccgatatacttgctatggcgaaataccggcaagggcatctcacggctatatttcgtaacaaactgataattaagacaatgctgctttaccccatcgttacctttcaataa

SEQ ID NO: 93363 - DNA, 891 bp, Enterobacter aerogenes
atgaccacgagcagtccgctggccctcacgacattaccctttacccatctggatattccgccgcagccatcgtcaattcagcattcgctggaagagggcaacgtcctctatttaccgaatctggatttttcgctgactgccgaagagcgcgagttactcaataccgatttagtatcgccgaagcgtaagaacattagctaccagccgcaaaagcgtgaaattaaaggcgtagcggacgcggcgaaagccccggcggtactgcagctgaccgaacgctactatcaatccacgttgcgcctgattgatgcgctactgcccggatatcgcgaagcgctttatcgcccgcaaaccagcctgcggctgcatccgataaccgcctggcgcgacacgacctcgtggcgtaaagatgatacccgcctgcacgtcgacgctttcccgtcgcgcccggtttatggcgatcgcattctgcgcgtattttgcaacatcaatccgcacggtgagccgcgtttgtggcgcaccggcgaacattttgaaacgctcgctgcgcgcttcctgccgacgctgaaaccgtggtcgccgttcgccagctggctgcagtcggcggtggggatcaccaaaagcaaacgtagccattacgatcatctgatgctggcgttgcacgacaaaatgaaaagtacgccggaatatcaacagcacggcgtacagcaggcggtagagtttgccgcggggagtacctggatctgcttttccgatcaaacgccgcacgcggcgatgggcggccagtttatgctggaacagactttccaactgccggtgagcgcgatgcataatccgcagtattcaccgctgaaggtgctggaaaagttgatgaaccagccgctggtgagatga

SEQ ID NO: 93364 - DNA, 1659 bp, Enterobacter aerogenes
atgtgggaaacgcgggcgctggagctcaataatcaggacatctggcactggccgtcggcctgccggttgattgaatacgcaattgagcatgattttaataccgtggtggtggggcaggccgagctatttggcaagctggtttcgccacaggggtatacgccttttgactataacgaccgcttgtcgagccaacaacgagcgcgctgtatctatctcaatcgcctggcgttgcgttgtcgtgaacaggggttgcgattttatctgcaggcgaaagaacttagctttcccaccgaactgttattagcgcatccggaactgctggataccccgcgcggggtgcgttttgatgtcgatttctggagccgctggttaaccgacaaaatccgcgccgtgtgccaaagcgtgccggcgctcaccggtttgattatcgcgctctccagtaccgacggtttactgccgatctctcgcccgcagtgggtcaggcaaagcgacggtcttcgccagccggcgcaaagcttgatgctctatcgccgctgctttaatgccctgagccaggcggtagccgcgcaaaataagcatctggtactgcgtgtcttccctgccagcaatgacgatctcagcgccgtgctggatgcgattgaaccgctgccgcctgcggtttcggtatcgataaaactcacgccggaacgtttctggcctgctttccctaacaatccggcgctgttggcggtgcagacgcgagatgtatggatcgatatcgatcttgccggcgaagaagtgggatggggcgtcatgccgtttttacgtattgatgagctgcaggggcgactgttgtggtgtcagagtcgcaacccgcgcattaccggcgctatctgtaaaaccagttgggaaagtatcgataatcactggatccctgcgacgctaagcgaatgcaacctcttcgcctgtagtcagttgctgggcgaaggggcggtaaaaaatcagcagcagttactggtgcaatggctggcgcaacgttacggctggtgtccgtcagccgatgtcgcgcagcagttccagttgctgcttgaacaggccacgcagacgctctaccagtcaatatatgtgcgtgaccacgttttccatcgccatagccaattgcctgaaagctacggccaggcggtgtggagcctttacggacaactggcgcgtagccactggttacccggttcggcgcaggatatccacttcacccgcgatgacccgcagaagtcgatggctaatctcacgcaaatcgcgcaagaaaaagatgaagtcgcagccagcgcgcagcagttggggatagcggcgcaagcgttcgctctcaccgcggattttcccgccgcgctggcgcttcggtggcgtgaagagtggcagggactgccgctctattgtcagttatttacccatgcgcaaaaggccttctttaccctgcactacgcccgagaggtggaaaacagctggagcatgcgggaaatttgccatatcaacgtgcaggcgttatatcgctgcgcatcggaaatggaaacgctttgtcagcagattggcgaggcctcgccggcgttttacgtgatgttcgatcctgtacgagcacgtaatctggcggatagcctgagcaccgaactggcggcgctcaggtaa

SEQ ID NO: 93365 - DNA, 387 bp, Enterobacter aerogenes
atgtttactcatatgcgtatcgccaaacccgtcaccgatcttgcacggtcctgtttgatgtactgccagggactgggcttacacaaaattgctgaattcaacgatcacgatggttttaatggaataatgttagggcgacaggggctcggctggcatatagaatttacctggtgccagtatcatcccgtgcaacccttgcagacggaggaagatttactcgtgctgtattacccggataagaaggagtggtcggatgcttgcgccagaatgcgcgaagcgggctttaccttgacgaattcttttaacccttactgggatgtcaatggccagacgttcgttgatccagatggctacagggtggtactccagaataaagcgtggggataa

SEQ ID NO: 93366 - DNA, 936 bp, Enterobacter aerogenes
atgatgaatattatgcatccggcgctcagacgcctcgatctcaatctgctgctcgtttttgatgctatctatcgccactgttccgttcgtcttgccgccgatgagctggcgatgagtacctccgcgttgagccacgcgctgtcgcggctgcgcgtggggctgaacgatccgttgttttttcgcgaaggacatcggatgtgcccgagcgtctatgccactcagctcgcgccctccatcgcttcagtattgaaattgcttaatcaggaactcacgcgacagcccgagtttattgccgccgacagcaccgagcggatccagatagccattaccgatttcaccgcgttatgcattttccctgcgctgatgcaaaagctgcagcatgaagcgccgggactgcgttttgaactccgttatttgccgcatagcccggccctgacggagctgctggcgggagaggtggatctggcgctgggcttcagcaccgctgaagatatccggcatcatgaactggaggaaattgactggtttgaggatgagtacgtggttatcagcaatacccgtcgcacggcgctgacgctggcggattatctcgccgcgcggcatctggtggtcacgccgtggaatgaaaagcagggagtgttggatttacgcctgcaggaattaggctatacgcggcagatagcgctcaaaaccccttcgatgctcagcgcgccgtttattgtggcgcaaagcgatctgttaatggcgattcctcgttatgccgcagagaagttccttcatgccgccccgatcgcgatttttcctttgccgttcgccataagcccgttcaccgtgaagatctattcccataaacgcggcgggcagcgaggagcaaccaaatggcttaagacggcgctacaaagcctggcgttggcagcgaatgccgggagtttttaa

SEQ ID NO: 93367 - DNA, 891 bp, Enterobacter aerogenes
atgaagataaatattctgactctggatggcgttttcgacaccggcttagcgacgttgctggatacgttcgccgcggccaatgatatggcgcgacgccagagcatgaatatttctcgctttgaggtgcaaatgattgccgtgaccgggcaggttaaatcagcccatgggttgagtattcctgctcatcaggcatcgggtttggattatcccgactggattgtggtgccggcgatcaacgttcacgcacgacaatcgccaccggatggctggcacgatattgctgacgctaagcggtttttgcaaaacatggcgaagcgcggcgttaaaattgccgccgcctgtttaaataccttcatcctggcggatagccgtttgctcaatgagcagaccgccgctgcgtcatggctcaatgcggctgcgccgatccttcccggcgcaatgatgggccatgtggagctggcgctgtggctgattcgccagagcagcccgccgcttgcggatttgctggcaaaagcgatggcggctgatatccgccatcctcaggtttcacgcctgccggcaggttatcctcagtatgccgatgacctgatcaaccgctttgcgcactggtcgcgagcgcatctggcgcagggattttccctgcaggcggctgccggcgcgcttaacgtgcatccacgcaccttacagcgcagaatggaggccgcgctggggaaatcaccgttggcttttttccagcaattgcgggtcgaacgagtaaagcagctgcttgccgaggggaaagatattgagacgattaccgctgacgtgggttattcggaagtgtcgacgctgctggcgttgctgcgccgtcagactggaaagggaatacgggcgctgcgtcatgctgtgtga

SEQ ID NO: 93368 - DNA, 237 bp, Enterobacter aerogenes
atgaaaaaatggatttttattattttttctttcatcctatcatttatcatcctggttaccctgatgtttgaattagcgtttcgcctattaaaggctgatgaagttatcaactttatggaaaaatcagtttttatcgattcgtttaattcatggtttatctttttggttatattatcattcataggtgctatcattatcagcagcatggtatttttaaagattaaaaaggtgatgtaa

SEQ ID NO: 93369 - DNA, 792 bp, Enterobacter aerogenes
atgaatatccctctctccacgccattgatagcgtcgcgccctcgctggttcacgggaacaacggccagcgtgctgggtcatctggcgctggccgtgccttttatcgttcatttcgcctcgccgccggatgccgccccccctgccgcggtgatggtggagtacgcgccggaactggaagtgtcattgattcatcccgagctgccgccgggtgtcacccagcagcgcaaagtcgaggcgatgaccgagcaggaaacggccgcggtgaaagaagcgccgaagctgcatattcacgagaatgcgcaaataaagctctccgccagcaaacccgaaccgcagcggaaaaagaaaatcgaggttaaaaaacagtcccgccgccagcagcaagaggaaaagggcaattcaaccatcaccagcttcgccgcgcccccggcgccggccgtcctcactcagcgcaccaccgcgccgctcgatagcgatgccgcgcgcctgagcgacaacaagatcagttgggaatcgctggtgaaaggcaaaatcaacaaaatgcgccactacccggaagatgcgcgccgccgtaaacgtaccggtaccgtcattattaccttcagcgtcaacgaacgcggcgaggtgttgcaatcgcagttggcgaactcatcagggacccattcgctggatcgcgccgcgctgatggcgctggaaaatgcgcgtccgcttccgccgccgccaaaagagctgctgcgtaacggtattaataaggtcactctgccggtggagttcggcttattaaaaatataa

SEQ ID NO: 93370 - DNA, 834 bp, Enterobacter aerogenes
atgattgatgatctggcgggcatactaaatcgtttagttaatcaaaaagataggctgcaggtccgctttccggagccggatattcccgttccggcgctggcgttgaaggtgcccttcccgcgtctggaaatcgtccttgaaggcgagctccatgatcagggtctaccgctatccgcggcggttttagccacttcgcaggtactctacgtacaggcgggaaagtggacgctacccgagtggaacggtccggcggtcacgctcagcattttatttggccgccaaaagctcggcttttgcattcagcgctgggacggaaaaaaactacatactgaaaagcaaaacgtcgcccggctgggcccccgcgttggctcctatctgctgctggcgttgaatgaagtctgcctgcagcctgacccagtaaccgcccggctggtggtttccgcgctgttaagccactgccttgaacaacttgtcggtctggaaatgcgcgttagccgcagccgcgatctgtttttagcagttcaggattatctgcaagaaaatcttagccagccgctgacccgcgaatcggttgccagacgctttcatattaccccgaactatctttcgcatatatttcagaaatcgggttcagtgggctttaatgaatatctaaccgccgtgcggctggaaaaagcgaagcaactattacgcggttacgatttaaaagtaaaagaaattgcgcataattgcggctttatcgatagcaactatttttgccgggtgtttaaacgtaatactgaacgttcaccttcggaatatcgtcgccactgccgtagcgcgcagcagcgataa

SEQ ID NO: 93371 - DNA, 768 bp, Enterobacter aerogenes
atggactcacaatcgacggttcatctggctgcgcttggcgcgacccggacgctaagcgaccaaatgaaacatgaacttgatacgcttggctataccgtggtgcacaacgtcgttgatcctcagtggctgagcgagatgcgcgagcgcattgacgcgctggtggaacgtgaaggcgagaatctggcgatggaacaccatcaggaggcgacggcgacgcgtattgccaacctcatcaacaagggcgttatctgggagaaggtgtggtcgcatccgctcattctttccgcctgtcgttatatttttaatggcgcgtttaaagtttccagccttaatgcccgcgaggcgctgtataacggtggtcatcaaccgctgcacgccgactggaaaaagccacgggtagacttcccgaaagtgcatctggtcaatacgatatgggctattgatgatttgagcgccgccaacggcgcgccgcggattattcccgcgacccatctgcgcccggagctgccggaagaggttttggcggatccgcaaaagacgcatcctgatgaaattgtttttgccgcgccggccggcagcgtaatgatttataacgcgcatgcctggcacggcggcacccgcaatcttgaaggcagcagaaggcgcgtgcttcatggcttatatattgatcgtgctgataccgcgcagcaggaccagcagcgctggctgacgccggaaacggcgagccgcctgacgcccgcgcaaaagtggctgctcgacgtgcaataa

SEQ ID NO: 93372 - DNA, 342 bp, Enterobacter aerogenes
atggacttcaacattgtcgcggtgaccgcctgcgtgagcggggttgcacatacctatatggcagccgagctactggaaaaagtcggtcatcatgaaaaatggtctctgaaagtggaaacccagggcgcgctcggcgtggaaaaccgaattagcgaagaggatattgcccgcgccacggtggtgttactggtaaccgatatcgaaatcgatggcgctcaacgctttgacggactccgtaccattaaaaccagtatcgccacattcctgttgcagccacagcagattgtcaaagccgttaatagcattatgaaaaagccggtcgtttacctggaagttccctga

SEQ ID NO: 93373 - DNA, 876 bp, Enterobacter aerogenes
atgacattatccgccgcaccgcgcatcagctgtgaggtcatcgaaacgcgcgccgatacggcgcgcatttttaacctccaacgctactcgcttaatgacgggcaagggatccgcacggtggtgtttttcaaaggctgcccccacacctgcccgtggtgcgccaatcctgaatcgatctcgccaaagatccagaccgtgcgccgggagagtaaatgcctgcgctgcacgcgctgcctgcaggacgtcgccgagtgtccctccggcgcatgggagcagattggccgggatgttacgctcgatgccctgctgcgcgaggtgcttaaggacgaggtcttcttccgcgcctccggcggcggcgtcaccttgtcagggggcgaagtgctgatgcaggccgtgtttgccgcccgcttcctccagcacctgcgccactggggggtgcgcaccgctatcgagaccgcgggcgactgcgcctttagccgttttctcccggtggccgaagcctgtgacgaaatactgtttgatttgaaaatcatgaatagcgagcaggcccattcactactgcagatgaatcagccgcgagtgctggacaacttccgtcagttggccatccgcaaaatgaatcttatcccgcgcgtgccgctgatccctggctacacgatgaacacggagaattttaagcagatcttaaagttcctcgcgccgttcggtctgacggagattcatctgttgccgtttcatcaatatggcgaggcgaaataccgtctgctgggtaaaacctggccgctggccaacgtcaacgctccccgagaggcggatattcatccttatcaagcgctggctgaagcagcaggatatcacgtcactatcggcggttaa

SEQ ID NO: 93374 - DNA, 2298 bp, Enterobacter aerogenes
atgacgaatcgtactcaacgcctgaaagccagcctgttcgcccagccgcgcgaaatctcccttgaacgcgcattgctctataccgccagccatcggctgacggagggggagccggtgattatccgccgggcgaaagccacggcgtggatcctcgataaggtggccatttcgattcgtgatgatgaactgattgccggcaaccgcaccgtcaaaccacgtgcggggatcatgtcgccggagatggacccctactggctgctcaacgagctcgacgccttcccgacccgcccgcaggaccgcttcgcgataagtgaagaagataagcggatttaccgcgaaacgctgttcccttactgggaaaagcgttcgatgaaagatttcattaacggtcaaataaccgaggaggtcaaggccgcgatcggcacgcagattttcagcgttaatcagacggataaaggccagggccatattattatcgactatccgcggctgctgaataatggccttgatgcgctgatcgccgagctgaaatcacactgcgcccggcagcctgataaccacttttatcaggcggtcctgatcttgcttgaagcttcgcagcgtcatattttgcgctacgccacgctggcggaagagatggccgccaactgtacgaatgcccggcgtcagcaggagctggcaaccatcgccgccatctcacgccataacgcgcagcatcggccgcaggattttgcccaggcctgccagctgttctggtatatgaatattattttgcagtacgagtccaacgccagctcgatttcgctcggacgctttgaccagtacatgttgcctttttatcaggcatcgctgaatcagggtcaggatcccgcgtatctcaaggagctactggagtcgctctggttgaagtgtaacgatatcgttctgctgcgttcgtccagcagcgcacgctatttcgccggttttcccaccggctacaccgccctgcttggcggactgacggaaaccgggcgtagtgcggtaaacgtactgtcctttctttctctcgatgcttaccagaatgtgcagctaccgcagccgaatctgggcgtgcgggtcaatgagctgattgaccgcccgttcctgcgcaaaaccgctgagaccattcgcctgggtaccgggatcccgcagattttcaacgatgaagtggtcgtcccggccttccttaaccgcggcgtgtcgctggaagatgcccgcgattacgcggtggtcggctgcgtagagctctctattccagggcgcacctacggcctgcacgatatcgcgatgtttaatctgctgaaggtgatggaaattgtgctgcaggaaaatgaacatcagcctgaagtcagctgggacggtctcatcagccaaatccgcgacaaaatccgctattacatcaagctgatggtcgagggcagcaacatttgcgatatcggacaccgcgactgggctccggtccccctgctgtcatcctttatcgaagattgcgtgcagcacggcaaagatatcaccgcaggcggcgcgcgctataacttctccggcgttcagggtatcggaatcgctaacctgagcgattcgctgcacgcgctgaagggcatggtcttcgagcaacagcgcctcagctttgccgaactgatggcggtactgaaagccaacttccgcacgccggaaggagaaaaaatccgcgcccgtttgatcaaccgttacgagaaatacggcaacgatatcgacgaagtggataatattagcgccgatctgctgcgtttttactgtaaagaggtagaacggtatctaaacccgcgcggcggccatttcaccccaggctcctataccgtatccgcgcatgtgccgctgggctcggtggtcggcgcgacgccggacggccggttggccggcgaacagctggcggacggcggcctgtcgccaatggttgggcaggatgcccaggggccgacggcggtgctgaaatcggtcagcaaactggataattatctgctatcgaacggtacgctgctgaacgtcaaattcaccccggcaacgcttgccggcgacagcggcctgaacaaactggcagactttttacaggccttctgcaagctcaaactgcagcatatccagtttaacgtggtcaacgccgacacgctgcgtgaagcgcagcagcggccgcaggattttgccggtctggtggtgcgcgtcgcaggttacagcgccttctttgttgagctgtcaaaggagatacaggatgacattatccgccgcaccgcgcatcagctgtga

SEQ ID NO: 93375 - DNA, 321 bp, Enterobacter aerogenes
atgacccacattatcgccgttaccgcctgcccatcgggcgtcgctcatacctatatggccgccgagtcgctggaaagcgccgccaaagccaaaggttggcaggttaaggtagagacccagggttccattggtattgagaacgaactcacggcggaagagatcgccgctgccgatatggtcatcctgaccaaagacatcggcattaagtttgaagaacgctttgccgggaaaaccattgtgcgcgtcaacatcagcgatgcggtaaaacgcgcagacgccatcatgaacaagatagacagccacctttcccagaacgcctga

SEQ ID NO: 93376 - DNA, 1077 bp, Enterobacter aerogenes
atgaacgaactggtgcaaatactaaaaaatactcgccagcatctgatgaccggcgtctcacacatgatccccttcgtcgtctcgggtgggatcctactggcggtgtccgtcatgttgtatggcaaaggcgcggtgcccgatgccgccaccgaccctaatctgaagaagctctttgatatcggcgtcgccgggctgacgctgatggtgccttttcttgccgcctatatcggctactccatttctgaccgcgccgcgctggccccttgcgccattggcgcctgggtgggcaacagcttcggcgccggcttcttcggcgcgttgatagccggcatgattggcggtctggtggtctattacctgaaaaaaatccccgtacataaagttctgcgctcggtgatgccgattttcatcattcccatcgtcggcacctttatcaccgccgggatcatgatgtgggggctcggcgagccggtaggcgcgctgaccgcaaacctgaccagttggctgcaggggatgcgcgaaggcagcatcgtggtgctggccatcattatgggcctgatgctggcctttgatatgggcggcccggtcaacaaagtggcctacgcctttatgctgatttgcgtctctcagggcgtctacagcgtcgtggcaatcgccgcggtcggcatcgccgtaccgccgctgggcatggggctggcgacgttgattggccgtcaatattttaccgccgaagagcgtgaaaccggcaaggccgcgctggtgatgggctgcgtcggcgtgaccgaaggcgccatcccctttgccgccgccgacccgctgcgcgttattcccgccaacatgattggcgccgcctgcggctgcgttaccgccgcgctgatgggcgcgcagtgctatgccggctggggcgggcttatcgtgctgccggtggtccagggcaaactcgccttcgtcaccgcactctttgtcggcgcctgcgtcagcgcggcctgtgtcatcactctgaaagcattcaccaaaaagaaaccgtccgacgcccaggacgacgatgaattagatcttgatttcgaaattaactaa

SEQ ID NO: 93377 - DNA, 2502 bp, Enterobacter aerogenes
atggcactggtaattgaattcatatgtgatttgccaaatggcgtgcatgcgcgcccggcaagcctggtcgaaacgctgtgtaaccgcttttcatcggcggttgagtggcggaatctgcgtagcgacggtcgcgggaatgcgaaaagcgcgctggcgatcattggtagtaacaccctcaagggcgacgcctgtcagctgattatcagcggtgaggatgaagccgaagcatttgccgcgttaaccgcgtttatcgaaaatgagtttccgcactgcgatgcgccgctacctgccgcgcaagcgctggatatcgagccggtgccggaatcgctgtcgcggctgaatccaacgctgtttcctgcgcgcccggtctgcgccggcagtgcgggcggtaagctggttcatctcaaatcacgcgatcttcacgaccttggcgaactgcccgtcgccgccggccttgaacaggagcagacggcgctggataacggtttgcgtctgctggtgcaggatatcgatctgcggttgctggacaatgacggcaccgccagcgcgattctgcaagctcaccgttcgctggcgaccgatgcttccctgcgccagcacctgcttggcggtattcttaccagccttagctgcgcgcaggctattgtcgccaccggcgaccacttctgcgcccagttccgcgattccggcaacagctatctgcaggaacgagtgctggatgtccgcgacgtctgtttccagctattgcagcatatttacggtgaagaccgctttccggcaccgggacaactgcgggaagcggctatttgtcttgccgatgaactgaccccaagccagtttctggaactggataagtcgcagttgaaagggctactgctgcgcagcggtggcaccacttcacatactgtcattctggcccgttcgttcaatattcctaccctggtgggggttgacctgccggcgctgctgccgtgggtcgatacccaggtacagatagacggtaatgccgggctgctggtggtggaccccagcccagcggtggcgcgttattatcagcaggaggcctggctacaggagcaaattcagcaacagcagcaggtatggctcgataaagccgggcagacgcaagacggtatccgcgtcgagattgccgccaatatcgcgcattcggtggaagcggtggcggcattcaataacggcgcgcagtcggttgggctgttccgcaccgaaatgttgtatatggaccgccctggcgcgccgtcggaaaatgagctctacaacatcttttgtcaggcgctggagccggccaacggccgcagcattatcgtgcggaccatggatatcggcggcgataagccggtggcgtatctcaatattccggcggaaaacaatccgttcctcggctaccgcgcggtgcgcatttatgaagagtatcaggcgctgtttcatactcaactgcgggcgattttacgcgcctcggcgcatggctcgctgaaaattatgatcccgatgatttcatcaatggaggagattctgtgggtgaaagagcggctggcggaggccaagcagtcgctgcgcgccgaacagatcccgtttgatgaaaagatcccgctcggtatcatgctggaggtaccgtcggtgatgtttatcatcgatcagtgctgtgaagagatcgatttctttagcatcggcagtaacgacttaacgcagtatctgctggcggtcgatcgcgataacgctaaagtaacgcgccactacaacagcctgaatccggccttcctgcgcgcgctggactatgccgtgcaggcggtgcatcgtcagggaaaatggattggcctgtgcggcgagctgggggcgaaaggatcggtgctgccgctgctggttggcctcggtttagatgaattgagtatgagcgcgccggcaatcccggcgaccaaggcgcgcctggcgcaactggatagccgcgcctgccgccagctgctgaatcaggcgatgcagtgccgtacttcgctggaagtggaacatctgctggcccagttccgcatgcgtcagcaggatgttccgctggtgagtacccagtgcattacgcttaatagcgactggcgcagtaaagaagaagttctgaaagggatgaccgacaatctgctgttggccgggcgttgccgctatccgcgtaagctggaagccgatctgtgggcccgcgaggcggtgttctccaccggtctgggctttagcttcgccattccgcacagtaaatccgagcatattgagcagtcgaccatcagcgtcgcgcggctggcgcaaccggtgatgtggggcgatgaagaagcgcaatttgtcattatgctgacgctgaacaaacactcggcgggtgaccagcatatgcggatcttctcacgcctggcgcggcggattatgcatgagggttttcgtaccgctctggtgaatgcggcaagccccgaggatatcgccgaactgttgcgccgcgagctggaactgtga

SEQ ID NO: 93378 - DNA, 1449 bp, Enterobacter aerogenes
atgtccgtatttcactcaaatctgtttcgccagcaggcgctgattgccggaagctggcgcgacgccgccgacggaacgacccttgccgtcagcaatccctccaccggcgaggcgctcggccagatccccaatatgggccggacggaagcgcagcaggcggtggatgccgccgctgccgcgctgccggcatggcgcgcgcttaccgccgcccagcgcgccgcgctattgaagaactggcaccgcctgatcctcgaaaacaagtccgcgctggcgcagattatgaccgccgagcagggcaagccgctggcggaagcggaaggcgaaatcgcctatgccgcctcgtttatcgagtggtttgccgaacaagggaaacgcgccaacggcgagataattccctcccccggcgccgataaacgcctgatggtgatccgccagggcgtgggcgtctgcgcggcgatcaccccgtggaacttcccggcggcgatgatcacccgtaaggccggcccggcgctggccgcgggttgtacgatggtaattaagcctgccaatgaaacgccgtttaccgcgctggcgatggcggaactggcgaatcaggccgggatcccgcagggcgtcattaacgtcgtaaccgggcagtcgcgtgagattggcgcggtgttcaccggcgatgagcgggtgcgtaagctctcctttaccggttcgaccgaagtcggccgcgtgctgatgcgccagtgcgcggaatccatcaaaaagctctctttagagctcggcggtaacgcgccgtttatcgtctttgacgacgccgatatcgataaagcggtcgagggggcgctgatcgccaagttccgcaacgccgggcaaacctgcgtttgcgtcaaccgcttctatattcatcgcgccgtctacgaccaattctgcgataagttcgttgcccgcgtcgccgccctgaaagtgggcgatggcagcgagtccgatgtccagattggcccgcttatcaacgccgacgccggacgcaaagtccagtccctgctcgacgacgcgctcacccgcggcgcgacgctgttaaccggcggtaaagcgcatccgctgggcggtaatttcttcacccctacggtgatcggcgacgtacagccggggtcactgctgctgcaggaagagattttcggcccggtggccgcgctggtgaaatttgaggatgagcaagaggtcattgagcaggccaataacactatctacggcctcgcctcctatttttacagcaacgatgccgcccgtatctggcgcgtctccgaacagctggaatacggcatggtcggcatcaataccgggctgatttctaatgaagtcgcgccatttggcggagtgaaacagtcaggtcttggccgcgaaggttcggaacacggtatcgaagattacctggagatgaagtatctctgccaggggttgtaa

SEQ ID NO: 93379 - DNA, 1608 bp, Enterobacter aerogenes
atgttgagcaacgtaaagaaaaaagatgtgccgctgattgtcatcagcctggcggccattgttttcatcgccgctacattaagtctcttcccccaacaaaccgcgcaggcggctaattcgatttttaacggcgtcacccgcctgctgggttccgcggtacaggtgctggtgctactggcgctgggactggtgttgtatctggccaccagcaaatacggcaatatccggctcggtgaaggcaaagccgagtacagcactctctcatggctgtttatgtttatttgcgccggactcggctcctctacgctgtactggggtgttgccgagtgggcttattactaccagacccctggcctgaatattgcgccgcattcagcaaaagcgctggaatacagcatcccctactctttcttccactggggcattagcgcgtgggcgacctacaccctcgcctcgctgatcatggcctatcacttccacgtgcggaaaaataaaggtctcagcctctccgggatcatttcggcaatcaccggcgtcaatccgcagggtttctggggtcgcctggttgacctgatgtttctgatcgccaccgtcggcgcgttaaccatttcgctggtggtcacagccgccaccttcacccgcggcctgtcagctctcaccggactgccggataacttcaccgtccaggcgtttgtgatcctgctctccggcggtattttctgcatgagctcgtggattggcatcaataacggcctgcagcgactgagcaaaatggtcggctggggggcgttcctgctgccgttggtggtattactggttggcccgaccgaattcatcaccaataacatcatcaacgccatcggtctgacgacccaaaacttcctgcagatgagcctgtttaccgacccgctcggcgacggcgcctttacccgcaactggaccgtcttctactggttgtggtggatctcctatacccctggtgtggcgatgttcgtcacccgcgtctcccgcggacgcaaaatcaaagaggtcatttggggactgattctcggcagcaccgccggctgctggttcttcttcggggtgatggaaagctatgccatgcatcagttcgtcaacggcgtgattaacgtgccgcaggtgatgcagtccctcggcggcgaaaccgccgtccagcaggtgctaatgtcgctgccggcgggcaagctgttcctcgccgcctatctgttcgtgatgattgttttcctcgcttcgcatatggatgcggtggcttacaccatggcggcgaccagtacccgtaacctgcgcgaaggcgaagatccggatcgcggcatgcgcctgttctggtgcgtggtgataaccctcatcccgctatcgattctgtttaccggcgcttcgctggaaaccatgaaaaccaccgtggtgctaaccgccttaccgttccttgccattttactgatcaagaccggcggcttcgtacgctggctaaaacaggactacgcccacgtgcctgtgcatcagatagaaacccatacgcccgagccgatcgttaaagccgagacgctgccggttggcgcggtacttaaaggcgacggccagtcgctgtaa

SEQ ID NO: 93380 - DNA, 510 bp, Enterobacter aerogenes
atgttaactatccgtaaggctgtaccagaagatgcgccgcagctcagtaatatgggctatgccagctatcgccaccacttcgcccacctttggcgcaacgccgatgagctggcattatttctccagcaggagtattccgtggaatcgctgcgtcaaagtcttgccgcggcggaacagcattggctcatcgccgaatccgcgcaccccgttggctttgctaaatacagctgccagcagagaattgatggcgacggacgtatcggcacattgctgcataagctctatctcatgcctgacgaaaccggacaccgctacggcgagcggctgtttagcgccatagaggctctggcacaagaaaatggtgaagcgtggctgtggcttgaggtccttgccgataatcctggcgcgcgtcgtttttacgaacgccagggaatgcagcatgtaaaagacaccattttccattccgccagccaacaaagcaccttacatattctggccaaaccaatatga

SEQ ID NO: 93381 - DNA, 741 bp, Enterobacter aerogenes
atgaataaaaaagtcatcttacgcggcgccagcgctattatgccgctgtgcatcggcgactttccattttcatttattgtcggcgcattaagcgttagcgcgggcatgagcgtctggcagagcacggcgtggtcggcgattgttattgccggttcggcgcaaatgctggcattaaatatgcttaaaaccggcgccacgctcggggttattatattcaccacattaataattaatctacgtcatgtactgtacagcgcctctatttccggtaccgtccgtgaagcatcattctttaaaaaatgctttatgtcctacgcgctgaccgacgaagtgtacgccaccaccgtcaaagagatggaaggcaataagcaggataagtatctgttttatggttcggcaatgatcaccttctgggcgatttgggtactggcggatttcctcggcgcgctggtcggcgcttccttcccgaacattgaaaagtacggtctggatttcgccatggtcgccgcttttatcgctatcgtggtgccgcaaataaaaagccaggcctgcaccgtcgccgccgtggtggccgccgtctccggcgtgctgttggtcatcctgccctactcgctgggcattgtcgtcgcgtcagtgcttggcgtgctcgccggactgtgcgtcgacctggctgaagaacgtaaacaggcagcaaaagccaaatccgggatgccgctcgtggaggcgctggaacatgaataa

SEQ ID NO: 93382 - DNA, 1278 bp, Enterobacter aerogenes
atgaacaccgataacgcttccctgtacgtaaaatggctcaaacaagaagttgccccggcgttaggttgtactgaacccgtcgctatttccttcgctgccgcctacgccgcacaatatctggatcagccttgcaccagaattagcggttttatttccgccaatctctataaaaatgcaatgggtgttactattcccggtaccaccgtttgcggagtagcgctggccgccgcaattggcgcatttggcggcgatccgcaaaagggattaaaaacgctggaagatatcaccccgctacacgtcgaaatggcacagaagctgatcgccaatcatgccgttgatattaccgtcaaagagaccccggactttattcatctggatctaactctctctgatggcgaaaacacctgtcgtgtcgtggtaaaaggaacccacaccaacgtggtcgaactttatattaatgaccagccgcagccactaagcgaaaaacagaatgcgagcgcccggcacgaaacgctgcccaatttttcgctacaccaggcttacgactttattaatagcgtcgactttaatgatattcgctttattctcgaagccgcgcgcttaaactccgcgctggcggcagaaggcaaaaccaaaaaatatggcctgaacattaacggtaccttttctgacgcagtgaaaaacggcctgatgagcaacgatctgttaagcaaggtgatcatcaacaccgtcgccgcttcagatgcccgcatgggcggcgcgccggtggtcgcaatgtctaacttcggctcaggcaatcagggcattacggcaaccatgccggtagtagtggttgctgagcatctcggcgccgatgaagagaccctggcgcgcgctttgtctctatctcatctcactgccatctcaattcattctcgttatacgcgcttatctgcgctatgcgcggcctcaaccgccgccatgggcgccgccgccgggatggcctggctatttactcgcgacatcaacaccattaataccgcgattattaatatggtcagcgatattaccggcatgatttgtgatggcgcctctaatagctgtgcgatgaaagtctcatctgtggtatccagcgcctttaaggcggtactgatggcaatgcaaaatagctgcgctggcgccaatgacggtattgtctgcgctgatgtcgagcagactattaataacctgtgccgcctggtgattaaaccaatgaccctcaccgataaagaaattatcagcatcatggtcgctaaataa

SEQ ID NO: 93383 - DNA, 1605 bp, Enterobacter aerogenes
atgagtcgtaacgcgccgcataaggcgttaagaatattcttcatcatactggtggttgtgctgccggtggtgttggcgttgtggtttgcgcaaatcagagcccgggaagaaatctcagatagactgcaatcgttttcgcagctggcgctgcaaaaaacggaaatggtcattcatgaatccgagcaggcgcgcgaaaaagccatgcactttaccggggcaatgtgttccccgcagcatcagcagtacatgttaaatatcgtgcgcgggctactgtatgttgatgacctgatttatgcgagcggtaacactttcctctgttccaccgcggtccatcccgaagagggctggagaatagctgccgcgaattatactcgaaagcccgacgtctccatttactactatcgtgatacgccgttttatcccggctatgatatgaattatatgcagcgcgggcattatgccgtggtggttaaccctctctcttatagttcggttatttccagcgataaagatttagcttacggcgtcttcgacaccaaaacgaacatgtttttctccgtgagtaaaaacgttgatgccagggaattacatcgtcttattcgccacgaagacgcttttttcaaccaggatggccgggtttataccgtcgcccattcgtcgattcgaccgattgcggtcatcatgtccacctcgcgcgccagctattatgccagcctctacgaccagattaccttgaccctgccgttaggcattatttgcagcattttgattctgatggtctggtcgcgaagccgtcagcagtatcattcaccgcgcaataaactgcagcgagcgttaagccaccggcagctgtgcctgcattaccaacctattatcgacatcaagaataaccgctgcgtcggcgccgaggcgctgttacgctggccggggtttgacgatccggtgatgagcccggcggagtttattccgttggcggaaaactcgggcatgattgctcaggtgacggattatgtggtcgacgagttgttcaacgatcttggcgaatatctggccagacatccacagctctatatcgcgattaatctttcggcatcggacttccactccgcgcgattaattgcgcagatcactgagaaggcccgcagctatgcggtttgcgtgaagcaaattaaaattgaagtcaccgaaagaggatttatcgatgtgccgaaaaccacaccggtgattcaggcgttccgcgaagcgggctacgaaatagccattgatgatttcggtaccggttattccaacctgcataacctctattcgctcaatgtcgatattctgaagattgataaatcctttatcgatacgctgaccaccaacagtaccagccatctgattgccgagcatatcattgatatggcgcgtagcctgcgtttaaaaaccatcgccgaaggggtagaaacgctggatcaggtggattggttgcttaagcgcggcgtgcagttttgtcagggatggcattttgccagggctatgccgccacaggagtttatgcagtggctcgccaagtccccgatcttactgcgtacgccgcacgacggtcgtcaggcggaaatctga

SEQ ID NO: 93384 - DNA, 957 bp, Enterobacter aerogenes
atgaaaaatttcatcctgaggcgcttattgcaaacgctgccgatgctgctgctggcctcctttatcatttttatgctctttgccaaaacccccggcgactttatcgatggcaatatcaccttgacggccgcccgcgccgccgaactgaaggcgatatacggcctcgaccagccgcttttcacccgctaccttcactggctggggcaactgctgcgcggggatttaggcttctcgctgcaataccaaattccagtcagccagctactgaaccagtacatctggaactccttcctgctggcaagcgtggcgctggttttctactggggtatcggcctgacggttggcgtggtctccgcgctcagacctaattcctggtttgatcatctggtgagtatcgcggtgttcgccgccatgtcctttcccacctttttcctctgcctgctgctaattaagtggtttgccgtcgaccttcactggctgccggtaggcgggatgaccaataccggcagcgacgatagcggctggcagtatgtgctgcaggtcgccgcccatctggtactaccggtactggcgctggtgatgctgcaggccggtagcctgacgcgctattttcgcgccagcatgctcgacgtggtgaagatggatttcattcgtaccgcccgtgctaaaggtctgcgagaacgcacggttatcatgaaacacgcgctgcgcaatgcgctactgccggtcatcaccctgcttggctttgaactgccgggattgttctctggcgccatcattaccgaaaaagtatttaactggccgggggccggacacattcatatcgattcgctggccgctcgcgattatccggtattgatggggtttaccctgtttctggcggtgctgacgatcatcggtaatttactggccgatgtgctctacgcgtgggccgatccgcgcattcgagtgaggtaa

SEQ ID NO: 93385 - DNA, 231 bp, Enterobacter aerogenes
gtgccttttgttaatgtgcaaacgattaaagggatcatgaccactgagcagaagaatgaactgctgcgtcgcatgactgacctcatggtggaaattgaaggccggggcgatccgcaattccgtcagtccgtctggatccgtattgatgaacacgagccggaacagtggagcctcggaggaatacagccgacagcggagatgatagcggcaaaatttgccgctaaacgatga

SEQ ID NO: 93386 - DNA, 459 bp, Enterobacter aerogenes
atgtcaaaatataattcatccccttacctgcccgcggaactttgcggcctggcggaaagcgctaaaattgttggcgatcaatggattttattgattttaagagaggcgttttacggcgtgacgcgtttcgaaacgattcgcgttcataccggaatgagcaaacagacgttaactcagcgtttaaaattgatggttgatatggggctactacgtaaacttccctatcgcgaagcgggggcgcgtgagcgttatgaatatacgctgaccgaaaagagccgcagcctggcgccggtcctttttgccctgatggaatggggacatcagcaactcttgcatacgtcgccgcatatccagttagtagataaaaccagcggtgcgccggtgtctctggcctacgtcaatgccgcagggcagcgtattgcgcaaagcgatgttcagatagtaaaagtccaggattga

SEQ ID NO: 93387 - DNA, 675 bp, Enterobacter aerogenes
atgtcgaaaagagctaaactgaatattgcccatggcgctttgaattttattgaaaaaagctttcaggcggaaatattaccgcagttgtataatgtatcgtcgttcggttgctcgatgattaccatcccgttgaagaatggaaccagcctggaagtgaaacttctggcctcgccgttccaggaagagggggaactgatgctgcagatgttctttgaaaataaacgcgtatatagcgtctgtttttcctgcacggatcaaggaagcgcgtggattggcggtattcagggcggtaaagacattagcaacgatgaagtgaaggcgttgaccaaagagctctacggcacgcggccaaaaaacctgattatcaccttgctgtacgggttattgcgccactttaatatccgtgagatctacgccatcgacagcgactaccatgtgaagagcgacaaggtgaaagccagttactcagagttgtggttagaaattggcggcgagaagcagcggcgcggttggtacaaattacctccacaagagattaaaaaaagtcttgaagaggtgaaaagtaaacatcgcagccagttcattaaacgtgagagtttaaaagagcaggcgcagttggatctgatcgcagcattacggcagattagcgtaggtaacaacaccaaccaaccataa

SEQ ID NO: 93388 - DNA, 657 bp, Enterobacter aerogenes
atgttaactcgcgaacaaatggcgatgcgcgtcgcccaggaactgcgcgacggcgattatgtcaatctcggtatcggcattcccacgctggtcgctaactatattcccgccggtattgaagtgatgctgcagtcggaaaacggcctgttggggatgggcgaatttcccgatgagtcgactctcgatgccgacatgattaacgccggcaagcagaccgttaccgcccaaaccggggcggctatctttgactccgcccagtccttcgccatgatccgcggcggccacgtcgatctcacggttctgggcgcttttgaggtcgatgtcgcgggcaatatcgcctcgtggatgatccccgggaaaatggtgaaaggcatgggcggcgccatggatctggtggccggcgcgcaaaacatcatcgtcgtgatgacgcacgcttcgaaaaacggcgaatccaaactgctggcgcagtgcaccctgccgctcaccggcgcgggctgtattcgccgggtactgaccgatctcgcgctgctggaaattagcgacggcgcctttgttctgcacgaatacgctcccggcgtcagcattgacgaaattgcccgtaaaacggctggacggctggtcattgccgatgacgtccgcgaaatgcgcttcaactaa

SEQ ID NO: 93389 - DNA, 618 bp, Enterobacter aerogenes
atgactaaaaaaatacttactacgccaattaaagatgaagatttagctgatattaaagcgggcgatattatttatcttaatggtcatattgttacctgtcgtgatgttgctcatcgtcgtttaattgaaggcggtcgcgaattgccggtcaacgttgccggcggcgcgatattacatgccgggccaattgtgcggccgattaaaggtacagaagataaatttgaaatggtctctgttggaccaaccaccagtatgcgtatggagaaatttgaaaaagaatttattgctaagaccggtgtgaaactcattgtcggtaaaggcggcatgggcaaaggtaccgaagaaggctgcgccgaacataaagcgctgcactgcgtattcccggccggctgcgcggtggttgccgcggtctgtgtggaagaaattgaagacgcccagtggcgtgatttaggtatgccggaaaccttatgggtttgccgggtaaaagaattcggcccacttattgtgtcgatcgatacccatggaaataacctgtttgagcagaataaagtgatatttaatcagcgcaaagagattgtcgctgatgagatctgtcagcacgtaagttttattaaataa

SEQ ID NO: 93390 - DNA, 900 bp, Enterobacter aerogenes
atgagcaaaagcgaacagatatcccgaatgaccgatattatggccaaattcgtgggatataccggcaaagtattgcctgatgacgtcactgcaaaactgaaagagttgcataagaaagagaccagccagctggcggacgtcatctttaccaccatgattgaaaaccagcgtctggccaaagagctggatcgtccctcttgccaggacaccggcgtgattcagtttttggttgagtgcggcgccaacttcccgctgattggcgagctggaagcgctgctgcgcgaatcggtgattaaagccaccgtggattctccgctgcgccacaacagcgtagagacctttgacgaatacaacaccggtaaaaacgtgggtaaaggtacgccgacggtattctgggagattgtccctgattctgaccagtgcagtatttacacctatatggccggcggcggctgctcgctgccgggtaaagcgatggtgctgatgccgggcgctggttacgaaggcgtaacccgtttcgtgctggatgtcatgaccagctatggcctgaacgcctgtccgccgttgttggttggcgttggcgtcgcgacttccgttgaaacggcggcgctgctgtcgaagaaagcgctgatgcgtccggtgggatcgcgcaatgagaatgaacgcgccgcatcgttggagaaaatgctcgaagacggcattaataaaattggccttggcccgcaggggatgtccggcaatacctccgtgatgggcgtcaatatcgaaaataccgcacgccatccttccaccattggcgtggccgtcaacgtcggctgctggtcgcaccgcaaagggcatatcgttttcgataaagatttgaattacaccattacgtctcacacaggagtggctttctga

SEQ ID NO: 93391 - DNA, 1269 bp, Enterobacter aerogenes
atggaaccgattaccatcaccttatgtttgctggtgttcgctatcgtcatgtttgtctgggagaaggtgcctttggcagtgacttccatggtggtctgcgtggcgttagtgctcaccggcgtgttggatctaaaacaagcttttgccggttttatcgactccaacgtcattctttttgtcgccatgtttatcgtcggcggggcgttatttgaaaccgggatggccaataaagtcggtggggtgatcactcacttcgccaaaaccgaaaaacagctgatcttcaccatcatggtggtcgtcggcgtgatgtcgggttttctttccaacaccggtacggcggcggtattgatcccggtagtaattggcgtcgcggcgaaatcgggttttgcccgctcgcgtctgctgatgccgctggtatttgccgccgcgctcggcggcaacctgtctctgattggcgcgcccggcaacctgatcgcgcaatcggcgttgcagaatatcggtagcggctttggcttctttgagtatgcgaaagtgggtttaccgatgctgctctgcggcatcctctatttcctgactattggctataaatttctgcctgctaccgcgaatagcggtgaagtcggtagcgtcggcgaacagcgtgattacagccacgttccgcgctggaaacagatcctgtcgctggtggtgctgatcgccacgatcctcggcatgatttttgagaaacagactggcattagcctgacggtggcaggctgtatcggtgcgttggtactggtgtttaccggcgtgctgacggaaaagcaggcctataaggcgattgattcacagactattttcatttttggcggcacgctggcgctggcaaaagcgctggaaatgaccggtgctggcaagctggttgccgatcatgtcatcggcatgctgggccagaactcttccccgttcatgttgatggtggtggtctttgcgctgtccgtcatcatgaccaattttatgtccaataccgccaccgtcgcgctactggtaccggtgagtttgtcgatcgcggccggaatgggcgccgatccgaaagcggttctgatggcgaccgtaatcggcagttcctgcgcctacgcgacgccgatcggtatgcccgccaacatgatggtgctatcggcaggcggctataagtttgtcgattacgccaaatcgggccttcctctgattatcgtttctaccattgtcagccttgtactgctgccaattcttttcccttttcacccgtaa

SEQ ID NO: 93392 - DNA, 666 bp, Enterobacter aerogenes
gtgcagaagcctaaattagggaaaattaagcttctttcggcgaaagagcaggtcgctgcggtattacgcaaagcgattctttcgcgggatttagtggaagggcaggagataactctcgaaggcattgcccggatggtcggcgtttccagcatgccggtgcgcgaagcgtttcagattttagccgccgatggcctgattaaagtccgccctaataaaggcgcggtggtgttggggatcaacgaacagacgattcgcgagcattatgaaattcgcgcgctgctggaaagtgaggcggtggcgaaagcctcccgtcccggcacggatatttcgtccattgcccgggtacacgatgcggcggaaaaagcgctggccgataataacttcactgaatattccgacctgaaccaggccttccatatggagatctggaacgccgcgggcaacgaaaaaatgaagatgctgctctgtaatatgtggaacggactgtcgatggggcacaaggtcaccgaagcagaatacgccgctatctccattcgcgaacataaggagattttacaggcacttgaacagcataatgaagaactggcgcgtcagcgcatgcgcgagcatattattcgctcaatggaaaatatgctcacgcgataccttcccgaaacctctgtatag

SEQ ID NO: 93393 - DNA, 630 bp, Enterobacter aerogenes
gtgaaaaagatcgaaagaaagcagaccagggaccacattacgcaaatcattcgctatcaaattctttccggagcgataaaaccgggagatgagctggcgcaggagagtattgctgagcagctagggctttcacgtatgccggttagagaagcgttgcagtctcttgaacaagaggggtttctggtgcgcttgcctaaccgtcatatgcaggtatcaaagctggtgcccgatgatgttagccatatttttcgcgtgatcgcggtgatggctgccgaattgttcactctcgtgccggcaaaccagggggaattgctgctcgggcgcgcgcaagcgctggcgcagcctggcgacaaaactcgcgaactggattttcatcagttgctgatttcctatcttgataaccgctatctggcgaaggcgtatcagcaatttttggatggttatatctcttatgtcattctgtatctgaaagacgatagccaggaatcggcactgatactacatgaactggctggagccattagccgcggcgatgtgggcaatattgctcaggcaacacagcgttatttcctcatgcttgcggaaattatgcgtcaacatatgaaggattgggaaagtgcagaagcctaa

SEQ ID NO: 93394 - DNA, 1833 bp, Enterobacter aerogenes
atggatgcacaggaatttagaaaagactttttggaagaagtgaaaattaacgctactgcaacaggagaaggatcctgtgcatcatttgtttctgcattttcccgtcgcttacaagatattgaatttttatcggattttacgtcatcttattttgaagggactggaaaatataataaaaaaattcgagttgatggttattcatatgatgaatttgataaaactatgcatcttgttattgctgactatgatggttccacaagtgaagcatatttatcaaaaataaaagcaaaaaaaatacaaaagcgattggtaaattttacatatgaggcgcgtaataactctctacatcaacgtatcgaaatgagtagaccatgctgggatttagtggatttgatgaaggagaaggagttagaactgcgaaaatatagttttcatatatttacttcatcaattatcccttctgatgtaataaaactcgaatctgaggatattgatgaaatacctacagaatgccaaatatggagtattgaacggctgtttaatatttgtagttcggatattggacggaatgccgtagaaattgactttaaagagtacacttctaatggaatttcttgtctaaatgctagcgaaacaataataaaagacttcagaagttttctttgtattattccaggggcggtattggcagatatttatgataagtatggtagtttattgttggaaggtaatgtacgttcattcctttcaaccaaagttgcggtaaacaagaaaattcgaacaactattatcgatttccctgaaagattttttgcttataataatggcatctcagcaacagcgatgaatgtgcagattgagtcaacttctgaagggcaacgtcttatagcagcaaaagattttcaaataataaatggagggcaaacgacagcatcattatccaatgcgcggtataaagataaatgcaatctgaacgaggtgttcgtgcaaatgaaacttactgttattgaaaagattgctgatgaggaggcgataaaattaatacaagatatatcccgttcatctaatagtcaaaataaagtaagtgatgctgatttcttttcaacccatccgtttcatgtgcaaatggagcatttttcccaaaaactctatgctagagccattaatgattcacaattcgacaccaaatggttctatgaacgagcgcgaggacagtatcttcaaaaacaaatgcgcttaactcgggctgagaagaaaaaattccttctgcaaaaccccaaaaatcagctaattactaaaactgatctagctaaagtaagaaatacttgggatgggtttccacatattgttagccgtggagcccaaactaactttatagactttgcagagaaaacgactaaagagtggaataaaggagaagtcgataaatttagtgataagtattttcaggaaactgtcgccttacttttaatttataagtatatggaaaaaatgatcccaaatcaaacatggtatttacagggatatcgcgcaaacattattacttataccattgcctttatgcgcatgttgataaaaaaacaattcaacaataaagatttagatttaatttcaatttggagtcgacaggcggtacctaacaccgtacagcaaacattaattgatttatcagaaaaagtctattttaaaattacagacagcacacgaagtgtggagaatgtaactcaatggtgtaaacgcgaagaatgctggaatagcgtcaaaaatatttcctatattttacctgattcgatagaaaatttcttgacagcaaatgataaagcattcatttga

SEQ ID NO: 93395 - DNA, 942 bp, Enterobacter aerogenes
atgaaaactacgccagaaactcttcttaatcaatgggataatattatatataaggatggtggtttcttacaaattgatacgcaacatcctctcgaatggcatattgggtatcaatcggctaatcaaagaacactattactggtttgtaacgcagaaattaatgctatcgaatcatctaaatcaatggttgtaagtcgtcgtcaaagagaaatagataatcgttggactttaacattcgaattaatgcgaaatgcagaacaagatgttttcgcgatcttttgttgtgacatcatcgaattctctcgtacagcttcagatgaaaaagaagcattgacatttgtcattaagcgttacaggcagtggagccgattgcttgaattgcaaaaaaatggattaatggatgaaaataagtgtaagggtttattaggtgaattgctttttttagaagaatacatgagttatggcggctcggtgcagaatgcagtacaaggttgggttggggcggaaggtgcagatcaggattttatgtattctgaaggatggtatgaagtaaagagtataggcatttctgcagctagtgtaactatttcttcactggagcagcttgattgtaaactggcaggagagctcgtggttgtacgtattgacaaagtagcgccagaaagagaaggatcaatttcactaaacgagatggtttgtagaatatgtaataagctctcaccatactcagacactctggaactttttcaacataaattaacgagttacggatatattgatattaaggaatactctgaacaaaagtactactatcagggaatgcaacgatatgaggtagacacattatttccacgattaacctccaattcagtgcctatagaagtactatctttaagttatgaattgagtttacctgcaatgtctaaatggttgaaaggttaa

SEQ ID NO: 93396 - DNA, 2784 bp, Enterobacter aerogenes
atgacaacaactaatatggaacagctagaaggaatcatttccaccagcatcaatagaggtttcccggaagagccgccaactgaatctgagttcgaagaaaaagctttagaattgaggcagtctcttcagaatgtatttaatgtaagtgatcttgaatttgaagcgataaaacgtaggctgaaggcaaaaattgttatacaaatggatgttggtgtagcgattttggataacaaaaagcctcatcagtcatggcttccagcaagacgcgctgagttagatttctttttctggcaacgatataaaagatacctagaagaagttaaaggctggaatccacgtgtaacaggcaatctggaacgtgtatcggatgaaattgttgacttgcttggtaatcccaaaagcgaaatgccctttcagcgcagagggttggtactaggtgatgtacaatcaggaaaaacagcaaactatactgcaatatgtaacaaagccgctgatactggatataatgtaatcattgtccttgccggtacaatggaaaatttgcgtcagcaaactcaagagcgtttagatgctgagttttcaggaagaaagagcgagtatctcttagacccaaaacgtgatgccaagaattactcagttggtgttggtgttggtagatacggactggataaaagaatcgaatcctttacatcagttataaaagattttgataaaaatatcttaagccagcttagtctttcattagataacgtaagtgcgacagttgtttttgtaataaagaaaaacaaaaacatattaaataatttaattcgttggctacaaacgaataatactgataacgggagtgttataaaaaaatcacttcttcttattgacgatgaagctgataacgcgtcagtaaacactaatgttccagaaaaagatccaacagctatcaataaatctattcgtaagttacttaagctattccatcaagcctcatatcttggcattacagcaactccatatgcgaatatattcattgatccggaagatgaagatgaaatggctggggatgatttatttcctcgtgactttatttatgctctttctccgccaacaaactatattggtgcaaaagaaatatttggggatgaagaagagatacctgcccaatacaaggatgtgcttaatcctatagattctatagaaatggatgcttttcttccattcagtcataaaaagtggcatgttgtgacagagttgcctcccagcatgaaagagtcaatagcatactttttattaatcaatggaattcgtgatattagaggggatattcggaaacatcgtacaatgatgattcatgtcagtcgattcactgatattcaaaatcagattcgtgatttagtaactacatgggtattgcaaatacgttccgatttgcaaaactatgcaagtctatccgaagaaaaaagtagtcaaattaatgggataaattatctcaagaaaatatgggagaaatacggtctttcagagaaagcgagcaagggaactcttccaataacgtggcatcactttctctctgagtatctttttaaagctgtagctccaatcgatgtaagggctgttaaccaaaagagtggtgctaccggattaaattattttagccacaaagatgatggtttaagggttattgcagttggtggaaatagtctgtcccgaggtcttacattagaaggattgtgtgtaagttacttttatcgtcgctcacagatgtatgatacattactccaaatgggaagatggtttggctatcgtcccgactatgatgatttgtttaaaatatggataagcaaagaagctattgattggtatggatatataacagctgcggctgaagaattgaagctggaaatagcccgaatgaaatatgcaaatcttacgcctatggattttggcttaaaggtacgtcaggaccccgcctctttaattgtcaccgcaagaaataagatgagatctgcaacacctgttagtcgaccaattactatctcaggacgattactggaaactccccgcctcaaatctgatcaaatgtctttaaaattaaatgaaaaagtatttaaagattttattagtcaactgcctgaaataggtaaaagaataccgcgtgatgatgcccgattcttttggtcggatgtaagcaaggatgaaattgaattattacttcgtgaatttaagacacatccatggcagcttaatttccaaggtgttgctatagcagattttattagagataatgaaaatattggcaattgggatgtttttattgctgagggtagtggtgatgaattttacaaacttagctgtggtgatgaggtcttagaaataaaacctgagtctcgtgcagtaaaagcaacgagcacccaaataagtattagtggtacaaaagtacgggtcggtgctggaggggctgctaaaattggtttgagtgacagtgaaaaggagattgcagaaaataatttcagaaaaatcaaaccgaatgctcgtcacattccagataaagcatatcttgagattcaaagaaagccaattttaatattacatgttatttcagttgataagaatgcaaaagataacaatggtaatcttcgcagtcaaatagaagctgatgttaatgttccagaacatatttttgctttaggtattggtattccttctaatggtgaagagaaaacagcaagatatatggttaacatcgttgaatttcgtagcttttatgactttgacgaggatgaagacgaatga

SEQ ID NO: 93397 - DNA, 1470 bp, Enterobacter aerogenes
atgaagagtatatcattgccgccatacgcaccaacactgatagaatcaacacgtgctattggctatacattagaagctgcgatcgccgacattatcgacaacagtatttcagcacaagcttcgtacactgatattttcttcttccccattggaaattcatacattgcaattatggatgatggatgcggaatggctgcagatgagattgataatgcgatgcgctatggtagccaaaatccgaatgaaaaacgcactgaaaatgatttaggacgctttgggcttggtctgaagacagcctcattatctcaatgtcgaaccctaacggtagttagtaagcaacgagattgcattgaagcaagacgatgggatattgaccatgtgattaaaacacaagattggtcactattagtgctagaatcagaggaaatagatcaaatccctcatattgataatctaaaaaaaataaaatctggcactcttgttgtatggcaaaatcttgataggctcaaaactggtgagatcgatttagaacaatcaatgggtaaaaagatggatgaaatgaggaagcatctatcactagtttttcatcgttatatcaatggggaatccggaataaggcgattaaatataaggatgaataacacatctgtcgaaccggtagatccttttctttcccatcgaaacacgcaaataatgtccgatgaatcaatatatattaaaaactcaaaaatcattgttcgaccatatatattaccgcatatttcagacttgtctaaagaagagattggttctctaggaggtaaagaaggtctaaggaaaagacaaggcttttatatctatagaaataaaagattattaatatggggaacatggtttcgtatgatgcggcagggggaactttctaagctagcccgtattcagattgatatccctaacgaactagatagcctttggacgctagatatcaagaaatctactgctattccaccggaaatagtacgaaataatttaaaatcaattgtagaaagtctagcagacaaaagtaagaatacatgggtatttcgtgggaaaagagaaacccaagattcagtcatacatatttggcaacgattcaaaggaaaaaatggagggtgttactataatataaatcgtgagcacccgctggtagaagcattctcagacacgacgcaaaatataagaaatatggtcgaaagcttacttaaatcaatagagtttggaataccgctaaatcagctatatctggatttgacatctgaaaaaatgatagaaaacgacaccagtattaataaacatgaagcagaacgtatttttcatgagcttttaggagaaaactccattagtaaagataaaattgacctgcttaatactcttgaaattacagaaccatttatggactacccagacctgattgaacattacagaaggaaaattattcatgacaacaactaa

SEQ ID NO: 93398 - DNA, 780 bp, Enterobacter aerogenes
ttgaatagcactgaagacgatttgcttgaagtggcgtggtatttgtcgaagtacggtaaatctcaaccacccgtaggactgggtgttcagaaatggaaagaggcttttgccttgttttatccctgttttggcgcgggcaaaaccgccagcgagtttcacaatagtctgagaaatagtcgtgatcgctttgactcgtggcttactgatgcgcgtgttggctggcgtgacgagcagggcgctcctgctgcgctttctcattcagcgcagcgagtgcatcagcgattgagtctgctttcagagagtgcgattgagcagcgcgttctttcgttaatatcttctgatggagaggaacaggcacaacgtgattgccttgctatccagcaggataaaagtattgaagatactatacgcgagcagttgattgcggcacgactggggcagggtacctttcggaaaaattgtctcatgctctatccggcatgccctattacgggaacgacgtttgcgccgttactccgtgccagccatataaagccgtgggctgcctgcgagaatgggaatgaacgtcttgatccttataatggaattatattggctgctcatattgatattctatttgatcagggatggatttcgtttgagaacgatgggtgtttattaattagtgatgagctggatattagtgttaaagagcagtttttgttgccggagaaaataaaggcgttttctgttgagtcccattgttatttggaatggcatcgggagaatttattgagatag

SEQ ID NO: 93399 - DNA, 891 bp, Enterobacter aerogenes
atgcccccacacaaaatccgccaggagtggctgacgctggatgaggccgcagaagtcatccggcagcacaacatcacgttgctgcccgccgatctgatccgccatgccctgcatggcgatctgctactctcggtctacttcccttctcccgtacttctgagaccactcaatcccccttgccgctttgcctgccgattcagcaagccgccctttccgccttcgcagtgcaacaaacccggtaaccgtaaagtgatggcgaactctccgccgttcagacgcgatcctactctgcaactgaccaccagccatctgtggaatttgccgttaatcggccttgaacgtctattgctccaccagcaactggcgcagacgctgaatcatccttgccccaatgatacccactgctgcaatcagattggcattgtggtctgcgatgagaacgacagctactaccaactctgttgccgcaaatcgctacgggagcttttgctggaactgctcgccacgcaaaacaacctccaggaagagcttcatctgctgattggccagctgtatggcaatggtcgcaataacctaaaatcccggcttagtctgtccgtctgctacctacaggacacgctgcctcctgacgcactgttcgtcatccgccgcactcatctcgaagccttcctgacccgtcatcagccggaatcaaaggagcggataagctccgcgctttcccgtttgctatggctggcctgcaagcacaacccacaactggacgataaaatgctggagcatccctacaaactgctgaacatttttgaatgctgggcgcgtgaggatggtatgcacctgccgctgagccccgagacgttgaaaactgcgctccagcgcggcgcaccgccgtaa

SEQ ID NO: 93400 - DNA, 195 bp, Enterobacter aerogenes
atgaatagcgacagatttttacgcttacgccaggtggaagacaaaatcggcttcggtaaatcgtggatttaccggcaaatccagctgcaacaatttccgccgtccatccgactcaacagccgccacgtcgcctggctggaaagcgaggtggatgcctggatccaccagcgcatccgcctcacacgcgatgtctga

SEQ ID NO: 93401 - DNA, 1284 bp, Enterobacter aerogenes
atgtgtgcttcacacctgctcaaccgctggcttcacggtgccagcaatagcggagaacaggagatggtccaggtcagtctggaacaaatccagccgttctctctcaatccccgcgtcacccgcaaccccggctatgatgcgctgaaagcgtcaattctcgcccgcgggctggataacccgccgatgttaacccgccgccccggtgatgaaaaatacatgctcgccagcggtgggaatacgcgcctcgccatcctcaatgaactgtggcaggagacgcaggatgagcgttaccaccgcgtctgctggccgttcagaccgtggccggaaacgctgtcaccgcagcagggcgatgtccagtgcctgatcggccatctggccgaaagcgacctgcataacggattgatgtttatcgaacgggcggaaggggtcctgcacctgcgcgatctttacctcgaggcaggcattgaatgcccgacgcagctggcgctggcggaacaactgacccgcgacggctatcccgtcagccagtcgcaaatcagccggatgttacagaccgtggactggctgctgccctgcatccctaacgcgctatacggcggccttacccgaaaggttatcgatcgcctgctggcactgcgcagcgcagcggaacaggtctgggcaaagctgatgccgctggaacgccagcccgaatttgccgacctgttcagcaccgccctcgccaccttcaacggcgagccggagggcgtggtgccgcaactggtgcaggatgaactgctcggtgagatgagctgtcgcagcggcatgagctggaatacgttgctggcggaactgaccgatggccagagcagacggcaggcgctgctggggcctccggccgaaaaagtcctctggccgccactgccggaaccggagaaaacaccactaccagagcctgagccaccgactgaacccgccgtgcccgatgagccaaagccctcaccgctggtgaatacggcacggtcgctgtgtgcctgctggggactggacgcctgtatccagccggacgacagcgctccggcgggtttcacactcgcgccctgccacgattttccccacccggcggcacagcgctgctatcaggtgctggcggccctgaatggcgacaccagcacgccgatgcctgccctagaattgttgttgtcgccggactacgacaacgctcagatccagcaactgatgcaacttatcagcctgtgccgccagcgacggctgcgggaggttcgccatgacgccctcagttaa

SEQ ID NO: 93402 - DNA, 558 bp, Enterobacter aerogenes
atgacgccctcagttaaccaggcagtgctcacccacatcgtccaggcgctgaaggagggacagatccgctactgcgaatcgctcggcttcagccctcaggagctgtgcgagctgacgcggctcaccgctgatgacatcctgtttctcagcaacagcgcggtgcagttcatcaccacccacattgaccacgaaatgcttggccggatgctggcgaggatggagcaggagcggctgtttcagcagcgcctggaggaagccctgtcgctcggcgcgtccattgaattcatcaaccactactttggcctttctacgccggaagtctgcgcccggcggcggctgattggcctgtttgtccgccaggggcgcaacaatgctccggatgagcaggtagagacgctggtgtggaacgagtggcagaaaacgggcgtgaaaaagctcgactcacccgaagcgctgaccgccatgatggcgatagcccgcgaacacgatctgtcgctgacggttatctggaacctgctgcgccagtggactcaggagaagctgctgcatgaagagtga

SEQ ID NO: 93403 - DNA, 873 bp, Enterobacter aerogenes
atgaagagtgacgatcggctgctgtttctcggcaacccgcagcagagcgtgccgaagcgtctgctgctggcgcgcaacctctccccgcgcgacaagttcacgtggcaactgctgcgcctgcacgcccgcgacgacggcagcggcgtctttccctcctacaacgaactgcagggctggctctcagaccagcctgagggtgagaaggcctcgcgtagtaccgtcagcaacgcgctgatgatgctgcggatcacccgctggctgagcctatgccagcggttgcgggacgagcaaagcggcaggatcaccggtaacctctacgccctgcatgatgcaccactgactcatgccgatgcctgtcggatggacagcgaatatctggcgctgctcaccgcctgctcccaccaccgcaaccggcgtatccgcaacatcgccatcgggctgctgctcaccctgcaacaacctgtggacagtggacgaacctgcactgagtctccattgaagaccgcccctggtcttaatcgaggactcagtaaaaaatgcccgagtcttcaattaagactcagtgatgtggcgggagctggcgggcagccggagccgcattgcgtacatactggtacagatttaaacaataaacatcaaaagcgtacgcaactgctgcactggcctgtggataatcccttcagcgccagcgaacgccgcgccgccgaacgcgcgatgcacaatctggatcctgctctcagccaacaggtgctggacgactgcctgtggcggatcgccgcccacgatatccatcgccccctcgcctatctgctggcaacgctggagaaggccagacggggcgagttcaatcagcttcggcgcaggcgcagatag

SEQ ID NO: 93404 - DNA, 612 bp, Enterobacter aerogenes
atgcctggcacaaccctgttcagcgatatccgcatcaccctgcacacccgcgtcgccgcccggctgtggcaggcgcatcccaccggaatgctgctctgtctggcgttactcaggcgtctgctgcgcgccgaagaggctgatgatccgtgggccgcccactggctgaagcaactgcgcatccgcctgaacctgatcgcgcacctgctgaagcaaaaaaatcgtcggctggaccaggccttcgccagcctgccgggcgctatccacaccacgcaggtcagtaacccgtccccgaccgaattcatcctgccgctggcgctgttctcaccgcccggttcacgcctgctgcaacagttgattgattatgatctgctggtccgccgcaccctgcttgcctggcatctcggccttatcacccaggcggagaagcgcgatttcattgccaccatcccacgcctgatgctccaggtgttcagcttcgtgaaccgctttcgcaccaccggcgtgacccgcgccgacgtgcgggcgaacagtccgctggcgcagacgatggcgcataagctcgggaatttgcccaaaaagatgcttgcggagatacagcgcgatgttcaatga

SEQ ID NO: 93405 - DNA, 426 bp, Enterobacter aerogenes
atgttcaatgacgatgatgatgaacgctccgcccgcaaaagctcgctaaagggccttttaaaggcctttaagggtaagggagagctgcgagcgctggtgcaggaattacagacgctgcgcgtgcaactgcaacaacttcagccaatgctgaaacaggcggtgtatgaattgccggggcgcaacgtaccactgatcctgtgcagcaacccggcgcgctccggaatcagctatctgcgctggcgcaatctggacaacaaccgttcggggagcgtggcgttgcaagaggccattcaacagcctgacgtgaccgatgaactgcgcgacgcgctgatggcccttgaatggcggcggcaggtgctgaatacgcagctttcagtggtgatgtttatgctgcgccggatacgcccgttaaccatgctggtttaa

SEQ ID NO: 93406 - DNA, 1827 bp, Enterobacter aerogenes
atgcaactttacctgtgcgaaaaaccctctcaggcgcgcgatatcgcccgcgttcttgacgcccgaaaccgcagcgacggctacctgcataacgccaccgtgaccatcacctggtgcttcggccatctgctgagcatggccgcgccggaagattacgatccggcgctgaaacactggcgggcagagcatctgccgtttattcccccggtatggcggctggtgatccgcccggaggtgcgcaagcagttccgtatcatcgagaagctgctgaaacaggcagatgcagtggtgattgccaccgacgccgaccgcgaaggcgaaaccatcgctcgtgaaattctggaacagtgccgctggcgcggtccggtccagcggctgtggctatcggcgctggatgaggccagtatccacaaggcgcttgctgccctgcgacccggcgacagcacgtttccgctgtaccaggccggactggcgcgcgcccgcgccgactggctcgtcggcatcaacatgacccgcgcctgcacgctaatgaaccggcggcacaagggcgtgctctccgtgggccgggtgcaaacgccgaccctgcgtctggtggtggagcgcgaccgggagatcgcccgctttacgccccgcccctggtggcgggtggatgcccgcttgcatgcggagggttgttcctttctggcacagtggcagccgggtagtgcgtactgcgacgatgaagggcgctgtatccgtgaatccgccgcccgtgaggccaccgcccgcctgcaacaggccggaaccgcgctggtaatggacgtgacaacccggcgggagaaaacgccgccaccgctggccttcactctcagcgccctgcaacaagtctgctcaaaacagtggggcatgggcgcacaggaggtactggatatcgcccagcgcctgtatgaaacccataaagccaccacctatccgcgcaccgactgcggctggctgccgctctcgatgcacgctgaagcgccgcaggtgctggcggcactggttgccagcgacacctcactccagcccctcgccacgcaactgaatctgcaacaacgctcacgactgtgggacgacagcaaaatcaccgcccaccacggcatcatcccgacccgtaaaacggtagatctgacgcagctaaacgacagtgagcgcaaggtctacggcctggttcgcaaccattttctggcgcagtttctgccggatcatgaagaagacaaaaccgttctgcgcctgaactgcgccggggaaacgctggctgcccgtggctctgtggtgattgtcagcggctggcggcaactgtttttgcgcgagatggcaacgcattcaccggaagaaacgcaatccatccccgccctgcaacaaggacaaacctgccaggtggaacaggtggacgttcgcgcccgtcagacccagccgccggagcactacacggaagggacgctgattgccgcgatgaaaaatgccgcccgttttgtcagcgatgagtacctgaagcagcggctgaaagagaacgcgggcatcggcaccgaagccacccgcgccgggattatccagacgctccttaagcgcggttatctgattaagcagcgccgctttctgctggcaacgaatacggccagcgcgctgattgatgccctgccggaagcactgaaggatccgggcaccactgcgctatgggagcagatgctggatgacatcgcgacgggaaaaatgggcctggaggcgttcctggtgcagcagcaagaaaccgttacagcgctcacggctcaaatagtcagaggccagaaatatgcctcatcaggttag

SEQ ID NO: 93407 - DNA, 468 bp, Enterobacter aerogenes
atgactctcagaacttttcctgtattacacgatctctccgattctctgtttgcggaccgttttaaccgtatcgatcgcctctttagccagctaaccggcagtacgccgttgccctccacgccttcttacaatatccggcggctgggcgataaccgctatgaactgacgctcagcgtaccgggctggaaagagagcgaactggaaattgaaaccgtcggcggtcaactgaacatcagcggtaaacgtgaagaggagaaaaccgaaaacggcgaagaagggtggatccatcggggtatcagccgcagcgacttccgggccagctatagtttgccggagcatgtgaaagtgaccggcgcttcgctggaaaacggcttgctggcgattgaattacaccaggatattccggaagaagagaaaccgcagcgcatcgccatcaacaacaacccggcgattgaacatcagccgtaa

SEQ ID NO: 93408 - DNA, 444 bp, Enterobacter aerogenes
atgaacgatacccattacttcaacctgtacaccagcggtctgggctacctcaaccggatccgggaagtgaccccgaaaaaaggcgaaccgttcctctgctgcgacattgccgcactgcggggcgaagccagcaacgcggagcacacctggttcgactgccgcgtcagcggcaaggaagcgcagaaactggtacgccgctgtatcgacgcctgcgagcagaagcgcaaggtgctgatccagttccgcctcggcgatctgtatgccgacacctttgtctacagcaaaggcgaccgtaaaggcgaaaccggcgtcagcctgaaggcccatctgctgcacatcgggctcatcaaaattgacggtgaagaggtttaccgggcagaacgcgaagctgaatcccagccaacgccagccgcaccgccagcagagcctgtagcgcagttctga

SEQ ID NO: 93409 - DNA, 381 bp, Enterobacter aerogenes
atgaataccgtattgaactcacgtgatgaagcccttaaccggggcaaactgattaaccttgatgacgaggcgctggacgctggcttgccgctggatctggccattacccttccggcccacaggcactgtcttgaagaccggaatgacaacgccatcagggagttgctgaaaggtgttgaaatggcagcggtagtggcctttatctcccaccaaccgccgcagcgcaccattcgtatcgattaccgctcggtgctgacgcaaaaaactaacggcagcacgcagcagcaaaccgtcagattgacgttacgcgttcatttttctgagcaaggcattcccatcgccgccacgctggggctgatgggggaaagattcccttactga

SEQ ID NO: 93410 - DNA, 660 bp, Enterobacter aerogenes
atgaaacgactgctaacagctctgctcctgtttattttcaacagcgtggccaccgcctcctctgccacgccagaagtcgtccgctacgaccgctatctactggtcagcacgtccccgcaacagccgccactcgaacagcttaccgccctgtccgttccgccagattttcacccgacggtaggggaagcgttgcaatacctgctgcgcgacagcggctgggctctgtgtcttgccgatgcgcgccgggcgcagctttatggcctcccgttaccgctgagccagtaccgtaccggcccgctgcgcctgaaggccgccctgcaactgctggcgggcccggcatggcggatgacaaccgacgaacaccgccgtgaagtctgttttgccagcgaccatatcctcccgcagacggtgacttaccgtcatcccgtgtccctccgcccttcggggccgttaacggccccgttttttctcgccgggaccgtacagcgcggtgatatccgcctggcggtgattgtgccgcccgaagccgtttacctccatcaggtggtgtggctgcgcaggggagaacagtggcatggctggcggctggagcggtttgatgagcgccgggcggtattccgtcacggcaaacgccagctgacgctgaagatgccggagtaa

SEQ ID NO: 93411 - DNA, 675 bp, Enterobacter aerogenes
atgaaacacctggttcttctgttactgttcaccgccagcgcgtgggcgcaaccgcttcaggtgcagaccagccagaatgcggactctgctctcaggccgctgaccacgcaacagcaggccaccgtctggggcgtcacgccggaggagtggcagcgctatctcacgctgaaacagcaggcgcgcggcgtctggtcgccggggctcgatccgctgaccacgctgggcgtcgaagccgacacagaccacgaacgtcagcgcttcgccgaactgctggtcaggcaggaatatcagcgactggagaaagaactcgccttccagcgtgcctatgacgcggcctggcaacgcctgtatccgggcctgacgccgctgaaaaccacctctgccagcacttcccgcgtttcgctgttcgtcaaagatgactgcccgccctgcgacagtctgctgcgtaccctgctggcgcaacagcgtccgctggatatctggctggtcaacagcgaaggcgatgataaccgggtgcgccgctgggcgatggcgcatggcatcgacgcaaaactggtgagtgaacacagcatcacgcttaaccacgacgcgggccgctggctgcttctgggccagagcaaaatcccggtggcgctggagcacaagggggagcaatggcgcgaggttctgccctga

SEQ ID NO: 93412 - DNA, 519 bp, Enterobacter aerogenes
atggcgcgaggttctgccctgatcctgctgttgccctgcctggcgctggcgcagccgctgccggaagcgtacctgcgcgccgcagagcatttccacgtgccgccggaactgctgtgggccgtcacacagaccgaaagcggagcgaacctgagcggcagacatcttccgtggccgtggacgctcaatatcaaaggcaccggctaccgctacgccagccgggagcaggcctgtcaggcgctgctggccgccatccgccgcaccagcccgaagcgcattgacgtggggctcgggcagatcaatatcggctggcaccgggcgtattttgcctctccctgcgacgccctgcatcccctgcagaacctgtcgctcaccgcgcaactgctgcgtcagcgctacgatgaacgccccggaagctggctcaatgccgccgcccgctatcaccgccccgcaggcggcgcgcccgctgcacgctaccgtaagctggtcagtcgccacctgcaacaggccgcaccgccatga

SEQ ID NO: 93413 - DNA, 2019 bp, Enterobacter aerogenes
atgagccgctacgcgctggaggcgctgcttcgcccgcccgtggagttttacagcaccgtcaccgccagctgtggcgcgttaatctgcctgacgcaggccccgctgctgatgctgacgccgtggcaggccctcctgatggcctgcgccctgatgctgctggccctgcgacgcggctggcagggatggcaaatcgtacgctaccagcgtaacctcctgcgcctgccgcgctatgcgctcaccagcaggaaaatcccggtcagccgccagcggctgtttctcggtaaaggctttcgctggctgcctatccacacccagcgtctgtacgactgcctgcaaccggaagccgcgcgctggctgcgcccgggatggtgttaccgtctcgcaagacacatcgaaaaacgcagcgagcatactctgcccgggcttgcccgcctgctcagcgccgatcgctggctgaacccggtgcgcccgctgccgcccgtcggcggcaatccgtggctgcatggggtggaactgaaagagtacgacgtcactctaccgctcagtgaacgccccggccacacgctggtgctcggcaccacccgcgtcggcaaaacccggctggcggaactgcttgccactcaggatatccgccgcggcgaggtggtgatcgttttcgatccaaaaggcgacgcggatctgctgaagcgtctgtggacagaagcgcagcgcgccggacgcggagaccgctttatcctgttccatctggcatacccggagatctccgcccgctacaacgccatcgggcgctttggccgcatttcagaagtggcgtcgcgcctcaccggacagctttccggcgaaggcaactcggcagccttccgcgagttcgcctggcgctttgtcaatatcatcgcccgcgctctggtggctctcggccagcgcccggactaccagctgatttcccgccacgtggtcaatatcgatgccctgtttatcgactatgcccgcatcgtgctgccgcgtcacaacgcgcgggcatgggaagtggtggtgcaactggcggaacagcttaatgaccggaatatgccacgccatatgctggggcgtgatcctcacgtggtggcgctggagcagtacctcagcacagagaaattctacgaaccgatcctcgacggcctgctctcggcggtgcgctatgacaaaacctatttcgacaagattgtcgcctcgctgctgccactgctggaaaagctgaccaccggtacgctcgccgccctgctcgctccggattatcacgatctggacgactcgcgtccgatcctcgattggcagcaggcgatccgccagaagtcggtggtctatgtcgggctggacgcgctctccgatgcggtagtcgctgccgccgtcggcaactcgatgtttgccgacctggtgagcgtcgccgggcatctctacaaatttggcctgaatgatggactgcccggcaacagcgaaaaaccgccgcctatcaatcttcactgcgatgagtttaacgaactgatgggcgacgagtttattccgctggtcaacaagggcggcggcgcgggcattcaggtcaccgcctacacccagacgctgagcgatattcaggcccgcatcggcagcgcgcccaaggcaggccaggtggtgggcaacttcaataacctgattatgctgcgggtacgtgaaaccaccaccgccgaactgttgacgaaacaattgccgcaggtggaagtgcgtagccgccaggtcagttccggcgtcaccgacacgccgggcggcatcaacagctttaccagcaacacccgtgaacaggtaatcacctgtaatgtgccgctactcgataccgccgcgctgatccagcttcccaaaggccaggcttttgccctgctcgaaggcgggcagttgtggaaaattcgtctgccactgcccgtggcggataaacaatgcccgctgccggagtctgtcgcgcaactggcggcgtggatgcagatgcgccagcaggggcaggtggaatga

SEQ ID NO: 93414 - DNA, 633 bp, Enterobacter aerogenes
atgagtgagcagcgaacgcctccatcacgcccaccacagggaccaattggctggctgctgtcgctgaccgggcggctcatcgggctggttattggcgcgctggtactacgggtagtgctggaactggcggggctgtatttctggtggccgcaggagggaagcaggcacgtttttctggtgatgaggcgggagctggcggaactggttattgctttacagtcgcacccgctggggaatgaaatgctggtgttgctggaaaaaggggcaactcacgggattatggtaaacaaacttctgcagaaaccgctcaccgccctggcctatacgctggtgagttttatgcagcgcttggtatggcttgccaccatactccccctactctgcctgtgtacggtaaccgggcttacggagggactggtgcagcgtgatttacgacggtttggttccgggctggaatctgtttttcttcaccgctacgtcatcaggtccggcagttcagtcgccaccatgctttgggtgttttatctggcacacccgctgtttgtacccgcgatgctggttttacagcccgccgccttatggcttgggataacggtatggatggcggcagggagctttaagcgctggttttaa

SEQ ID NO: 93415 - DNA, 672 bp, Enterobacter aerogenes
atgaataaatctgtaattgatgaatatttggtgagtttatatttccgccttaacggatatataacaaccagtctaatcattcactcatccgaatggggacaaacttcgactgatattgatttaattgctataagacatccataccataaacaggatgaacgagaaatagaaccttctgcttttatgcagcttccacaggacaaaagtaataaaattgatgttatttattgtgaaataaaaaatacacctgaaaccttacgcttcaatgcgcctataaagagtaaccccaataacattataaagtcattacattggctcggtattatccctcccgatgagatagaatctttatctcaagagatgatagctatgtttagagatgatgcgcgtatttcattagcaagcaccggcattacttgtgacagatataattttagagcattactatgctgcccaaatttaaatgaagtatgtgagcagtgggctctaaattctaatgagatattttcttttatttcaaagtgcctcaaccctgtagaacgaagagaatcatgctcaacgcgctataactttaatcaatggggatatatcacatcaaacatagtaagatacttcaaggaaaataattcccctaatattggtgatttatataaaacatttggattggaataa

SEQ ID NO: 93416 - DNA, 309 bp, Enterobacter aerogenes
atgcgcaatacatctttatttctgttaccgattttactcataggatcgcaggcctacgcctccccggaatccgcccaactcgccctcgcgctgaaacaactcgacggcgtgaaaacctcgctggagcgtgcccaaaccagctccagcaccgatccacaatcgcgctacttcttcgactacttacaggcgcagcaggacatctctgccgttgaacaaggcatccaccgctaccttagcccagcaagagcacagccacgcgccatccagcccctgagcaccaactaccagcgggagaaccctgatgactga

SEQ ID NO: 93417 - DNA, 234 bp, Enterobacter aerogenes
atgactgactcgcaaatcgccgcctttcaggccgccagcctgagcaaaccggagaccgtcagcctgctggtgctcggcctgtttaccagcgtcctgctgctgtggtgtgcctggacgctaatggtcgcctggcagggcgtctgccgccagcgcctgagctggcagagttttggcgcggtggcggcccgttcactgttactggtgctggtcagtttctggctggtcctgaactga

SEQ ID NO: 93418 - DNA, 318 bp, Enterobacter aerogenes
atgcgctggctgttgctgctgttacttactacgtttgatgcacttgccgatctgccgacgatggaagatccctcgcgcggtcagggtcagggcattatggagacgctgcaaaactacggttttgacatcgtggtgctgctggcgctggccatctgcgccgtcggttttctggtggtggcgaacaattgtattgccacctattcggagatccagagtgggcgtaaacagtggaaagatttgggctcgatggcaggcgtcggcagcattcttctggtggtcatcatctggctgctcaaccaggcttcggacgtcctgtaa

SEQ ID NO: 93419 - DNA, 354 bp, Enterobacter aerogenes
atggcgaccatcccctttctccccgaccgcctcaaccgcgagcccgtggtctggcgaggcctgaccaccagcgaactgtttctggcgctggctctcggcctgggcggcggctgtgcgttcggcattctgctggccctgataacccactactggccgttaatccccggttcggcgctggcgggcgcggcgttactgattcagggcggtgggcggattctggcccgcgccaaacgcggcaagcccgatagctggctgccacaggcgatcctctcctggctggagcgccatcatcttcggggttcacacctggtccagcacagcaccgtgtgggtggtgcgcaggagtccgcgatga

SEQ ID NO: 93420 - DNA, 660 bp, Enterobacter aerogenes
atgagccgctttcgccatgcgctggccgagcgcgataaccatatcctgacgcttcgggccgtgattgtcctgctgtgcctgtgtctggcgggcgttggctacggctggtacagcgcgccgcaaaagctcaccctctggttcccgccggacctgcgcagcggcagcacccgcccgtggtgggaagtgcctcccgccagcgtctacgccttcaccttttatattttccagcaactgaaccgctggccggacaacggcgaggaggactattcccgcaacctccgctcgctgcgcgcctacctgacgcccgcctgttacacccggctggagcacgatttccaggtgcggcgcaacggcggtgaactgcgcgaacgcacacgcggcgtgtatgagcttcccggccacggctacagcagccaggtgcatgacggcgataaacgccccttcccccgcgtcgagaccttaagccgggatgcctggcgggtgacacttgatgtagcggttgaggagtattaccagaacgagccggtgaaaaaagcactggtgcgctacccgttgcaggtggtgcgttacgccattgatgcggagaaaaatccgtggggactggcgatcgactgtaccgatgccgcgccgcagcgtctggtggcggaggagaaaccatga

SEQ ID NO: 93421 - DNA, 768 bp, Enterobacter aerogenes
atgaagccagtcctctttactttattgttcagtttccccgccttcgccacggaagtggtgcagtgggaaaacatcccgctgcccgtcacgcttcatgtcgggcaggagcgaattgtcgacgtgggtaaaccggtgcgcatcggctatcccgccacgctggaaggcaaagtgcgtctgcaaagcgcaggcggcaaggtcttcctgctggcgaacacggcgttcccggccacccgcatccagttacgtgataccggcaacggtgagctgatcctgctggatattcatgccacccagggcacttcgacacttgaaccagtgcaaattagctatgcgccacaaacgcctgccacagccaaagcatccgttccaataacagcatcaaccgagcccctgcccgtcctgctggtgcgctatgccgcgcagagcctgtatgcgccgctgcgtaccgtcgaagccctgcccggcgtcacgccttcccccgtccggctggcgaaacgcatcaccaccttactgcctgagcaacctgttaccgccaccccgctggcgtcatggcaggtcaacgccaccaccgtcaccgccatccgcctgcaaaatcaaagcggacagcgcatcacgctcgatccgcgcgagcttcaggggcagttcaccgccgccgcgttccagcatgactggctcgggccgcgtggtctggcagaagataccactgtggtgtacctggtgacggaaggcctggtttcccgcgccctgctgccggaaccgaaaccatga

SEQ ID NO: 93422 - DNA, 1296 bp, Enterobacter aerogenes
atgatgccgcgccagagcctcctgctgaagatcctgctgcccgtgattgtgctggtaacggtatggctgctgctgcgcccggccagcaaaaacatcactgagaaatccccgtcccgcagcgtggcaacattaacgccgcaggaactacgcgatctgggtatcgacggcgacacgcctgccgataccgtcgccacgctggtcggccagatgaagcagtaccgccgggagcttcagactatccagagcgataatgaaagccagcaggcgcgcgagaagcggctgaaagcgcagcaggcgacgctagtatcggagttgcgcggcgatatgcgcaggcagcaggaccagatgcgcgacgagctactgaaaagccagcgggggctgctggataagctcgaccgcctgatggagaaacgcccggacgatatcccgcccggtctgggactgacgcccggcgaactgcccgccgacgtacagccagatatccgctggctggagccgctggatgcgcccccgcccgtggatgaaaagctgctgcgcgtccctctgaaagcggcggacaagccgccaccgaaacctgatgtgaaggtctacaccctgccgcagaacgccacgctgaccggatcggtggcgatgacggcgctgattggccgcgtaccgcttaacggcaccgtcagcgatccctacctgttcaagctgctgattggcgaggacaatctcaccgccaacggcatcgaactgccggacgtggcgggtgcagtggtctccggtatcgcctcgggcgactggacgctctcctgcgtgcgcgggcaaatcacctccatgacgtttgtgtttcacgacggcaccatccgcaccgtcccgcagggcggcaaatccggcaacaaacagcaggagatcggctggctctcggataaccaggggctgccgtgtattcccggcgagcgcaaaagcaatgcgaaggagtacctgacctcgcagttcctgctggcgggatccggcgcggcggcgcaggccttcgccaatggcgaaagcaccaccgtggtggaggacggcagtatcaccagcgcggtgacaggcaacaacggtcagtacgtgctcggccaggccatcggcggcggattaaaagaaaccgccgactggatgaaacagcactacggccagatgttcgacgccgtgtacgtgccgccgggacacagggtggcggtgcatctcaccgaacagttggccatcgactatgaaccggaaggccgccaggtgaaataccagcaggccagcacgccgggaggtctggaatga

SEQ ID NO: 93423 - DNA, 360 bp, Enterobacter aerogenes
atgaaatttaccatccttatacttctgttgttactggccggatgcagcacctcgcaggaggaaatgatgccggtcgaccccgacgccagtatgctctcactgtggcagcagcaaagcggcggcagtgccgctctgcttgatgcgcgcgcccagttgcgccgtccgccagatggttcagtggcgcaacctgaggcaaacaccattcgcagccagtttccgcgcctgccgaacccggatatggttctctacgttttcccgcacctcaatggcaacacgccggtgcccggctacagcaccgtcttccccttctacacccgcccgcagtatgcgctgccgggcgaacgcctgacgccgccatga

SEQ ID NO: 93424 - DNA, 2634 bp, Enterobacter aerogenes
atgagtgaacggagtggcctgaccgaacaggcgctgaatgccagctaccgcaagggcccgtcgtttgtcgactggctaccgtgggtggagtttttgcctgagtcgcagacgttgctgctggaggatggccactctgtaggtgccgtatttgagctaaatcccgttggtaccgaaggccgttcgacggcgtttctggaacagatgcgcgataccgtcaccgacgccttgcaagatgcctttgacgagcatgagcgcgccccgtgggtggtacagtttttctgtcaggatgaggacgacagcgaggcatggctggagacgctggcgacttacgccacgccggaaattcgcgattctgcctttacccgcgagtggctcacacagatggcaaaccatatggtgaatctcatccgcgatgaggggttgtttctcgataacaccgtgacccgtacccgctggcgggcgacgtggcggcgcacgcggatggtgatataccgctggcttcctagtttctcgccggacgaaccgtccccggaagagacgctgaataatatctgcgagcgtctcaccgccgggctaaaagcggcgggcatcagcgcagtccgtcagaatgagcaggccattcaccgctggctggtgcgctggtttaatcccgcgccgcccgttgaagataaaaaagccttctggcgacaactggatttaccggaagctgaatccctgcccgtcatcaccgatttcgccgaacgactgctgacgagcgaaccccgctcggatgcggagaacggcgtctggtggctggataaccgtccgcataaagtggtggtggtcgatcggctgcgcaaagcgccgccacccggcctgctgaccggagaaatcgcacgcggcgacgggatcaacgccctgttcgacctgctgcccgcaggcaccatcatgaacctgacgatggtggtgtatccgcaggacaaactggagcagcatatcagccatttatcccagcgagcgattggcgacaacaccgattcggaatacacccgccgcgactgccacgaggtgcgcagctatctcaaggacggccataagctctaccgcagcacgctggcgttttacctgcatgcacccgacaccgataccctgtttcgccagcagcgccagttgcacagcctattgctcaatgccggactggtaccagtgcaggagttacacgaagtcgctccgctcagccactggctgcgctggctgccgatgtacttcgatcccctgcacgatccgcgcgggctgtatacccggctcaacttcgtccagcatatcgccgggctgctgccggtttacggacgggaaaccggcaccgggcatccggggatttgctacttcaatcgtggtggcgcgccgctgtgcttcgatccgctgaataagctggaccgcgcgcagaacggccacctgctgctactcggcccgaccggggcgggcaaatccgccacgctgaacgcgaaaatcgcgcaactgatggcgctgcatcgcccgcgcctatttatcatcgaagccggaaactcgtttggcctgatggccgactacgccgccgcccacggtctgacggtgaacaaaatcagccttcgtcccggttccggcgttaacctgcccctgtttgccgatgcgtggcgactggtggagcaggcggtcaccgacgccgaaccgccggaagacgaagagagcgacggcgatgaccagcgcgatgtgctcggtgaaatggaaatcaccgcccggctgatgatcaccggtggcgaagcaaaagaggatgcacgccttacccgaccggatcgggcgatgatccgccaggccattatcgctgccgcgcatacctgctacgaggacaaacgccagacgctgacccaagacattcgcgacgcactgtttgctctttcccgtgatgccagcctgccagaatctcgccgccagcgggcgtatgagatggcggaatccatcaacctgttctgcgccgggtttgaaggcgaactgtttaaccgcgagggacagatgtggccggaggcggatatcaccttggtggatctcgctacctttgcacgcgaaggctacgaagcacagcttgccatcagctatatctcactaattaaccatatcaacaacctcggcgagcgcgaccagcaccttgcccgccccatcgttaatatcaccgatgaagcacatatcattaccgttaacccgctgctggcgcggtttctgaccaagggttcaaagatgtggcgcaagctcggcatctggctgtggctcgccacccagaacctggcggattttcccgatgaggcaaagaaactgctcaatatgatcgagtggtgggaactgctggtaatgccgccggaggagatcgatcaggtttgccggtttaaggcactgactgatgagcagcggcaactgctgcgctcggcggtgaaatcgccggggcagtataccgagggggtggtgctgtcaccgcgcgttgaagcgctatttcgggtggtgccgccagcgctctatctggcgctggcgatgaccgagaagcatgagaaggccgagcggatgcggattatgaaggagacgggatgtagtgaggtggaggcagcaaaaataacttcaaaaaaatga

SEQ ID NO: 93425 - DNA, 666 bp, Enterobacter aerogenes
atgactgagcaaatcaagaaaatatactgtaataattgtgcctgtgaaactaggcattcaatccttttctataaggaaaaaagagatgtagaggaagtcgaaaatcaagtaatttggtatgaagataataattattatctctctgaatgtttgggttgtgagagcataactttacatattgaatccacttatagtggcctgaatgatgaagttgtagtcacgcaattcccaccaaaaataataagaaaagaacccaagtggctataccgcattgatggtgatggaattttttttgaggactccgataaagttgaagtattcagggagatttacattgcattaaaaaataacatgcctcgattagctattatgggcgtcagagcattactagaaatcgtaatgattgaaagcattggcgatcaaggttcatttgtgaagaatctgttaaaattaaaagatgatggctatatatccaactatcagtttgaagccataaataaagtcatagaagccgggcatgcaagcatgcacagaagatacaaagcctcttatgaggaaatttcaagtataatggatataacagagaatattattgaatctatttatattaacaagttaaacataacaaaacttaatatcccccctagagtcaaaaaagacaaatag

SEQ ID NO: 93426 - DNA, 672 bp, Enterobacter aerogenes
atgcaaaagggaagttctaatttaaaagatactatgagagtttattatctcactagtgcggaatacgcgattagtaatcttgctctcaaaagaattaaggtttcgagatatcaagatcttaatgatccatttgaattgcttgctgctgacttaagcgataaaaccgttagaaggcaattacgaaaaattaagaaaaaaattgcggacgaacaaggcattatttgttttagtacaacttggaataatcctcttctatggggacattatgctgataagcatagaggaatagcactcggctttgatattccaaaatcgatgctgcaaaaggtagagtatgaaaaagacttgtccaagataacactagagaagtgttctgatgaaagttatattaaagaattgtcgttgacaaaatttgagcattggagttatgaagatgaatatcggctgcatattaacctaaatcttgaaaatgaagattcaggattgtattttaaacatttctctaatgaaattgatttgaaagaagttattcttggtgttaagtgtactgtaccgatatcatctatgcgtaaatttttcgaagaaaagaacgaggaagtgaaagttattaaatcgagaatcgcatataaagattttaaaatagttgagaataggcttgcaacaagaaaataa

SEQ ID NO: 93427 - DNA, 321 bp, Enterobacter aerogenes
atgaatacaagtaaccattacagcgatattttttgccgtcgcctgaagcaggctcgactggcaagtgggctttcacaaaaacgtctggggatcgcggcaggaattgatgagtttgtcgccagtacgcgtattaataggtatgaaaaaggtgtgcatgaaccgggaacggagattgtgcagaaattggctgaggttctgcgagtgccgctggcttacttttatgctgaagatgatgatttggcagaattgatgttggttttcctgcaaatgaataagcatgagcgagaggatatattgaaatatgcaaaagggaagttctaa

SEQ ID NO: 93428 - DNA, 180 bp, Enterobacter aerogenes
atggaaaccgctgcacggatagctgatgtgctgaatgttcccctaccatggttgttcacttcggatgagaatcttgctgaactgattctcaacttcgctgccctctctcctgatgcgcaactctatcttctggaagcatctcgccagatgatgaacatcccccctagagatgacacttaa

SEQ ID NO: 93429 - DNA, 276 bp, Enterobacter aerogenes
atggctaaaaaagactggcaccccgccgacatcgttgctgccttacacaagcgcggtaccagtctggcgaaactgtcgcgggaagcgggactggcctcatcaacgctgtcgaataccctgacgcgcccgtggccgaaaggcgagtggctgattgccatcgcgctcgacgtgcatccgtctgaaatctggcccggccgttacctcaatacgggaaataaacgtgaaccccgaaaaccgctttaccccatgacaacaacagaaaactccgggacataa

SEQ ID NO: 93430 - DNA, 630 bp, Enterobacter aerogenes
atgaactggcaatttgtctcgttttttggcgatagtaccgtgttgcttcctagcgcagtggtgctgttcgcggtgctggtgctgcgtaaaacatcccggactctggcctggcaatgggcgctgctctttgggattacggggactgtcgtgtgcatttcaaaactggcctttatgggctggggaattggcatacgggaaatcgattttaccggtttcagcggacataccgcactctcaaccgccttttggccaatactcttatggctgttaacttctcgtgcttcatcatccctgcgctggggggccgtgcttctgggctttattctggcgggtattgtgggttattcccgattgatgattcatgcacattcggtatctgaagtggtgagtggatttattctgggggcttgtggaagtttgacttttctgctgttgcaatggcgtacgtcggcttttcgttctgcgcagatttcatggatgggggcgttgagcgtggtaattatcccactcatattattaaacactggggttaaagcaccgacgcagtcgttgttaggcgaggttgcaaccatgatcggaccatttgagaagccgtttaccagagccgatctacataagcatatatattaa

SEQ ID NO: 93431 - DNA, 2166 bp, Enterobacter aerogenes
atgacatcggtaattgataaaaaagtaacaccacaagaaaataatgagattgattttggacgtttgttcggtgaattaattgaccatcgcaaactcattatttctataaccactggctttacagttatagcagttttatatgctctgtttgccaccccaatttatgaagctaatgcattaatacaggttgaacaaaagcagggtaacgcattaatagatagcctcagccaaatgttgccggatagtcaacctcaatctgcgccagaaatagcattactgcagtcacgtatgattctaggaaagactgttgatgatcttaatcttcaggctcttgttgaacagaaacattttccactattaggaaagggggttgctagattattaggtgagaaagaaggtaatctggagattaatcgcctttatttgccgaaagatgctgggggaaaagtacctgaaattttggtaacagtaaaagatgataaacattacactgtcgattttgacggtatcgttttacaggggaccgttggtgtaccactggatgagaaaggtattgctctcgatataaaatcgattgatgcaaaacctggaacgcaatttgaggttaaatattattctcgactgaaagcaatcacgaatctgcaggagtcatttagcgctttagatcagggcaaagatacgggaatgcttaacttaactttgaccggtgaagaccctgatttcatttcacgagtattaaacagtatcagtcaaaattatctggctcaaaacgttgcgcgtcaagccgcgcaggatgctaaaagcctggagttccttaataatcaattacccttggtacgtggagatttagattcagctgaaaacaagttgaatcaatatcgacaacaaaaagactctgttgaccttaccatggaggcaaaatcagttctggatcagattgttaacgttgataatcaattgaacgaattaacatttcgtgaagcagaaatttctcaactttatacaaaagaacatcctacttacaaagcactgatggaaaaaaggaaaacacttcaagatgaaaaaaataagctaaataaacgtgtcagtggaatgccctcgactcaacaagaagtgttgcgccttagtagggatgttgaatctggtcgggctgtatatatgcaattactcaaccgtcagcaagagttgaatattgctaaatcaagcgcaattggtaacgtcagaatcattgatgatgctgtaaccgatccgaaaccagttaaacctaaaaaaataattgtaatattagctggcattgtacttggttttatcgtgtcaatagctatggtctttgtacaagtattcctgcgtcgtggtattgaatctccagaacagttagaggagctgggagtaagcgtgtatgcgagcgttccagtatctgaatggttaactaaacattctgcgaagaacaatatacgaaacaaaaatcaatcggatagactgctggctgtagaaaaccctgcagaccttgcggtagaggcaattaggagtcttcggacgagcttacattttgcgatgatggaagccgaaaataatatactgatgatttccggagcaagcccaaatgctggtaagacattcataagtactaacttggctgcgatcattgctctgactgggaagaaagttctctttatagatgctgacctcagaaaaggttatgtgcataagatgctcggccataaacagacaaaaggattatcagatatactttctggccaaagttctgtagaaagtacaatagagaaggttaccagtggcgaatttgactatattggacgtggtcaagttccaccaaatcctgccgaactgctaatgcattcaagattctcagatttgcttaagtgggcttcatctaattatgacttggtcgttatagatactcctcctattttagcagtcaccgatgctgcaattattggtcgttatgcagggacaacattactagtagcaagatttgaatcaaatactgtcaaagaaattgcagttagtgtaagacgttttgagcaaagtggcattgatgttaagggtgctattttgaacggagtcgttaaaaaagcaagtagctattatggctatggctatagttattacggttattcgtattcagataaagaaaaaagttaa

SEQ ID NO: 93432 - DNA, 681 bp, Enterobacter aerogenes
atgacgatgagtgttggattaattacagacgagccaggacgtttttacaccttccaatcaacattgccagccggtgaatactttgaatttcgcccccgcaacccaccactgaactcaaaacccatcgttgatgacgaaagcgggatgtgtattggttactccgtcgctcaggctcccgggttatggcagatttatgatgccgacggtatgtttgtcaggctggaagaggcgccattagaagcccccctgattgatccaacagacctcgctttaattgcttttggcgtatttcgtctatttcgtgcgggtaaagcattactggagagtggtgttaaaaccgccgtaactgtgagacttagtgaggctacaatcagtctcttgcgtggccggttgaaaatgggcctatcagctcacgcgctcagaatgagtgagtcatcggcaaaacatatgctaaaccccggccgctatgtgcctttacagatccaggaaaaggccattcgctatggcgcgcgaacgccggatccactgaaaaaaccaggccttttccggtatgaagcgcgtatgtataaacttgttgagaacaagcaaaataaaggctcatatatttataagtcataccgtcttgaggttttagtcagggaagctgactggactatcatgcattttcagtacatgccgtga

SEQ ID NO: 93433 - DNA, 429 bp, Enterobacter aerogenes
atgatagatatcatcagcggtgacaggcatctgaaattaacgccttatgaaagagtgactgaacccgagataccatcctatagccgtattatggtatgggttgagttctcaattcctgccttaaaaaccgagtttgcagcagagttttttgtcggtcagttagagcaattcaggaatgatacacaaaatttccatcaggccttaaagaatgggggggaatctaaggatattaacttaacctcggcattcgagcaggttgtacttaagtttcaccaggcgcattttgccggggctgttggcgtcagcatggaactaaagcctgaaaaccatgctgaaagtattacgcttgagggctccctcgatattgatgaaagttattttcccgacctgatctcaggtctcgatgacatcatttcatggcaaaactga

SEQ ID NO: 93434 - DNA, 141 bp, Enterobacter aerogenes
atgagcaagcgcaagccacgtaaagcagtcgccatgaccgccagcgccccgcaaaaaatggaggagtttaccatcggcgagccggtgccgttaacaacgggaaaatcgcgactcaatggcataaaaaaccgacattcttag

SEQ ID NO: 93435 - DNA, 1248 bp, Enterobacter aerogenes
atgcctaagcaactgaaacccttaacaaatgtggagatcgctggcgcgaagccccgtagcacagattatgagctacgggacggtgaaggcctgtacttgctggttaagacttcagggaggaaggcctggcatttcgagtattatcatcccgtcaccaaaaagcgcaccaaaaccagccttggcccttacccggtcgttacactggccatggctcgcgaaactcgcacgaaatacagacgactgctctggcagggcatcgatccccgtcaacacttagcaggaatagccgaagaaaaacgcatccagaatgaatgtacgctggaaaaagttgcggaacagtggctcaaagagaagaaacggaccagcgatcttagcgaagatcacgccaaagatgtctggcgctcgctggagatgcacgtcttcccctctctgggtaacacacccgttactgagatccgcccgaagatgctcaaggaacacctcacaccgctggaagaacagggcatcctcgaaacgctgcggcgagttatctcacgactcaatgaaatcttccgcttcgccatctccgaagagctcatcgagttcaatccggctgacaacctggtcgcccgcttcaagaaaccgaaaaagcagaacatgcccgcccttcaccccagcgaactgggcaggttaatgctggcgctacagaacgcgtctatccgcaaggaaacccgctgccttatcgaatgggagctactgacctgggttcgccccggcgaagccgttagcgcccgctggtgcgacatcgatatgaaaaaagcggaatggcgtatccctgacacctttatgaagatgaaccgttcgcacacggtgccgctcagcaaacaggcgctgcgcgttcttcaggttatggaacctgtcagccgccatcgcccgtgggttttccccagcatccgcaaaccactggaacatatgcaccagcaaaccgcgaacgccgcacttatccgaatggggtttggcggcgagctggtcgcccacggcatgcgcagcatcgccagaacggcgggcgcaggtcattttccccgtgaagttctggaatctgcactggcacaccagaaagaagacgagatcgaagcggcctacaatcgcagcgactatctggaacaaaggcgaccgctcatgcagtggtggggaaactacgttgatgccgccagacggcaggcgctgctcggtgcagaagaaccgctgcagatcgtggaaggagaataa

SEQ ID NO: 93436 - DNA, 1494 bp, Enterobacter aerogenes
atgtgcgggagcggcgaaaagaaaacgtaccgcaaagatacttattcactttgctatggcaacgactcaatgggtacaacaacaattacgccgaaagcaggcgctttttccgccccggcattattggtggctggcgctttctttatggagtttctcgatggcacggtcatcgctaccgccctgcctgatatggcgaaggattttggcgtagcggcggtcgcgctcaatatcggcatcagcgcctacctgatcaccctcgcggtgctgatccccgccagcggctggattgccgaccgcttcggcgcgcgaaaagtgtttacgctggcactagccatttttaccctcgcctccgttttctgcggtttatcgcgcaacatcgaaagctttgtgacaatgcgcattctacagggtatcggcggcgcgctaatggtccccgtcgggcgactggcggtgttgcgcgccacgcccaaagatcagctcatcaaggcaatagccacgctgacctggccggcattggtcgcaccgataatcggcccgccgctcgggggctttattaccagttacgccagctggcactggatcttttttataaacgtgccgcttgggctactggcgatggcgctctcgctacgcatcattcccaacatccgtgaagaagaacgccgccccttcgacctccccggttttgtggcgacgtcattggcaatgataagtctggtggcagcgatggaacggctcggcgaccagcagccacaaagttggcaaacgccggcgctcctggcgacgggtatgggatgtatggcttttgcgctacgtcatttccgccgcgccgcctggccaatggtacggttggacgctctgcaggttccgactttccggataaccatgtacggcggttcactgtttcgcgcctcgataagcgcagtcccgtttctgcttccgctattattccaggtagggttcggtatggatgcttttcattccgggctactggtgctggccgttttcgtcggcaatctcactatcaagcccgcaaccacgccgctcatccgctggttgggttttcgccgcttattgctgattaacggtgcgctgaatgtcgcctcgctacttgcctacgcgctgttaacgccgcaaacgccagtatggctgataatgttgatcctctatcttggcggggtgttccgttccatccaatttaccggcgtcagtacgctcgcttttgccgacgttccttccgctcagatgagttatgccaatacgctgttcagcaccgcttcacagctggcggttgggctaggtatcactctcggcgccatcggcatccgcatcggtgaacagttgagcgagtggtttaacctgacgactctaccgggaattgatttccgtatggcgtttgtctttattgcgctgatttgtttggtagggatggttgatacgttgcaccttacgcgagatgctggcagcacggtatccagcaaagaaaaaccatag

SEQ ID NO: 93437 - DNA, 150 bp, Enterobacter aerogenes
atgtccgacaccgcagactccacgctgaatgccctgaaggcgcttattgcggccttccagaccggtgccactccggtcacggttaaaacctccactgtggacgcatctggaaaaccggtattaatgtctgtagcggccaattttatttga

SEQ ID NO: 93438 - DNA, 570 bp, Enterobacter aerogenes
atgataaagcatatccgtattttgcccggcggactgaaggtgctggccgccgcttttctctgcctgctgacggcctgtcgcgaccacagtcgcgacggcatgagcggcgctgatataaacgtcttaaaccatggtccggacgccattgtttcgatgcaggtgaacggctacggcgggccaggcgctaactcctacggcggcggcggcggcttctgctgtgtgatggtgccagatgtctggcgcccgggtttgacggcaaaaatcacctggacctccgatcctaacgcatggatagacccgaaacatatcccagacgatcatgcgagtcattatcagcgtcatggaccgatcaccgtccccattgaacgctgggagaagggacaggcctgtggctttgaagtgcatattttcccgtgcgacaaggtaagaattgttcgttcttgtcacgatcgctcatctccggaatatccgatacatcgtgcgcccgatgaggatgaaaaggcgaaaaaaatattattcgaccatgttaaggagaatatcgtatgtccgacaccgcagactccacgctga

SEQ ID NO: 93439 - DNA, 225 bp, Enterobacter aerogenes
atgaacaacgccttcccaggtgagcgactcaatacccgtattcattcacaattgtcactgcatatcgaaattgaaccgagggccgtcgagttgacagttaaacttctggccgttagtcgtttcgataatattaaagcccacccaatattcgttcaagaaaaaataaataccaataacaataattcaagtttttctctttcggagcgccgtttgcccgtgagttag

SEQ ID NO: 93440 - DNA, 990 bp, Enterobacter aerogenes
atgcatattacatacgatcttccagttgctattgaagatatcctcgaagcgaaaaaaagattggcaggtaaaatatataaaacggggatgccgcgttcgaattatttcagcgaacgatgcaaaggcgaaatcttccttaagtttgaaaatatgcagcgcaccggttcttttaaaattcgcggcgcgtttaataaactcagttcgctgactgatgcggaaaagcgcaaaggcgtggtggcgtgttccgccggtaaccatgcgcagggcgtttcgctctcctgcgctatgctcggcatcgacggtaaagtggtgatgccgaaaggcgcgccaaaatcaaaagtggccgccacctgcgactattcggcggaagtggtgctacatggcgataattttaacgacaccatcgccaaagtcagcgaaattgttgaaatggaagggcggatatttattccaccatacgacgatccgaaagtgatagccggccaggggactattggtctggaaatcatggaggatttatatgatgtcgataacgttattgtaccgattggcggcggcggtttaattgccggtatcgcggtggcgattaaatcgatcaacccgaccattcggattattggcgtacagtctgaaaacgttcacggcatggcggcctcgtattacgccggagaaatcaccaatcatcgcaataatgccaccctggccgacggttgcgacgtttctcgcccgggaaatattacttatcagattgttcgtgaattagttgacgatattgtgctggtcagcgaagacgaaattcgcaacagcatggtcgcacttattcaacgcaataaagtgattaccgaaggggccggggcgttagcctgtgccgcattattaagcggtaagctggacagctatattcagaaccgaaaaaccgtcagcattatttccggcggcaatatcgacctgtctcgcgtatcgcaaattactggtttagttgacgcttaa

SEQ ID NO: 93441 - DNA, 1689 bp, Enterobacter aerogenes
atggcaagttcgggcaccacatcaaacacaatgcgctttaccggcgcgcagctggttgttcatttactggaacgccagggtatcactatggtcagcggcattccgggcggctccatcctgcccatctacgatgccttgagccaaagcacgcagatccgccacatcctggcgcgccacgagcagggggcgggttttatcgctcaggggatggcgcgtaccgaaggtaaacccgcggtctgcatggcctgtagcggccctggcgccaccaacctgattaccgccatcgccgatgcccgcctcgattctattccgctggtctgcatcaccggccaggttccggcctcaatgatcggcaccgatgccttccaggaagtcgatacctacggcatttctatccccatcaccaagcataactacctggtgcgcgacatcgccgagctgccgcaggtgatgagcgacgccttccgtattgcccagtccgggcgaccgggcccggtgtggatagatattcctaaggatgtgcagtcggcgacgattgaactggaaacgctgccggagccaggcgagcgcgccccggcaccggcattcgcgcctgaaagcgtgcgtgaagcggcggcaatgatcaacgcggcgaaacgcccggtactgtatctgggcggcggcgtgattaacgcgccgcagccgattcgggacctggcggaaaaagccaacctgccgaccaccatgaccttaatggcgctgggtatgctgccgaaggcacatccgttgtcgctgggcatgctggggatgcacggcgcgcgcagcactaactttattctgcaagaggctgatttactgattgttttaggtgcgcgttttgatgaccgggcgattggcaagaccgagcagttctgcccgaacgcgaagattattcacgtcgatatcgaccgctcggagctgggcaaaattaagcaaccgcacgtagcgattcagggcgatgtggcggaggtcttagcccagcttattccgcagattgaagcgcagccgcgtgatgagtggcgccagctggtggttgatttacaaagagaattcccctgcaccatcccgcaggaaagcgatccgctctcccattacggcctgattaacgccgtggccgcctgcgttgacgatgaggcgatcatcaccaccgacgttggtcagcatcagatgtggacggcgcaggcctatccgctcaaccgtccgcgccagtggctgacttccggcggtctcggtaccatgggcttcggcctgccggcggccatcggcgcggcgctggccaatccacagcgtaaggttatttgcttttctggcgacggcagcctgatgatgaatattcaggagatggccaccgctgccgaaaatcagctggatgtaaaaatcatcctgatgaacaacgaagcgctggggctggtgcatcagcagcagagcctgttctatcagcagggcgtcttcgccgcgacctatccggggatgattaactttatgcagatcgctgccggttttggtctgcaaacctgtgatttaaataacgaatcagatccgcaggcggcgctgcaggcgattatcgaccgcccaggtccggcgctgatccacgtgcgtatcgacgcgcagcagaaagtgtatccgatggtaccgccgggtgcggccaatactgagatggtgggggaataa

SEQ ID NO: 93442 - DNA, 159 bp, Enterobacter aerogenes
atgccttatccggcctacggtccgtgcggcctgcctttaatttattcaccatgctggctgaaactgccggtgttggcggcctcaaaatccccggtggcgctgccgcttaccggggctacagcgctgaggcaatccgattcccggctggcgctacgctga

SEQ ID NO: 93443 - DNA, 321 bp, Enterobacter aerogenes
atgaacacagtacgcactatcgtggctatcagcgttatttttgcagcaagtgtggcgaatgctgcggaaatgacccatcacaacgcggcgttggcgcatgagatgatgaacaacgggcagtcgccggcccatcagcagatggcgcaggggcatcttgcgcaggtgggcgacaatcttgcctccccgaaacagccgcgttctttttcacaaatgaatgaacatgaacaggctgcggtatttcatgaatcgctgaataatggccaggcgtttgcccatcaggcggaagcaaaagcgcatcgccaacaaattccagctctctaa

SEQ ID NO: 93444 - DNA, 123 bp, Enterobacter aerogenes
atgaaatatcaggaaaatgacagctttgtcattttcctgtcacgcgttgaacagagcccgctgcgtaaagtatccgccattgataaatcgccgaaaaccgtctgtcgccatgcgcccaattaa

SEQ ID NO: 93445 - DNA, 327 bp, Enterobacter aerogenes
atgactgatcgcgattgtagtgtagattcgtttgatccagaagtcctgccggtaaataaccgcgagctgaccgtaagttatgcgagccgttatcctgattatcagcgtattccagcggttaccatgaaggggcaatggcttgaggcggccggtttcaccaccggcagcaaagtggaagtgcgggtgatggagggctgcatcgtgctgacggcaaaatcacaagaaccggaactggaggcggcgctgcgccaggcgagcaagctgtcggcgagaaagcagaagcagatcgctgagtttattggagtgatcggcgggaagcgtcgctga

SEQ ID NO: 93446 - DNA, 270 bp, Enterobacter aerogenes
atgatttcctgcgaacaggctattgcgatagctaaagtctatgccgctaaaaccggtcgcggttgggatgagcattatcatgaagcccagccgatgatgctggatggcaagccggtgtggtgggtggcgaccactgattgcgaatattcagctgagcagccgtggctgatggagcaactacctaacccttctcattattacatcagtatggtgagtgcatgttgtgtggccgtggggtcaagggataacgactttcggtacgtggactga

SEQ ID NO: 93447 - DNA, 345 bp, Enterobacter aerogenes
atgaagctcggttatttttgttacttcctgctggcccttgccgccgtcggcagcctgttgctgccctattccatcgccatgtggttcctgctgacgaacgtgctgacctggcttatctatggcatcgacaaattagccgcccgtaaagcctggagccggatcccggaatccaccctgctgacgttcggcctgcttggcggatggccgggcgcgattgccgggcagcagtgttttcgccacaaaacccagaagcagccattcagaacgtatttcattattagcatcgtactgaatgttgtggtgctggtcggcgggtattggctgtaccgggattatggggtgtag

SEQ ID NO: 93448 - DNA, 327 bp, Enterobacter aerogenes
atgaccatcaaagaaagagatctattcgatgccggattcactgagagcgatgtcgagagtctgcatcgcaggcttgcagcagcggaaggaaatttgaatgaactgatttcagtgctatcccgccgattccgggtggcattttgggttaccgttgccctggttgtggttatgttcgtcaccaccttatgcggcccccagaaatacctcatctctggaggtctgggtactgttgtagtgctggctattacctggggtatattctcaccatttctggcctggaaggctaaccggctgcagaaaaaaatatctcatcaaacaaatagatag

SEQ ID NO: 93449 - DNA, 342 bp, Enterobacter aerogenes
atgaagagattcgctatcttacctttaacttttcttatttccggttgtcctggtggtaatcctgcgccacacccaagagataccattattaatggagagcatctttgctttagtttggataaaagggatgtattgaattactacactattgattcaggcgaaaacggtaagacgcaaacggtaatgagttctggttatgacaagttaatatcatcatatcctgacaattgcatcgatattgaatggaagaagaatcatacttatgtcattaactacggtttaaataataaaaaatatgttcatgaattctttattgatagtgctgggacgttgactaaatag

SEQ ID NO: 93450 - DNA, 270 bp, Enterobacter aerogenes
atgacccaaaaaactaccgttagtgtcgctagttatgttcaacagcttgcaaatgataacaacgttacagctaaccgtgatggcatgagccgcgttgctgtggccattaccgcgcttgccgatgactctgtcgagctggataacgttgagcaattattggtaaaccttaaaaagaaaggtgtactcagtaaatctgaaattttacagcttcagggacgttacttccgcgaacaaaagcactttcataaaaagctactgcataagttttga

SEQ ID NO: 93451 - DNA, 819 bp, Enterobacter aerogenes
atgattcaacgaatgcttgctaagtccttggaaattcacaacaataaaataaatgttatagagtacacaacgaaacagggactagtagcaaaagttacatctatggcggtagttgattatatagagtcaatactaggttccgaagatagtggttatagtattacaaaaggtgtcttgtcagctacacatttcggtgtgccgcaaaaacgaatgcgttttgtaattatgggtgtaaagaaagaaattgctgaaaatattacattacccgtgggggattttactgaggatagttttagaacagttgaagatgctatcaaagatatagaaaatctcaaagtcgcaactacagttagcgaaggcagtattggtattcctatttctaagcagccagattctattagcgaattaggtcaacagcttcgcaattcgaaggtgctttataaccatattgctactgatactacgtctcacgcattagaacggtttaaagtcattcagcaaggttgcaatttccatgatttaccctctgagcttaagacgacatactcagatagctctcgcacacaaaatacaatttatctaaggttgaaatataatgaaccttcaggaacagtcgtaaatgtaagaaagtctatgtggatacatccgactcttgatcgtgcattgagtatacgcgaagctgctcgattacaaacttttcctgatagttttatattttgtggtgtaaaggattctcaatatcaacaaattggtaatgccgttccacctatgttagcaaaagctcttgctagacatttatgcgactatttagataagtaa

SEQ ID NO: 93452 - DNA, 1959 bp, Enterobacter aerogenes
atgagcatggatattagcgctttttatcagactttttttgatgaagcagacgagctgctggcagacatggagcaacacctgctggagctggatccgcaggcccccgatatcgaaccgctgaacgcgatttttcgcgcggcgcactcgatcaaaggcggcgcggcgacgtttggcttttccgtattgcaggaaaccacccatctgctggagaacctgctcgacggcgcccggcgcgaagagatgcgcttgagcaccgaaattatcaatctgtttctggaaaccaaagatattatgcaggagcaactggacgcctataaaacctcgcagcagcctgacgctgagagctttgactatatctgccaggcgctgcggcagctggcgctggaagcacagcagcaggacgcgccagccgcgccgcccgtcgtggctcagcctgcgccgacggccgtcgccggcggtatgcgcgtaagcttaaccgggctaaaagccaatgaaattccgctgatgctggaagagcttggcaatctcggcgaggtacaggatccgctgcaaactgacaatagccttgaggtgaccctgctgaccaccgccagcgaagaagacatctgcgcggtgctctgtttcgtccttgagccggaacaaatcagctttaccacgccgccaacgactgccgctaagccattggcgtcggccgaagttgtgccgccgcctgtcgcccagccgcagcctgctgccgtcgagccgcccaaagcgccgagagcgaaggccagcgaatcgaccagcattcgcgtggcggtagagaaagttgaccagttgattaacctcgtcggcgaactggtgatcactcagtcaatgctggcgcagcgctctggcaatctggatccggtaacccatggcgatctgctcaacagcatgagccagctggaacgtaatgcccgcgacctgcaggaatcggtgatgtcgattcgcatgatgccgatggaatatgtattcagccgctacccgcggctggtgcgcgacctggccggcaagctcaataagcaggtggaactgacgctacagggcagctctaccgaacttgataagagcctgatcgagcgcattatcgacccgttgacccacctggtgcgcaatagcctcgaccacggtattgaagatccgcaaacccgtctggcggcaggtaagtccgaggtgggcaatctgattctttccgctgaacatcagggcggcaatatctgcatcgaagtgatcgatgacggcgccgggcttaatcgtgaaaaaattctcgccaaagcggcggcgcaggggctggcggtcagcgacagcatgagtgatgaagaggtcggaatgctcattttcgcgccgggcttttcgaccgcggaacaggtgaccgacgtctctggccgcggcgtcggcatggacgtcgtgaaacggaatattcaggagatgggcggtcacgtagaaatccattcccgggcgggcaaagggacctcgattcgtattttgttgccgctaacgctcgccatcctcgacggcatgtcggtcaaggtcaatgaagaggtctttattctgccgctcaatgcggtcatggaatcgctgcagccgcaggctgaagacctgcatccgatggccggcggcgagcggatgctgcaggtccgcggcgagtatctgccgctggtggagctataccgggtgtttgatgtcgccggggcgaaaaccgaggccacccagggcattgtggtgattctgcaaagcgccggccgccgctatgcgctactggtggatcagctgatcggccagcatcaggtagtggtaaaaaacctggaaagcaattatcgcaaagtgccgggaatttccgcggcgacgatcctcggcgacggcagcgtggcgctgatcgtcgacgtgtcggcgctgcaaatgctcaaccgggaaaagctgctgagcgcagcggccgcgtaa

SEQ ID NO: 93453 - DNA, 2079 bp, Enterobacter aerogenes
atggctaatttggcctccctgctgcgtttgccggggaattttaaagatacacaatggcaggtgctggccggcccaatcttgatcctgctgattttgtcgatgatggtgctgccgctgccggcgtttattctcgacctgcttttcaccttcaatatcgcattgtcgatcatggtgctgctggtggcgatgtttacccagcgcacgctggacttcgccgcgtttccaaccattctgctgttctcgacgctgctgcgcctgtcgctcaacgtcgcctcgacgcgcatcattttgatggaagggcacaccggggccgccgccgcgggacgggtcgtggaggccttcggccacttcctggtcggcggtaatttcgccatcggtatcgtggtgtttattatcctcgtgttgatcaacttcatggttatcaccaaaggtgccgggcgtatcgccgaggtgggggcgcgtttcgtgctcgacggcatgccgggtaaacagatggcgatcgatgccgacatgaacgccgggcttatcggtgaagaagaggcgaaaaaacgccgcgcggaagtcacgcaggaagccgatttctacggctcgatggacggcgccagtaaatttgtccgcggtgatgccatcgccgggctaatgattatggtgattaacgtggtcggcggactgctggtcggcgtggtgcagcacggtatggagctgggcgcggcggcggaaagctacaccttgctgaccatcggcgacgggctggtggcgcaaatcccggcgctggtgatctctaccgccgccggggtcatcgtgacccgggtggcgaccgatcaggatgtcggcgaacagatggtcggccagttattcaataacccaaaggtcatgctgctgtgtgccgcggtacttgggctgctggggctggtgccggggatgccgaacctggtcttcctgctgtttaccgccgcgctgctcgggctggcctggtggctgcgcgggcgcgaaaaacagacgccgaaagccgccgacgaacccatcgtgcaggagaatacccaggccgcggaagccagctgggctgatgtccagttggaagatccgctgggcatggaagtgggctaccggctgatcccgatggtcgattttcagcaaaatggcgagctgcttgggcgtatccgcgggatccgcaagaaattcgcccaggagatgggctatctgccgccggtggtgcatattcgcgataaccttgaactggcgcccgcccgctaccgcattctgatgaaaggagtggaaatcggcagcggcgaagcgcagccggggcgctggctggcgattaaccccggcaacgctatcggcgaactggcgggagataaaaccatcgatccggccttcggtctggaggcggtgtggatcgatagcgcattgcgcgagcaggcgcaaatccagggctatacggtagtggaggccagtacggtggtggcgacccatctcaaccatctcatcggtcagttcgccagcgaactgtttggccgccaggagacgcagcaactgctcgatcgcgtgtcgcaggagatgccgaagctgaccgaagatttcgtaccgggcgtggtgtcgctgaccacgttgcataaggtgttgcagaatctgctggccgagcgggtatcgatccgcgatatgcgtaccattatcgagacgctggcggagcatgcgccgacgcaaagcgatccctacgaactgaccaccgtcgtgcgcgtggcgctggggcgggcgattgcccagcagtggttccccggcaatggcgaaattcaggttatcggcctggatacccaactggaacgactgctgctacaggcgctgcagggcggcggtggtctcgaaccgggccttgccgaccgcctgctggagcaggcgcggcaggcgctgcagcgccaggagatgcttagcgcgccgccggtgctgctggttaaccacgcgctgcgcccgctgctggcgcgtttcctgcgtcgtagcctgccgcagatggcggtgctttccaacctggagatcaacgacgatcgccagattcgcatgacctcaaccattggagcggcctga

SEQ ID NO: 93454 - DNA, 981 bp, Enterobacter aerogenes
atgaacacggtgcttattccgcccggccccggcggctacggtaaagggctgtggctgcccgtcgccagtggcaaaaaggtgctgtctcttgccgggcgggaaatccatccggtggcgatagaaatcggcgcgctcaccgaatcgaaaatcgttaacggcttcgccgatatcccgccggataacgacatcctgtgcgtggtgattaactgcgccgggtccctgcgctgcggcctgtatccgcagaagggtatcccgaccgtcaacgtgctccccacctggcgggccggaccgctggcgcactttattaccgaggataactacgtttccggcgtcacgatggagcaactggttctggtggataccgccgaagcccctgacggtaaaccggagccggtgcctgtcactgcaccacaggttatcagcacaccaccacctccccgtggcgcggagaaactggtacgcatggtcgagcagaccggcaccgccgtcggccacattatcgccctgctgttcgccgccagccgtgaagcggtggacgtgtcgctgcgcaacattatcccgtttatggcctttgtctcgctgctgatagcgctggtgcaggagaccgcactcggcagcctgattgcccacgccctgacgccgctggcgaactcgctgtggggactggtgctgctgtcgctcatctgtggcattccgttcctctccccggtgctcggaccgggcgcggccatctcacaggtgattggcgtgatgataggcacacagattggcgcaggggcgatatctccggccttcgccctgcccgcgctgtttgccatcaacgtgcaggtcggctgcgacttcgtgccggtgggcctttcgatgcaggaggcgaaaccggagaccatcgccaaaggcgtccccgcctttctgctgtcgagacaactgaccggaccgctggcggtaatagtcggctggctgttttccctgggcttattctga

SEQ ID NO: 93455 - DNA, 1023 bp, Enterobacter aerogenes
atgaacaaaatcagagccgccgtggtcggcacaggtatctacggcaaacaccatatgaacgcgtaccgccataacccggacacggtgctggtcgccatctgcgacactgacgcagagcgctgcgacgaccttgccatgtcatacggcatcatgggctatacccggctggaaacactgctggaagaagaagctatcgacgtggtctcggtagcgacacctgacccgtaccacaccgaatccatcctcaccgccctgcgccacggcaaacatgtgctggcggagaaaccgctcgccacctcagtacgcgagtgcgagcttatcgtggagatggcgcagcagcgggacctgctggtcggcgtcgatttccacaagcgctgggacccggcggtgatgcgcattaaggctgaactggataagccggaagccgggcgcatcctgcgcgggcatatcagcatggacgacgtgataagtgtgccgacggagtggctggactgggcgggcgcaagctctccggtgtggtttctcggctcacactgctttgacctggtgcgccacctctccggccaggaggtggtgtcggtgtacgccgtcgggcagaagcggctgatggttgaatgcggcctcgacaccttcgacagcgtgcagagcctgctgacgatggccgacggcagttcgtgggtggtggaaaactcatgggtactgccggagggcttcccgaaggacaacgacgggcgtatcgatattctctgcgaggcaacctatatccgcagcacctcgcaacatcgcgggctggaaatcaccacgccggggatgacgctcacgcccaacagctacttcatcaactaccgcaacggcgttgccagcggtttcggtatcgacccgatcaatgactttgttcactccgtcagacataaagcaccgtacccggtcaccgcgatggacggactggcggtcagccggatttgtgaggcagtgcaccgcagcctggaaagcggcaaacctgaacgcccgataaagccataa

SEQ ID NO: 93456 - DNA, 885 bp, Enterobacter aerogenes
gtgagtaaactcttcaccagaggtagctcacgtggaaaaattaataactcaggagtctctcgaaaatgtttgtgctccatttggttatacaattatacttcgtaccatattttattgtttctattgaaggttaccgtgattataattaattccattaaagataaactggaaaaatccacaaatcactccaatccttttattggtgttgatgagttaggcaatgattggtttgtaaaaacatatttcagcaagtccggtcatgaaacaaatgcgttatttaatgaattagtagcttttaaattagctgagaagataggtttaccttggccaaagggccatctagttcagttttcagaaagtgtaaagagtgaactaaatgtatcaacttctcattttattgcatatgagttcatgcataatctagaagagttgcctgagggttatcaattcagtaataaccaaataaaaaatctctatggcaaatcaatatttgataattggctatcaataggtgatgtaaaaaatgatacttgcaaattgttaaatggcgaactgctattcatggatgctggaatagcctttgaggatgataattgtgaggcatggggggaagatggtcttatatggacagaaaataaattgttcattgaatcatcgccatatcatcgcggagttttgcattctgcagaagagtataaatcatggatggataaaatttgtgaaatacctgttgagttttatcaatcgatcgcagatagcatccctcaagattggcatgttccggaaagttacaaattaaaatttgttgaggtgttttcatcatcttgtgagaggtttattcctatgatgaaatcatgtattgagtgggaattaaatcaccaataa

SEQ ID NO: 93457 - DNA, 636 bp, Enterobacter aerogenes
atgaaattacagcttgccctggacgagttaaccctgcctgaagcgctggtatttattgataaggtggttgacgacgttgatattattgaggtgggaaccccctttcttattcgggaaggtgtgaacgcgattaaagccattaaagagaaatacccgcataaggaagtgctggcggatgcgaaaattatggatggcggccattttgagtcgcagctgcttttcgacgccggggcagactatgtcacggtgttaggcgtgaccgacgtgctgacgatccagtcgtgcatccgcgcggcaaaagaggccggaaagcaggtggtggtggatatgatctgcgtcgacgatctccccgcgcgggttcgcctgctggaggaggcgggcgcggatatgctggcggtacacacgggcaccgaccagcaggcggcggggcgcaagccgatagatgatttgataacgatgctgaaggcgcgccggaaagcatggattgccgtagcaggcggcatcagtagccagacggtgaaagactatgcgctgttaggcccggatgtggtgattgtgggatctgcgatcacgcattcggcggatccggcggatgaagcgaggaagatttcacaggtgttgttgcagcatcattga

SEQ ID NO: 93458 - DNA, 567 bp, Enterobacter aerogenes
atgatggaaacgcaatctgttgcaggcgttgcctgtagcgacctgaatcaggcgatgtcgcggattgatggcgctgcgctggcacgtctggagcaggccatcgctgaagcgaacgcgatatttgtttttggtgcagggcgttcgctgttgatgctgaaagcttttgcgatgcgcctgatgcatatcggcctgaaggtgcatgtggtcggcgatgtggtgacgcctgcgctgcaagaaggcgacctgctgctgctggccagcgcatcgggtgaaacggcttcgctggtgaatgtggctacaaaagcgaagaagctgggcggcacagtggccctgctgaccattttccccgagtccacgctggggaaactggcggaggtggtggccaggatcccggcctataccgacaaactgccggatggatccgataacgtgaaaggcattctgcccggcggcagcctgtttgaagaggcagtcatggtgctgggggatgccatgatagtgaatctggcccagtcgacgggatatcgcttaaccaaaggttttgcgctgcacgccaacctcgaataa

SEQ ID NO: 93459 - DNA, 843 bp, Enterobacter aerogenes
atgaaacagctacaccacagcggcctgccgctgtatctcgatgacgacggcgtgatggcgctgaaacccccgctgaactatctcggctttggccgcaaaagcgccgggcagatggcggtagtcttaccggagttcaccgaagcgctatgcgatgaaccggcttacgatgtttatcgcggcttgtgctttccggaggatcaggaacggcttgccgctgatcagtatcagtacgacatcaccatcatcatgccgggaacgattggcaaggagcgcaagaaaaccagcggtcattatcacggctataacgacacgcggcgcaacacccatccggaagtgtacgaagtgattaagggcacggcggcgtatatcctgcaaaagtcgccggattttgccgttgaaccaaaagatctgctggtggacgatcttatcgtggcggtagtgaaggaggggcagagcattatcgtgccgccgaattacggccactgctccatcaatatcggcgacgggccgctggtattcagcaacctggcctataaaccctgcgcggttcactacgacacggtgcagttttaccacggtatggcctgctacatcgtggaagagaacgggcagctctgcgtgcgcaagaatcactactacccgcgtattccgcgcatcaaattcgccaccgtcaaagagaacccgcatcttggcatcaccttcgatacgccgctttaccagcgctactgcgccgcaccggaacgttttcattttctggggcatgtcgataactatgtccgggaaatcatggggatgctcgagtatcagggtaatttattcccgctctgtcaggaggacgcatga

SEQ ID NO: 93460 - DNA, 1527 bp, Enterobacter aerogenes
atgaaaagattcaaccttctgcaaatgttacaaagcatcgggcgatcgttaatgatccccattgccatgctgcctgccgccggtattttgctggccttcggcgtcagctttcaggatcccaatattgtcgccagcctgccgtttctcggcgctgactggctggttcacgtgctgaagctgatggcggaagcgggcagtgcgattttcgctaacctgccgctgctgtttgcggtcggcgtggcggtgggacttagtgatgatcagggcattgccgggctgtcggcgatcgccgggtttctgattatgaacgtcaccatcggccagtttctggggatcacgcccgagtcggtggcgcaggtgcgtgactacacgatggtgctgggcatcccttcgctccagactggcgtgtttggcggcatcatcattgggattatcgccgcctggctgtataaacgctattaccgcatccagcttccttcgtggctggagttcttttccggcaagcgttttgtgccgattataacctccttcgccgcgctgttcgtcgggctggtgatggcggtggtctggccgccggttcagcatctgattaatggcctgtcgaataccatgacggtgcaggggccgggcgtgtccgccttcctgttcggctttgtcgagcggctgctgatcccgtttggtcttaaccatgtctggtggccgaccttctggctgcagtttggcgagtacgtgaacaaggccgggcaggtggtgcatggcgaccagcttatcttctttgcccagttgaaagaccaggtgccgattaccgccggaacctttatggccgggctgacgcccatcaagatgttctgtattccggcgattgcgctggcgatctaccgctgcgccagcccggaaaacagagcgcgggtgaagggcattatgctctctggcgcgatcacctccatcgtctgcggcatcaccgagccgattgagttctccttcctgtttgttgcgcccgtgctgtatggcattcacgccgtcctggcgggggtggtgttcctgctgatggagtggttcagcgtacacatcgggctctctttctccggcgggcttatcgactatctgttctttggcgtcctgccacgcgcgcctcactggtacatggtattcccggtcgggctggtgatgggggcgctgtactacgccctgtttacctttgctattcgtcgctggaatttgctgacgccggggcgtgaagtcgaagaaagcactgtggcgcaggaaaacgaacagaatgacctggtgagcggcatcattctggcctatggcgggctgggaaatatgaccagcatcgaagcctgcatgtcgcgtctgcgcattgacgtgacggataagacactcgtggacaaagcactgctgaaacagcttggcgcggcgggcgtcgtcgaggtcgggaacaatatccagagcgtatttggcatgaaatccgatcggctgaaagaggcgatccgcgcagctaacgcgtatacacaggaggcaaaatga

SEQ ID NO: 93461 - DNA, 1680 bp, Enterobacter aerogenes
atgaacatcttcgaggcgcattttcgcaggctgcacgcccgctatggcgcaggccagacgcacgaattacagatgaaggagatcgccgccatcttcggctgttcggtgcgtaactgccgtattgcgctgaaaaagatgcatcaggaaaaatggctcgactggcagccccagcgcggacgcggcaagcgctcacggctgcacctgttaacctcgccggaaaagttgttcagccagaacgtcaataagctgctggagaaacaggattacggcaacgtgctacggtttatcggcaacgacaagtatctgctggatcgcctgagcctgtggcgcttcggtgtgcaggataaaagcagcgaaacgcgggtgcgcatcccctactaccgcaatctggatcctctcaatccactcgttcccctgcgacgaaccgaacgtcatctcctgcgccagtgtctgagcgggctgacgcgctatgacgccgttcagggcaggatcgtccccgatattgcccactactggacccacaacgaggactttacccactgggagttctggctgaaatctaccgcacgctttgcggatggcagcgagctgaatgccagcgccgttgagcgttgcctgctcgccgccagccagagcccgcagttcgcgccgcttttcagcccactcaagaccatcaccgctgacgccccctggcatctggtgattgaaacgtatcatccggtgaagaggcttgactgcctgctcgctacccagccaacgatgctgtttgattaccagcacggacacatccgctgtaccggcgctttccacctgcaggagcacagcgacaactttatggtcctgcggcgcaatcaacactggcaccaggcgcggcccggactggatgagatcaccattttcacctgggctccggagcatatcagcatgagctttattcccctgctgcggggcgaggaggcgcaggatgaccgcccgctcaatgagcgcagtctggagcaggggtgctgctttgtgctgctcgacggtgacggtgcctttgcggatgaggccggaagacggtttatcaattatctgctgcaacctgtcgaactcctcagccagacgcagcttcccgacgaatacgcacgcatcctctccgttgctcagggcatgctgccgcagtggaatcaccgcccggtggatttcggcgggatcaccgcgccgtttaacctgcgtcagccggttatcatcagcacctttcagcaaccggaactggtggagcttgccggggcgattcgcatcctgcttgagcgctggcatattcgcgccgagatacggatcgacgcatttgacagctttaacagccaaccgcgccctcccgcggatatctggctcagcaactttatgctcgataccctttcggttccggcgtttctggaatggctggcttccaccacgctgttaacgcgactgcctgaaacccagcgacaaaacctgaacaccctgctgccgacgattctgaacagcgacgatgaacaggcattcgccaccattgccgcctttttccatgagattagccatcagcgatatgtcattcctttgctgcatcactggatggaatttgcgaccgagaagtcatttacctggcgggatttaaatacgctgggatggccggatttcagccaactttggctcgaataa

SEQ ID NO: 93462 - DNA, 537 bp, Enterobacter aerogenes
atggtcactacacatgttttcatcgcggtcagtcttgatggttatatcgctcgacaggatggcgatatcgactggctgttgaagcgcgatgacccgacagaagaccatggctatgccgcattcatcgcggacaaagattggatcattatggggcgaggtagctatgagaaggtgctgacctttgacgaatggccttatgatcgacccgtgctggtgctttcccggcagctaaccgatacccccgtgcccgaggcgctgaagggaaaagtgcagttttcatgccgcacaccaagggaggctcttgctgacctgatggagaagaacgtgcaccgggtctatatcgatggtgggcagttaatacagtcgttcctgcgcgaaggtctggttgccgatatcgttatcacaactgttcctgtcctgcttggttcgggaaaaccgctattcggagtattaccccatgatatcgatttgacgctattatccagctgcagcttcccttcgggtctggtgcagtcgcactatcggctgacggcataa

SEQ ID NO: 93463 - DNA, 522 bp, Enterobacter aerogenes
atgattagaattttagggtttatatttttgttacttacggcagggtgttcaacgctaggaaaaccagctttctattatacctggacacagtacaaaaccggtgttgaagtgatgctggttaatgaaccgcagtacaaagatggttttgatggaattcttcgccttgacgataaaggcaaatacgcagtaatggctatatacaacggtggggatatgtcgagtcacttcggatatgtcaccaaggacagtctcgaaagttggataaccatgtacactgactttttaaaatgggatccgcaaaatccagcgcagccgacaaaatttactattctggataatctttcgtggacccataaagactacgatgttgagtatcgcttcgtgaacggtaaaaagctatttgttatcaataagcatagtactggaaactggtttgtggacttctcagcgctctccatggatgaagccaatgtcgcaaagctgactaatgtctacatcgatctgagacagaagctgaaatag

SEQ ID NO: 93464 - DNA, 426 bp, Enterobacter aerogenes
atgattattaatgattcatacaagagcgttggaagtaatttaaatctttcaaattatttcaaacatgctcttggggaacataaggatgtatcagggtttgagtcatttgttaaaacatggattttactagaaaaagcagtgtctttaattcacaatcaaaacaatcgccagcacaaaaaattcttcaccgcaaaatttgagccattggtttctgacggagtgctgacgcgggaagagtcaattgaactaaactattttaaaagaattagaaataacttacttcatggtatagaaacacctaacgataaagatctaaacgaaatgttcgttaggttgttagcattaactgagaagatcatctcatctattaaaaatgatgatgataaagctaaattgctcaaagaaataaagacgttgagtgattaa

SEQ ID NO: 93465 - DNA, 525 bp, Enterobacter aerogenes
atggggctactggcccacaaaagaaaggatgtacgagatcgagctatgcgtattcatcagcagaataagtcccgtaaactatatcgcagcgtcaacacgacgacgcggcaccattctaataatccgggtgctgagtatcggtgggaacgaaatcgcaaaaaagtcggagatgagctactggtaaagcgcgagacaatgcatagcagacagaagcgtggccgagactacacaccattgttttattttctgatcaaagagattggcaagccgtggaatgaaatattcagcgaagtatgtggacgtcttgataccaccgagccggtattctggttggtcgcgctacatgagtatcagcgaagggatctagtctgcattggtgaaagcagtttttacccaggtctgtttgttgatgagaatggaattctgcaacaggtaaacctttcaatcacaagagatgacgttaaggtgacatgtcgttgctgcacacacacttatattggtgaacctgtaccttggatagattga

SEQ ID NO: 93466 - DNA, 336 bp, Enterobacter aerogenes
atgaacaacattccctctataccgcagttagggatttatgtctcaaaaatcgatcccacccttcgcatcactgtaaccgacgttgatattgttgatgacgatgatgagtctcctgatgatgaattgttttatttagtccgctggatggagggggaagatgaaagtgatatgtcggcgatggaatttgagctagacccagtagagtggcatgcttttgttgagtctgagcaattagtgtttgagcgcgatccatacatggattcagcccccgaaaattcaaaccttgcgaaaatccgggatttactcatgaagcctaaacagaatgatcgttcgtaa

SEQ ID NO: 93467 - DNA, 384 bp, Enterobacter aerogenes
gtggacactttgtctattaaagggattcttgaagttttcgttaacaattgggctcctggtatcttcaccttctttttaggtatctgttactcaaatatcgttgaaaagaagaaacttaagcagaagctaaagaacgatattcttgagatcttcataccggtctttaatgcaggaaacgagatctcattcgaaatcgcggaaaatgcttgcaggaagatgaaaggtacctttcaggcatacaagaggatatatccaggtatcttcgacaaagaggtagagagtgaacttgaagacctacttaaagatggtttcctcataaatggtgaagttaattcgcattactttgaaccagccaatattgagaatctgattaaaaaattgtag

SEQ ID NO: 93468 - DNA, 837 bp, Enterobacter aerogenes
gtgatcgatgacccactaccagaaaactggcaagacctccagacaggggtccaacgtatattccgtaatgttggcttgtttgcagaagtcgaggtcgatttagaaaccccgcgtggctcggtgaatgtggatgttctcgctacagatgttaggagcgtggacaaaatcagatacattgtggaatgcaaaaactggggtagttttataccacagacggtggtccattcgttcaccacggtaatgcatgaaaccggggctaatattggatttattatttcaaagcacgggcttcagcagggtgctaaacagtacactcaaaacaccaatattattgggatgacataccttgagttccaaaaaaggtattttgaggcttggtggaatagatacttttgtccacgtatcggtgatgctgcagacgaaccgcttcagtacgtcgaaccaatcaactctaaacgagatcgcgaatacgccaagctaagccttcaagcacaagagaagttcgatcagttaaggcaagagaaaggtgtatcagtaatggttctctctatgctcaattacaagtttatgtcgaaagcattaaactctggtaacttgctggaagtcccaaataatctggatgattttaagaacagagttctctcccaaatatgtcctcacattgaatggcattgtgatacgtacagagagctgctagagctcatcttgcaatacttatcagtcaccaaagcagagtttgatgcaatatttggtcgggccatctttgaaccgccaagtagtatcacggaggttacggctgaaggtccccctttggacgatggtatttatcatcattag

SEQ ID NO: 93469 - DNA, 810 bp, Enterobacter aerogenes
atgattacttacattaataaaattcaaaaagatgctgagttcatcagaaaacatgatgcaacatcaattgtcagcattagtgctattgagtattgctattataaaatcagcacgatatgggatattgcatatcagatagctgataaattaattttcccaactaaaaaaaatggcaacaaatatgattaccttgaaaatcatttccagcaatatgcacaggaatttccagatttgaatttaaaatggtataaggactttaataaaataagaaataagatagttcatggagggataacagtaaacccttattatgtcaacgatgataatattaaaacaaagatttgtttccaagcatatgactctgatctaaacgatctgattcaacctcatatgatgtattcaaatagattcaataacaatattaattttgctgattactattttaccttttatactcatcttctctattcatatctttttgatttttttgattttgtacttcttgagctaaacaaagataaatcacatgatttaaacaatcttattcttgatgatataccgcacaaattgtttggtgctcatcatgaaacatggttgttatctgatgttgatcaatttatgaaaattacaagagaaatgatttccctacaaatagctgatggttgtttaaataaaattgagaaaataccctcaagtgatattgaacatttttttaacaactttccattttgtcttatgacaaaggttagctccggagattgggtattggttgaggataaagctgctgaaacaaagtcatcggacacttaa

SEQ ID NO: 93470 - DNA, 1092 bp, Enterobacter aerogenes
atgaataaatatttattaatgttgctgctgattttccctgtgttgagttgggcttgtgagggggtgaattctggcgatgtatcgatgactaatttgcctgagaagattttacttagtgccgggaattactcggccggaacagtattatatgactcaggtaagataactcgttcgcaggccgcgctactcaactgtcaaggtgatatatatgctaactttcagtgggcatcaaataacaccggaaatttaatcggcgataatatctataccacctcgttacaaggcgtagggttgagagtcaaagtttggttaaacgttaccggcgaatatgatggtgatagcgacgatttcaatagcgattatcagcagcattttattggtgatgttaattactaccttggcaaaccttccggcttactggattattatgcttcaaccaattactcaccggcttaccagctacagctggtggcgaccggcggcccaatagcgacaaatagtaaattgtcgttgaacgatccggtggcgacggtctctgcgaaagacagttcaggtactatcgtaatttcccagctgcatattagcggcaccacgactattcagctcaccccgatgggttgcatggtcagtagctcaggattgaatttcgcgatggggacggtaagcgcttcggcattcaattccgcggggaaagccggctctgcaactcaatcggtgacgctctcctgtgagccggggactaacgttgtaatgcgggtgacggctgcggaagcgagcggcgataacccgaaccatacggtgatggccttaactgcggatggtaatgctgccaccggcgttggcgtacagcttaatctgaaggacaatgcgctgccgctgaatacggatatcagcttatattcttcaagccgcacgacggtgaccaataacggcgcggatgctggctataccatttttaccaatcctgatttccccggcggcgcatatgctatgcagtcgctcatgtttaccaccaattattacaaaacagcggagacggtgacggcgggatcggcaaatgcgagcggggtgataacctttacctataactaa

SEQ ID NO: 93471 - DNA, 198 bp, Enterobacter aerogenes
atgtatcgctcaacacattaccctcgtcacgctgaaggctatgtgtcccgagaacactttggctttcactataccctgaatcgggtcggtgatgtcggtcaaccggcgcagataatgacattttttattatcacgttaactgaacagaagtataaacttttcgtgatattgtttctttcgttcgcgcaccaattataa

SEQ ID NO: 93472 - DNA, 1359 bp, Enterobacter aerogenes
atgtctggaattattcattttttccgggcgtcgccgccgcaagcgggcgccgcgtttgatgaaaaacgttttcgccgggtacgttggcaaacgtttattgccatgaccctggcctacgtgacgttctacgtctgccgcttatcgttcaccgtggcgaaaagcgcgctggtggaattaggcattaccccaacggagttggggatgattggctcgacgctattctttagctacgccatcggcaaactggtcaacggttttatcgccgatcatgccaacgtggtgcgctacatgagccttgggctattgctcagcgccgggatgaacctgctgatgggcatgaccaccaacgccatgctgctggctatcttttgggggatcaacggctgggcgcagtcgatgggcgttggcccttgtgcggtttcgctggcgcgctggtacggctttaaagagcggggaacgttttacgccatctggtcgacggcgcataacatcggcgaggccatgacctacatggtgatcgccgcggtgatcgcgggttttggctggcaaatgggctacctctccacggctgcgctcggcgccgctggcgtggtgctgttgctgctgtttatgcgcgattcgccacagagcagcggctttccctccattaacgtgattcgtgatgaaccgcaggaagagactgaagcgcggggatcggtgttcaaaaaccaactgctggcgttgcgtaacccggcgctgtggacgctggcgctggcatcggcatttatgtatatcgaccgttatgcggtgaactcttgggggatcttctttctggagcaggataaagcttattccacccttgaggcctcaggcatcatcggcgttaacgcgatcgccggtatcgccgggaccatcatcgccggcatgctctctgaccgctttttcccgcgcaatcgcagcgtcatggccggatttatcagcctgctcaacaccgcgggtttcgccttaatgctctggtcgccgcataattactacaccgacatcctggcgatgatcgtcttcggcgcgaccatcggcgcgttaacctgtttcctcggagggttgatcgccgtcgatatctcttcacgcaaagcggcgggggcggcgctgggaaccattggcatcgccagctatgccggggcggggttgggtgaatttctgaccgggatgattatcgataaaaccgcgatcctcgaaaacgggaaaacgatttatgatttcagcacgctggcgttgttctggataggcaccggattgggttccgcgttactctgttttaccaccgccgccatcgtcgcccgacgccatgccgtcgaacggcagacttcattctcctcataa

SEQ ID NO: 93473 - DNA, 282 bp, Enterobacter aerogenes
atgggcagtcaagaggaatggcacttcctaaaacttattactggttctatcaaaaagttagaaataaagggccttgggattataaacagtttgacccatattgggcagaatttggcaattttaactttggtgcagcagggtatgcagctggtatcctttccggaatactcttggttggtgcaggatgggcacaaaagcgcgcaggaacttccagacctgaatggggaatatggtataaagatgcaccttatggtgatgatcctactgatcaatactggataa

SEQ ID NO: 93474 - DNA, 426 bp, Enterobacter aerogenes
atgcgattgagaacggctattaaatggttacatggtctgctcacgaccatactcctgatgatggttatcggtttcatgacatcaactcccggaagcgaacagcgttctgaggataaagttattacatcacaacaattggatagccatacctggctttatgtcaccggttttagcggtggtggggcaacagtagcagatacttatcgctactaccttaccggtaagattgaaggtaatgctgcgaccgatctggcaaaacggattccgttccttattgctgcgggtagtggcgcaaacgtcagcgtagagggagaggtaataaatatcagctatagcggacgcgttttttcattcagtaattcgattgtttatgaatataagggaaaaacattcaggccgcaggtgagttttcaggcccgaaattag

SEQ ID NO: 93475 - DNA, 1401 bp, Enterobacter aerogenes
atgacgcagccttctttgttaccggcggtcctgcaggccgtcatgaaccaccagccgcgcgcgcggcgggatgaccactatccgcagtggcatctggcgccggtatgtgggctactgaacgatccaaacggctttatccacttcaatggccgttatcatctgttttatcagtggaatcccctcgcctgcgatcatcgttataaaggctggggacactggagttcaccggatctactgcactggcggcacgaaccgattgccctgctgccagacgaggagtacgaccgtaacggctgttactccggcagtgcggtagataacaacggcgtcctgacgctgtgctacaccggtaatgtgaaatttaacgatggcagccgtaccgcctggcagtgtctggcgacgcaaaatcccgacggtacttttcgcaagcagggcccggtgctggcgctgccagccggctatagcggacacgtgcgcgatcccaaagtctggcgcgacggcgatcgctggttgatggtgctgggcgcgcgcgatctggccgaccgcggtaaggtactgctattcagctccgctgatttaatgcagtggagctgccatggcgaaattgccggtagcggacttaacggcctgaacgatggcggctatatgtgggaatgcccggatctgttcccactcggggatcggtatatattactgagctgcccacaggggctaccgcgagaagcccagcgcttcctgaacacctatccggcggtctggatgcacgggcatttcgacaatgctgacgcgacttttagccacggcgcgctcgaagagctggatagcggcttcgaattctatgcgccgcaaaccaccctggcggaagatggtcggcgcctactggttggctggatgggcgttcccgacggagaagagatgcagcaacctacgcgggcccacggctggatccatcaaatgacctgcctgcgggaactcagctggcgccacggcacgctgtatcaaaatcccgtgcgcgaactggcggcgctgcgcggcgaggcgcaaggctggcagaccgaaccgctggcgctgcagccgatggaactggccttcgaggtcatgccaggcgatgcgctgaggctggatttcgcgggtgcgctgcagctttcgctggacagtcgcggcgtacgcctggcccgtcgaagcctggtagctgatactgtcgattaccgttactggcgcggctcggcgcataaactgcagatcctcatcgatcgttccagcgtcgaaatttttattaatgatggcgccggggtgatgagcagccgcttctttgcggattatccaggagaactggtattcagcggcgcgacgccgggggcattctgctgctggccgctgcggccatgcatggtagaataa

SEQ ID NO: 93476 - DNA, 1017 bp, Enterobacter aerogenes
gtgatgaaacccaaacgcattaccataaaagatatcgccgaactggctggcgtctccaaagccaccgccagtctggtcttgaacggtcgcggcaaagagctgcgcgtggcgcaggagacgcgtgaacgggtgctggctatcgcccgcgagcagcactaccagccgagcattcacgcccgttcactgcgcgatagccgcagccataccattggtctggtggtacccgagatcactaactatggttttgccgttttttctcacgagctggaaaccctgtgccgcgaagccggcgtacagctgcttatctcttgcaccgatgagaatcccggtcaggagagcatggtggtcaataatatgattgcccgtcaggtcgatggcctgattgtcgcctcttgtatgcacagcgacgccgactatctgaagctcagcgaacagctgccggtggtgctgttcgatcgcaatccaaacgatagcgccctgccgttggtgatgaccgattcactggcgccgacggcggaacttatcgcccgtatcgccggccaacacccggatgagttctggtttctcggcgggcagccgcggctctcgccttcgcgcgatcggctggccggatttagtcagggattagcccaagcaggcgttgagttgcgcccggagtggatcatcaacggcaactatcacccaagctcaggctatgagatgtttgccgcgctgtgcgcccgcctcgggcggccgcctaaggcgttgtttaccgccgcctgcggcttgctggaaggggtactacgctatatgagccagcataacctgctggattccgggatccatttagccagcttcgatgaccactatctgtatgattcgctatcgctgcgcatcgacaccatccagcaggacaaccgccagttggcctggcactgctacgatctcatcagtcagctgattgatggtaaaacgccacagccgctgcagcgttatctgcccgccacattgcaaatgcgttatcagcccgccagataa

SEQ ID NO: 93477 - DNA, 639 bp, Enterobacter aerogenes
atgtccgacaccgcagactccacgctgaatgccctgaaggcgcttattgcggcttttcagaccggtgccactccggtcgcagtcaaaacctccaccgcagaagcggccagcctaccgccaaagtttcccgggccggatgacaaaaagcccgcggataactccacgcagcagaaaaccgaatacaacgagcgcggccgcctgccagcgagcagaacgcagaccgaaggcaactacgccaggcagtacctggaggggtatgttaaagagtccgatcatccctcggacaaaaaaacggagccgggctgcccggccagcctgcatatcagcctgttctttgacggtacctgctgtaacgaagaagatggtgatgaagtctacggctcgcgaaacccgccgctgaccaatatcggccgactctaccatgcggcaaactggttagataaggcggagaatgatggttacttttgttactattttcccggctgcggggcgcgctttccggagattggcgaagagcactactcgctggacggcgagctgtttgccaacggcggtgaggaccgtatcaaccaggcgctgcttaaaacctacagcagcatttgctatgcggtgaaaaaggaaaggatcgaggacagctaa

SEQ ID NO: 93478 - DNA, 315 bp, Enterobacter aerogenes
atgctggatctcgacaaagccggtacgccggatccctacgtagagcgtctgtttgaaggggttgctttttccatggagcgcttgcgggaaaagattgatgacgacctgcctgagcttaccgaagggctggttagcatgctgtggccgcactatctgcgcaccattccgtggctatcggtggtggcgctgacgccggaactaccgacgatgaagatggcggaaacggtgcctgccgggctggagatatattcccgcccgctggggccgaaaaataccgtctgctgcgccgcctacgcagagcgtggggccgcgtga

SEQ ID NO: 93479 - DNA, 1575 bp, Enterobacter aerogenes
atggcatcagttcttacattgattagtgcgagccaggtagcgccggaagcgctggctgcacagacccagcagcgtttgctgctgtgggaaaactggctgcagccggtcacgaccgagcaaccaacgggcgatgatcccggctatgacgatgatttccagttgatgcgcgaagaagtgaataagctatccggcgccaataccgatctgatttgtcagcttgcggaaaagctgctgaccaccgtcacccaggatatccgcgtcgcctcatactacgcctgggcccgcctgcaccgcgatggcgaagcgggtctggctgatgggctggaattactggctggattaatgcagcgttttggcgtgagtctacacccgcagcgggatcgcagcaggagagctgcccttgactggctggcgagccagcgcatgctcgacagcctgtcgttatacccggaggtatgcaacagcgatgcgctacgtatcaccggcgcgttgctgatcatggagcagacgcaagaaggggcggtccccggcgcgttgtgcgccgccctcgaaacccggttaatgaaatccggcgggccagaagctgtggtcccgcagaatatcagcgatgcgccgctagcggcggtggggggcagcgcgccagtgctcagcggtatcacctctggtcaggagctgctgacgcaggcgcgggtgctggcaaagtatctcagcgaccagccggatggctggctctctgcccatcacctgataaagagcattcgccatgatacgctgcatcagttgccgccgttactggcggacggcagaactcgtattgatccgccaaaaccggaccagcgggcgctgctgaaaaggctgtatctccaacagagctggatggaattactcgagcaggccagcgagatgttttcccgcggcgcaaaccatctgtggctggatctgcagtggtatgttcaccaggcgctgttgaaatccgggcgcgacgcgcaggccgctattattcagcatgatctgcaaggactgctggcacgtttgatcggcctggaagggttggcgtttaacgatggtacgccgtttgccgatgaggtgacgctgaactggatacagcaacaggtgctggataatgcaaccatctggctggacgacaccgcttcccgcgccgtcaccgcttccggcgacgacaacatccttcagttagagccggaggcgctggctctggtcgacagcgatggcgctgaggcggcgctgacctggctgcaacatcgtccgggtatcaccacccccagaagccgctggttactgcgattattgatggcgcggattgccgagcagagcgggaaaaacgaactggcgcaacatctgctggcggaactggacgtgctggcagccacgctgtcactggcgcaatgggaaccggaactactgtttgaagtccgagcgcgtcatctgcggctgttgcgcggtaaggccggacgcagcgaaacggaaagagctcgtctgcagtcgcagatggaccgtttgctggcggacctgattgctattgaccccgcccgcgcggcggtgctgtgcgtttaa

SEQ ID NO: 93480 - DNA, 336 bp, Enterobacter aerogenes
gtgagcgcaacacaaccgcaggagcataacctgcatggttgggaatatgaatttaatctcaagcaaagctacccaaaacgcgaacagataaaccagtatcgcgagagcgacctggcgtttattcagcgcctgctggctgaagtcggcatattctattatttcaccctgcaggaagaggcgcagagcgaagtggtgaatttcgccgatgcgcagcgcacgttgatatttggtaagacactccacgtcaacagcccgtcgggaatgagcgacagcggggcggagtccgtatggggctgcgaggcggagagtgaacagcgcagggaggatctttattaa

SEQ ID NO: 93481 - DNA, 2376 bp, Enterobacter aerogenes
atgattattgattgtctcgaccctttaggaattaacggatatgaaaggaaggctaatgatattttagctaaatatcttccagacagttggaaagcttattcttcactggaaatgattggacgacaaagccgtgactttgaagcggatttaattcttataactgatgacagaattatagtagtagagcttaagaattataaaggaaagctcttttcagttgatgggaaatgggtacagcagtatgaagatggctatcaagaaaataggaagaatggagttcatcaagctcgcagagccgcacaaatactatccagtaaactcgatgagaaatttatcggaaaattcaggccatgggtcgattattgcgttgtattatgtggaagtgcaacccaatcagatttaccaaatgatgaacaagaatatgtatttacattagaacaatttaaagaaataggcgatgaaaagatctacgtaaaatattttgggaataaaaaagcgataaaaagaaaagaggatgccccaaataaaaacatcactatttgggatagaattttttcaaataatagtgcagacttcaaagcaaaaaccttttccattaacaattatatccaaaaagacaccaactctctcctaacacataaacaaggtttatattcagagtttcgtagcgaacgtgcagataatcataactacaaggctataatgcgacgatgggatttcacagtaccatgtatacaagaatatgcaagaacgccagaccagcgagctcttattgcacaccgggaatccagtgtacttgggtatataaatagtcaaaatgaagatttaaaagacattcacctacaattattgcatttacctaaagatcttacatcagactttgtagaattatatgagtggccaaataaaaaagaaagacttgacgttttcatccgaaaaaataagtcgaaattaactaaacaaaatagactagacctgatacagtcgctgataagtcaactcgcaagattacatgatattgatgttgcgcatcgggatattagtgcacacagtgtatggctctccttgccaagcaaagttgtattatcaaattttcttacagcctactatccagatccagaaaataaaacggtttctaatgtcagaaaaatactccaacacgggcaagtcgaaacccctgaagaattatttaacgaaaatagtggaactgtttacacaagagatgtctatctggctattgccgcatgtcactatatagcctttgatcattggccacagagacaagagaacatattcatatgggaacccatagaaaataatgaaattagcaaaaaactggcccattggttcgaaactggcttagagcttgattcttgttcaagatttcaaaatctcagagcagctctatcagagctgaataaaatattagatttcagtgaaaacaattgtccactttcattactatcaaaatattactcaacaaaaaatatattcatagattttaatgcttctctcgttcatagctttggaaattgtcagttattacgatcaaatgacaatgcatttgcaattaaagcatggtttggagtttctgatacaaatgcttctggtggtattaatcatcaattattatcgttttttaacaggttagatatgctgcaatcggcatcattatcctgtgcccctaaaataatggattatggactaaatcctacgatgacatgtctttacttccagtatgaatgggtggaagggaatacctgggacgaatctatctataacataaataaagatgacgctctaaatatttctaaaaaacttttagaagcagtcatagaactccaccattctaatatacatcacggagatatacagcctaataacattataataagagaggataaagtttatttaattgattttctcgattttaacaacggaaatgaaaacaagtatacaccagcatatgtaccgcaaaactttgaagcattatcattaacaagcatagatcgatatgcaacaatcaaattaattaatgagatcgctactaaatttgagtatgtacatctgaactcttatacaaataatcttctttcaattccagaaatatcatcctccgaaatagaaactttatatgatgattttgacagcattgttgaaccgccaaaaccaattgcaatcgactcatatttcattagccataaatctttatccaatgaagaaattatcctatcagatgatggtatttactatgctacaatatcaataaattcaggtaaaaataaggatttattgaaagttagaattactggtgttcgctcgcaaattgaactgttatttcacccagaaaaaaattcattgcacatatatctttaa

SEQ ID NO: 93482 - DNA, 873 bp, Enterobacter aerogenes
atgtcgcgactggcacaggatatgaaaaaactggcgcaccgcgcaggtggcagccacaaaacagtccacgaccgcgaacagatggcgcagcgttttgcccgtcatctgctggtgcagaatattcaggtcaccagcaccagccagctcaaagccagacacatcgcgggatatatccatgaacggctggcgcagggtatttctctgcgaacgctacagaatgagatggcgatggtgcgctctattctggctgaagccggacgcacacacctcagccagtcagaattaatcagcaaccagtcgctcggtatcagtggtgccagccgtgacgggacgcaccgggccattccggatgcactttaccatcatgtactggaccgggttcatcatatcgacgtaggcctcgcagccagcctgcaactggctcgggtgatggggctgcgcggtcaggaagcggtacagtgctgccagtctctgaaaacctgggataaacagctggaaaaaggggctgaacgtctgccggtgatctttggcaccaaaggcggacgaccgcgtatgacgcaggtgatagacagggaagcggttcgccaggcggtgaaagaagcgcttgagattaccgggggacgtgatgggcatctcattgacaaaccggatctgaaatccgcgatggactactggcacaacaatctccgtaatgcagggctgacgggtgaatactctccccactccctgcgctatgcctgggcacaggacgcgatccggtattacgaggaacagggactgagccagaaagaagcgctggcggtgacctcaacggatctgggacatggagatggacgggggaggtatattgagcaggtttataaccgaacgtaa

SEQ ID NO: 93483 - DNA, 231 bp, Enterobacter aerogenes
atggaaaagacaaccgtattcaaaagcaaccgtagccaggcggtgcggctgccaaaagcggtggctttaccggaggatgtcaaacacgtggatatcgttgcggtagggcgaacgcgcattattactcccgcaggcgaaagctgggacagctggtttgatggtgagagcgtgacgactgattttatggctgcccgtgagcagcccggtgaccaggacagggaagggttctga

SEQ ID NO: 93484 - DNA, 405 bp, Enterobacter aerogenes
atgctcaaatacatgctggataccaatatttgtatctatacgatcaaaaataaacctcaggccgtccgggaggcgtttaaccagcattacgggcggatgtgtatcagttcagtcacgctgatggagctgatttatggcgcggaaaagtctgccagcccggagaaaaacctgcgcgtggtcgaagggtttatcgcccggctggaggtgctgaactatggtatcgacgcggcggtacagacggggcaaatccgggcagaactggcaagagcaggcacgcccgttggcccgtatgacagcatgattacggcccacgctcgcgcactgggtttaattctggtgacgaacaatacccgtgagttcgaacgtattaatggattacgtctggaagactggagtatcagctaa

SEQ ID NO: 93485 - DNA, 1224 bp, Enterobacter aerogenes
atgaagataacagaattatataatcacccgcaccgcctccatctggaaacgacgaagcgctgtaacctctgctgcgagcactgctacgtttccgcttcagatgatttccggcaccatgacgcaaccatgttgaagaaagtcattgccgacaccagggaaaaaggagcaacacgactcacactgactggcggcgaattcctgatgagaccagatcacagtgaactcattgaatatgccattgcagtggggtatcgcaatatctacttcatcacaaatggcatttatctaaaaagaagcacgctggaatggcttgcaaatcttaaggtcaggcaaactctcaaaacgcttgtcccgacacttatcaaaaaaatgaaacctttcacgataggattagggatcagcctcgatggacttgaaggcaatggcattatccgtaaatacaaaaatggtaatcccgtcccttttgataaaatactcaacaaaatcgcactcgccacacaatatggactttatataacagtaaacaccactgtttgtaatgaaaaaaccgcctcagagcttttccagatatataaaaaactgcgtgacctgaatgttgaccgctggcaagtcgatcaggtatttatgagtggcagaagtattaccagcgatgcggtgaagaataatgacacctggattgatattgccaaaaactcgtattacgaaattattaacgattatcttcgtgtttatcctcataaaacacaaatgaaactggaaatcgttcagttatttcgttcggctattcttgagcacggattcaaaattattaaagatgatgcttatcatccttgttcatatcagtttggcagcgttatcgttgaaaatgaacagaacgtcagattctgtccatcactacgccatgctcaggacattatattcaataccacggaacaagatatttcaactgactcatatatgcaaaatccgcatttcagaaccttttcagaactgatgctcaaagatctgccatgcagggattgccgttacaaatttattgcacatggtggttgccgggcaaacagcgtcagttacagagatgccctgtatgctaaagaccccgtatgctgttctctcgccccattccttgagaaacgcatagttcccctgttgccctacgcgctacaaaaacagtacatatcagccctgtaccaggaaggtaaaatgccagaagagattctgtga

SEQ ID NO: 93486 - DNA, 126 bp, Enterobacter aerogenes
atgagcattctttccagactattcaaaaagtacgtttctccggcccagcattttggtatccatgcgggcctgaatggacatcttgttgacagtgcagacaccggccctgctggcggcggctggtaa

SEQ ID NO: 93487 - DNA, 1263 bp, Enterobacter aerogenes
atgtcatgtactgggggaaacatgggggacggtttaggccgggatttctggttctacagatgtgctcagattgcgacagcattgggttacagcgcgtcgtcgattgctgctgtctggtggattctgggtgaataccagaagatgatctatgtgtcatacctcattgtcccgccattgatcatttctgctctggcccagccgctgattgcgcctgccggtgatcggtacaataagaaattgttgatactgtccggtctttctctccagtttttaagctatgtcaccgttgcttttgttttcatgtccggtggcatgaaactgtcggcactgattgcatttgagcttctgtctgcttctgggcgaattttatttaatgcgggctcaataggcattcttcctcatcttataccggaaaacaggatcaccgagggtatgaacattacccatcgtgttacctccacgatgtccattattggtggcgtgtctggtggtgcaatggtgactgtatttgggatcgctaattcttttctgtttctggccttctgcatcagtattgcctgtttattctgtgtatgcatgagctgtcattctcaggccgaccagggggagcgtcgtcgagtccgatggctggatgatatcagagaggggcttaactacacggtgagtaacagggtgatctccggattttttatctacagccttattattggccttgcctttgcgccgatgatggtggcctttccttacttgataaaagaaattaaaggactgtctcctttctacgtcggattgcttgcaaccagcatgggggctggtgtgataaccggatcgtttatttttccccatttacgctcgcgatttgataataagtctctggtttatgtctcctcatcacttttctttctctctctgctgctcatcagtttgtgccatcatgtcatcgtgctttttatcggacaatttatcatagggttatcacggaactggattaacgtggtgattgactctctgttactgattaatttaccaaagcacttaagaacacgcgtactgtcgaatctgtcatttttcgccatgatcaatatgccagtggcaatgctgttgtttagctatctgatggatttgatgggggtatataacatcttccttatgctgtcggcactgtgttttattgcgatgctggttattgtctctaaccgggaaatcagacggtttttgtctgctgaacccgaagaagccgcagagatgttaatgagtaaatga

SEQ ID NO: 93488 - DNA, 624 bp, Enterobacter aerogenes
atgcgcattaaggctgaactggagaagccggaagccgggcgcatcctgcgcggccatatcagcatggacgatgtcatcagcgtgccgacggagtggctggactgggcgggcgcaagctccccggtgtggtttctcggctcacactgctttgacctggtgcgccacctttccggccaggaagtggtgtcagtgtacgccgtcgggcagaagcggctgatggttgaatacggcctcgacaccttcgacagcgtgcagagcctgctgacgatgaccgacggcagttcgtgggtggtggaaaactcgtgggtgctgccggaaggctttccgaaggacaacgacgggcgcatcgatattctctgcgaagcaacgtatatccgcagtacttcacagcatcgcgggctggaaatcaccacgccggacatgacgctcacgcccaacagctatttcatcaactaccgcaacggcgttgccagcggttttggtatcgaccctatcaatgactttgtgcactcagtcagacataaagcaccgtacccggtcaccgccgaagacgggctggcggtgagccggatttgtgaggcggtacaccgcagtctggagagcgggaaacctgaaaatgtttaa

SEQ ID NO: 93489 - DNA, 732 bp, Enterobacter aerogenes; identical to SEQ ID NO: 75878

SEQ ID NO: 93490 - DNA, 642 bp, Enterobacter aerogenes
atgatttactattttatttttaaaatggtaatgagagtacaaattccaaattataccgttttcctgattactgggttgttcccgtggcaatggttcgcaagttcggcaaccaattcattgtactcatttatttctaatgcgcagatcattaaaaaaacagtatttccgcgctcggttattcctttgagtaatgtgatgatggaagggctgcacttcttgtgtacaattcctgtaatcgctgtgtttctatatgtttatggtatgtcaccgtcgctgagttggttctggggcattcctctactggcgatcggacagattatttttacatttggatttgctctaattttctcaacgctgaatttgtttttccgtgacctggagcgatttgtcgccttgggcattatgttgatgttctactgtaccccgatactctataattcagatatgatcccgcaacaatttacctggatcattgattataacccactggctagcatgattatggcctggcgagatctgcttatgaatggcaacctggattatgtgcatatcacttatctatactcatcaggcatggttgtgttgctgctaggagtgtgggtctttaataaattaaaatatcgatttgcagagattttgtga

SEQ ID NO: 93491 - DNA, 741 bp, Enterobacter aerogenes
atgaccgctgttattgaattttgcaatgtaacaaaagagtatcctctatatcatcatattggctctggcattaaagacttgttttttcatccgcgtcgggcctttaatttgctaaaaggccgtaagtatctggctatcgagaatgtgtcattcaccgtcaataagggtgaatcagttgcattgattggccgcaatggcgctggcaaaagtacgacccttggtctcgttgctggtgtgctaaagccaagtaagggcgaggtaaaagttgtcggccgcgtggcttcgatgttggagctgggaggcggttttcatccggaacttaccgggcgtgaaaacatcaaacttaatgccaccttactggggttacgcagagcagaagttaataaacggcttgataaaattatcgagttctcagagctaggtgagttcattgatgagcctattcgcgtatactccagtggcatgctggcgaagctgggcttttccgttattagccaggttgatccagatgtattgattatcgacgaagttctcgcggttggggatatcgcatttcaacggaaatgtattgaaacaatcaatgagttcagaaaacgtggggtaacaatcctgtttgttagccacagcatgaaagatgttatgcagatttgcgataaagttgtgtgggttgaaaatcaccggttgaaagctatcggtgaggcaagctctattgttgatgaatatgtagcctcaatggcttga

SEQ ID NO: 93492 - DNA, 1152 bp, Enterobacter aerogenes
atgcagaagaatgtacttattgtcggcgcaggattttcaggcgcggttattggtcgcttattggctgaagcaggtcatcaggtgacgattattgacagccggccgcatgttgctggtaactgctatagtgagcgggatagtgaaaccaacgttatggttcatacctatggccctcatattttccatactgacaatgctgaggtttgggagtacatcaaccaatacacggaaatgatgccttatgtgaaccgggtgaagacgacggtcaatgggcaagtattttccttaccaattaacttacacacaattaatcagttcttccataccacgtgctccccaaccgaagcacgtaaattaattgatgaaaagagtgataaaacgatagaagaacctgcaacatttgaagagcaggcactgcgttttgtcggcaaagaactttatgaagccttttttaaaggttacacaatcaaacagtgggggatgtctccgtcggagctcccggcttccattcttaagcgtctgcctgtacgattcaattacgatgataactactttaatcataaatatcaggggatgccaaaagacggctacacggtaatcgtagataagatattagatcataaaaatatttcagtggctttaaacaccctgtttgatgaaaccactcgtagcgaatatgaccatgtattttatagtggcgcgctggatggtttttataaatatgatatgggacgtctgggctatcgcaccctggatttcgatgctttccgaaccgacggtgattatcagggatgtgcggtaatgaattatggtgagcaaaaagtgccttatactcgtattactgagcataagtactttgcgccatgggaaagccatgaaaaatcaatctgctatcgcgagtttagtcgctcatgtgagcctgaggatattccgtattacccaattcgtcaggtaggggagatggctatgctgcaaaattatctcgatcgcgccgaaaaagaagcaaatattacctttgttggtcgtctgggtacataccgctatcttgatatggatgtaactattgctgaagctctggaaactgggcgaacttatcttaagtcattagaacagaattctgtgatgcctgtgttcacggtcaaagtcagatga

SEQ ID NO: 93493 - DNA, 891 bp, Enterobacter aerogenes
atgaatgtagctgctctaatcgtcacttataatcggttagaaaagttaaaaacaacaatagaggcaacgctggcgttgccttttcaatatatagttgtggttaacaatgcatcaaccgacgacactcaagcctatcttaattctgtttgcgatgaacgagttatagttttacatcgggagatgaatgatggcggggctggcggttttaaatatggagcgcaatggataacgcaaaatttgaacactaattgggttctattttacgatgatgatgcgtatccgaagaaaaattttggcgtagcttttcagtcacttgatttatcgagtgaaaatgtctatgtctgcacggtggtggatacatcagacaaatgctgcaagatgaatataccctggaagaaaattcctaatggtttttggggaaatatcgcttacagagttaatcctgcacgttttattcctgacggaagccagcaagagaccgtggtgagcgtttcatttgtaggaatgttgataagtcaggagacactaaagaaatctatatcgtttatatatgatgagctttttatctattttgacgatgtttattttggtcatcatctggtcctgcaacgtacgcctattatttaccttcctgaattatgtattgtccatgatattgatactactaatcaattaatagccccatggaaactatattatttaagtagaaaccttatcttgtcccgtaaaatattccaggacaattcgcctttcaccttatttgatgtttcattaaggttgttgaagtatatatttacagcactgaagcatgaaaagcggaaagaatgtatgattaatgtctataatggaatcaaggatggtttctggaagccaaaaggtagaggtgcataa

SEQ ID NO: 93494 - DNA, 1137 bp, Enterobacter aerogenes
atgaaaaagaaattatgctattttgttaactctgcctggtattttgaacttcattggctcgaaagaggaattgctgcattaaataatggatatgatgtctatgttattgcaaattttgtagatgatgcaatttcaaacagactcaccgcattaggatttcactgcgttaatagtcaaattaatgagaaaagcatcaatccttttgcttttatcaaaggctttattaatgcctcgaggatattgaaaggcattaatcctgatatccttcattgcattacgattaaacctgggatcataagttgtctgtgggccaaatatcacaaaactaaacttgtttatagttttgtagggctagggcgagtgtttgagagtgagcaactcatttttaaaatattacgttggcttgtcctcaggttgtatcgatatttgttctcaaatgttgattgtaaaataatatttgaacatcgagaagataaaagaaaaatactttctctgctgggagtcaaagaagagaaagcaaaggtcattgatggcgccggggttaatatcagttatttttcataccagcaagaaccgaaattgactcatggaataatactttttgccagtcgtatgctacatagtaaaggattacttgatctcattaaggcaaaaaggatcctgaagttagaagggatagattgtactattcaggtagcaggtatcattgttgagaatgatgacgatggaattaccttggggcaaatagaaaaatggcacgcagcaggtgatatcgtctggttaggtactcgagatgatattagagaattgattgctggggcaaatattgttgctcttccttctgtatatcccgaaggtgtaccgcgaattctgcttgaggctggtgctgtgggtagagcttgtgttgtctatgataatggtgggtgcaattcactaattaaagacggctataatggttatatagttgaacgcaaaaatgtcaaagaactggccgcgagaattaaagcattgataaatgaagatgatgacagacaaaaaatgggtatcaatgccagggaaaatattgtcaatcattatacatcagaaattgttattgataaaacattacaagtatatgaagagctgtttcagcgctga

SEQ ID NO: 93495 - DNA, 195 bp, Enterobacter aerogenes
atgaccattgagaagaaacagcctgattatcttcgcccatttggactcaggactatcacggtcagtttttttcacgtcgttaccctgctcgacttcacatggcaattcatctttcgacagctcactaatccgtctacgcgctttttgcgcatccgcatcgtcaatccagaaatcagggccttgcataacatctga

SEQ ID NO: 93496 - DNA, 1749 bp, Enterobacter aerogenes
atggaaacagcaaaatgcttacagcggttggttatgccaaacgccaggtttggggcttctgaaagcatgtacatcagagggagccttttttcattttcggaaaatatcattaccatatttcccggagggaaaatttcttttgatacctattacaatggtttttccactattctctggaaagaaaaatgcggaatacacgatctcgcgttcaatgcatcaggcactgggttagccaaaatcagcgcgatgctcattacagaagaaaattcaaaatatgagctagcatcggcgaccgtggcactggataacctcactcgagaaatattcaccctggatttgggcaacactctcaatcgaggcattatatatattgaaataattccgatagatggaattgtctcccttaatagcggggaatggtttaccaaacagtctccccgcagagaggttaagcttgggatatcaattacacattttgatagaaaaaaatacgttatcccatcaatgatgagaataaagcgagaaatattagaagatgataactatcgcggactaattgattttactgttattgataactccaataatataacagctaatgaggctaatggaattaaggtcattccaaataaaaataccggaggtgcgggtggatttatgagaggcctacttcattacattgatgaaggtgatttcacccatacattattcatggatgatgatgcaagttgtgaagctgaatgcattaaaaagacatactcgatattgagttatgcgttaaacgacaatgctgcagtttctggttcgttattcgcaggcgcgcgccccgactctttagttgagaagggagcattttttgatagggtatgtcatcctatttactcagggtggcgattaaatgatgtggaatccctggtaaaaacagaaactctaatacaattccctaattatggcgcgtggtggttctttgcattcccgataaatcacgtcaagagttttgcatttcctttttttgttcgcggtgatgatatcttattcggcatgatgaacgattttgatatattaacaacaaatggcattgcttgttatgcggaggaagatttctcttctaagacctcaccgttgaccgcctaccttgatacgcgaaatcatctcgtgaatatgttatattttggccgaccagttaaagacataattggtacatatatttcatttcatctaaaaagcctgcttgctcatcaatatggtagtgcagccgccatcaacctggctttcaaacatgtttatggcgctcccgatttttgggaaaataatgcagacatgaaggatgtacgagaagaattaaactctattacttttaatgaaaaaatgaaaccgatatctcctccagataacagtgtagagtttaagtgtaatttcgagacaaaatcacggcgacttttcagaattattacgttaaatggattcctggcgcctttaaaaaacaaaattatttatcaggaaaaaatatcaggcgtgtcgctgagacagatttttaggtacaagaagatcttttattacgatcgaagcactaaaaatggttatattgctgaagcatcaaaaaaacagcaggccttagggtttatcaagatactctttaataccttaaagataattattacatcaaaagcacagcgaaaaaaatactcagaagtgacttgcaagctcacaacagaaggattctggagaaagatacttcttcgccaataa

SEQ ID NO: 93497 - DNA, 3840 bp, Enterobacter aerogenes
atgagcgtgttgagctgggcaataggcctgtgcaggaagacggaagcatggctggttaatcaccaggcaaaagatcagctacagcgtgcagagcagaggctgagtctgacggaaggagagttagatggccgctatgacaccttagcgccgaaaactatcaatgatgccagtatgcgagagtatttcattgccctgaaatacgctttgtcgcagaaagatgtgagaaacattgccattacaggtagctacggagcagggaaaagtacggttatttcatcatttatgaaatatcactgcgatgataagtacatcaatgtatcacttgccggattcgatatgacggaaaatgaaacaaccgtcagcccaactcatcaggaggttgaactcagtatcctgcaacaaattctttataaagagaatagagagaaacttcccgactcaaggatagacagaataatcgatagaggcccccactatgtcagaggaacctatcgggccttacttaaagtcattgcgcccatcgcggctgccgcatttattatctatttcaaaacaattgcagagtttctaagccttccactatcctggaccgaggtatttaatgcacactatattataaaaagcattatattagttttgctggcttttacgtcgctatactttataactgccagtgcatcacgaatcggtatttttgataagaaacttaagttgagcaagattgcccttttaagcggggatgttgaagcaagcgaccaagagacgccatctttattgaataactgccttgacgagattgtgtatttttttaccaagttggaatataaagtggttatctttgaagatcttgataggctaggaacgcctgagattttcgttaagttgcgtgaaattaataaaatagttaataacaatattgttgatggcaatccagtcaggtttgtttatgcggtaagagacgacctgttcctgggtgctgatgccagaactaaattctttgatttcattcttcccgttattccatttatggatagcagaaatgcgtttactctattaaagaggaaaatgtcgctcgatacgcataatgataaatatctgaaagacatttcggcatatataaatgatatgcgcagcctacaaaatttggtcaatgaataccatgtattcagtaatatcgttgataacggaaatgataaaatcaaactgttgtcgctggttttttataaaaatatctacgctttagactattttcttaccgataagaaaacaggagttttatattcatttattcgcgactatcgcactcgcaaacttcaccataatcatttcgactctctggaaactaaactggatcttttacagtccgaaatagaacatcttaatcatgaacctatgtatgatcatagaggaattagagaggaaatagtttgtcgatatattccgaaaatactctgggatggcattcattttggtacgggcaatggatacagtaattttcaccccctaacaactttgtctttaattgatgatgaaaatggttttttagaatttttatcgcaaaaggaaaatttatatataggctactttgttagtcaccagagatattcactctcactttttgatagggcattaagagaacaactaaaagaagaatacctgaaacgaaaaacaaaaatgggtaaagataaaaactcggcttttagtgagctgcagataaaaataaagaaacttaaagagtcaataaaattaaaaaatgccctttcactgcgagaacttacgctaatcatcgggcgtgaaaaatttgaagatattgctcaggggtatcttgaggcgatggagggtcatgacttcgtctctgagcagcagctccatgctttgcgtaccgatatgcgcaatggcgggttagacgccttgtatctgctgttgtctgatggtctggtgatgcaggacttcatggcctaccgttctattttccatgaaggatcgatgaccgtaaatgataacgacttcctgaaagccgttggtcaggatctgagctacgcaacctcaaacggtgaatattttatcgatgatgagaacagagtcatcagcgaactggttgaacataaccgtatttatgccgatggagcgcttcattatcaactggtgacacatctgattgataacgaggatgaacatctggctggtatgatcacttcgctattcagcaagtctgatgaacatatccttgctgttttttctgagctttatagcagatttggcaaacccgagaccttcgataagttaatcgttactgcactgcaaaaaaatggttatcttgacagaatggttgccgttctcgcaggccagccgggtgaaaaattcaccaatgatattgctataagtgtgatagcctgcgtatcgcctgaacatgcgctagataaatcgcaataccgccagcttattcattcgctgggctgccgtatcatctctcagctcaccgaggagaatcaggaagagttcatgcgtcacatacaacaggcggatgcatgttatgacgagctgttcgaaccaatgacgctaacggagcggtattgcctgcaatttattgcacaaaacagtctttatcagttaactcggcacaatgttggcattgccgtttcgtgtcttattgaagacataacgcctgaagaggcggaaaggaaaccttggacgctcgcctatgagcataaactcaatgcggtttctgattacttcagtcaaaacatcgatacattcgtaagggatgtgtttatctcctctgctgaggatgccgaatgtattcactacgttctgacccgcacctccctaagcgatggttccaaaggcgatatcgtcagaaaaatgaccttctcgtttgctgatctgtccgggatatcggctaaagaagaatttaccgaagaccagctaacgatctcctatcacgacctgttttaccgttatgaccgcgtcgtgccgggatggggcgcgcttatagactatatctgtgaagactgcaacatggcgatactgacggcgtatgtgacaaagcatgtggctgcattaggtcaatccccgctagaagtctatgatggcgaccgctatgacctgttgtacatgaaaattatctgtaatgatgacctagacgagtggacttatcagaacctagttgcaccgattgagattaacatgcgggaaattgatgagcacctcagcgcccgtaatttctgcaccttgatagctatgttgaaactgcctctcgacgcggatgtgtatgaaaaaattgcggctcaatacgcggatctggatgagaaaatcagtgatgccttcgtctattggttcagtcagtataaaagtgaatttttggcgcagcctgagttctatctaagaaaagaaaaagatgcgcgcttctttaaagccatgctcacaaaagtcatggcttacgcactctttactgtgcaagagagagcggacctagtatcgctatttattgattatttcattgcgtctgatatcgctgaccttaatttcccaaatgatgtcctgctgcaggtgtttaacaacactagtaatgaagaattcaagggcatgctgtttacacgatttattgtgacaggtctcaataaacatcaactggccgggctttgtcatcatttaggtgaagatgaattgagaaatatattccttaatcgaacccgagcgacaattgcagttgcaaacagagagcgcgtgatatcaattcttgagcatctgcaagcagtacgtatcatcagggatttcaaggagcgtgatgatgggaaattctctgttgttatcgaacctaactcagaggatgaagattag

SEQ ID NO: 93498 - DNA, 216 bp, Enterobacter aerogenes
atgaaaacccgtgttgacagcaacgatgcttttcccgaaagcggtaacgtgcgtatgcggcaggtggtccagtttctggcgatgagcgaatcttcggtttaccgcctgattaaagacaccgactttccccgtcccgtccacctctcttcccgactggtggtcttcgatgccgctgaaatccgccagtggcaacagcgccgcaccgccatccgttaa

SEQ ID NO: 93499 - DNA, 252 bp, Enterobacter aerogenes
atggatattaatgacaaaattagatcattaggtgaaggattaaaggatcggctggaaccttcgttagttgactttgctcttgattatattgggttctcagagaatgtattagcgttcgaaacgctatgtgatcacatcgctgatcatgatgttgtgatcagtaaagatgagtacacacaggtgcttaaaatagcgaatgatcttggtctggaaatagatagtaggtatacatatataaatccagaaaaataa

SEQ ID NO: 93500 - DNA, 270 bp, Enterobacter aerogenes
gtgcataacgcgatatttttgcgcggcgagtggataccgcaggcgggatttactgacgggatgccgctccggacccgggtgacgccggactgcatcatcattaccgcccagaacacccgcgagctgtacggctgcgccgaaggcttaagcgtcgcgggcgtcaaccgggcaaagatgcttcagtggctgaagaccttccccggcgcgcttaacgacaccggcgatctgccggtgatcaagcgtggcaagggacatttttcgggagcatag

SEQ ID NO: 93501 - DNA, 405 bp, Enterobacter aerogenes
atgatgtatatggatgatgattttttagaaaatgatttggactggtttttatccggtcaggatggctttttagctcactttgcaactggtgggaaaggcccagttccagataaaattaaagaatctattgataattatgaattaatttatgattacttctattctctggagcctttatctgacgtcgaggttattgaatacaatcttcctgatttttcagatgaggaacagcgctctcgctatttgaagtcattcatagaaatgtcacgtaaaggattatttagttatgactataggaatggcgagtataagttaatatcaaaacctctatacccgttgagatatagtgtattaccagatgatataaaaggagttatttatatctcacctgaaaatatctcatga

SEQ ID NO: 93502 - DNA, 1083 bp, Enterobacter aerogenes
atggcagaagctgacgccgctgctatgatgcgggagttgcaggtacagacaccacggcggggcggtagcgtgtcgtggggcaaaaacgcgtaccctaatgtagataaactttctgaagaacagaagcagacagtcagtgcgctggcgagcatatctgcgggtatggctggagggatcgctacagggaatacagctggagcagcgacgggtgccggtgccgggaagaatgcggtggagaataactttttgagtgataaggacatcacgactttcaccgaaaagtatgcgaatgcgaaaacggatgctgagagagagcagcttctgtctgacctgaaaaaactggatgcagataagcaaaaacaagcccttgctacagctattccggttaacgagcagaaagcagagctggaaaaactgaaagtactgcaagcttcacctgactgtaatgctcaatgccagcaactggttgcttattcaatctctgaactggagccagtagcgaataatacagaactgcataaaaacaacctgagcaaagcggttcttgcgtcggtgattgtggcgtttacactagataaaccatcatcaggaaacggaaaggcttctcagggaacagcagctacgggtaagtctggtacgtcagctattgatagtattgttaagggaggtgaacaggcggggaaaaatcttgctaaaagcgaaactgcacttcttaatgatgccagcaagcaattagataaatatgtaaattcttttgcgggtagcaagtacaaaccagcgacagcaattggtgccgttgatcctctaacaggaaaaatagtgacgacatctaatggcgctgtacctaccgtagttgctccagagttgcaggcctatgctgataagttaggcgggttgggagtaaaaactgtgtgtggaaaaacattaggccgttgtgcggagtttagagcagcaaatgagcttttattgtcaaatccaagtttaaaacttaaagatattcagttcactcctgcgattcgaccaagaaccggagaagtggttcctcgttgtgaaaactgtaaaaacatctttggtgctgaataa

SEQ ID NO: 93503 - DNA, 351 bp, Enterobacter aerogenes
atgaatgaatatatttttacacatatagactatgacaacgatccagaatgggctattaaggatttttttaactcaataaatctttatggaaaatttatatttggaattcaatatgttgtaaataaaattggttttgtaatcgacgaaacttattgcacttttcctgattgggaagatccagatcctgaatgtcattttaaagggataatatttggtgtctggggaggagaaattattgttcctgagccaataggatttaaatatgttcgtctggcctgtgaaaaatatcttcagttacaccctgaagatactgaaaaagtaaacgagttactggctaaaatcccatcctga

SEQ ID NO: 93504 - DNA, 1152 bp, Enterobacter aerogenes
atgctctaccctaatgtagataaactttctgaagaacagaagcagacagtcagtgcgctggcaagcatatctgcgggtatggctggagggatcgctacagggaatacagttggggccgcgacgggtgccggtgccgggaagaatgcggttgagaataactatctgagccgtgatgaggccgccgagaaggcttcgctggaatacaagctgaaaaatggcttgctatccggcgatgataaaactaaagctgaagcgcggcttggccagcttgatgaaacagataaagcgcgtgatgcagcgatagcggcggcatgtccgccgggaagcaagagcagtggtgcctgtggcgcactagttggcccggcgcaaaaagcgctggccgagtatggcgaaaacgttacttactcgttgttgtataaagacctgtatccgcaggatacgaagaacctggaaacggtgcttcagggactggatgccggcagtatcacccgcgatcaggctatcaccgagatagcgaaagcgtcaggggtaagctgggaaacagcggcagaacgttatgatacggcgctacaaacacaggctattgtcggagcgattgcagggttcaaagggattggttcagtaagtaaaactgttgtcgttgaagtagcctctggtgaaaaagtcagtatggcaacgaaagggaaagttactgaagtgacttatcccgatggactcagctttaaaattgaacagcctgaacatctgtctcaacttgcaggctactcacagaaaaaagggatcacaggtgcacataatgcggacgctttttattcaactgtaagtgaaaaaggagtaaaaatcgtaggtgaatctcaaactggtgtgaagggaataacagaaattcagtatcagatacctgcgtatgatcgtgctggtaacgtgattggttataaagaaaaaccactcactaaaactatctatgatcccaaagtattttcggagcagaaaattcttgatttaggtcagcaggcggctgctaatgggtacaaagcagctctggcctcaggggcaagagaatacacggcaaatgctggcggagtgaattttagagtctatcttgaccctaaaacaggaacaatagagaatttcttcccggtgacagtaaaatga

SEQ ID NO: 93505 - DNA, 978 bp, Enterobacter aerogenes
atggccgacgaaaaatatcgcagtaaatatctcgatcttgcagtccgggtcatttcggcttatgtcagtgttgcatatgcaaaagatcaaattgcactcgctgaggcgcagaaagctgcttataaagaacaacttgctctaaatgatcgcctgatgtccgctggcgagggtactgtaacggacgttgctgagactcaagcaaggtacagtttggccgaagctcaggttatcgaggctcgggatgtcttagactcagctcagcgggaacttgaagtcatcatcggaattccacttgatcagttagatgcattgcagacgttacggcaaggcaaatttcaggtctcgccgctacgttatacagcattcgatgattggcaaaaattagccatggaacgaaatccccaactagcttcatcacgtcatggcgtggatgcagcgcgttatgatgtagaacgcaatcgggctggatttatgcctcaggtacagctatacgcatcacattcggaaaatgattccagcagcgacaacaccgtaaatcaaaaatatcgaacagatagcgttggggttcaggtatcaatgccaatttattctggcggaggggttgctgcctcgacaaggcaggccgcggcacgttatggtcaggccaagtatgaactggacgcccaggtcggttcgataatgaacgatctgcgtaaacagtttaatcaatgtattagtagccaggcgaagcttagggcttacgaactggctgtaaagtctgcaacgacgcaggttgaggccacgcggcaaagtgtgcttgcagggcaaagggttaacgttgatgtgcttaatgcggagcagcagctttacgctgcacagcgagatttagcagaggccaaatacacgtatattaaggcctggattacgttgcttggagattcaggtacgctgagcgaaaaagatattatgcaagtcgcggggtatttccatcgttcttga

SEQ ID NO: 93506 - DNA, 1320 bp, Enterobacter aerogenes
atgcgcattaagttgtcagggtgttttcatgctgtaggaaatggcactttttttacttcaaaaatccgaggggaagatggcaatgtatttaactggggttatgactgtggctctaccagtgaaattgccataaataacataattaactcatcttatatggagtttgaagacggtgatagtatagatatgatggtcatttctcattttgacgatgaccatgttaacggattgataactctattaagaaaacacacaataaaaagattggtacttccctatagtgattgggctcagtctattagggaaatatctatagatggagtccatgggttatcacgttctgccgcactttttcagttaaacccagcactatggttatataataacgatctttcaaatcgtgtggaaaaaataattttagtacaaggcaatggtggaccagagaatcctgacgaacctataactcctgataatcctccgaacaatcatgatgaacctttgatactaagagatgattcagaggaattaaacgatccagaacaagaaaaacacataaatgatgctagggataatattttttttgatttaggcagaccaatcaaccgtagcggaataaaaatatcaaaaatcaaccaaatgcaacctatttgtgcactcgacggtttttttgaatttgtgttttataacgccgaaaaaacatttaaaaaactcaatcttgtgtatgagaaagatggggaattttatgccataaaatctcatgttaaacttactgatgctaaaaatgatattcaacaaacaattgaaagtattaacctacaccgagatatcaactctagtattgatgtacattggcgggagaagttaaagatttgctaccagaaacatttcggcagcaccaataaagcccagaacaatatttctttatgtatgtatgcatcacctaaaatcaccccgcgtgatggctttttctttttcggtcaatgtaaggaaagttacaatattcaatcttctggtttgatatttacaggggatattaatctgacaacccctgttctagatgatttaaagtctcatctcggtgttgaacgatggatgaattgtggattgtttcagattcctcatcacggttcggcaacttgctgggagaagggacatactaaaaggatcaaacctgcttattttgttcaatgtgcgagccctacattaaaacatcccagtcagtttgttttagatgatttgaatggtgaaaaaagcattgtttataatgcatcccgacaaaacccagtacatttttcatactttttcaaattgtatatgtaa

SEQ ID NO: 93507 - DNA, 1869 bp, Enterobacter aerogenes
atggcaactcaagaagacgacacccaaccaaaaagcgatatggacaccatgcctgtaattctggcggcagcagatgatttcgccgtttttaactttgattccttgctaccagaatcgacctcttgtgattatcacgagctaaatagccagttggaagcatcagctcgctcctctgatgagactcaaaaaagcgtttatgaattgttcaaggcaatttgctcatttcattttagggccgatgaccctgtccaaccgtgggggccagtatggagtggtccaaatggtcgttcttacatacctagcgacttccgaggtgaacaaaatgaaattctttcaaacgtagttattaaaattgaaaacagactacttcgagctcgggtggcagacataatatggactaatgacaaaagaaaaaaagacgcagctacaatagcaataaatacttattgcgaactaatagacacatacagtaaccgtagtttgcaggagggaatttatagcacctttaatcatatggggaagctcgagcaattcttaagacgtgtgttcgatatagcttccttaacacagaaaaaaaattcatccccgcaaaatataaaatctgcatttgatattatatacgcaaaaacattagagctaaagttgtatgtagtatttgaacgagtagcgcggcttggggcaaataagaagataatcgattggagtgttgttgcccaagatgccaagagactagcaagtaagactgatgctaatacaaatccagatgttgtcaaaaaggtactttatttagcggcaagtgcatttgaaaaaaatggggacaatgattctaagcgagagtgccaagagaacgcagtagagcagacacttaagatgagagagcatgtcagtcaggcttcagcaaaagcatactggacaagcattgcaataggggaactgcgttctgtaggtgggcacaaagagcgaatagcagcgttgactgccgagttgcgtgacttgcagatgtcatcacgcgatgaatttgcaacattcacaatccccatagatgccgataaggcgagagaagaaacatctaaaatctactcagaactctccctctcagcctgtttgcatgaatttgctctggctccatacattatatctaagagcgatttacgtcaccacgctgacactgttcgaaaggaaagtttttttagtaatttcgtgggaggggttcatattgatatagaaggtaaggtctacgccaaaacgcctgcagtttctgtcgatgggaatccatcggatgagtggtacaaatctcgacatataagaactcttgatttattttatcatcacttcgtttcaggttatgtagaccctgcccgttattgtttatcaacccgattttctatagaagaacgtcattttgaatctatttccgcattaagcccattcgttccacgtggtcatgaacacatattttcgttaggcttttctcgtttttttcagggtgattatgcttctgctacttaccttctcgttcctcaacttgaaaactcaatacggttttatatgcacacattgaaccgtgagacttctaaattagataatgaacttcttcaggaagaccgttctctatctggaatgctagaaagccttcgccctgagctggagcaggtctttggtgaggatttaataaatattattgatttacttttcaattacaaaccaggtccgtctctgcgccatgaaatagcgcacgggaaattgtctgcgggagggtgttttagcgcttcagctatttatgcttgctggttgatttatcgtcttgtctgttggcctctgttagattgctgggttgaacatatagcaccgtctatagaggaaaactaa

SEQ ID NO: 93508 - DNA, 237 bp, Enterobacter aerogenes
atgtttataatgttgcaagtgagaccccgtagcctgtttggctttatttttgttgtgttccataaccaacgcgtcaagaagcagaacctgacggtatttgtttatattaccacactgatgttaactggtagttatttttttgttgttgtgatcggtctcacgatagttgatttaacattaaatttgcttaagtatgtgaaattaagcccggagtgcagcacccatcatgccgaataa

SEQ ID NO: 93509 - DNA, 1056 bp, Enterobacter aerogenes
atgggggtgctggtatcgccaaatggattatattcgcaaaactcagtatggtggcagatatatcgaaggattttggatgggaacttctcagtttgtctatttttcgtaatgagtggttatgtgttgctcattggcttttataagcggcaaaacgacctttcttatcttaaagaaagctttataaaaagatactttagacttaccccactggtactcgcttcagtcattctggctgttgttttacaaaatacgataggcttccataatgccgaaatggcggcgatcgtaggtgggcacgagtggttaaaatctaactatcaatcagaactcacactaactggagccatatacaatggtctgtattctgcttatataggcgatacctcctataatggcccactctggacgattaaaatagagttaatggggtcactttttctgtatctctatgccgcattattttttgtcaaaaaaaacggtgcccacatcataatatcagcaatacttatctatctgattgaaccgacacttggctgctatttgatactatttattattggcggtactattttggtatataacataaaacttgaacctaagtttattcttccagccagtatattaacagttgttcttgcaacagaaaatccgtggacaattgaaattaacttcttaaatgaactcacaagttttagtaaagaaggtttggccacgttgtgtcactcaatcgcagcagtagttttattattaatagctaatacatcatcaaaactttcaaattgtctgtccagacctgtatttacttttctgggtaagatctcattttccttatatgtatttcatatccctattatcatgagtattggaacggcattatttgtttatttacatgatgcaggtattactaaccaatttgctagtataataagcacattagtcagtttattattttgtgtgcttatctcatggtttggctatacattcattgataaaccatctacaaaaattgcatctttagtaggcgacaagctgaatatgagagccagccaattataa

SEQ ID NO: 93510 - DNA, 1485 bp, Enterobacter aerogenes
atgatcaatagaacacaattgaatgcatatctaaataaactaccttcggcaattagccatgatgagttagcacaacacaagcatatcatcgagcgaagcttttttggcgtagatttgttttcttgcgaaagtgatgttttagcttttgtcggtacttatactggtctggagcttctggttgcattttataacagcaagccgcgcgcgataattgttgttgaatctaatgcaagcaagtttaaacgtattcaggaactattaaataaaaaccctgaattgaaagaacgtgtctatctgtttgataatttctccaatcctgaaattaatgagttgattggtgagcgtcacgttagcgttcgtatttctcttcctgcatttacccgggcagctctggagtatgttactgcacagtggaaacttgaccatatttgtggtgaattcaatcagtacgatgttgatccgttaattgtttatcgtcaatgcgcgcgcgctgcggatactttttactggcgcattcaggatcaacaccaacctctcacgggtagtcgccagaagtatgagtatgaagtttcagtggtcgtacccgcatacaatatcagcgcctatatcgaccagtgcattgagtccctggcgaatcagtctattgaaagtatagagattttagtcgtcgatgatggtacaccggatgattccggtgagaaagctgacgcctgggctgcgagatacccaggtagagtgaaagttatccataaagccaatggtgggtgcgcgacggcacgaaatgccggcgttagccaggccaaagggcaatatattggttttgttgacggcgatgattggtgcgatcttcagatgtatgaagatttgttccgtgccgcggtgatgaaaaatgctgacatttcccagtgtggctataaagaagcttatgagactggtgaaatagttaaattccccctggacattaatctcagccgtctggatttactacgcgagcgcccaacaatgtggcgtcgtatttactctgctgacatgctgaaaaacaaaggaatttctttccctgagcatattcgtcggtttgatgatttacctttccagttcgagacttttttaaacgccaagattattgctaatataccttttgattattactattatcgtcaagggcgcttaggtcaggatatttctgtgcgagatgaccgactttatgttcatttccctatttttgattggatctacagtcgtaactcggatacgttcaactatgatgaagagcgtaaattatttgagttagaactcgatgtccacttctgggcctggagtgtcattgaagcgaaattcaaggatgaatattttaagcaggtcctggcgcaaatttttgcatctaagaagattttgtctaaatttgatatgctggtaatagccaaaaataaaggaagagaaagatttatgttttatttaaagctactaaaagccaaaacattctaa

SEQ ID NO: 93511 - DNA, 1029 bp, Enterobacter aerogenes
atgtgtataagagacagtggcagtactgataatagtgtcgaagttgttcagcaatggcttgatacctataaaggtaacgcaattttcgtatcacaggaaaataaagggctatcagaggccagaaacacggccttacgctacgcgaatggccaatatatttctttctgtgatagtgatgactggttgaacgaaaaagctgttcttgattccctggaatttgccgagtctgacgatcttgatattgtattatatcgttcatacgtttacgacaaccaaacaaaagattcgtatccgttctatgatgcagcgacttgggatcatattttaggtggcgagctgaagaagacagtaaatgttgcagcatatccgcaaatcctcagtcttgaacctaataccaataaccgtatccttaagaaagagttttttgacaagtatataactatcttcccggtagggattcattttgaagacgttactcctcatattgtaagtctggttaacgcaacaaaaattggcatgatagatactgtcggctatttttatcgagttaatcgtgaagggaagattacggatcaaaaaagcgaaaagcgatttgatataattaagaccgcgaaagagttattgcagaagcctgaagttaaaggtctcaatgcatatcagcaatattgtgtaatgtcgctactatttaaaatgattttctggtgtggtagatatacaactttgagtgatcgacgtcgttacttccagcaaggtgtggatctgttttctgtatctaatccgggcgtgcgttcgcgcttgaaaacttccttaggttttgcggagcgtaacagagagtttattctcatgttggcatttttcaatggcgcaacggattttctcacagagtacagtactggtaagcaaacgctatcaacaaaatttaaactgttgaaggctatttctactgcaaacattgatgtcaataaattgatcttcaaaaaagctttgcgttttgcaaaaaataagttcggaaaacgggtagtaggttaa

SEQ ID NO: 93512 - DNA, 1332 bp, Enterobacter aerogenes
atgtcttctcacattaatcagtctcttcgtggcgatacctcatcagattctactgatgagcggaagtatacgcgtttcggttggttggtgatcgccattggtttatgcggtttccttttatgggcagcttttgccccattggataaaggcgttgcttctcaagggtcggtaacagtttcaggaaaccgtaaaacaatccagtctccaactagcggtattattagcaatattgcggttaaagaaggggataaggtcaaagccgggcaggtactggttcaaatgagccaggttcaggcgcaggcgcaggtggattctctgaagattcaatattataccactctggcaacggaagggcgtttgttggccgaaagagataacctggataccataaaattctctgacgttttcaatgctatcaaagacaagcctcgtgcagcggaaatcattgccttgcagcaacaacttttcatttcgcgccgacaggcattacgtagtgaagttgatggttttaaacaatctattgatggcatccgtttccagcttaagggattacaggattcccgggcgaataaacagatccagctaaacagtatccgtgagcagatgaccagtatgaaacagctctctgctgaagggtatttgccgaggaatcgttatctggaggctcaacgtcagtttgcagagatcagtagcagcattgatgagacgattggcaggatcggacagcttcaaaaacaactgctagagtcgcaacagcgaatagaccagcgttatgcggattatcagcgtgaagtaagaacacagttagcgcaaacgcaaatggatgtaaatgattataaaaacaaacttgatatggctaattttgaactagggaatacggaaattatttcgccagttgatggaacagttgttgggctgaatatatttacccaagggggagtagtgggtgcaggcgaccatcttatggatgtggttcccagtgaagctgcgctggttgtggatgctcaattaaaagtacaattaatcgataaagtatataccggacttcccgttgagcttatgtttactgcttttaaccagaacaggacccctaaaatacctggtactgtaacgctcgtttctgcagaccgtttaatcgataaagcaaatggggaagcttattatcagatgcaggtaaccgtcactccggaaggcattaaaatgctccagggcgaggaaataaaacctgggatgcctgtcgaggtgttcgtaaggacggggtcacgttcgttgttaagttatctctttaaacctattatggatcgtgcgcgtacttcattgaccgaggaataa

SEQ ID NO: 93513 - DNA, 1776 bp, Enterobacter aerogenes
gtggagcactatttaccgcgcaatgaaattgcggacgtaatacgcactcgcagtaaaatattctggacagttggtgttttcaccgcattcattaatatcttaatgttagtaccttcgatttatatgctccaggtttatgaccgggtgctaccctctggtaatgaaattactctgctgatgctaacccttatcatgcttgccatgtttggtatgatggcattgctggagtacgtccgtagcatggtggtaatacggattggcgcacagctagatatgcgtttaaatacacgtatttataccgcagcatacgaagataatctcaaaaacaaatctgctgatgccgggcaaatgcttaacgatcttactaacatgcgtcagtttttgaccggcagcgcgctttttgctttttttgatgcgccctggttcccgatttatttgttggtcatttttctgtttaatccctggttggggttgtttgcattaattggctcactaatactgatagcgttggccgtggtgaatgaaatagtttcaaaagaaccattggctgaagcgagtaagcttgcgttgcaatcaggaagtcttgccagcaccaacttgcgtaatgcggaagttatagaagcattaggaatgttgccaaatatcaagggacgatggtttagtttacatcaacgatttctgaacagtcagcgagtcgcgagcgaacgagcttcacgtatcaattctattacaaagtttgtgcgtctttccttgcaatctttggtgctcgggctggggggctggttggccattgatggccatattactccggggatgatgatcgcaggttctattttgatgggaagaacgcttgctccgatagaacaagtgattaacgtctggaaaagctggagttcggcaaaactatcttatggccggttggtgaagttactcgatagtaatccaccccgtggcaccgggatgtctctaccgaagcctgaaggagtactgagcgtagaaaatgtatctgcgaaaccgccgggcgcgcagggtgaaccggtactacacgctgtgtcatttaatttacaggcgggtgatgtgcttggcattattggccctagtgcatccggaaaatcgaccctggcacgattattagttgggatttggccggtaagtgaaggaattgttcgtttggatggcgcagatatttatcagtggaataaagatgaactgggcccccatattggctatttaccacaagacattgaattgttcgccggaaccatagcggagaatattgcgagatttaatgatgtcgatgctgagaaagtgattgctgccgcgaaactggcaggggtacacgaactgattttacgttttccacatggctatgactcagttattggcaacggaggaaacggactttccggaggtcaaaaacaacgaattggtcttgcaagggccttatatggcgatccctcgttgattgttcttgatgaacctaattctaatctggatgacgctggcgaattagcccttaataaggctattgcctttcttagagagcggaaaaaaacggtggtactgattacgcatcgaactaacttgctttcaatgaccagtaagttgttattgttagtcactggtaaggttaacgcatttggtaccacccagcaggtacttcaggctttgaataatgctcagagaactcagtcagcacagcaacaggcaatgcatgcagttaataatgaatcgcatgacggcaacggggcaccccctaaaacacaaataaactaa

SEQ ID NO: 93514 - DNA, 2592 bp, Enterobacter aerogenes
atggttactcaagtgctactcacacaaaaagcagttgcagctatacaatttgcaattcttgggaaaaacacctatacgacggcttccacctatgatgccgtagcaggccagtttcgtacgggggcgattagccaagaacaatatatttctaacctgttagcatccacagcgggtcagactttgtattctggcaaaactgaccttgagatagttaaacttgtctatgcgtccatttggggaagtaccccagcagatagtgtcgcccaaacctttttaacaggctcaaatttaaatgctgcacttaataatgtaattaatggcgttcttaattatacaggattcgattctgcgacgctaactgcacaaaatagctttgataatgcactgaataaagtcatgtacaaagactatggctcagcgaactggaatacatggagcgtcgctttaagtagcaaggagcaagtcgaagctgcgtacatttctttagttggccgttcagttgatatgggtgggcttggcgactggactaattatctcgccaccggtgggaatacatatagttcattactgacaaaattaatcgcatcttccgagtttcaaagcaagggatctaacttaactggtgatgcctttatcacacatgtttatcaaggaatttacggcgtcgcgcctagcgcagcggttttagcgcaatacagcgctcttggtaccaataaggcaaccattactcaggcaatcattaacgatttacgcggttctacggctacagatgcggcaactgtaaccaatcagcatgcttttgaataccagattggtaccgggctactttataaaaccagcgcagtcctcagcgccagcgccgcaggcggcaacgcgacagggactgttaacactaatgccagccatcagctcaccaatgctgaaactgcggttctgactaacgcgcaacttaatgctaacgtggcgagcaccgttaacctcaaattcgcggatcatttggctaatctcaccattaatggttcaagcgcagccactgttaacctgtccgataatggggtaaaccctggagtggacatcgttgttaacaacggcagcgtgatcctcaatgccagttccggcgctgatgacgttattgtaagcaacctggttaatatgaccaccgccacggctaagtttaacctcggaacgggtaacgatacgctgaagtgggccggtaactcttctggcggggcaaatacggtgagcacatctgtcaccgctgatggtggagctgggattgataccatttcggctaactttattacgaaaaatgtcgttatgggtgggactattctaaacagaactgcggtcatcacttctaactccgcgcaatttagtaacttcgaaaagctggaccttgctggctatatagggcaagcaactgttagcgctagttctaccgctcaagcccatacattcgattttggtgtattaactggtaatgcatccaccgaatcaagcttgactactcttccttctaacgttactcaggcagcaacctcaaccgtcggttcacagggatttgttctgtcaggtctggctaataacgtccatgtgataaatgcggcaggtggtagtgctgcgcaacttgaagtcacaggtaatgcgactgcggcaagtagtgtcgatattactttccgtccaggtatcaccgatcatttcaatgttaacttcaccgcaaccagtaatagcgatatcaatgcaggctcgctggccctaaacagcagtggtgccactgctttgacaaccctgaatgtcggctcgggtggtaccggtagcttcgctaacgccatcaccttggcgggaaccggtagtcagctacaaaccatcaatgtcaccggcgatcatttgcttaatctgacggtaggcaccggttatggtaacctggagactattaatgcttctgcaaatactgcagggttgaatctggatgccaatgtgggggggaccggtaaaggtattctttatcagctcctgactcttcttcctggctccggtgtgacaacaacccttattacacttttgggattggatggtggtcacaacttaacggtgcaaggaactggcgctgcggatactttcaaggtcctgggtaacaccgttgtttcaggaggtaatggggcgaatctctaccaactgaaagcgagcactgtcaattctggtgtgaccatttcggattttaatagcggtaaagatagtatctttgacacggcctcaggtctgactattaacaatgatgtcacacatacccaagtagcagattatggtacacgtacgtcggatgttgttgatgcgttgctgggtacgttggttggtggtgtggttggcggcgttgtcggcttgttagggcaaatccttggtattggtgggaatggggatcttactgctaaggtgggtgtagcgtcggttatctggactgataactcccacgaggctagtaactacctgattgttgataacaacaacaaccatactctggatgcgaacgatacagtagtgtatctcaacgggcaaacccatcagcagttggttgatactttgcactacgcttaa

SEQ ID NO: 93515 - DNA, 906 bp, Enterobacter aerogenes
atgcaggatctcaacgacctggcctggtttgttcaggtggtagaccatggcggttttgccgctgccggtcgggcgcttgaccagcctaaatccaaactcagccgccgcattgcgcaactggaagaacgcctgggcgtgcgcctgattcaacgaaccacccgacagttcgccgtaacggaagtcggccaaaccttctatcaacactgcaaggcgatgttgatagaagccgaagcggcgcatcaggcggtagaaacgctgcagtctgaaccgcgcggcagcgttaagctcacctgcccggtaaccctgttgcatgcccatgttggcccgatgctggcgcgctttatggtgcgatacccaggggtgacgctacatctggaagccactaaccggcgggtggacgtggtgggcgagggggttgatgtggccatccgcgtgcggccaaggccatttgaagatagcgacctggtcatgcgggtgttggccgatcgcggccatcgcctggtggcgagtccggcgctgatcgctcgtcttggccgcccacaggcgccggcggaattgagtacctggccggggctaagtattggcgccggaaaacatcagcataaatggcaattgaccggcccggagggggcgcgagccgaggtttatttcaccccgcgaatggtgaccagcgatatgctggcgctgcgcgaggcggctatggcgggcgttggcgtggtacagcttcctttattaatggtgcgcgatcagctggcatcaggggagcttgaaatcgtgcttgatgagtggcaaccgcgacgggaagtcattcacgcggtgtttgcctcgcggcgcggtttattaccttccgtcagagcgttggtggattatctcagcgaggagtatcagcgcatggaagaggattag

SEQ ID NO: 93516 - DNA, 2052 bp, Enterobacter aerogenes
atgtcaggcagaaaacagcactatataccacagttattcctgcgcgggtttctcatatgccagcaatctgggcagacacacgtttatcgcagagataaaatgttcatatctaaaactgatagtgtggcagcacaaagggatttttactctaagccagcaaatgatgcaaataaaactcttgatgataaactgacggattatgaaggtagattaggggaattgcttcgcatattgcgggaaaaaaacgttggtactgatgtcgaggcatctattgctgcagaagtaattgcacatttaacacctagaagtaaaagccttcgtagcatatttggccatggcacacaaaaacttatctctggcttagctgatgtaatatctgataaaacgttgatgatatctttgttagggctggatgaacctacaacaaataaaaaatggagtgaacatatagcatcatctttcaatagcaatccggaaatagctaaatccttggggtttatttcggaggaaattggcattccaaaagattcgatagagcgaatgctatttatgagtgcaaaagaaagttttttaggtgatgcaaattcattttactttcaattacagcccttgttcactcaacttctcactggtactgaggatgctattagttatggccataaaaaggtacttaataatggtgttgttgtggaggctcgaaagcagtctctcgaatccttattatggcgtattttccctgccccgcaagaaggggcgattatgccagattgcatagctattggttttgatgaggaagaaggtgtttaccttccctatattatggcatcctctatttctactgtcatcatgcctcttacttccgagaaactacttgttggagttcgagcgagtaatatcaatgttgacctatctggattcaacgatgatgcctcggagtgcagtgatgaattatttattgctgcatcatctgctcatgaatatttacgtaaaaatattggtgagcgatggaaaaatagaatggataatattgtccatgacacattggatactttatgtgaacataagggctatgataatttaaatgttccggaaagtatctcttgtccttcatttagctatcagattgcttttaatgattggcttagtgatgatattgatcatattaatgaggtagttcagggggttgtggcaaaactaagccaatggctggatctttcacgattggatggaattacatatgcgtctaattttgaaaaggcacttgaagatatcgaacgtagttttgatggaaatgaaattccagaaagtgaagcagattaccttgctcaaggtggtgctgctcttttagtcaagcgggatgggaaaataaaagtacgcattgtctttcatcaaagttatgctcatgctttagctggagaagatcagcaaaatagggaggtggctattcatcttcttgtttcctcattatttattgttcatacaattaatcactttgagtatgtacttccagagttcctgctggagcccgtaatgatgaacaatcatccggctgttatgcattgcgctatgcgaaaggctctgcgtgcctattattatgcttttgcaagtgcagaatttggagccgaagaattattagaacaggagttttcacattacgcaattagagcccttgattcgaatttttctaagatagttagcgcaaaagaagaacataaaatagacaacaatcattcaaaattttttagtactgtgcatgctgcagtagctgatattttgattgctatggctcgattaatcggccatttgcagggaataagtaaatcaccgttactaaactctgatactgatgtaggtgcagaaatcgccgcacgtgaacttactgggtgggtggatgtgtttgcacatgatcttgaacgattctggaagcaaccatcttggactagagaggacttatatgcactaaacatccatgtagaacgcttgttgtggcctcatgggattttccttttttcgtcagatagtgatcaagggacgatgattttatctgtatga

SEQ ID NO: 93517 - DNA, 285 bp, Enterobacter aerogenes
atgaaaaagtcaacaaccaaagactggcaccccgccgacatcgttgccgccttacacaagcgcggtaccagtctggcgaaactgtcgcgggaagcgggactggcctcgtcaacgctgtcgaataccctgacgcgcccgtggcctaaaggtgaatggctgattgctatcgcgctcgacgtgcatccgtcagcgatctggccggagcgttacctcgacacgggaaataaacgtgaaccccgaaaaccgcttcaccccatgacaataaccgacaactccgggacataa

SEQ ID NO: 93518 - DNA, 249 bp, Enterobacter aerogenes
atgactgatgctgcgctgttaggcgagggcttcaccctgatgtttcttggcatgggcttcgtgctggcgttcctgctgctgctcattttcgccatccgggggatgtctctcgccgttacccgtctgttccctgagccgcctgccgcgcccaaagcggcgccggccgccgtcgcgcccgccgacgacttcgcccgcttaaaaccggcgattgtcgccgccattcaccaccatcgccgccttaatccttaa

SEQ ID NO: 93519 - DNA, 570 bp, Enterobacter aerogenes
atggtctccggcttcgcctcctgcatggaaagaccgaccgggacaaagtcgcagccgacctgcacgttgatggcaaacagggcgggcagggcgaaggccggggatattgcgcccgcgccaatctgggtgcctatcatcacgccaatcacctgcgagatggccgcgcccggcccgagcaccggggagaggaacggaatgccgcaaatcagcgacagcagcaccagtccccacagcgagttcgccagcggcgtcagggcatgggcaatcaggctgccgagtgcggtctcctgcaccagggctatcagcagcgagacaaaggccataaacgggataacgttgcgcagcgacacgtccaccgcttcacggctggcggcgaacagcagggcgataacgtggccgacggcggtgccggtctgctcgaccatgcgcaccagtttctccgcgccacgcgcgggtggcggagtggtgataacccgtggtgcagcgacaggcacggattccggttcaccgtccggggcttcggcggtatccaccagaaccagttgctccatcgtgacgccggagacgtag

SEQ ID NO: 93520 - DNA, 375 bp, Enterobacter aerogenes
atgatgatttactgcgcacgcattactgccatcgggctgtttgtcgccgatggcctgaccgacaaaatgctcatcaccttcgacagcaacggaccgaaggattgtctggactactccctgtctctggagccgggcatgcgggaagaaaacctgttcattctgccgggcgataccctgctgctggccggatacagctacctcattaccgctgtgggtaaagaggcacagcagtcgctgtttgagctcggccatctgacgatgaaatttgacggcagcctgaatgccttccatcccggtgtggttcatctgtccggcccggttccattgctcccggccctccacggagaactgatgattgcggagggacggccatga

SEQ ID NO: 93521 - DNA, 522 bp, Enterobacter aerogenes
atgtggacagtcagcctcgctgaggcgtttattcatgtattccatgccgcaggcaaaatcttcctcgacatgatgaccgggcttatcccgatgctcatctgtctgctgctggccatcaactttctgatgaaactggtcggcaccgtcagaatggagaaggtcgccgccctgctcggccgctcgcgtatcctcacctacggcgtgctgccggtgctcggctggttctttatgagcagccccggcgcgctgacgctcgggaaacttttacccgagaagagcaaacccggctatgaggatgcgctcggcaccaccgcccatccgctcaccagcctgtttccccacgtggtgccgtcggagctgtttgtctggctcggcgtcgctgccggggttaaggcgctcggcctgcccgtcacttcactggcgctgcgttatatcgctgccgccatgctgattggtttaatccgcgggattatcaccgagtacctgttcctgcggctcagcaggcgggggaatgcaccatga

SEQ ID NO: 93522 - DNA, 417 bp, Enterobacter aerogenes
atgaccgataaaaaagacgaattttgtgatcaagataacgaattcaattttggtgaacgcatcgctctggcgatggcgaaatctcacgatacgattagttctctcgtcgagaaaacggggattcctgattcaaccctgaggggttatatcaacaagaaatcagagccaacaggctggagtcaactccgtaaaatcattaaagaaacaggtgtgagtgcctcctggttttttggcgaaggggtggaactggaaagcgagcctcatgttagtagtgttgaaaaagatctagaattactgaatagcctctttaaatatatgacgccagcgcaacggagaagggtattaaaacgagttctggcgagtgtggcgcatcagatcgaccaggatgctggcgacgacactattagtgaaaaatag

SEQ ID NO: 93523 - DNA, 261 bp, Enterobacter aerogenes
atgcatgccgatgtcggcggcgactgtaagcccacggaactcggtaaggtgcagaccgactcccgcagcctgctgtcaaagattgtgctgcatgatatgtatgccgccgccttcgatgccggggcgccgctgagcgtacttgaggaggtattgcccggtggggctcaggacaaaaaatatcgtgttatgcaaggctacgttgctgattatttcaaaatctccgaacaggccattgccctgcttaacgccggccgtcaatga

SEQ ID NO: 93524 - DNA, 573 bp, Enterobacter aerogenes
atgataaagcatatccgtattttgcccggcggactggcggtgctggtcgccgtttttctctgcctgctgacgggctgtcgcgaccacagtcgcgacggcatgagcgccgccgacataacgttgttaaaccacggcccggatgccatcgtttcggtgcaggtgaacggctacggcgggccaagggcgaactcctacggcggcggcggcggcttctgctgcgtgatggtgccagatgtctggcggccgggcctgacggcaaaaatcacctggacttccgatcctaactcctggatgaaatcgagtgagatgcccgatgattatgaaactcactatcagcgccatgggccgatcatcgtccctatcgaacgctgggaggaggatcaggcttgcggttttcatgtgcatattttcccctgcgataaggtgcggatagtccgttcctgcattccaccgggacaaccggagtatccggttccccagtcgccgccagactggaaggaaagagcaaaaaatatactttataagcatgttaaggagaacatcgtatgtccgacaccgcagagtccacgctga

SEQ ID NO: 93525 - DNA, 426 bp, Enterobacter aerogenes
atggcctcctggtacagaacgcaggaagcctgccagagaatggccaaaatcccgggggttggtatgttaacggccacttatgtgatagcggcagtgggtaatgcccgacaattcagtactgcaaagcagttcgcttcatggctggggctgacaccaaaggaacattccagcggcgggaaacagcaactgggagggatcagcaaacgtggagatggatatttccgatacctgctggttcacggcgcacgcgcacttaccgcctgggtcaaccggaacggcgcggttgagaagaatgcctggcttcagggactacttgagcggaagcactgcaatgtagctgttgtcgccatggcggcaaaaacagccaggatcatgtggtcaatgttgacacacaatactgaatatcagcctcgccagctcgcctga

SEQ ID NO: 93526 - DNA, 1026 bp, Enterobacter aerogenes
atgaaagtatcaactcttggtatcgacctggcaaagaacgtttttcagcttcatggcgtcgatcacgaaggtcatactattttgcgtaaaaagctcacccgggctaagtttgttcaatttgttattcaactggagccttgtctgattggcatggaagcctgctcatccagtcatcatttcgcgcgactattcacccgctatggtcatgaggtaaaactcatccctccgcagtatgtaaagccttatgtgaaaacgaacaagacggatgcagcagacgctgaagctatctgcgaagcggtcacccgcccgaatatgcgttttgtacagataaaaaccgaagagcagcaggccgttttagcgttacacactgaacggggaatacttatccgtgagcggatcgcctgttccaatagtttaagagccacacttgctgagtttggtattacgattgcggccggacaaagccatttaacccatgagctgccagccattctggaggacgacgaaaatggtttatctcccttcgtcagaaccagcatctacagacagtctaaacatatccgggaacttgaggagcaagttaaacaggtagaacaagctctggcctcctggtacagaacgcaggaagcctgccagagaatggccaaaatcccgggggttggtatgttaacggccacttatgtgatagcggcagtgggtaatgcccgacaattcagtactgcaaagcagttcgcttcatggctggggctgacaccaaaggaacattccagcggcgggaaacagcaactgggagggatcagcaaacgtggagatggatatttccgatacctgctggttcacggcgcacgcgcacttaccgcctgggtcaaccggaacggcgcggttgagaagaatgcctggcttcagggactacttgagcggaagcactgcaatgtagctgttgtcgccatggcggcaaaaacagccaggatcatgtggtcaatgttgacacacaatactgaatatcagcctcgccagctcgcctga

SEQ ID NO: 93527 - DNA, 981 bp, Enterobacter aerogenes
atgaatacggtgcttattcctcccggccccggcggatacggtaaaggactgtggctgcccgttggcagcggcaaaaaggtgctgtcgctgaccggacgcgagattcatccggtagcgatagaaatcggcgcgctcaccgaatcggaaatcgtcaacggcttcgccgatattccaccggataacgacattctgtgcgtggtgattaactgtgccgggtccctgcgctgtggcctgtatccgcagaagggcatcccgaccatcaacgtgctgcccacctggcgggccggaccgctggcgcagtttattaacgaggataactacgtttccggcgtcacgatggaacagctggttctggtggataccgccgaagcgccggacagcgggcctgagccagttccatctccggagccagtaattaccaccgctccgccgcctgcgcgcggcgcggagaagctggtgcgcatggttgagcagaccggcactgccgtcggccacattatcgccctgctgttcgccgccagccgtgaagcggtggacgtgtcgctgcgcaacgttatcccgtttatggcctttgtctcgctgctgatagcgctggtgcaggagaccgcgcttggcagcctgattgcccacgccctgacgccgctggcgaactcgctgtgggggctggtgctattgtcgctgatttgcggcattccgttcctctccccggtgctcggaccgggcgcggccatctcgcaggtgattggcgtgatgataggcacacagattggcgcgggcgcaatttccccggccttcgccctgcccgccctgtttgccatcaacgtgcaggtcggctgcgacttcgtgccggtcggcctttcgatgcaggaggccaaaccggagaccatcgcgaagggcgtgcccgcctttttactgtcgagacaactgaccggaccactggcggtaatagtcggctggctgttttccctgggcttattctga

SEQ ID NO: 93528 - DNA, 375 bp, Enterobacter aerogenes
atgatgatttactgcgcacgcattactgctatcgggctgtttgtcgccgacggcctcaccgacaagatgctcatcaccttcgacagcaacgggccgaaggactgcctcgattactcgctgtcgctggagccgtcgttccgggaagagagcctgatgatactgcctggcgaccgcctgctgctggcgggccatgattatctggtgaccagtgttggcaaaggtgcacagcaggcgctgtttgaactcggccacctgacgctggtgttcaacggcgacctgaatccctgccacgtcggtgcggttcatctctccggcccggtgccgaaactccatgacctccacggcaatctggtgattgaggaggggcggccatga

SEQ ID NO: 93529 - DNA, 1050 bp, Enterobacter aerogenes
atggcatcaagccaatctcaattccagaattttctagccaaaactcggacgcttgtaagcggtacctgtgtaggaattgggcgctatcattacggtatccaagaaaatatatatgaccttgttgtgatcgatgaagctgctcgttctccagcaagtgaattggctatcgccatgcaagttggccgtaaaatactgcttgttggtgaccataagcaattaccgcctttattcgatgaacatcatataaaagctgccaagcgccttctaccagagatcagtgttgaagaattgaagcgtagcgattttgagagagcgtttgtttccgattatggtaaaaaaataggatgctcattacttattcagtacagaatggcccccgtaataggtaatctagtttcatcttgtttttatgaaaacaaattagaaacaggaagaagtaagacaaaagattcctattataaaataatcaataactttgcaaggcctgtcacttggtttgatactagcgaggcaaaggaaaaatcttatgaacaacgcccacaaggaaaaggcattaactcaaaaagttgggttaattcattcgaggcagataaaataatagccataataaaatacctttatgataatgatactgatactgaagaaaatatttttacagaaggtgatgaccctaaaataggagtcatctgtatgtatggtgagcaagttcgcttacttgtaaaaaaaattaatagcttatcttgggctagaaatttgctagaaaagagaataattaaaattgatactgttgatagttatcaggggaaagaaaacgatattattatactatctcttgttcgaagcaaccgtaaaggtgaacaaggacatgtttcatcagaaaatagagctaacgtatccttatcaagagcgagagaggccctatttattgttggaaataaaaatatgtggcaacagaaaaactgtgattcagcatttggaaaagtattcgcttacatatcatcagttgagtctgatgaatacacaattttaaatgcggacgatatggaataa

SEQ ID NO: 93530 - DNA, 981 bp, Enterobacter aerogenes
atgaacacggtgcttattccgcccggccccggcggctacggtaaagggctgtggctgcccgtcgccagtggcaaaaaggtgctgtctcttgccgggcgggaaatccatccggtggcgatagaaatcggcgcgctcaccgaatcgaaaatcgttaacggcttcgccgatatcccgccggataacgacatcctgtgcgtggtgattaactgcgccgggtccctgcgctgcggcctgtatccgcagaagggtatcccgaccgtcaacgtgctccccacctggcgggccggaccgctggcgcactttattaccgaggataactacgtttccggcgtcacgatggagcaactggttctggtggataccgccgaagcccctgacggtaaaccggagccggtgcctgtcactgcaccacaggttatcagcacaccaccacctccccgtggcgcggagaaactggtacgcatggtcgagcagaccggcaccgccgtcggccacgttatcgccctgctgttcgccgccagccgtgaagcggtggacgtgtcgctgcgcaacgttatcccgtttatggcctttgtctcgctgctgatagccctggtgcaggagaccgcactcggcagcctgattgcccatgccctgacgccgctggcgaactcgctgtggggactggtgctgctgtcgctgatttgcggcattccgttcctctccccggtgctcgggccgggcgcggccatctcgcaggtgattggcgtgatgataggcacccagattggcgcgggcgcaatatccccggccttcgccctgcccgccctgtttgccatcaacgtgcaggtcggctgcgactttgtcccggtcggtctttccatgcaggaggcgaagccggagaccatcgcgaagggcgtccctgcttttctgttatcgagacaactgaccggaccgctggccgtcatcatcggctggctgtttaccctgggcttattctga

SEQ ID NO: 93531 - DNA, 237 bp, Enterobacter aerogenes
atggtacgggtccggcgtcgccaccgagaccacgtcgatggcctcctcctgcagcagaacgtcaagccgggtatagccgattacgccgtaggccatggcgaggtcgtcgcagcgctctgtatcggtatcgcagatggcgaccagcaccgtatccggattatggcggtacgcgttcatatggtgtttgccgtagatacccgcgccgaccacggcggctctgattttgttcatcgttga

SEQ ID NO: 93532 - DNA, 786 bp, Enterobacter aerogenes; identical to SEQ ID NO: 93238

SEQ ID NO: 93533 - DNA, 225 bp, Enterobacter aerogenes
atgcaagttaggtttttcaacgaaacgttttacatcataagctatatgattatcgaaatgttcttcgttaccacgctggatataaccatatcccgtttcagggccagtaggcacaataccaaacgttacaagcttcccttgatttgcataaactacagcgctgttgattgcagcttgaaaagcatcgttattctcaataacgtggtccgcggccaaaacaagtag

SEQ ID NO: 93534 - DNA, 471 bp, Enterobacter aerogenes
atgctgtccggtgtcgctggggatttgtaccatgcgcacatccattccggcgtagaggcgctccccggcgcgttcggtgtgttccgccagcgacagctccccggtggagaacagcagcagcgtccagtgcctgcggttacgcacttcgccgtcggtgcgggcgcgccccttgccctggccgttcgccagcatataggcaatcatcccggcttcacgcgggtccacttcgcgcagttcatcgagcggcagcagggcatcgttgtggcggctggcaattccttccagcgcattcccggtggcccgccaggagtgccagtaatccgtgccgccacagacggaagcggccaccttcatcaccgtggttttgccgtcggtggactcaccgcgcagatgaaagcctccgccgcccgttccggtcaggcgcagcaacggggcggccagtgcacagcagacggcaaagatcagccgtga

SEQ ID NO: 93535 - DNA, 654 bp, Enterobacter aerogenes
atgggtattgcattcgatggtgatttcgatcgatgctttctgttcgataatatgggtaactttatcgaaggctactatattgttggtcttttggctgacgcatttcttgaaaagaatcctggttctcgtattattcatgacccgcgtttaagctggaatacaattgatattgtaaaaaatgctggcggtattcctgtgatgtctaaaacaggtcatgctttcattaaagaacgtatgcgtgcagaagatgcaatatacggcggcgaaatgagcgcccaccattatttccgcgattttgcctattgcgatagcggaatgataccatggctccttgtcgctgagttactctgtatcaaggataaaacgctaaaccaattagttagtgcacggatgcaagcttatcctgcctctggagaaatcaacagctcccttagcgatccacaatcctcgatcaaacgggttcttgagcgctatcagaatgaagctcttgatattaattacacggatggtataagccttgaatttgcggactggcgcttcaatctacgtagttctaacactgagcctgtcgttcgcttaaatgtggaatccagaagtgatgttgctttaatgaaagaaaaaactgcagagattttagccttgttaagggcttaa

SEQ ID NO: 93536 - DNA, 423 bp, Enterobacter aerogenes
atggagtttcggcaccgggccggagagatggaccgcaccgacgtgacagggattcagatcgccattgaacaccagcgtcaggtggccgagttcaaacagcgcctgctgtgcacctttgccaacactggtcaccagataatcatggcccgccagcagcaggcggtcgccggggagtatcatcaggctctcttcccggaacgacggctccagcgacagcgagtaatccagacagtccttcggcccgttgctgtcgaaggtgatgagcattttgtcggtgagaccatcagcgacgaacagcccgatggcgacgatacgcgcgcagtaaatcatcatggcgcattcccccgcttgctgagccgcaggaacaggtactcggtgataatcccacgtatcaggccaatcagcatggcggcggcgatatag

SEQ ID NO: 93537 - DNA, 216 bp, Enterobacter aerogenes
atgaaaacccgtgctgacagcaacgatgcttttcccaaaagcggcaacgtgcgtatgcggcaggtggtccagtttctggcgatgagcgaatcgtcggtttaccgcctgattaaaaacaccgactttccccgccccgtccacctctcttcccgactggtggtcttcgatgctgctgaaatccgtcagtggcaacaacgccgcgccgccatccgttaa

SEQ ID NO: 93538 - DNA, 180 bp, Enterobacter aerogenes
atgtctgtttttcgcgtccgctcgcaaaacttttgttacctgatagcaagcgccaacatttcccggatagcgcggcgcaacgccattcttttatgcatgatcacggtggcgaattgtctgacactccccgataacagggaggtgttatgcgattaccacatctggcaggctgcgccataa

SEQ ID NO: 93539 - DNA, 2256 bp, Enterobacter aerogenes
atgcgattaccacatctggcaggctgcgccataatcggaatttcgccgctgctttggctaccggcgctaccgaatatgctaagcgtctggtgtttgattggcgctgcgctaatcattgcaacgctgcgcaaaccttgcacaacgtatgccgcattgacgttgctatttttcgtatggggaatattacatgcccggcaagcgctgtggcccactgagcatattcccggtcgcaaccgacaggccattattgagctggtaggcggtgatggcctgacgagctggcaaggtaagataattcgtcttgagggtcggcgtttatatcctgcggttgggattaccctctacggcagcgaactacctgaagcaggctgcgttgggcagcgctggctgatgaccatccgcgctcgtccggtacatgggcagttaaatgagggcggcttcgatagccagcgctacgctcttgcgcagcatcgcccgcttagcggacgttttctaaatgcctcatcgcttgattcacgttgcagcttccgggctcgctatctggcctcgttaaaccgcacactcgctgagtatccatggaaaacggtgatgctggggctgggaatgggggagcgcctggcagttgcggatgagataaaaagattaatgcaggagacgggaacctcccatttaatggctatctccggcctgcatattgcgctgggggcgtcgcttggctggttgttggttcgtggaatacagttctttcttccgtgccgctggataggctggcggataccgctacttgtcgggttaggctgcgcgctgttttacgcctggcttaccggcatgcaacccccggcgctgcgtacctgtgcggccttaagcgcaggatgtctgttaaggctacaggccaggcgttggtcgccgtggcaaatcttttgctgttgtattgcggcaatactgttggctgatccgctggcgatgatttcagaaagcctgtggttatcggtgtttgcggttgctgcgttgattttctggtatcagcttgcgccgcttcgccggctccgctgtcgttcaccgtggcggcaactgttggcgctgggccacctgcaatgcggcctgatgttactgctggcgccgctgcagatagggctttttcatgggattagcctgacttcattgatagcaaacctggttgccgttccgctggtgacatttctgatagtcccgctgattttagcggcgatgctactgcatctaagcggcccggtgttgcttgaaatggcgttatggcaactcgccgatcgtctgctggcaatattattctggttcttacgccatttgcctgccggatggttatcgcttgacgaacggtggttggcgatcagtgtactaccgtggctggcgctcctggcatggcgttttcaggcctggcgtcagatgccgttactctgtatgagcggcgtggcgctactcagttggcccttctggcgcaccgcgacgccaggcgagtggagagtgacgatgttggatgtcggacaagggttagcggtggttatcgagcgtcagggagcagctattctgtacgataccggccccgcctggccggggggcgatagcggccagcgactcatcgtgccctggttgcgctggcgtggtctccatcctgaaggagtcatcttgagccacgaacatcttgatcatcgcggtggcctgaatgcgattgttcaggcgtggccaaatctcgttattcgtagctcgcttaatctgcgtggacatctcccttgccgcagaggggaagcctggcgctggcgagggcttcgatttcaggcgctttggccgttgcctgcaggcgagcataagggaaacaatggttcctgcgtggttagggtcgatgacggcaggcgtagcgttttgcttaccggtgatatcgaaatccctgccgaacagcaaatgataagccattactggcaacatcttacgtctacacttattcaggttccgcaccatggcagtaatacgtcatccggcgtgacattgctgcagcgggtaggaggagaggcggctatcgcctcggcagcgcgttacaatgcatggaagatgccttccaaaaaagtcgaagagcgttatcgtaagcagggatatctgtggtttgatacgccgcactcggggcaaataacgattattttttctccagatggttggcaaatccagagcttacgggatcaacttttccctcgttggtatcatcagtggtttggcgcagaggcgtag

SEQ ID NO: 93540 - DNA, 204 bp, Enterobacter aerogenes
atgcggcgcgtaacctccctgacattccacagcgaggtagacattatcatgaaagaaatcattgacggttttcttaaatttcaacgtgatgcatttcctgagcgcgctgaactgtttaaaagtttagcctcccggcagagccccagtacgctgtttatttcctgttccgatagccggatggttccggagttggtcacccagtga

SEQ ID NO: 93541 - DNA, 300 bp, Enterobacter aerogenes
atgctgccaagtcaattcgctcagcttgcccttgttatcggtcagagaagtaaaaacttgagtaaatctgcctgcaaaattccgcagccgcttttatgccggatggcgctacgcttatccggcctacgcgctgtgcgatttggtagcccggagaaggcgcgacctccgaacctagaacagatcgttaatatccgcggcataggctttcaccgcctgcgccccggcgtgcttcatctgctgaatcacgctgaccagcttgctggcgtactgcgggtcggtggcgtaacctgcgcgctgtag

SEQ ID NO: 93542 - DNA, 1269 bp, Enterobacter aerogenes
atgaccagtaaaagcgagctcaagcagtttactgcgactaaagcgacgcctgacgctttgcctcagcacgtggctgagaaacgaacgctggcgctgggcggccttggctgggcatttgaaagctacgactcatttctactctcattattattgccggtattaggagtggtgtttggcgtgaataaaagcgaacttggactgtttatcagcgtcacggccggtggacagatcatcggcgggatcctgtttggttttatcgccgataaaattggtcgggtaaaaacggccatgacctgtatcgccatctattcactcttttccggactgttagcctttacgcacgatcaacagcatttcgcacttttgcgtttttgcggtgcgctgggtatgggcggaatgtggacgtcaggtgcggcgctgattgctgaaacctggcggccagagcggcgcgcgcgcggcggcgctttgatgcaaatgggcttacccgttggcgctattctggctatcagcctgacggcaatcgtgagctcggttaacggcggcctggagcagggcgcatggcgctatctgtttatgatcggcgcgctgccggtattcattatgagcgtggtggcctggttcacgccggaatcacaggtttggcttgcacgacagcaggggaaagctaagcgcactcaacctgcctcgaaactgggcaaacacaatctgaaaggcctgctgctggctttcgtctttatcttctttattcagtatctattctggggggtatttacctggacacccacctatctacgagaagtaaaacatctggattttttacatagcctgaaatttgtgctcgcgctgcaggtcggggcgatcgcaggttttctggtcttttcagtactggcggataaatggggacgccgtccgatgttcctgatttatctgttaacgggggccattgccgtcgcgctttaccttgtgaccactcaacccttcattctgatgctggcgattttcatggctggttttggtgttaacgggatttttgccggatctggaccattccttgcagaaatcatcggagacacgtcatcgcgtggcttcctgatggggctcgcctacaacggaggccggctgggcggatttatcgcgcccctgctcatcggcgctgtggccagcgccggcggtttcactgcgggactggcgactaccgtggtcgccttcctggcggcaatggtggtggtgtggctggcgccagaaaccagaggcgtcaagctgaagtaa

SEQ ID NO: 93543 - DNA, 2511 bp, Enterobacter aerogenes
atgacagaacaacctaaaataattcaattacaggatacattaaaccgttatttgctttactttccgcgaagcaaaagtacggctgtcgatgtgcattcttttataggcgaagagacgctcagtaaaccgtatcgttatatcatccgttttaccagtgccgatgacaatatccccgccggagctgttctcaatcagatcgcgcagttttatcttcgggcgcctaatccgaacgcgcgttggcagaacgaggctgcctggttaccggtacgtcagattaacggcgttataacacaatttacccgcctgaagtcgtcctcagatgaggcgctatatgagtgcgtgctggagcatgagcttgcgctgctggataaaaattatcgctcagcggtgtatacggatgtcaccgtgccggaagttgttacgcaactcatgaaaaatagcggctacttcaaaggctataatatcgatttcgacaggctgagttacacctatcctcgaagggaaatgattattcagtggaaagaaacggatctgcagtttattcgtcggctgttggctgaaattggcatctggtttcgttttgagaatcaccataaggctcagacggaaaccgtggtgatttttgctgactctgacagtcgatacatttaccgcgataaaaaactcccctacgtccgctattccgggatgaccagctatgacgagtatgtgaccgatctggaagagcagcactcgctgattcctgaacaggtattagtacgcacctacaactatcgcgatccgtattctccacaagctattaaaaccattatcaataatgatatcccggaggggattacgtccgggggagagtatcactacgccgatcattacctcgcagacggcgattttcacgcaacagaagctgagacggccacgttttacgcccgcctacgctatgaacgtctactgaatgagcagagccggctcagtgcaacaaccagcgatccggcgctgcggcctggcgttatgtttcaccttactgggccggtaccagacggcttcaaaccgggttttttgattaccaccatgacgattacgggcagtcgagcccggcattatcacgcgcagctcgccggcattccgtatctgtcaggatacaactttcgaccggagtatctgtcgcgacctgtcattgccggtacggtgcccgcgcgggtggcctctatcggaagggataaaacgtatgccggggtggatgccagggggcgttactgcgtgaagtttgattttgatctcaatgaaaaacgcagcggctttgaaagcgcactcgtccggctgggcaggccgtacgccggcgacacttacggttttcattttccgttgctggatgggacggaagttgccattgcctttgaaggtggcgacccggacaggcctttcattgcgcatgtgatgcatgacggcgctcgccccgatctggtcacaaaccgtaatgatacccgcaatattatccgcacggcagcgctgaacaaaatccgtctggaggaccgccggggtaaggagcatatcaagatttcgacggagcacggcaaggggcaactcaatctgggccaccttgtcgatgcggaaggaaaaaaacgcggggaagggctggaggcccgtaccgatgactggatggctttgcgtgcggcaaagggggtgatgatcaccacgcaagcgcagccgcgggcccaggggcagcagttggatatgaccgccgcgattacgcaactggaaaaagcgctctcgctggcaatgacattgcaacaaagcgcactgacggccggcgccagtaatgtggataccgatcggcaaaatacgctcggccagacgctgaatagactcagcggtgcagctctgctgacctatggcgggcaaggacaggcgcatgtgaccccggaaagtctgcaactgtccgccggacaggatgtgattacgacggcaggtcgtcacgccagtatgaacgtgatgaagaaattctcgctggccgttggcgaaacactctcattgtttgctcgcaagctaggtattcagatggttgccggcgccggggatatcaccacgcaggcgcagcgcggcgccatacatatgctctctcagcaggattttacgctaaccagtacggacgggagtctgcatggcagcgccaaacagggcatacaactggtgtgcggaggcggcgggatccgtatcagccctgatggccaggttgagattttctctcctgtcggggtcgatattaaagggccgaatctcaggtatctggggccagaaagcgcgcaggtgcaagcacctgcctttgataaaggaacctttacacgtcgctatcaactgcatgcttctgacgatccggaacaggttctggcgaatcgtcctttcaggctcaagagctcaaccggcgaagtgctcgagggcgagacggacagcaatgggtgctctccattgctcgattcggccgatcttgattcgtacaaactggaggtactgtaa

SEQ ID NO: 93544 - DNA, 1380 bp, Enterobacter aerogenes
atggaatggtggctatattctgagcaggaagatattcaggatgagatgcctgtattggctgtcgtgatgatttatgtagcgcttatcgcggtatgcctgtttatacaggcgctagtctggcctgaaaataaacctgtcacgtttgagttcttcattccttccgtattacttcctgcctgtgttttgaccacgatattgttcttcgtgaagatggtattgagtgcgacagtgtgttacgcagaaatacgcaaatatattgccaaatcctgggaggtggagcttaaaacctatgcccgaaaaaatatcgcgctagccgcctggactgctctaacccctttagaacagcctgcgctcaatatgctgaaactggaaggggagtttccgttagcgccgaaaaccccactcaggatagaaattgaagatcttttcgagcagacccgtaatgagcaaattttcacgaaattgcttaccccaatagctatgatgttgaacggtaataattaccgcggaattgaaattatcgtctgggtacgtgggggagataatttctgtgtagatgcattgaggagggtgctggagcatctgaatatccctaacgccaacgcctgtgaaatcgaataccttaccgagtgtccggagtacggcatggtggataaatggatcgctgcgcccgatgacaacgtcattaaccgaatcgtcattactgtcgatatgcatgaagaagatagcgattctaaaagcatggaaagcgcctgtgcgtttttgttcactaatcactatgtcagaggagcaggcgaaaagccggtatatctttatcagccgatgtccggcgttactgatgtagaagaaaagatgccggtctatttggaggttaagtccgttactgcacctaaaacactgtggtatacaggattgtccagagtggataaatacccattattgcaggcgttagatgcaaaaaatctggcgtcagaacgcctggatatggaggcctcactaggggaaaagagtgccggttatcgatggctggctttggcgctggctgccgatgccgttaggtatgcgcaaggcgagcagctggtggcgacatctgaaaataacaagtttgctattacttccttgtcttcaaagaagacgaatttacccgacaaagctaagtggggccatacgataccgccagttgtgcacagcgttatagtatcgggaggcctgatgatttcgtggctgttttataatgtgagttttacgcctaaacctgaacatatctctacgctgtggatcgtggcgagtatagtcattcctgcaattatcgcttttggcgctggtttgtcattgactgttttagccgtcaataaggcatatcaacatatggggtattga

SEQ ID NO: 93545 - DNA, 1137 bp, Enterobacter aerogenes
atgggacagagtcaaaaattgaatatacaaccgcgttcgctttctccgctggtacaactggcgggaattcgcaaaagctttgatggcaagaccgttatctccgatctcaacttaaccatcaataatggtgaatttctcaccctgcttggcccctctggctgcggtaaaacaaccgttcttcgtctaatcgctggtctggaaagcgtcgatgtcggacgtatccaccttgaagaccaggatatcacccatgttccggcggaaaaccgccacgtcaataccgtattccaaagctatgcgcttttcccgcacatgaccgtgtttgaaaacgtcgccttcggcctgcggatgcagaaaaccccggcggcagaaatcaccccgcgggtggtggacgctttgaaaatggtacagctggaggcgtttgcccagcgtaagccccaccagctctccggcggccagcagcagcgcgtcgccatcgcccgggcggtggtcaacaaaccgcgtctgctgttgcttgatgaatccctctcggcgctcgactacaagctgcgtaagcagatgcagaacgaactcaaagcgctacagcgcaagctcggcatcacttttgttttcgtcacccatgaccaggaagaagccctgacgatgtccgaccgcattgtggtgatgcgcgatggcaaaatcgagcaggacggcactccgcgtgaaatctacgaagagccgaagaatctgttcgtcgccagttttattggcgaaatcaacatcttcaacgcgaccgtcattgaacgtctggatgaacagcgcgtacgcgcctgcgtcgaaggccgcgagtgcaatatctacgtcaacttcgccgttgaaaaagggcaacagctgaacgtactgctccgtccggaagatctccgcgtggatgaaattcatcacggcagcgaagctgacgggcttatcggctacgtgcgcgagcgcaactacaaggggatgacccttgagtcagttgttgagctggaaaacggcaagatggttatggtcagcgaattcttcaatgaagacgatccggactttgaccactcgctcgaccagaaaatggcgattaactgggtagaaagctgggaggttgtgctggccgatgaagaacaccagtaa

SEQ ID NO: 93546 - DNA, 837 bp, Enterobacter aerogenes
gtggcagtttcgctctccgccgcccgtttgcggctataccatctactcttcgatcaaactcgtcgctccggccgtcgttttgaagggctttgcggtttattcgccctgttaagcgtggtcattatttttgttgagtccggactcggctcgcaatatcacctgtcgcttgatgagtggcatgtttttgtttggctggagttgggggttaccgcggtcttcaccgcagaatatattctacgcgttataagctggccgaatccgctgcgctatatcttcagcttctggggatttatcgatctggcgaccgttcttccgctgtatgtaatgtggttatggccggaaatgagccttgagtatgtctttgcctggcgggccatgcgggttatccgcgcgctgcgtattcttaaactgctgcgctttatgccgtcgctgaatattttttggcgggctatcgtcagcgcccgtcaccagctcattctgttttactcgtttattgctattgtgatggtgattttcggctcgctgatgtatttaattgaagggccgcaatacgggtttaccaccttaaatgcttcggtctattgggcaatcgtcaccattactaccgtgggatacggcgacattacgccacatactccattagggcggatactcgcctctgtacttattctcatcggttattctatcatcgccatcccaaccgggctgataacgacacatatgactacggcgttgcaaaaccgacgcgctcgccgcgtttgcccaaactgcaataacgccgagcatgataaaaatgcccgtttctgccacgcttgcggaacagaattaccgcaataa

SEQ ID NO: 93547 - DNA, 1278 bp, Enterobacter aerogenes
atgctgcagattgcactgcttttatgcggtcgacgttttatcggtggtaaccggtaccttcttactgctgcaggtctgatttggggtcttttcggttttctggtactggcggacggtatgctgggagcacgctattttccgctcggactttttggctggtttcttttgtgcgagagtctgttaacgcttgttgcgtcatccggtgccaccggggctaagcgaggaatttatctgtttaaaggtgggattattggagccgtggccctgcttattctgtcaggatattcaggcagtaatctcctcctggctatcatactgggatttatctgtttgttgtccggcgcttttcaggttgctgccgcctgggtggttcgttatccgtactggagacgcgcgctggctggcgggatgtgtcagatcctgtatgcggtattccttttccagccctatcccactcatcatgatggaacggttcctcagttcatcggggcgctgatgctgctcagtgccgttgactgcattctgcttgcttttcggctccgaagtctggccccgggggtgactatttttgatgtccagtctccggacagcacaggatacgcgccgacaaatacagaaccacagcatccctgtcaggaagaagtggcgttggaagcgacagagctccgtgttctggtctggacaccggaaggttctgctactcaggacactctcccccggccagtgatgaatcgctatattgcagcagtggattctgccggggtcatttctaccggacatgccgcgctggagatgcaggatatctatatcagtctttacccggcagtggatatagatcggtccccttcggagttttttcgcacactccgggccgtacgggagaataatgtacccggaaaatttcaggacagttacgcatcagagtccgccgcctggtgtgaagccgacagacaggtttgttttcatactttcaacgcggtatcgctccgggcattcactacatactatcgccgccaggaaatatataaccttacctggcgaaattgctccagcagtgtggcatacgcacttgaagccgcgttagatggtgtgctgtgcaaccggagcggctggccagtttttttacggctcttcttgcagccggagctctggatcgcagcacaactccgccgccgtgccactaccatggcctggacacccgggctggttctggattattcccgcgcattgcacgggctggttcacccggccagactgaactggtttcgcaaaccatga

SEQ ID NO: 93548 - DNA, 3324 bp, Enterobacter aerogenes
gtgaatatttccacatggtccattcgcaaccctatacctcctatcctgctctttctggtcctgagtgttgcgggtttttattccttccggatgataaagattcaaagcttccctgatatggacgtccccaccgttacggtctctgccgcacttcccggagccgctccgccacagcttgaatcagaggtggcgcgcaaactggaggatgctatctcttcggtgcagggcctgaaagatatgcgtaccaccatccaggatggtctggtcaatatgtctgttgaattccggctgggaaaaccggtccaggaagcggtggatgatgtgcgctcggccgttcagggcatacgtacagatttaccggcagatcttcgggatccggtcgtccgtaagctcaatattacgggaaaaccgattctggcatttaccgtcagctccagcaagatggatgaaagcgaactctcctggtttgttgacaataccctttcccggcgtcttcagggcttgtcgggcgtggggacggttacccgtgttggtggcgtcgatcgtgagatacagattgagctggatccggtcaaattggaggccgcaggtatcacagcagcggaggtttcacgccagctacgtgatgttcaaatggaggcgactggcggtaatgccgagtttggacatggaaagcaaccgcttcgtttttttgcccgcgtcaaaaacattaatgacttatcagcacttgaactaccgctgcccggcgggaagcactttcgcctggacaatgtcgccacaatcaaagacacgattacagaacgccgcgcgctggcttcgcttgatggtcagaaggtggttggattcgaagtcacacgcgctaaaggcgccggtgaagtagaggtcggagacaacatagcccaggcattaagacagataaaagcagaatggcctgatctgcaaattacccaggtctatgattttgtccagccggttcaggaagagtttgatgcatccatgcatatgatctacgagggcgccatactggcgatccttgttgtattcctgtttctgcgtgacattcgggcgaccttaatttcggcagccgccctgccgctgtcaattttacccgcctttatcggtatggacgcgatgggcttctctctgtccatcgtaactttgctggccctgtcactggtaataggccttttagttgatgatgcgattgtagaagttgagaacatcgaaagacacattggtatgggtaagcccccctaccaggcagcaattgatgccgcctctgaaattggacttgccgttgttgcaacaacctttgcgctgatcgcggtctttctgccaacggcttttatgcccggcgttgccggaaagttctttcagcaatttggctggacagctgcgctggccgtttttgcctctctgatagtggctcgcttgctaaccccgatgatggcggcgtatctgatgaagccgcacgtgcgcccgcagcgggatccattctggatggcggcatatctgcatgcttgtcactggacattacgacatcgctggctcactttgtcgctggcgggaggattttttattggctcattgatgcttatccctttacttcctaaagggttcttccccgctgacgataattcgcaaacccaggtgacgctggagctgcctcccggcgccacaatagatcaaacacaagccctggcggaacaggccaggcatcgtctgggaaatctccgtcatattcgtcatatctatacaaccattggtggaggcgcgacgggaagcgatatcatggcggccgacggcaatagtgatgtaaggatggcaacgcttacgctattgctggatcctcgtaaagaacgaccagagaaacacattattgagaacgacattcgtgccgcaatggccacattgccagggacacgtagcaaggttggttttggtgcttctggtgaaaagtatcagttggtgctggttggagatgatcaacaactgctctctaaaacagcagaagcggtattacgcgatttgcgtcaaattcccggcctgggaaacatcacttccagcgcggggcttacccgtaatgaaattatcctgcggcccaatttctccagggcagcagagcttggcgtgtcaggagcagcgattgccgatacgctgcgtatagcgacggttggcgactacgaccaatttttgtctaaattcaatgttgagcaacgccagatccccattgtcgtcaagttatcaaaggcgctgcgtgaacacccacaacagctcgagaagctattggtcccaggaaccaaggggcccgtgatgctcgatcaagttgtcacgctggaacagggtagcgggcctgcacagattaatcgcatcaatcgggcacgcagcatctcgctggatgtagagctttcaggtatggaactgggaaaactgaccgcaatggtatcgacgctcccctctatccagaatttaccgccaggcatacatcaactcactcagggtgatgaagacatgatgaatgaactttttgctggcttcgcgaccgccatggttgccgggattctggccatatatgtcgtactggttctcctgtttaaagacttcttccagcccatcaccattctggtagcgctcccgttatccttgggaggggcgtttgttggactgctacttgcaggccaggcgttttcgatgtcctcgctgattggtttgatcatgctaatggggatcgccactaagaactcgatcctgttggttgattatgcgattgaatcacgtcgcgggcatgttagcccggatggagccacaatcgtcagacctttcagcagaactgaggcagtgcttgacgcctgtcataaacgctcgcgcccggtcatcatgacaacgctggcaatgggcgcaggtatgcttccggttgccatgggctttggcagtgcggatcccagtttccgcagtccaatggcggtagcggttattggagggttaatcacctccaccgtgttgagcctattggttattcctgtggtctataccctgattgatgatcttgagaaaggaatacgtaagttacctgcgctggtgcgtgagagtaaattgagtttcaggaagaaagcaggttttaccatgctaggactggtgctggtgtactggttagcttttccgtttattcctttactcaatattcccaataaaattgttgtcgtttcgatcgtcgctgtagttggtgaaatcctgtttatattcgccgttacgcttctcggtaaagaatattggaataagattaaggcatggctgcgaaagcgattattcaatcgagggaattaa

SEQ ID NO: 93549 - DNA, 1164 bp, Enterobacter aerogenes
atgatgcaaatgcctccccctttctcccggtcgcggattttacccgcactcatgctgattcccatgttgatggtgttaactgcatgcgatgggtccgcggagacaacttctcagacgacaactaaatcggtcctgaccgtaaccgttgtgacacccgagagacgctcagtgcctctctccatagccgcaagtggtgccattgctgcatggcaggaagccatcatcagccctgaagcaaatggcttacgcgtggaaaaattactggctgaagagggtgatgttgttcgtaaaggacaaccactggcggagttttctcatgataccgttatgaataattatctgctggctattgcggagcgcaacgaagctaatgccctcgcgcagaatgcgcaggcagatgctctacgtgcccgaaaattacgaggcacaggtacgctcagtgagcaggatatccataaattattgactcaggagttggcgacgaaagcgcgcctggagtcggcaaaggcacgggtggacgcgcaaaaaatatatctcgaccagaccgtgcttagggcgcctgatgacggtgtgatttccagccgcctggcaagcatcggttccgtcccgggccaaaatacagagatgttccgacttattcgacagggccgatttgaatggcgagctgaattatctgcagaacagctagaaaaagtcttcccgggtcagaaagcgcaaataacctcccccggcggacatacatggaacggagtggtacgcctggcctccaccactatcgatgcctcttcacgacggggaatcgcctacgtggatattctctctcatgaaatcaaagactccaaatccgttcggccaggttcgtgggtcaacggcgaaatcgttttgggtgaccaccagcgttggaccgtaccgcaatcagccatcattgcacgcgatgggtaccatcaggtattcattgtgaatgacaatctgcaggtaaaagcgctaaaggtcagcgttggtcgcgtactggacgatcggcaagaaattgattctggcctaaatggtacggaacaaatagtcgcgagcggaggcgtatttttacatagtggcgataccgtgcaagtagatgacggcgtaacgtctcctggcagggtcgaagagattcaggaggcgaacccgtga

SEQ ID NO: 93550 - DNA, 576 bp, Enterobacter aerogenes
atggcccgtccccgtagtgaagaaaaacagcaggcattgctacgtgccgccaccgaaatttttgccgagcaagggttagcagcatccaccgtaacgatcgccagaaaagcttccgtttcagagggtaccctgtttcactattttgaaaataaagacgcgctgataggcgcggtaggtgactatctccttgatgaaatggagaatatgctggctagaagtttagcgtcagcttcgccggagacaaataagattcagatcggctggaacgcttatattgattgggcactggagaacccggaagcctacgccaccagcaacaagttaatggtctccggaaagctatctgagcaacagatggaaagaagtatgagaatcggggaatttactatgcctcaactcgcatcgatagaggggttagatgccacgcaatcatctgagtttcacggaatgatttccacggtcatggccaatggtgtgatcgacctggccgcgcaaaaaccttaccttacagaggcctataagcgcgcaggctatgaggccatgctccgggctatcgaacttgatggcagtgtataa

SEQ ID NO: 93551 - DNA, 900 bp, Enterobacter aerogenes
atggcaagacgcaacctcaacgatttactctctttcgtcaccgtggcgcgggaaggcagcttcacgcgtgccgccgcgcagcttggcgtgacccagcctgcgctgagccaggcgatttccgggctggaagagcgaatgcaaatccgcctgctgacgcggaccacccgcagtgtgtccccgacggcggccggggaacgcctgttgcaatcggtgggccatcgtattgatgagatagaggctgagctggacatgctgactgaactgcgggacaagcctgcgggaatcgtccgcatcacctgcgggccgaacgtgctgaaaacgaccctgctgcccaagctggcgccgctgctccgcgaatatccggatattcatattgagttcgatgctaatcacggattccgggatatcgtggcggatcggtttgatgcgggcgtgcggcttggcgatacgattgataaagatatgatagcgatgccaatcggcccgaaactgcgcatggcagcagccgcttcgccagattatttcgcacgatacccggtgccgaaaacgcctcatgatctgacgcagcatcagtgtattaatatgcgtatggtccgctccggcgggatttatgtctgggaattcgatcacgagggaggagagttgaaggtccgggttaatggacagttgacgtttaacacgtcggatcatgttgtcgacgccgccctggcagggttaggcatcgcctttttacctgaagaggaattcggctcacacatcagagaaggtcgtctcgttcgcgtgcttgagtcctggtgtcatccttttccgggctactatctttattatcccagccgcaaacagccttccccagccttctcactcgttgttgatgcgctgcgcatgaacgggaaactttaa

SEQ ID NO: 93552 - DNA, 423 bp, Enterobacter aerogenes; identical to SEQ ID NO: 92961

SEQ ID NO: 93553 - DNA, 273 bp, Enterobacter aerogenes
atggtatgtaacattgtgaaaagaattggcttcaaaagaatgctcagttacgccaggctctataacagatatgtaatcgcttccattgtctatggcctgcatgacaaaaaagggcaggaagcgttagatgtggggaatgaggggcaacaaaaaggccagcgcggggctggccttaagtcgtcaagcggggtggcttatttcaggccagccgcttcgcgcagcagggctgctttgtcggttttttcccatgggaaatgttcgcgaccaaagtga

SEQ ID NO: 93554 - DNA, 729 bp, Enterobacter aerogenes
atgaaaagcataccgcgttacggtcttattatcggtttattatttttaagcggctgcgcaaaacagccggagtacaatacccgcacggcactctccactgaggttgccacccgctggggcagcgacgttcactcaacggttaaaggcgtgtctgcagaacgcgtagattcccatcctgatgagatcgtactaattaattattccggtcaatatcaaaccgggtttgaccagcgctatagcattcgtaatagcgatctggaatatgcggtgcgcgatgctaattttaactctctccctattactcgcagctataataattccacgggaaaatggcaatacgccattgcggcccgcgttggtactcagtatcaattatatgtccgtaattatagccacagtgtggattatgaaattgtcgccacggtggatggtctcgatgtcctgagcggtaaggccggttcgcttaacaacaatggctacattgtgcctgctggtggctcgttagcgatcaaaggctttcgtaaaaacagccgtatcgaggcggcattcgaattttcaaacgtcgcgcaatcttatgccgcccattccgtacagggcgacacgcgtaacgttggagtcattggttttgcggccttcgctttacgtggaaaagagcaagcgtcgctaccgccgtgcgcgagccaggccttcccggcggacggtttcgccccggcgccttgtcaaaaataa

SEQ ID NO: 93555 - DNA, 531 bp, Enterobacter aerogenes
atgcaaatatgtagaatggattataatgaagtatcttctgatggaagacggctcaaactacatgtatatggtgttggtgtgtttccagtcttttctggtgtagaacctgtaaccaacattgcagagtgtgcttttaaaaggaacgcggctttaccggttggtacatattggattgttgatgcacccctggggagctttgctaatcgagttgaaagagcaataaaggactttaaaaacggcaccaatcatgatgaatggtttggtttgtttagctcaacaacgatgagtgatcaactttttgttaatgggatcgatagaggctctttccggttgcacccacttcgcccaaatggtagaggtgaatcttgggggtgtattaccttctataatattcctgattttcagttagtaagaagagcattgctcagatatagaaaagtcagggttcccggagggaaaggtttaatggcatatggacgtatcgatgtaacagggcggacagactatgcgtcatgtaaaattaatccctaa

SEQ ID NO: 93556 - DNA, 273 bp, Enterobacter aerogenes
atgcgtcatgtaaaattaatccctaacgtattcattgggatcctttgttttatagtatctttcttcatcgttctcttcccgttgggtgggctgttagattatttatcccggactagcaacgatttcttgaacagcaccggtttggggtttgccgatggggatgccgacccctctttcttgtgggttttgctgacgttgatgatgattgtgaccgtggcgttgatgttcgccattcagaagataagaagcagaaaagcggagagtcgccggtaa

SEQ ID NO: 93557 - DNA, 2412 bp, Enterobacter aerogenes
atgaccaaccactgggttgatatcaaaaacgctaacgtcgtgatggtgatgggcggcaacgccgcggaagcgcatccggtgggattccgctgggcgatggaagcgaaaaacaataacgatgccacgcttatcgtcgtcgacccacgctttacgcgtaccgcgtcggtggccgatatctatgcgccgattcgttccggtaccgacattacgttcctgtcgggcgtgctgctgtatctgatcgaaaataataagatcaatgccgagtacgttaagcattacaccaacgccagcctgctggtacgggatgattttaccttcgaagatggcctgttcagcggctacgatgcggaaaagcgccagtatgataaatcgtcctggaactaccagttcgatgaaaatggctacgcgaaacgcgatgtaacgctcagccatccgcgctgcgtgtggaatctgctcaagcagcacgtttcacgctacacgccggaagtggttgaaaacatctgcggtacgccgaaagaagacttcctcaaagtgtgcgaggtgctggcttcaaccagcgtcgcggatcgcaccaccaccttcctgtatgccctgggctggacgcagcacaccgtcggcgcgcagaacatccgcaccatggcgatgatccagctgctgcttggcaacatgggcatggcaggcggcggcgtcaacgccctgcgcggacactccaatattcagggtctgacagatttgggcctgttgtcgaccagtctgccgggttatttgacgctgccgtccgataaacagagcgatctgcaaagttatcttagcgccaacacgccaaaagcgacgctggccgaccaggtgaactactggagcaactacccgaaattcttcgtcagcctgatgaaatcgttctacggcgatgcggcgcagaaagagaatgactggggcttcaactggttgccgaaatgggatcaggcctacgacgttatcaagtacttcaatatgatggataacggcaacgtcaccggctatatctgccagggtttcaatccggtagcgtccttcccggacaaaaacaaagtggtgcgtagcctcagtaagctgaaatatatggtggttatcgaccctctggtgaccgaaacctccaccttctggcagaaccacggcgagtctaatgatgtcgacccgaccgcgattcagaccgaagtcttccgtctgccgtcgacctgctttgccgaagaggatggctcgatcgccaactccgggcgctggctgcagtggcactggaaaggccaggacgcgccgggcgaagcgcgcaacgatggcgaaattcttgccgggatctatcaccgtctacgtgagctgtaccgtcgcgaaggcggtaagggcgcggaaccgttgctgaaaatgagctggagctataagcagccagatcatccggaatcggaagaagtagcaaaagagaacaacggctatgcgctggcggatctctacgatggtaatggggggctgctggcgaaaaaaggagagttgctgaatagcttcgcgctgttgcgcgatgacggcagcaccgcgtcgtcctgctggatctacaccggctgctggaccgagcagggtaaccagatggcgaatcgcgacaacgccgatccttcgggacttggcaatacgctgggatgggcctgggcctggccgctcaaccgccgcgtgctgtataaccgcgcatcagccgacattaatggcaagccgtgggatgcgaagcggatgctgatccagtggaacggcagtaagtgggtcggtaatgatattccggacttcaataccgcaccgccggggagcagcaccgggccgtttatcatgcagcaagaggggcttgggcgcctgtttgcgctcgataaactggcggaagggccgttcccggaacactacgagccgatggaaacgccgcttggcaccaacccgctgcaccccaatgtggtctccagcccggtggtgcgtttgtatgaagatgatgccattcgcctgggtaagaaggataagttcccgtatgtcggtactacctatcgtctgaccgaacacttccatacctggaccaagcacgcgctgctcaatgcgattgcgcagccggaacagtttgtcgaaatcagcgaagggctggcgaaaagcaaaggtatcgctaatggtgactgggtgaaagtcagcagcaagcgcggctttattcgtgcggttgccgtagtgacccgtcgactgcgcacgctgaacgtcaacggccagcaggtagaaaccgtcggtatcccgctgcactggggctttgaaggtgtggcccgtaaaggctatatcgccaacaccctgacgcctaacgtcggcgattccaactcgcaaacgccggagtataaggcgtttctggtcaacatcgagaaagcgtaa

SEQ ID NO: 93558 - DNA, 327 bp, Enterobacter aerogenes
atgatgcttgaacaattcaatgtctatcgaaattgttctgcgcaaacaaataacaccctgccgtattatatgatagtgcagaatgattactatgctgacctggccactagagtcattattcctttaatgcgggcgcgacagttacctcgttggcatcagcatgtcgccccaaggataaatatagagtttgacagctttttactttgtacgccgatgatcagtaatttaaataataaacgaatccagccacaggatttcgtatgtaatctgagttgtgcgcgtcagggggtgattgattcaatcgatacacttatcactaactgctga

SEQ ID NO: 93559 - DNA, 633 bp, Enterobacter aerogenes
atgcccgaacttgcttcattaattgcttttgccgccgtggcgctggggttggtactgacgccgggaccaaacatgatctatctcacctcacgctctatttgtcagggtaaacgcgccggacttatctccctcgccggtgtggcgctgggctttattttctatatgctttgcgcggccttcggcatcagcgcgttggtcttcgccgtgccctatgcctacgatgcgttacgtgtttgcggcgtggcttatctgctgtacctggcatggcaggcgattaagccgggggcgcgttctattttcgcggtacgtaatttgccagcagatagcggccgtaagctgtttctgatgggctttattaccaacctggctaaccccaaaattgccattatgtatttatctctgctgccgcagtttatcactccggggcatggcagcgttcttagccagtcactggtgttaggctttatccaggcactgattagcgtggcggtaaacgggattattgtggtgatggcggggcaggtggcgctgtttcttgggcggcgaccgggctggcaacaatttcaacgttggctgatggcgagcgtgcttgcaggcatggcggtgaagattgcctttgaggcgcgaaaataa

SEQ ID NO: 93560 - DNA, 153 bp, Enterobacter aerogenes
atgcgtcgtagctacgtactgtgcctggtagtgatgtgcgtcactgctctggctttcgtctggatggtgagaagttcgctttgcgaattgcacattaaacagggggatactgagctcattgcgtatttagcttacgaagttgaacaccgttaa

SEQ ID NO: 93561 - DNA, 1014 bp, Enterobacter aerogenes
atgctcagcagaacagtgacgtttcatcgtaccggcggcccggaagttctggaaataacgccaatgaccgttgcggcgcccgcggcgggcgaagtacaaatacaagtacaagccattggaattaaccgcgctgaggtgatgtaccgcagcggccagtacgtcattgcgccgcagtatcccgcaaaattaggctatgaagccgcaggcatcatcaccgccgtcggcgcggatattgatggttttgcgcctggcgatagcgttagcgttatccccgcttttatgtttagcgattacggaatgtacggcgaaatcgtcaatgcgccggcacacgcggtggtgaaacatccgcagaatctcagtttcgttgaggcggccgccagttggatgatgtttgtgacggcttatggcgcattagtagaattcggcaagctgcaggccggtcaatatgtggcgatcggcgcggcgtccagtagcgttggcatagcggcaatccaaatcgccacaatgcttggcgcgcatcctattgccctttcgcgtagcagcgacaaacgggagctgctaataaacgctggcgctgaggccgttatcgccaccgccgaacaggatgtcaccgccgagcttggacgcttaactcaaaagaaaggcgttaatatcgttttcgatccggttggcgggccggacagcgccaaactagcggcagcaatgtctatgcatggcctctttttccagtacggagccttggatagccgcgatctctccatcccggttatggatattctcggtaagcatctgaccttccgcggttatgaattgtttgaaatcactaccgaccgcgacaagatggcgcgggccaaggccttcgtttaccaggggctgcaatccggcgcgctgaagccgattatcgacaaagtgtttgcctttgacgacatcgcgatggctcaccgctatatggaagctaacgctcaggttggcaaaatcgtcgttagctgtgcgtccaaacagtcaacatcttaa

SEQ ID NO: 93562 - DNA, 1920 bp, Enterobacter aerogenes
atggccctattgagagatgagatccgcgaccactcggcagaagagatgctgtttatccgccgcgccgttattgctttcctgttggtggtggtctgctttggggtgttgattttcaatctttaccatctccaggtagagcagcacgacttttatcagacccgttccaatcaaaacgacattaaaatgttgccgatcgcgccaagccgggggctgattttcgaccgcaacggtattccgctggtgcaaaatatcaccctgtatcgcctgcaggtgatccccagcaagattgccgatatgtcggcgctgctgcaggcgttaagcccgattgtcgacctgacggcggatgatatcgccagtttccgcgacgatatgcaccacaatagccgctataaagaggtgacgctgaaatccgatcttaccgatgtggaagtggcgcgattcgcggtcaacgaattccgttttcccggcgtcaccgtcgagagctaccagcagcgaagttatccctatggcgcggaactggcgcacgttgtcggttacgtttcgaaaattaacgataacgatttacaacggctggcgaaaaacggcgaagcagaaaactacgcggccgatcgcaatatcggtaaacaggggattgaaggctattacgagaaagagctgcatggcaccaccggttatcaggaagtcgaggtagacaaccacggtcgcgtcgttcgcctgttgaaagaagtcccgccggtcgccggcaaaaatatctatctgacgctagacctgcatttgcagcagtatattgagtcggtcctgaagggccagcgcgccgcggtcgtggccgtcgacccgcgcgacggcggcgtactggcaatggtctccagccccagctatgaccccaatcccttcgttaaggggattggctaccaggcttacaaatcgctgctcgataaccaggatcgcccgctgattaaccgcgtcactcagggcttgtatcccccggcttccacggtcaagccgtatatggcgctctcagccctttccgccggggtgattacgccaaataccaccttcttcggcgcgccgacctggacgctacccggtactcagcgccgctatcgcgactggttaaaaacgggacatggtatgttgaatgtgaccaaagcgattgaagagtcggcggataccttcttctaccaggtcgcttttgagatgggcatcgatcgtatacacgagtggttgagcaagtttggctacggacaatcgaccggcatcgatctcaatgaagaatacgccggggttttgccgagccgcgagtggaaacagcgggtacataaaaaaccgtggtatcagggcgatacgatttccgtcggtatcggccaggggtactggatcgcgacgccaatccagatggtgaaagcgctgaccactttaatcaacaacggcaaagtacaaaacccccatcttttgtactcaatgaagcaggggaataaggtcgtacggtaccagcagccagccaatttaccgcaggtcggcgatccgaaatcgccatactggggggttgtccgcaatggtatgtatggcatggcgaacctgccgaacggaacgggatataagctgtttcataccgcgccgtaccagattgcggcgaagtccgggacctcgcaggtgtttagcctgaaggagaaccagacctacaatgccaaaatgatcccggtacgtctgcgcgaccacattttttataccctgtttgcgccgtatcagcatccgaaagtggcgatggcgctcattctcgaaaatggcggcggcgatggcgttgtcgccggcccgacggcgcgtgcgattctcgaccatatcttcgacccggcgaatgcgccagccgcggatagcgcgcaaagcaacgttccgcaggtcgatagcgccgatgcgcagtaa

SEQ ID NO: 93563 - DNA, 1248 bp, Enterobacter aerogenes
atgaataatgaattaagtaaaggatatttaccgctactacggcaattacgtagtcttttatttatcactgctgcgttgctcagcgctaatgcctgtgcatcagtgcccaaaggggatacccattttagtattgcgataagcgatctctatattccctatttgtcggctgaagagaacgcggcggtgcagcaaaacctgcttaaggaaacccagattgtcgccacctatgcccgctacaaacgttcatttcgctggtttgcacgtatagatggcgttaccggttttttcgctcctggattcgatgaaatgcgtatcgatgaaaagcgcagttttcccttacgtgcggaaccggggcaggcgaatacctttggcgttgatttaccgcaatctctcgatggcggctatattttagctggtctgtattttacgctttctgccgatgcgttttatcgtcaaccttcgtatcgtactcttgtggataaaatggcggatagtaaagaaaaaaacagaaaagatttttctgacccttatattgaatatatagtctctgaggataagtctggtcataaaataaagtctggtgaacagcaggactgtgtggatatatcaacgccatttggttttccggaaactaaaatgccgatggtggtgcgcagaacattaagttccaaaacattgtatttggtgcgtctgatgcactacacctgcccgttaactgaagaaaagtcagataatgggcgtttaccgccggcgcgcattgcagacgcgcaaagccgtttcgaagattaccgatcgtcggcgtttattagccatgacggtgttctgccagtgactccagcgatgacccgctggtatcagcgcggcggttataatgtcaccggctggcggcagcagtatggcgcctttgaaaagttccgtatgcatttacgtgaagaccggacttacgcggttaatgggcgagtgccttttcgcattgagacatggaatttttttaacaaccaactggtgaagtatgccaacgaagtccactatctgagcactaactacagtaatgattctataagcattgaagaggtggtttactttcagcagggcgttgaagtggcgagaaaaagtaagcaggagaattgtagcgaagcggcctgtcagaaagttctcgccgacgttaagcagcagatgtcgcagccgtatgacgttttgcttaatgaggttaacacctacaaagcgttacctttaccgagggaataa

SEQ ID NO: 93564 - DNA, 372 bp, Enterobacter aerogenes
atgaattttttatcttatatcatgcctaaattagcttggataattccacttgtggtccttgtctttgttatctatgtattgatccagaatttattatcttcgaatcaagacaaaaaaacaaaggccaacggagttgatattgatgcgatgattgttgaggtgaagtatgaccgtgatcaacgtataaacaaccatctctcggcaattttgacgattaaatttgattacaatggtgaaaacgtagtaggcagtagaggtatgatttttccgacatcgtgtaaggaagatgtaatctctggcaaggttattagagttagagttaacaaagataagccagataacttttatttcattgacttcagaaatgtttga

SEQ ID NO: 93565 - DNA, 399 bp, Enterobacter aerogenes
atgtcatttgaaaaatggatcaccaatatgtctccaggggaaatgatacccttgattattggtttatcagtaagtatattattcatgatagccacctatttcacattcagaaagtcatcgttacaactaaagtcagtgaaaatctttttaaaacgcgagcgctggcgaggagacttactgaggtcgcggattgaattctggcaacaaactaatgtaatgcttggtaataatttatttttcgatctgtattttcacatcgatggcatcccccaactgctttgcgccaaggcgctaatatcatcatcacaaatacatttattacatgaagggttacctattgtcgttaaaaaagggcgtggcaataaaattgccgtaatgcaaattggggagtctggttaa

SEQ ID NO: 93566 - DNA, 891 bp, Enterobacter aerogenes
atgtcgaattatccacctattgcaagtttgcgcagtttcgaggccgtcgcccgtcttggcagcgtgacgctagcggcgaaggaactgaatgtgacacattcggcgattagccagcaaatcaaaatcctcgaggagcttgttggggtaaaactctttatccgccaggggcgtggcgtacaaatcaatgaagaagggcggctgtacgcgctgcaaattcgcgaggctctgcagcatatcgcagaggcgacaaagctggtacaaattaaacctcggacgttggaacttacgttgtcaacactaccttcatttgggtgtcactggctattgccgcggctaatgagatttcgcgagaaatatcctcatatcttattgcggcttcaggccagcttgacggtgagcgatctggaacaggaagggattgatattgctatccgtatggggcgtggtgaatgggaaggggttaaaagtcattttctctttgcggatgaattaatggttgtcgccgcgccaaattataacggcggcaagctgccagcgacgccggaggaggtggctgcgagcaacattatttattcgatggaatcatggaaaagctggtgcctgaacgctgggctggagaaagagatcgagccaggcggactacgggttaatgattcaaatctggttcttgatgcggtacggctgggcgaaggtatcgctctggagcgtagatctctggttcagggggcgctggatagaggagagttggtgcagataacggcaattactgcgccttatccctggcactactggttggcggtctctccgttggcggaggaaaaggaggaggcagcgctgtttatcggctggctttttgacgaaatcactatctggcagcaacaacggcaataa

SEQ ID NO: 93567 - DNA, 615 bp, Enterobacter aerogenes
atgacgatgaaacttattggtatgatggattcgccttacgttaggcgtgttgcaatctcgctggaactatacggcatacaatttgtgagcgttcctttatcagtattcagcacctttgatgcgttttcacaaattaacccggttgttaaagcgccaacggcggtactggataacggtttgttattaatggactcgacactgattctacaatatttcgaaatgcaggccgaacccaggcgtaaactgttagcgaacaatccgcatcggttagcggaggatctgcaactgttggggtttattctcgctgccagcgaaaaggcggtacaaaatatttatgaacatcgtctccgtccggcggaaaaacagcatcagccatggattgagcgtgtaacacagcaactgctggcagcttgtcatgaatgggatgcaagattggccggccgcactaccgcccaacagctggatcaggtcatgataaccagtactgtcgtctggtcatttattcaggccatgatcccaacgacgatcccgccccacgattttaaacatatacatggtttagccgaagcatgtgaggctttagccgcttttaaaaaatatcctctggcggaataa

SEQ ID NO: 93568 - DNA, 495 bp, Enterobacter aerogenes
atggctactgaaactgccggtgttggtggcctcaaaatcgctgagacgttcccggcaggccggggcagcccgcatggatgcgggctgagggccgtgatttgcaaggacgctgcctcggcccgacccgaagcctgccgggataagtcgaaggcaccacgaagtggcgattttggcggccagagcccgggagtacagagggcggcggcgactggccgccctctgtgcgctccctgcgccatgagagacataacgcagaagaaatattgggagcgcaatatgttcggaaacagcacagaacaaccgcttttccaggagcgaaaccattgcaaactgataacagtatctacccacggcgccgtttgtttaccgggtggcggctacgccttacccgacctacggcctgtaccggatggtcgccgggatattcctgataaaacaaaaccccggccacgcctgacgcgaccggggttttttaatccatgcgatttcgcttaa

SEQ ID NO: 93569 - DNA, 2841 bp, Enterobacter aerogenes
atgagcaataaacactttgaactaaacagaacaaccaaaacgctggcaaggatatttcccgccttattaatgttaacgccaatagtcgttagcgctgccacgattgaacagtcaacctccacgccgcaagacttctcggctgatagcgaatacgttattaatagagatgttaccgtctcctccgcagataacaccccggcagtatccgttagcggaatgaatgtcgaaaaagtcaccaacgaaggtaatattgcaggaacggggatcggtctggatattaatatcgaaggacaatccgttgaaataaataataatgaaaatgcaattatttcatctgcaactgataatgccgttaacgtgcaatcaatggcgggtgttcttaataatagtggaatcattactggcgccagcaacggtatttttgttagcgaagagtcatcggcaattaggatcactaataccgataccggcgtgattaccggcaaaaacggcctgagttcgcaaattggcgtcgggttagataacagcggcgccatcaccggtaccgctggcgatggtattgcgttaagcgacggcaacagcaaaatcaacaacagcggcaccgtacagggcagccaaaacgggatcaacgtcgttgatagcgcgaaagccgatatcatcaacagcggtttactcggcggcggcggtacggccgtcatgttcgccagcagcaaaaataacagcctggtgctcaataccggctcttccctcatcggcgatgtcatctccacgggctctacgggtaacacactctcgctggagggctctggtacggaagacagcaattttgtcggccttaatgatggcgacggttttgcctccgtgaaaatgaacggcgaagactggacgctcaccggcaacctcgacatcatcggcagcggcgattccctccaggttaatagcggccagttaacgctggcgggcgctgtcgctaatagcggcaacacgctggtcgcggaagcggctacgctacagttaggcaacgggcagaaaaccgcgaccctcaccggcagcatgaccaacaacggtacagtgatcttcaatcagggaagcgactctacgtttgccaccagcatcatcggtagcggcaacgtggaaaaagtcgatgccaataccctgaccttaaccggcaccaatagctataccggcaatacccttctgaaaagcggcaccactctggtcgcggaaggcgccactctcggtgtagcagacagcgacgccaccatcaccatcgaaaatggcgcgcaatttgccagcgccggcgaagtgaataacaacattgatatcctcagcggcggtatcctcgcggcgtggaatgcggttgaaggtaacgcaacgctaagaacatccggcgtcgatacgattaacggcaatgtgaccaacagcggtacgctgttactcagcgccgccgataatagcgttggcaacaattttaccattaacggcgactataccggttccgccggcagccagatcgtaatgaacagcaccctcggcgaagacagctcgccgactgaccatctgtccatcaccggcagcagctacgggcaatctggcgtcagcatcgccaatatcggcgggctgggcgcgcaaaccgtcaatggtatggagattgtcagcgtcagcggcagctccgaagcccagctaaccttatccaaaccggttgtcgccggggcttatgagtatggtctgtatcaacacgacaacggcaactggtatctggaatccaaagcgaccccgtctgacgatccgtcggatgatactgacgatggtgacagcggcagcgatagcggcactgatggcggcagtggcactgatggcgacagcgataacggcagcaataccgataatggcggtcaatccgcgccagaagtgatggcgccggaagtcggcgcttatctgggtaactaccttgctgcacagagtatgttcctgcataaacgtgacgatcgcgaccagctcacgttccgcaacgaagacaatctgaacacctggatgtacgttaagggccgctatcatgagaacgatgccggcggcgataaagtcagctatgacaccactaccaccgtgcttcaggtcggcagtgatttcatgagcaagccgatgcacaaagggatactgcgtgccggcggcatgtttggcgcgggccaggcgaaaacagactcggatgcgaaacacaacgtgcgtgacgcgcagggtaaagtcgacggtttcaacgttggcctgtacgcgacctggcaggaagatccgaaattacgtctgggcagctacatcgatacctgggcgtcctacagctggtataacaacacggtcaccagcaatcgcaacaatgaaaagtatgatagcaaaggctttgccgcctctgtcgaagtcggccatgcatgggtgatcccttcagacaatgcgcgtacctggaagattgaacctcaggcgcagatgatctacagctatctcgatcaggaaaatcataccgatacggatggcgtgcgggtaacgaccgtggataacaatagcctgtttggccgtctcggcgtgaagagcagctacttcgagcaacacgatgttaaagcgtggcagccttatgttgccgtgaactggctgaaaggcgcgggtcaaaacgatctggcattcaatggcgaaaaagtcagcaacgatacgcctgacgatcgcggtcagttagagctgggcgtaaccggtaatgtgaacgagacgaccaccatctcgctgcgcgccagcggcgaatggggtgaaaacagctacgccgcgtatggcggccacattctgctgaatcaccgttggtaa

SEQ ID NO: 93570 - DNA, 288 bp, Enterobacter aerogenes
atggttggggctataacaagtagtgttggctctggattaggatatggggttggtcattatgtagtgaagcctactgcaaatacaatcggtaaatggataactggtggatgggaccccaaatttgatcccgttagattaaaatatacggaaataaaagggctgattggaatatcgaaagaaatgtcgccaagtaaaattcctggagcaacaggaaatataactggttcctttagcacagaatacggcagtgttgaaactcaagaaattatcaataaggttaagaaatga

SEQ ID NO: 93571 - DNA, 258 bp, Enterobacter aerogenes
atgaaaatctcaacctcaaaatggttcttgatattcatttacttgattgtttcctttcctgtttgtgtcttcgtaggtgttgttataactcattttttgatagaaattgttttatttttgattgtcggtcaacctttttatttatatgcaattgatttcatgaaaatcctaaagggaagtattgtcggaggccttatcggagcaattggttgttggtggatttattaccagggttacaagaaaaatcgtaataggtag

SEQ ID NO: 93572 - DNA, 198 bp, Enterobacter aerogenes; identical to SEQ ID NO: 92088

SEQ ID NO: 93573 - DNA, 768 bp, Enterobacter aerogenes
gtgatctactcggtaggtattgactccggctccactgccaccaaaggcatcctgctggcagacggcgccatcgtgcgccgtttcctcagcccgacgccctttcgccccgccgatgccattcatgatgcctgggagacgctgcgcgcggacctcgcggcaacgcctttcttaaccctcaccggctatggtcgccagttggtcgattttgccgataaacaggtcaccgaaatttcctgtcacgggctcggcgcgcggctgctggcgccggaaacccgcacggtgattgatatcggcggccaggacagcaaagtcattcagctggatgcgcagggcaacctcagcgattttctgatgaatgacaaatgcgccgctggtaccgggcgctttctggaagtgatttcacggaccctcggcgccagcgtcgaccagttggacgccattaccgaaggtgtagaaccgcacgccatcaccagcatgtgtacggtgttcgccgagtcggaagtcatcagcctgcgttccgccggagtcgcgccagagtcaattctggccggggtgatcaacgccatggcgcggcgcagcgcaaactttattggccgtttatcggcgcagggaccgctgctgtttaccggcggcgtcagccactgcgtctccttcgcccgcatgctggagaagcatgttggcatgccggtcgcgacccatcccgacgctcagtttgccggggcgatcggcgcggcgctgatcggccagcgccagcggaggcgcggatga

SEQ ID NO: 93574 - DNA, 2760 bp, Enterobacter aerogenes
atgaaactgacgccgcaggatacttcgcctcccgtcgcccagctggaaaacgttggccagcagtttggcgccaccatcgcgttgcgcgatatcaacctggcgatcccggcgcggcgtatggttggcctgattggcccggacggggtcggcaaatcaagcctgctctcgcttatcgccggggcgcgggccatcgagcagggtaacgtgatggtgctcggcggcgatatgcgcgacgttcgtcaccgccagcaggtatgcccgaaaatcgcctggatgccgcaaggtttggggaaaaacctctaccatacgctatcggtctatgaaaacgtcgacttcttcgctcgcctgtttggtcacgataaagccgagcgtgaacttcgtatcaacgaactgctgcagagcaccgggctggcgccgtttcgcgatcgccccgccggtaaactctccggtggaatgaaacaaaagcttgggctgtgctgtgcgctgatccacgacccgcagctactcatccttgatgaaccgactaccggcgtcgacccgctctcccgcgcgcagttctgggatctgatagacagcattcgccagcgccagccggaaatgagcgtgctggtcgccaccgcctacatggaagaggccgagcgcttcgactggctggtggcgatgaacgccggtgagattctggcgaccggtagcgcggcggcgctcaaaaaacagaccggcagccagacactggaacaggcatttatcgccctgctgccggaagcgcagcgcctggcgcataaagacgtggtcatcccgccgcgcgacagcagtgaggaagagatcgctattgaagcgcgcggcctgaccatgcgcttcggcaactttgtcgccgtcgaccacgttaactttcgtatcgcccgtggcgaaatttttggcttcctcggctctaacggctgcggcaaatccaccaccatgaagatgctcaccggcctgttgcccgccagcgaaggcgaggcctggctgttcggccagccggtcgacccgaaagatatcgccacccgccaacgagtgggttatatgtcgcaggctttctcgctctatagcgaactgagcgtacggcaaaacctggagctgcacgcccgcttgtttcacattccggaccatgaaatagctggccgggtcgcagaaatgagcaaacgctttatgctgaccgaggttgaagacgcgcttcccgctgacttgccgctggggatccgccagcgcctgtcattagcggtcgcggtaatccatcgcccggagatgctgatccttgatgaacccacctccggcgttgacccggtggcgcgcgatatgttctggcagctgatggtcgacctggcgcggcaggatcgtgtcaccatcttcatctccacccactttatgaatgaggccgaacgctgcgatcgcatctcgctgatgcacgccggcaaggtgctggccagcgatacgccgcaggcgctggttgagcaacgtggctccgccagcctcgaagaggcgtttatcgcctggctgcaggaagcggcggatgccgcgcaaccgaccgtttctgtctctaccacgcccgcgccgtctgctgtcgcatcacaccacaagaacgcgtccccacgccagtcattcagcctgcgccgcctgtttagctatagccgccgcgaagcgctggagctgcgccgcgatccggtacgatcgacgctggcgctgctggggacggtgatcctgatgtttatcatgggttatgggatcagtatggatgtcgaggatctgcgttttgccgtcctcgaccgcgatcaaacgatcagcagccagaactggtcgcagaatatcgcgggctcacgctactttatcgagcaggcgccactgcagagttatgacgaattggatcgtcgaatgcgtaacggcgagctggcggtggcgatagaaattccgccgaactttggccgcgatatcgctcgcggaacgccggtgcaaataggcgtttgggtggacggcgcaatgccaaatcgcgcggaaacggtgcgcggatacgtacaggcgatgcatctggcctggctacaggagatggccgggcagcaaagtagcccgaatcgtgagacctcgcttatttccatcgagacccgctatcgctataacccggacgtaaagagcctgccggccatcgtcccggcggtgatcccgctgctgctgatgatgattccggcgatgctcagcgcgctgagcgtagtgcgtgaaaaagagcttggttcgatcatcaacctgtacgtgacgccgaccacccgcagcgagttcctgctcggcaaacagctgccttacatcgtgttggggatgtttaacttctttctactatgcgctttatcggtcttcgtatttggcgtcgcgcataagggcagtttcctgaccctcaccctggcggcgctgctgtatgtcaccatcgccaccgggctgggattgctgatctcgacatttatgaagagccaaatcgccgctattttcggtaccgcgattatcacgcttattccggccacccagttctccgggatgatcgacccagtggcatctctggaggggccaggtcgctggatcggacaaatctacccgaccagtcatttcctgaccatcgcccgcggcaccttctccaaggcgctgaatattagcgatttgtgggtttcgttcattccactattgattgcggtgccgctggtgctcgggctgagcgtgtggctgctgaaaaaacaggaggaatga

SEQ ID NO: 93575 - DNA, 165 bp, Enterobacter aerogenes
atgttaacgaaccaggcgaccgggccggatgttttcccggaggcggtgctgcgcaccttttccgggctacgggactgtagccccggtaagcacagcgccaccggggaagatggcggcgcgtctggccgcaaaacacaaaaacaaaaggccctgtcttccgactga

SEQ ID NO: 93576 - DNA, 684 bp, Enterobacter aerogenes
atgactgagcgcggaatgatttttaattccgagatggtgcgcgccattctcgacggcaggaagacgcagacgcgacggatcatgaagattcagccagagcattcaggacttgggttacgccgggtgattgactccaaaaacggtagtgatgacggtaaatatttttggtcatcctcggattcgtgcggccgaaaagcgcgctccaagtcgttcgcatgcccattcggcgcagtaggcgatcgcatctgggtgcgcgagacatgggcgctcctgggtaacgaagacggttgctgtgtggactggaatgacaatctgtgtaagggcgacgaaaagactgctgcgcgcatttaccgtgctagttgtgaacagcgccccggagattatgggttgtggtctatacccgacaatgcctactggaagccgcacactgaaaatgaaaaatttgaaggcgcgtggcgaccatccatccacatgccgcgatgggccagccgcattctgctggaaattacagacgtgcgggttgagcggttgaacgatatcagccaagaagatgcgcaagctgaaggcatggcgcttaccggatggcggccaacatactctgatccagatagtggaggagaggtttggactccatatgacaactttgcgcggctgtgggagtccatctacggcgaaggaagttag

SEQ ID NO: 93577 - DNA, 345 bp, Enterobacter aerogenes
atgagcaagtcattaaacgcgcgttgcattcgtcgctgggaagttgaatttaaaggccgctgcgattcgaaatatagcccgtactggcgtaaacgcgacctgcgtgggtatatcagggaggccgcgcttactactgcttactgcatggttgagcggttagctgaagataatgccagggtggctttttgcggatattcgtatggctggtcccctgaattctcagcctggtacgccgaccgccgcgaggcatatctgaccgcagcccgccgcgacctcaataagagcgctaccaacgccgaaatcgacgaagaaatcgagaacgaactggaggcctggaatgactga

SEQ ID NO: 93578 - DNA, 222 bp, Enterobacter aerogenes
atgacgcctgaagaaaaagaaaacgctctccgcgcccaggctcgtcgctgcgcagaagagataaccaaagcgatgagcataaagcctaaaccgaagtggaacgctgtatgcccccccatccttcgcaagcactacgagaaggtaaagccgatgggtgtcagcctggtgaaatttgtcagtgttattgggcggctcagcggccgctatggagtggaatcatga

SEQ ID NO: 93579 - DNA, 660 bp, Enterobacter aerogenes
atgactaaacaatattctcttatctacgctgatcctccctggtcatatggcaacaccatcagcaacggtgccgctgtcgaccactactccacaatgaaactcatcgatatgaaacggctccctgtatgggagctcgccgcgggaaacgccgtgctggcgatgtggtacaccggcacccacaaccaggaagcgatcgagctggccgaggcctggggctttacggtacgcacgatgaaaggcttcacttgggtgaagctgaaccagttggccgagctgcgcattaccaaggctctggcagagggagacgtcgccgatttttacgacttcctcgacctgctgaatgccgagacgcgcatgaatggaggcaaccacacccgcgccaacacggaagacgtgctgattgccacccgcggcgccgggctggaacgcaagcatgccggcattaagcaggtggtctacagcccgctcggcgctcacagcgagaaaccgtgggaagtacgccaccgcctggagttgctatacggcgacgtgccgcggattgagctgttcagccgcagcgctgcgcccggctggagtcactggggaaaccagtgcgccaccgcttccgttgagctgatccccggctgcgccatcgatgttgtaaagacggaggcagcatga

SEQ ID NO: 93580 - DNA, 285 bp, Enterobacter aerogenes
atgccatcacctcttcccggggcgggatatttacgccagccaaaacattcaggcaccaaagaggaggtgctggcgaggtgcttcgaggcaatcgcaaataacgattaccagacgccgaacatggaagttcggattcaggaacgattcgagaaggatgtctggttcgacaatctggaagcaagtaaacgccctcagtatgtaccggtcggaccgatgcgcccatcacgtgaggatgaacgaatcaaacgctatcgggcccgcttcgggtctgttagcaataactga

SEQ ID NO: 93581 - DNA, 468 bp, Enterobacter aerogenes
atggcaataaataccatcatcgtttccggcaatgtggggaaagacgcggttctccgcgtcacgccaaacggaaaacacattgcgtcattctctattcccgccaaaaccggatatggtgagaatgaaaagacatcctggctgaattgtaagatgttcggcgccatggctgaaaagctatcctctgcagtcgttaaaggcgcgaaggttacagtctctggtgagtttgttattgaagaatggactcgacaggatggttctacagcgcaaacacctaccattctggttcgggatatcgatctgcccccaagaggtacttttgaaaatgataagccgcgacaacgacaagttcagtcgcagcaatcatcagcacctaagcagcacagcgaaccacctatggatttcgacgacgatattccattttcgccggtaactcttcccttcccacgtcacaccattcacgtcatttaa

SEQ ID NO: 93582 - DNA, 726 bp, Enterobacter aerogenes
atgaaccttgatgatttagatgcgccatttgccagtgaggatattgagtggcgcattcagcaggcgggaaaaaacaataacggcatttgggcgaaggtgttggcctacgtaaccaaccgcgcaatcatgaagcggctggatgaagtatgcggcaaggctggctggcgtaacgagtaccgagatattccgaacaatggcggcgttgagtgcggtatttccatcaaggttgaaggcgagtggatcaccaagtgggatgcggcagaaaacacacaagttgaagctgtgaaaggtggtcgctctggcgccatgaagcgcgccgccgtgcaatgggggatcggtcgttacctctacaatctggaagaagggttcgcagtggtttcagcatcgcgcgcgccggggttccactacgccaaatcaaaagaggttggtcagttctattggaaagctcccgcactgccagcctgggcactgccatcaggtattacagtcgcgcagaaagagcaacctcatgatggatctcaacacagagaccaggcacctctgtccgtggatgcggacaaaatcctcgccgaattctctgcatacgccggctctgaaaacgatagcgatcggcttaagcatcgctatgaagacacatggaaattgcttaacggctttgctgagcaccagaacaaatgcaaagacgtaactggtatccgacttaaagagttaaaacaggcggcataa

SEQ ID NO: 93583 - DNA, 159 bp, Enterobacter aerogenes
atgacagcggcagaacgatgggacgaagagtctttcctgcgtctgatgcgcgacgtgataccggataagccagagaacgacaacgagccaatcaatctggccgccgagcggcagaatccggtcattggctgggatgagtttgcggggaattacacatga

SEQ ID NO: 93584 - DNA, 198 bp, Enterobacter aerogenes
atgaatatcacatgcgagtgcgctgacatgcgcacatctgttggcccacacaacactctcaaagttgagatggaaggcgttgtgctggccggaactgtaaaaactagggacgtacttccccagctcgacggcgcagaggtgatcgagtggttggttgagcagggttacgtcatcacccatcaggagcgtgcagcatga

SEQ ID NO: 93585 - DNA, 972 bp, Enterobacter aerogenes
atgagcgaagtaacggatttagtcgtcattgagaaacagaacgcaatggcggtattcaccaccaaagagcaactggacccgattattgaggcgatcgaaaaggaagctcgcagccttgtcccggatgtgtcgactcgtaaaggccgcgacgctatcgcatccatggcacataaggtggcccgttcaaaaacctatatcgacaacgccgggaaagacctggtggctgagcttaaagccttaccgaagcagatcgacgaaagccgacggattgtgcgcgagcgacttgacgcgcttaaagatgaggttcgccgcccgctcaccgagtgggaagccgagcaggagcgaatccgggtggaagaagcctggaacgctatgtacgaagaagcgttggtgatgaacaagatgttcgatgatcagcgcgccgcacaaatcgaatcagaccacgaaatggctttgctgatgaatgacaagtttgatcgtgaacgtgaagagcagctccgtctggcggaacaggcacagcgtgaacgtgatgagcgactgaagcaagaagcggcagaacaagcccggcgcgatgccgaagtgaagcacaaggctgaactggaagctgcagcacgccgcgaggctgaagagaaagcgcgcgcagaactggctgaacgccagcgcatcgaagcggaacagcgtgcggcacgagagaagcaggaagccgaagcccgggctgagcgtgaaaaagccgcggcagtcgaagccgaacgccttaaggcaaaacaggcagaagaagcacgcctggctgaagaaaagcgcaaagccgaagagcaggcaaaaagagaggctgacgttaaacaccgtaagactgtcggcaccaatattgtcaacgcgctaaccagtcataccagcatcacccgcgagcaggctatcgaagtgcttacggcattgaaagataacctgatcccctgcgcgacaattcattactga

SEQ ID NO: 93586 - DNA, 207 bp, Enterobacter aerogenes
atgattagtcagcactacggcacacagaccgttaaccgcggcgccgttcagccaggcatgctggttaagcatcgcgacggcacctggacggcatctgctcacaagcgcgggaagctataccttcaccgcggctgcgaacgtacctacaccaaagccctgctcatcgagatctacctcgatggacgcggaaacggcttaagcaactaa

SEQ ID NO: 93587 - DNA, 138 bp, Enterobacter aerogenes
atgaatcacgaggaatttgatgatggtcgttgcggtatgtcgcgccggtgctggcgaaacctgacccgcatctgcattggcttgatagccatatacctgctgattgccttgtttgttatggaggtcttccatgattag

SEQ ID NO: 93588 - DNA, 201 bp, Enterobacter aerogenes
atggagtttaagaaaggggatgttgttacgtggtcaggccaggccgcgagcagctggaagacgaaaactggagtgattacggaagtgtgggaatacaagaaacaaacgcgttacaccgtaaaagttgatccgaaggaaggttctacggcgaaaccaaagttttattacccccgcacatcagcactacagaaagtgtcatga

SEQ ID NO: 93589 - DNA, 693 bp, Enterobacter aerogenes
atgggattctcggagcgcctggcgcaggcaatgaaaaatgctggatatactcaaggccgattagccaaagatgtcggcatggctcaatccagcgtaaataagttacttaaggatgctaacggttcgcgtaaaactgttgagatcgcctctgtacttggcgtacgtccagaatggctttctgcgggtgaaggagaaatgctcgcttctggtatgcaagagccatataagccataccaggttaaagccgcagaaaatggattctaccgcgtggatgttctagacattaaggccagcgctggtccaggttcgctggtcaccagtgactttattgaaaccatacgtgccattgaatacacaactgaacaggctcgcgctttgtttggcaaccggccatcacagcacgttaaagttatcacggttaatggcgatagcatggatggcactatttcccctggcgaccaaatatttgtcgacactggtgtcacacattttgatggcgacggtgtgtatgttttcgttttcggaaaaactcttcatgtgaaacgcctgcagatgcagcgtgacagactggctgtcatttcagacaaccccatctatgaaaagtggtacgttgaagctggggatgaggacacgttctatatcatggcgaaagtcctgctcaggcaatcaatagattacaaacgtttcgcataa

SEQ ID NO: 93590 - DNA, 249 bp, Enterobacter aerogenes
atgaagaccccaacagtagagaaaaactccgcagtagaaaaagcgattgccatcgctggtagccagaaagaactggctaagcgttgcggcaaggcacagtcaacaatttgcgattggcttaatggcaagaaacgtatttcgccagtccatgttcctgagcttgttagtgcagttggcggggagatcaaggcgtatgagttcaggcctgaccttccagcactattcccgcatccagacactgccgcctga

SEQ ID NO: 93591 - DNA, 702 bp, Enterobacter aerogenes
atgaaaagccttgcagagcagatgcataactttgaccgcgaacagatgcgccgcgttgcgcacaacctgccggagcagtacgacgagaaaccgcagcttgaacaggtggcccaggtcatcaacagcgtgttcagccagttgctggctgcgttcccggcaaccactgctaaccgtgaccagaccgagatgaacgaaatccggcgccagtgggttctggcattcagagaaaacggcatcaccaccatggagcaggttgcggctggcatgcgggtagcccgtcgtcaggaacgcccattccttccgtcacccggccagtttgtcgcctggtgcaaggcagaagaagccgcggcggccgggttacctaacgccgatcaactggtggacatgatttaccagtactgccgtacgcgcggacagtatccggatgccgagtcctacccctgggagtccagcgcgcactactggctggttacatccctgtaccagaacatgcgcgcaaacggcctcagcgatgctgagttgcgccgtaaggcatcagaggaactggctcgcatggctaaccgaattaactcaggagagacgattccggagcccgttaagcaacttcctgtccttggtggtaagccgttatcacgcatgcagggactggccaggctggctgaaattcgcgagaagcacggactgagggggcgcaaacaatga

SEQ ID NO: 93592 - DNA, 666 bp, Enterobacter aerogenes
atgaaaattatacagttgcagatggcttttttttatgatgcatcaacagttattgactttgatgggatgtcatattttatccggcaatcatttaaaaaacatacaggagttgatctaactatcaatcagatgctcggagttttaccagctgatgctccctcggagattcctcggcttcagctaacctctttagataataaatggagagtacaatcatcattgcttagaagtgatgtttttattgagcggaaggagactgaagatgaggtcagcttagatttattcaaaaatatctttgacgatatgattgatgttcataataatttacggaaagaaattattagggttggtttggtggcctttaaagctgaattaaatgataatcccaacaaagatattgttaagagctatctcaacaacacaatgattgctgaggctgacggtttagaggatgtcagcttgatgtataatcaaaaatttgaatacgaatcttcaaactttaactgtcattttgcaattatgactggttatgatgttgttagacaacgtccaatgttagttaagcaaatagatgtaaactcttttgaaaacattaaatttactgcagggtattcgccagaaaaaataaagatggccttcttaaataaaattaataatattcagtaa

SEQ ID NO: 93593 - DNA, 939 bp, Enterobacter aerogenes
atgagccaaattgataaaggaaaagacaataaggtaaaagtcggaaatgaaaaaaataatacaatgtcagattcagtggggagaggaagcgttgtttactctagctcttcatcgactaatggcgtatcaaatgacataatttccagaacgcaacgatttggtaatgtggaaatacacaataaagcagtaacaacttcagagcaagagaggaaaatatccgctgaaaaagaattgcctataaaaaacactaagataaactacactgataaattcacaaatgatttccatgatacaattcaatacacaacaaaattcagagcttgggggactaatgatcctgcaataaatgcaagtcaaactaataaatcttataataattccactgctagtgatgcctcaaaaacatatgcgagaggtgatgttgacaaaattgtatgggaaagcatcatcgaaaaaataagcagtttctctcaagaattagagaaaaacaaaaaaaatatacatgatagcaaaaaaaatatagggaaaataatgtcttccctagctcaacaaacaaaaaaaatagaaaggtttgacgcaacgttatctagtgcagaaaaagaagttcatgagaaagttaaaggttttgagtcagaggtcattacggcgagaaattcacttcttggcgtaatagccttatttgcttctttttttacatttatatctatttcagtaaatgttttttcacgtgatatgtctctaagtacatcaatttcggttttattggtgatttggtcgtgcttaattagttttatattcattttcatggcagggattagtaaaggcggagcctttttcacaagttcatctttcataaggcatgctatttttatggtcgctctttttatagcatcctttactcttcctagagttatttttttagttttttcaataacatag

SEQ ID NO: 93594 - DNA, 573 bp, Enterobacter aerogenes
gtgaatacattgaacatatcaaaagaaattaacaaattaaataaacaaacagctctttcggcggccttcgctctaatcgtgcttgtagggttctctgtcaaattgcatctaatgggcgcagacttctatgcctttttagttttcgctgcaacagctctatatgtgtttttttccgccaagcagattatgacctccaacagcatgttaactgaattagcaagaaaacatgatgtctctgaggtctattcggggaatacatgtctattcccaaagcgaccgcaagagcagctcaaggttgttctaagtgtcagagcaatcaatgagacttcaagtgaaattgatatcaaaggggcactgtctgaaagtacatatcaatccctaaaacaatcaggagatattaagttttacggtattgataatatacatttgttatcacatgcatctcagtgtttaggaatcccactcaacaatgaggtacaggttgtttcggcggtggtcactaacatcgaagggattggtaagcactttgatatttatcgggactatacgtccaatggctatcatcgtaagtag

SEQ ID NO: 93595 - DNA, 258 bp, Enterobacter aerogenes
atgccaaagttcaacatagcagctaaaccgaaagatgagcaggacaaggttaatgtcgacctggcagccagcggcgtcgcgtacaaagagcgcatgaatatgcccgtcgtcgccgaggttgtagcgcgcgagcagcctgagcacctccgggaatacttcctggagcgcgtacgatactaccgcgaacagagcgtacaacttccgcgcgcttccgatccgcgctacatcgagatggccgagcagaacgccaaaaagtag

SEQ ID NO: 93596 - DNA, 456 bp, Enterobacter aerogenes
atgactctgccagtagacggcatcaaactccatcgcggtaactttgcagccatcggtcagcagatccaaccactgctggatgccggccagtgcttccgcttgcaggttaagccttggcgcgagaagcgcagcctttctcagaacgcgctcagccacatgtggtatagcgaaatcagcgaatacctcatcacccgcggcaagacctttgctacgcctgagtgggtcaaagacgcgatgaagcacacctatctcggctacgaaagcaaagaccgcgtggacgtcgtgtccggcgaggtcaccactgtgcaatccctccgccacacatccgatcttgaaaccggcgagatgtacattttcctgtgcaaagtcgaagcctgggcgatgaatataggctgtcacctgactattcctcaaagttgcgaataccagcaactgcgcgataagcaggaggcctga

SEQ ID NO: 93597 - DNA, 171 bp, Enterobacter aerogenes
atgtctactccactttctcgcgtcatcacaaacgaaatcttccgtgttccggcgcgccgtaagcgcaagcaggaaccacgcccatcagaaataccaacacttctcggatataccgccggtctcgttgataagaaatggctgcgcctggcggcaagggggaagcgtggctaa

SEQ ID NO: 93598 - DNA, 225 bp, Enterobacter aerogenes
atgagcaaaatccaatatccaatgtccactgcagctgtttttgatgacgtggtttatcccatccccctgaacggaccgcatcagatagagagtgaggttatgggcgcgatcagatggttctgccggtggaacaacgaggaaatagccgtcgttaaggcacatgtgctgtttagctgctggggcctttacctgacgtatgaccagcttatggcggaggccgcatga

SEQ ID NO: 93599 - DNA, 141 bp, Enterobacter aerogenes
atgagccgcgacgttatcgaacgcatccgcgaccgctggcaaaagctccgcctctgccggcaccgcagaacagtattggttgattaccgcattttgaggaatttcgtccgcatctatcaaaccctgggagagacagcatga

SEQ ID NO: 93600 - DNA, 480 bp, Enterobacter aerogenes
atgaaactggaattaaccaacgaacaacaccagtggatagatcaatggctccagctttggggggcgtggtgccagacaggaaagatagacaaggcgatgataaacatgatcgccaagttcatggcaacagttgagccgcaagcatcatcaagacctgtatgcagtgatgatgacgggatgcttattgatgctgttatccggcattacctgaaaaacgtagatgaaaacgcttggaaggtaatttttgcctattacgtctgcaactcaagcgagataaggatcgcctcatggcagcatgctgtgagcaaacctcgactgatgaagacgcgtgctggaaaccagtataagcacccgagcatttcaaccattcgccgggaagttaagcagattatcaacgcggcgctcttctgcctgtaccagccgctgcaaaatgcgtttaacgatcgcgaaagcgtgaggaaaattgcaaaaaatagttag

SEQ ID NO: 93601 - DNA, 606 bp, Enterobacter aerogenes
atgcggggcttttttatgcctgcgatccgggcaaggctcttgggtagagatgtactgaatgaaactataatacccgtgttgcaagggccatctcgatataacccttatagtttctggttgaaattaattaaatgtgaaaaaatatatatttgttttcatatttggtggttatttgtgatttttagagttttatttgtgttctttgctgtactttctgcaagtgggtgcgttcagaaaactttagatgagcgtatagcggaagctaaaggaaaatacgtggctcaatcagggccgggtagttctgatctagaccacactcaagatgttaacccacttgttaggctggaatgcagcacaaaggctggcaccaaaatctctgcactggtaaatggtacatctcagacagttacggtcagcggtgcagtcttccgttatgttgaccgatttgacgattcaaatggaaaagacactctgatgtttggtcgggttacccatggcgaaaagtacgcgttatttattcaaatggatagttttcctgtgcctctcactatgtataacgagaaaatgggtgtcataagtttttcatgtcagccttatactgaataa

SEQ ID NO: 93602 - DNA, 351 bp, Enterobacter aerogenes
atggacaagcatttatatgatgtttttgctccagagattgggtttcaaagctatgccctacataaaaaaatcgctgctggtgagcgcgtaacaatcattgctcaactcattgaatctgaaggttcagaaagggcagtaacccaaaaaaatcctcttcgtttttgttcggttgagatctcattatctgaagaggacgcaagttgcgtagcagctagaggaattgttgagggtgaagtggttaatgagaccatcgctcttggcttgataactaaatcatctttagggcaaggccgtctgagcttagctgtaagtgagatttacagcatggatgatttagttataggaaaatag

SEQ ID NO: 93603 - DNA, 225 bp, Enterobacter aerogenes
atgtatcgcatggaaaaaataaccactggtgctgcttatggcgcttcagccgggagcatcctgaacggcatgcttaatgcctacagtcccgagcagtggaatgccatcggcgtgctggtgggcattgtcattgccgtacttacgtatctgacaaatttatatttcaaaatccgcgaagacaaccgacgaagcaggagcagagatgaacccgacgctcaggaataa

SEQ ID NO: 93604 - DNA, 504 bp, Enterobacter aerogenes
atgaacccgacgctcaggaataagcttattggcgccatcgccggcggttccggcgctatcgcaatcgcttctgtcatgcttggtaatgctgatggtcttgaggggcgtcgctattacgcttaccaggatgtcgtcggcgtctggactgtttgcgatggccacacaggcgccgatattcgccgtggtcaccgatactctgataaagagtgcgacaacctgctgaaggcagatctgcgaaaggttgctaacgccatcgacccgctgattaaggttcgcatccctgagccaacccgtgccgcactttactcctttacttataacgttggttctggcgctttcgccagttccacgctgctgaagaaattgaatgctggagacgtgccgggtgcgtgcaaagaactgcagcgctggacgtatgccggtgggaagcagtggaagggactgatctctcgacgtgagatagagcgccaagtctgcgagtggggccagaaatgggccgattaa

SEQ ID NO: 93605 - DNA, 378 bp, Enterobacter aerogenes
atgggccgattaaccgcaatcatctgcgctgtcgttatctgcctgctggtttccatggcatgggcgattgaccattaccgcgacaacgccatcaccttcaaagagcagcgtgataaagcaacggtcagggcggaaaccgccgagaccgtaagcaatagcgtcgtcactgcaatgaacctcatcaatgacatttcccgggtaacccagaatgcaaagaccgaactttcccaggcaggtgagcagcgtgttatctacatcaggcaggcgcttgaaggcgatcggtgtgctaagcagcttgttcctgctgccgctgctgacagcttgcgggaatacgcgaacggtttacgttccggcgccaatggtgccgataagcgctga

SEQ ID NO: 93606 - DNA, 219 bp, Enterobacter aerogenes
atgaatgcctgctgtaatgccttaactggactgttcagtcgcagtttcaaaaagcgccagcacttcggtagcttcctgaatagctttgatggtccgcgccaccacttgcgatgggggagcattatcgaagccactctacggaatggcctgtgttatgaatgcaaatccactctcctttgtattgtgatagcaaacaactcactaatagggagccagtga

SEQ ID NO: 93607 - DNA, 576 bp, Enterobacter aerogenes
atggatacaaatttaattgccttcgaaactctaaaagcggctcaagagacagcaaaatggacctattggatgatgtttgccacatggtttgctggcgctgcgacgttttctgctgttgttttaacgctttatattgctaatcgaaaacccgtcccatcacttaaaatcaccgcttctggctcaataatttcacctgcgccaggtattgctcagcaaggatatggcataacagtggcaaacataggaagttcacctgctgttgttagttcaattcactgggagtgcggtggtaaacagaagtttgttcaattttttgcacctggtatatcaagtcagatgccgaaaaaacttgagcatggtgagtcagcattcttcttttttgagttagatgatttttcgagttgggttaagtcaatgaaagtaaacatcgaaaatgcagaagggtcggttgataaactgaaaatcgttgttaacctttctactgggcgctcagtaaagtgtaaggctgagaagtctttaagggaggctttaaaccaaatcacttgcaagcgatctggcaatttttgtaacgattag

SEQ ID NO: 93608 - DNA, 195 bp, Enterobacter aerogenes
atgagtaaatatcaggttggagataaggttaggcttaagtctggtggcccagttatgacagtgcaccaaattggagtgcatcatccaccaatgtatcgcggcaatcatcgttgccaatggtttgcgggcaagaaacttgaagaaggttacttcccggacgactcattagaggaagtcgaggatgacaatcaataa

SEQ ID NO: 93609 - DNA, 1182 bp, Enterobacter aerogenes
atgaaacgcaaccgcgttaacgtgctgaccgtcgtcaactccgcttcaaacatcaccactgaaaccatcgacggcaagccacatatcgtggttcgcggcatcacgcctgtcgtggacgatatcgtgatgaaccggaagttgtacccggcagcagaaatcgaaaaggcctacaactcgcttgagcgtaacccgatgccgcttggccacccgaaggttgacggcaagcatgtgtctgctcgcgatgtccgggcggtgaatgaatatcacgtcggcgcatggctgcagaacgtcagccatgaaggtgggaaagtgacgggcgatatgtacgttaaccgccagtacgccgagtcaagcgagaagggcaagcgcctgattaatcgccttgatgagatggtcgctggtaccaactcagaacccatccacatctccacaggactgctgtattccggcattgccgctaatggcgagtcaaagggcaaaaagtacaacgagatcgccaccaacatgatgtttgaccatgtggcggtgctgctcgatgagcctggcgccggaacgcctgcagaaggcgtcggtatctttgtcaacgctgagggcgacgagctcgaaattgaagtagtcaacctcgctgatgctgacgtaccagacccgcaagacgcctcattcaaaacattctttaaccagctaaaggcgtttttcagcgccaacagcgattcaacccagaaggaaacagatccgatgaaagagctcatcgttaatgcgctgaaggctaacggcaaagaggtagagggtaaaaccgatgccgaactgatggacgcatacaaccagatgaaggccgaagaggtcaccgccaagaaaaaaggcgatgaagaaatcgacccgaccaccggcgcacccaagaagacggaacaggccgccaacaatgaagagatgccagcctgggcaaaagctctgaccgatcaggttttggcgcttaacagcaagatcaacgcaaactcggaaagcgagaagagcaacatgcgcgcagcggtaaaagccaaatttggcatgacggatatcgctgtcaacgcgctggacggtgaaccgctcagcgagctgtttgctaaatgccagacctcaaccggcctgaatggtgctttcctgcaggccactaacaaccaatcagtcagcgaaatgccggagtaa

SEQ ID NO: 93610 - DNA, 432 bp, Enterobacter aerogenes
atggctaaagacggaaaacacgtaattcacgccggtggcgtattccctaatccgctgcttaaccgtgaaggtgccgcggcggccgccactaaaccaggtaccgttggcttcttctctgctgggaagtttacagcgtcggttgatggtaacgaagaggcgatcctctatatcgctgactttgattatctgcgctgccagacggttgatgactccataccggtgaatgagctggtggttggcattcatccaatgcagggcatgttcctcaacgtacgcgccgctgcaggcacgtacaaaaaaggacaaccgctttccatcgcaaatggccaggttaaagccgccggcgccgatgaatcaatccgcgcatttgtcgaagaagacacagcgtacaccgttgctgcaggcgatctgctgcgcgtcgttatcaagtaa

SEQ ID NO: 93611 - DNA, 1083 bp, Enterobacter aerogenes
atgcttgtattttcacgctctatcggtgaacgcaccggtaacctagaagtcaaccaggcgcagttccgtgagctggagatggcgcgcaacatgagcgcccaggccgtggctgacttcatcgcccgcgctcgctttggtgagcaaggccatctggatgcggtgaatgcggtagacgatattcgccgcatgtaccgcgcgtacgatcagaccgttcttgctcaattcgagccaaataccgagttcaccttgtttaatgacttgatgccgctgtctcgctcggtccgcctggaagagtccgtgtatgaatacgctcgtactggcggccgtggctgggcgcacacatcaatgtcgggacagattggtgcggcacttgacgcacgtgcgtacagcttcgacggcacgatggtgccggtgcacgattctggtttcaagttccactggcgtgacccgatcttcaataaaggttctgcccttgcttccctgtctgacgcgcagcgcggttctgttgatgacgtgcgtcgtaaaatcgtggattacatgtttaacggtttccgcgattcagaaggcaacttcgtaaccttcgatggcaagacctggaaaggtttaaaggctgatgagcgtgttggtctggtcgatctcggagcagcaggcctgaacatcaactttgcaaccagcacagatcctgacgccatgcgaaagggggcgatcgctcttcgcgatgtgctgaaactgcagaaccatcagtatggccagcagacctggtatgtatccagtgaaatcatgtcgaactgggagcagtacttcgatacccagaacaagacccgtacagtcctggatgaaatcctgagactttccggcatcgacgctgtgaaagaagacgctgaattgactggaaaccagattttggttgttcctctggctgcaggggtgatcgctccagtcaccggacaggccgttggtacggttgcagacccgcgtcagttctacaacagcgacttcatctggcgtacctggggcgcaatgggtctgatggttaagcaggacatcaacctgaaacacggcgtgctctttgcgagcagctaa

SEQ ID NO: 93612 - DNA, 264 bp, Enterobacter aerogenes
atggcactggtaaaagtaacaggcaataacctgttctctggtgccaatctccgcaagttggaggttggttcagaagtagaggttgaccgaagcactgcgcatcggtggaagagtgcagggttggttgaaatcatcgttgatgaagatcgcgtacttgaagtcgcctctcctggctctgatgctgaagagcagccggagcagccggagcagccggagcagccggagcagccggagaccaccgctaaatcgaagaagggtaaataa

SEQ ID NO: 93613 - DNA, 693 bp, Enterobacter aerogenes
atgacgcctgttaaagagtttggcgagtgcctgattacgtccggggataaggaatatttctttcgaccgtcactgctggccatgactagaatcggagagccggcagaaattgttcagacgttttatgacctatgcaacgatgaggcgacaccgttgctcaggcgtgctgaggaagtctatttgcttaatgggaatggtcgatttcctgaatgtgtaatgaattacataaagagcggcgtgttggccagaaagtccatcatggcagcgcatgtagtcctgtccgcctgttgtgatgatgatgttggtgatctggttggttggttagctcccggaaaaagtgggaaaagggcttttctgtggaggcaggggagcctttctccacagaacatggtggtcgtagctttaaatctcatggtgcacgggataattggcaaggcaaaggtgagaaaacttcagcgccatgagactagcgatacaaccaatgaattcagagcatctgagtatatcgtcgcggcgcgcaatcacttcggcataagcaaggaggaggcgtggcaactcactatgaccgagtttcagctaatgctcatcgctaaataccctgaacagaaaggctatacgcgcgaagagtacgatcacgcagctgatgactactttgcgcgccgtaagcgcagacaggctaaatcccaccaataa

SEQ ID NO: 93614 - DNA, 558 bp, Enterobacter aerogenes
atgaaatatccaactgtaattaatggcttagattttcgtgacctgatttttgtggcggataacgatccagtcacagactcgtttatggtggcgaaagcatttggaaaactgcctaaaaacgtaattcgcgacattgagcggactattgaggcttgcccaccagagttcgatacaaaactcaattttgagctttgctataaaaacaatgagttgcagaatggaaagccgcagaagttctatcgaattcgcaaagatgggttgatgcttctggttatgtcctacaccaaaaaagaggcgatgcgtatcaagatcgcctacatcaacgccttcaactggatgtacgcaatgcttcaggttggtcggcgccagtttgaagaagagcgtaacgccgtcatgctggagttcttgaaagagaaggatgttgccagtatgtctggccgattgctgcgtcggtggggtaaagagaagaagccccagttactttcacgcattgagcaactggacaagcaaggtcagttggccttgcccggttttcctagcgtgattaccgaggcatga

SEQ ID NO: 93615 - DNA, 372 bp, Enterobacter aerogenes
atgtcagaaaaatttccaagccagatacaggataagtttactgttcgattcccagatgggatgcgtgagatagttgctgagagagctaagcgtaatggacgttccatgaactcagagatcgtggatatcattgcgaatgccatatctcaaccagcactggcgcaagagggtatagaattcattcttgggttaacggaacctggtaaaatagaaaaactaagcgacaaagaaaagaagaagattcacggaacccttgtggatgctgcatcaatcatggctaggaatctcgaaacagaaagctataacttgaggagagttttatttctcctttctcaagatgggcccctgctagaggctaaaaagcccacttga

SEQ ID NO: 93616 - DNA, 159 bp, Enterobacter aerogenes
atggacaagaatgatgcaaagttgacactgcggtacccaaaagaagtgaaggacgcatttaagaagatcgcgaaagaagagggtctttctgagaattcggcgttagttcaggcactggtatgggctttgaaatttagagatcagatgcatgcacagtaa

SEQ ID NO: 93617 - DNA, 1062 bp, Enterobacter aerogenes
atgcacagtaaaaacagcgaagccccagaggcggcaacctccgaggcttctaatttaccagtcaatcgcgagactactgatatgaagagtttagctaaatccactgtaaattgcactaacagcattaccatttccgacatcaaaatccacatggatgcagcagggcgttactctctcaatgacctgcacaaggcatcaggtaaagagcgtcgtcatgagccagccgcatggctgagactcgatcaaactaatgagttagttcaggaaattctaaatacgcagatgtgtgtatttaaaaaaggcgataactccaattcttcagaatcgcagattaagaagccgatggactccaggaagggccgctatggtggtacatacgtttgtaaagagttggtttactcctacgccatgtggatcagcgcagcttttgctctcaaagttatccgtgcatatgacgcactggtaactggcaatgtaaatgaagcagtccgcattgccaaaacgaccgtgagcgaaagaacgccacttcgcgatgcagttaacatgcttgtaggcaagaaaggactccgctatgacgacgcctacaatatagttcatcagcgctttgctatcgacagcattgatgagcttgaactcgagcaaatccctatagcagtggagtacgttcaccgcatggcgctagaaggcgaattcctgggcaagcaagaatcgttaccggcgccaaaacttgacgttaacattccgattcagtggtggcttgataacaacccggtagttcgcagtggaaacctctcatttggcagggggcgtactgctcctgcgctggatgtgactatggacatgctttgcggtgataactcgacatctgcggccattcgcctgatcaacgttcttgaagaagctggttttgatgtatcagcaccgaaggctgaaattgtggcgatgcgcaaacatctgggtaatgtcgagtacggtatgaaggctatcgctgacgcttgccgccgggcggggaataaaaccatctcgtttcgcggtggtaaagctgaatatgtgattagttaa

SEQ ID NO: 93618 - DNA, 2352 bp, Enterobacter aerogenes
atgtcgcaaggtgaaaaagtaggtggtctttatattgaaatcgaagctgataccgccaagcttttggctggagaacgacaggcgaacaaatcattaaacgctatcggtaacagcgccgataatgcctcgaaaaaatttgaacaactgcaaacaagccttaataaagtcgctggagctgttgctgcatctattgtcgttgattggggaagagcattccttgttgctgcagataatatgagtcagttaaatgcgagagttgaaagattaactggaagtgcatcatctgcctctcaaaccatgcaaagtcttatgcgagttagctcatcgacaggcgggtctatacaggacaccacaaagctatgggaatcgctcagtactgcattgcgtgatacaggggcatcaaacggccaaattattcaacttacagaaactttgcaaaaaattggtcgtatagggagcacctcttcagaggaaatggctaatgctcttcgacaattcggtcaatcgatttcttcaggtacagtgagggctgaggaatttaactcaatacttgagcaaatgcctgagttggctcgacagattgctgcaggaatgggagttggcgtgggagagcttcgccaattgatgctcgaaggaaaattatcggcgcaagatgctctaaacgctattcagaaacagaccgttttagttaataccgagttcgagaaactacccaggaccttgtctcaagccaatacatcattaactaattcattcctaacaatggtggataatctaaataaagctacaggggcaagtaacggaatggtcttagtgatcgattctttagctgtagcaataggcagattaactggtcaggctgcgactgcaagtcaacaaatcgcagaccttagatctgaagctgaaatgtatgcaagaagggcaaggacttggggatggttggggtttggcgattggcaaaaagaaaatgagcagaaatcagcaaagttaactgcagatgcttgggaaaaggcatcccgtgccggttgggatgctgcccaaaaggtggcgaaaaacaccaagcctattgagataaaagcagtgtcgactactgcgcaaagtaaggctaagggtgggaagtcagcagcccagaaagaggccgagcagtacgctagagcacaagaattaattacggaaaggttgtcggatttaaaaagtaaagcagaactgtcagccggtagcatcactgaactctcaagagctcaagcaatcctaaatgcccagcaatctttgggcaaagcggcatcgcaagaacagattgctttggctggagagtatgcagcaaaagcttgggacaacgcaaaagcgttgcgcgaacaggccaaagctgaaaaacaacgggctgatgcggcaagcaagtttagttcaattcagactaaatccagtagggttatagggctagatactcagtatcagcaggatattgctgatatcaaaatgtacgctcaaatgtaccctcagaaaatagctgaggctgaggcggctagatcctctattgaaaagcaatatcgagaccagcgcatagcagctatgtggcaggagtgggcgcagcaaaccactgcgacacaagcggcagcggcggcatttgatggttttgctaatagtgctagtaatgcattaacaggcatagtgacaggaagcatggctgcctctgatgcattgcgttcaattgggaataccattttgaacgaggtaattaatacctttgtgcaaatgggagtccagtgggctaagtctgctattttgggtgcaactacccagcaagcagctatagccgccaccactgctacgcaagtcagttctctggcaacgactactgccgccagtacatcgtcggcagcggccacaacggcagcatggacgccggcggcgcttgttgcttcgatcggttcgttcggtggcgcggttgctattggcctcggtgccctggtggctgcgctggctgttggctcatcgttggccggcaagcgcaagaacggtggtccggtatcggcgggctcaatgtaccaggtaggtgagggcggtatgcctgaaatctaccgcgccagtaacggcagtcagtacatgatcccgggggataacggctctgtcatcagcaataaggatttgcagggcagtggcggcggcgcgctgcaggtcgtgaacaacgtttacaattatgcaaatggcgtcaatgtcgatacccgcagcagccagaacggcgggcaactggttatcgagacctttatcaccgatatgcagaacggtggcccgatgtcctctcagatgcaggacacgttcggccttcgccggcaggccaatggcgattactaa

SEQ ID NO: 93619 - DNA, 489 bp, Enterobacter aerogenes
gtggcaacagtttcatacccggaatttctacctcttccgcagcgtcccagccagaacatgacgcaggacaccggctggcagacaacgcagccggcggtcgggccagcaatattcaccccgtttacgacggacctgaaaacaacctggacgcttcagtggatattcactcttaagcaggcggaagtgtttaagtcctggctacgatcgccgacgtactgtgaccgcggacgtaactggtttcagatgcgtatcgaccttggcgacacttacggcccgcagctgcagacgcttcacttcatcaacatgccggtgcaaaccagcaaaaatggcggggtggtgacctgggcggcgacggttctgtcgaacggaatgagcgactacaccgagcaatacgacgactggatcgtcggaatggctcctggtaccgaatatctctatgacctgctcgttaccgaggtcatgccggaatatccagtggggaactcatga

SEQ ID NO: 93620 - DNA, 471 bp, Enterobacter aerogenes
atgacgacattgcgcgaatggaaggagcggcggccggcgagtgatatcaaacagaccatcgagttctatcacccggcgtttggttattaccgggtggtgaacaagctttttcaggaggcggcgttcggcggaaacctctatcagcccgcggcgtttgatatcaccgaaccatcacaaaccagcacctccatcataatgatgaccattaccttcatgcagggtgcagaagaggtaaggaacacgctcaaaacgtggcggggggccgcgagaatgacggagataacctgtaaataccagcaatggaatgcgatcggagatgttgaaccgatgaagacctggtcgctatttgtgaaggatgtcgctgctgatggcactaacgttaccgtgaacgctggcaaaaccaatccgctgacgctggccaaccccatcatttacaccaccaaaaactatcctgggctgattactgtatga

SEQ ID NO: 93621 - DNA, 390 bp, Enterobacter aerogenes
atgacgcagagcgagtttgtcaggcttgtgaatggcaggccatgggttaatcgtgcctgcacctttgagcagatggattgctgggggctggtggtgctgtattaccggcatgtaatggaatgcgagttgcaccacattccagggtatgaatctggcgccgacttcatcacctgttacgaagaggaatcacagcattggacgacggtaccaatggcatcgcctggctgtctggctgtcttttattacggaagtaagcctgctcatgtaggcattatggttactccaaccaaatgcctccacgccagaagagatagcggttttgtcagaattgataacgcaatactcctggaaaaggcttacagcaaagtggagtacatgatacatggttag

SEQ ID NO: 93622 - DNA, 2478 bp, Enterobacter aerogenes
atggttagatatgaggtacagcggcttcctggagcgccaaagcagagaggtgctgttaaacacggtaccgagcttgcagaattgctgaataagctgaatttgcataacaacgtcattgttaagctaaacggcagaacgttgggtgatgattttgatgttggttacaaaatgcaggctggtgacctggtatcgatttatgatcagcctgaaggtggcggtctgattaaaaccctcctgaacccgcttgagcatctgaaccccatccgatttacaaagaaggtgatggaagggctgagagggaagcagggctccccatcgatatctacaggtgaatcttcgaataatgacacgacccagcagacgaatcgcgccagattgtataagggaagacctaacatctatggtgccgttcgcgcttacccagatctgattcaggagtcactgtttgaatatcaaaacaaccggaaaatggtcacagagtggatggagatcggtttcggctactatgacatttcctctgtcagatattccgaatcatctttgacggcgcttgccggggccagttatgagattattcagcctggtaccgttatcgcggaaatgccgcaggggtactcatttgatgatgtcgatggtcaggaaataccggcgttaaataaagtcacgactgaaattaaacagcaggccactaccgacaatctgcttgagggatatttttcaggggggcagttttacgcaaggatactgaagcaaaatgctttcgatagtttcttcgattcatctaagccactttcagtcaccgtgacagtaaatgttacctataacaccgcaagtggtgctgttacaaagaacgtcagcattgatgcatcattatttaaatccacactcactgacgacgggcaaccgattaatccggagcaatattataacttttggtttgattcactgagcggttcagatcttgaatctctgcctgaaaacacgacggtaaatagcacacttttcaccataactgaatattctggcgcggtagtaggccctttctttgctgctgtctcatcagagcagttatggctacatttatacggtaatcagggtgggcattatgatggtccggtgcacattatctggtatcaggtagatgaatcgaacgacatgatccccggaacgcaagggagcatggatgttaacgtcaggaataacggcaaagatcaggattatgtttactatacgtataagataacaccagccgcggggtatgggcgttatgcatttactgtgcagcgaacaaacaacggtggctcatcgtccgttgtttatatctcaggcgcgcacgcggtaaatatccgacgtaatgttgtttacccggatgatacgttagtgcgagtaacagtccgtgaaactgaaacgcctacggcagcaaaagacagaaaatataactgtcttgcgcagcggagagtcatctcatggactcctgcaggtggggttgattatacgcttcgcccaagccgttcatttgctgatgctgttcttcacgagtgggtaatggttggtaagcaggatgtatccgggcttgatgtggcttctctttatgctatttatgattccctgccaaacccgttgttaggatattttgactatacgttttcagatgaaaaactttctcttggagagcgaattcaaaccatctgcaatgtggcccgggtccagttcaactggattggtgacatcattacattctggcgtgatgaaaaggtgccatatcctgacgcggttttttcacgctctaatatgttctgggacgaatataaaatatcctggaaaatgtctctccccggtggttacgatggtgtaacggttgattatgttgatcctgtcactaacaagaaaacctatatctacctgcaaattgattcgggtggtatcgaggaagtcgaggatgcgacgattaacgccagtcagattagcctggaaggttgccgtaatcggacccaggctttggatcgggcatggctagaggctcaacgcattttgtattcgcggttgagcatgacagtcaaggtgctggaaactgaacaggtggtgcgtggtgccgttgtccagtgtccggacatgtacgacaatcagcagcagaatggctacctgactggtcgtaatggcgacatcttcacaacttcagagcgcattgattttacgcctggcgatatgtgggtcgtgatgacggatagtctgggtaacttccgtggccgctggcgtgcatatcctgtaacggaaaattcaaaagcatttcaggccgccgcggatgcctttgaccttaatatctacaatgggagcgattgccaggttgccagccggtactttatcgcaactgattccgaacttaactccagcatctggcgcgtagaaacagccaaacccaatggcgattacacccagacgctgaccctttccgaatattcagacgctatttatccgtaa

SEQ ID NO: 93623 - DNA, 2934 bp, Enterobacter aerogenes
atggcaacaccgttaccgactccaacgcagaatcctgtcccaagtacggatatcagggacgcagtttttgcgggcgcaaaaatggatgaaatcgttaccagccctggcgagaagtatgtcgaccgctttggtaatgagcactatacaattgaaggcactcgccagaaccttatacctcttagccggcagtatatgacgctggcggcagcgcaggcggatatcgcgaatattcctgttggagcagcgacatatgtcaggagtacagacggtagctcacttgcggatgaatatatcaacaacagcggaacgctggaggcaaccgggcgtaaaatgccgtcacaaagtggtattgccacggcgattaattatttactgagtggtatttatccatctgacgtatcctcttcatgggaaattaccaagaattttgtcattttcagggatggcacttttgctgctaatgacgcatgggatggctattttgttccctgcaaagaaggcgatcaggctgattattttggtgttatcaacacagtaacagctggagaaaaaaccgcttggctgattcagtgcgacaataacaaaaactacgttcaggttctggcggaaaccgtttcgacaggggttgcaactgagcagggaactgtacacggcgtggcaactcaggacgggtatatttatgttcgcgtgcgtaatagtgtaaacccgaactggaatatcaactttctcaaaaagcatttgattaccactgatgactatttgaacggcatttctcaacttaaccagggactttggccggaaagtgcatcatctgtctgggaaattacccgccagtttgttttgttttctggcggtctttccggctcttatcctgaatgggatgcgtattacattccttgcagcaaaggagaccaggctgaatattctggcattattgatctggcaactacaggggccgttacggcatggctgattcagtgcgataccaacaaaaaatacgtgtctgatttagcggccaatgtcactactggtgatgcaacaaggcagggaacagttaaaggaacggctatccaggatggatatatttatgtccgggtaaaaaatagcgggaatgctgggtggtatatcaatttcatgaagaagttcttagttgcttcttctgatgttggtattgctggcggggttgctgaatatgacgttttaaaagctataggggataacgggcaggccattgattacaccaaaaatggcaacgtgtatatctttggtacagttatgctctatgacggtacagttaacagcaatgctggtaatgactggctggcgtattacttgccagtatcaaaaggcgataaggtcactatgtctggcatctacggttccgcaactgtcggccagcaaatggcatatttcattcagctggaccatgacaaaaattttgtggctcctctggatatctataccagcaccggtgcctctgacgtccagttaacccgcagtgttgtcgcctctcaggatggggtgatgtatgtcagggtgcgtcgtgtactgggtggcgtcgaacaggcatacagcgttacagcattccagcgcagctacaagctgctgcaggacctgtacgctctgcaaaatcaggttgatgacctgattaataacggggcagtacagacgcccgtaattggtgcgactctggagcaattaccagtcaggctggataacagatttaactacaacgctgccgtatatattcaggataacgttgtcactgccgggaattacactttcgcagttggtacacgtgggaaccgtcatcccatcatcatgcgcaaagagaatctcaccggagtgtggacatatttcgatcttcactatgttaccggaaaccctttagcatcgccaaccgaagaagatagtcataacgtttacagcctgggcgtgacgaaagacggatatttgattatcagcgggaatatgcacgccaaaccgtgccgggctgttatatccaatgctccatatgacattacagcatggatggcaatctcgtacacaagctccaatgaggtaacttatccgcgtttcattaaataccctgatggcaccactcaggcattctggcgacagggcttgtccgcagcaggtcaatacttctccgctttatttaacgatacaactcgccagtttggatctgttttccaaatagcagccacagaccttaacgctaacgcctatgagcagcgtctcggtgtaggccgcgacgggtcattgcacttctgttttggcctgcgtgtcaacgcaaatactgccgatgccaaccgtgggctctactacgccaaatcaatggacaagggtctgacgtggacgaacgccgcagggacgataaactatccggctcctctgacagaggctaacagcgagaaaatcgctgatatcccgatctattctggctatgtgaatcagaatggcggcgcgtgcgattacgacggccactatcatacctgcctgtggcagaccgatgagaataaccatacgcagatcgctcatatctggtttgatggcactgtctggcatgaagagctggtgtcgaaatttgatttcaaagtagacacatcccggcctctgctgactggtacgctaagtcgtccagccctcggatgtacccgctacggtaaaacatggattttctaccggacaaccgaaatggggcgtgatggtgagatacgggcaatcgacgtttccgaaccaggtaacccgattgagcatatcgtcaccggattcaacatggggacactggaactggccgtaaataccaatactctgatgaacgataaccaactgctgatgctggcaactcgcggtgcgattggttatgcggaccctatgtactctcgatacacagatgaaccaggatatttgttagtggcagtgatgccgtaa

SEQ ID NO: 93624 - DNA, 291 bp, Enterobacter aerogenes
atgcctcagcaatcaccgttttacgagacaactggcataagccagcatgcaacatttgttgaaacacaacgtggagtcgctgtagttgagcgctcatcatcaccattagcatcagcggttttacttatctcatattgtggggtgcagcagtttgcgcgcttccttggtgggtcgctcattactgaggatggggaagctatagaaggggaatcgctcgcggatgtagaactgataggtgtggttacccacatcatcagtaaagcaggttttgatgacagcccggtgatgtga

SEQ ID NO: 93625 - DNA, 762 bp, Enterobacter aerogenes
atggaattaaaaatatataaccgtgtaattttgatgattacaataacacttttgcttttttgttgcttggtgattttttatgcatttggatttgacattattaagttagagataaaggattttccagactggttaagttccattagcacatttggaactttagttgtagcatattcagcgtataaaaaggccccagaatggataagtcagagaatgcatgaagatgcattctcgttagcgaaaaaagtaattcttgatgattatccattacttcaagaagaaacagatagggcttttgattatgtaagctataatgttatgttttttgatttaattggtgatgattatgatgttcctatcacagtggaagactgcgatgatgcacaatcatattttcatggcatgcaaatgtcacctttaataataatgaatagtttagataagttatctaagctaggatgggaggttgatcaggatattttaagtatcaacaaagaaattaatgaatgttataatcagatgaaaaatagttactttttagcatttgccggaataaggcgaatggtaacgattgaagatgttaacgaaaagcgtcgttgtgccgatagagtgagtgttttttttgagagatttgaaaataataaaaaaatatttgatgacctttatgaaaaaataagattaaagcacaagcgtgttccagactattttaatgtagagaagaaaaagggagtaaaaatacattctaaaaagcttggtgattaa

SEQ ID NO: 93626 - DNA, 570 bp, Enterobacter aerogenes
atgataaagcatatccgtattttgcccggcaggctggcattgctggtcgccgtttttctctgcctgctgacggcctgccgcgaccacagtcgcgacggcatgagcggcgctgacatcacccttttaaaccatggtccggacgccatcgtttcggtgcaggtgaacggctacgggggaccaagggccaattcctacggcggcggtggcggcttctgctgcgtgatggtgccagatgtctggcgcccggggctgacggcaaaaattacctggacctccgaccctaactcctggatgaaatccagcaatatgcctgacaattattcgcaatactatcagcgccatgggccaattaccgtgccgattgagcgctgggaaaaaggccagggatgtggctttgatgtacatatttttccctgcgataaggtgcggatagtccgttcctgctacggtcgtgcagcctctgaatatccgataccccctgagcctgacggaaataaaaaagcacaaaatatactttataaccacattaaggagaatatcgtatgtccgacgccgcagactccacgctga

SEQ ID NO: 93627 - DNA, 570 bp, Enterobacter aerogenes
atgataaagcatatccgtattttgcccggcggactggtggtgctggccgtcgcttttctctgcctgctgacggcctgtcgcgaccacagtcgcgacggcatgagcgctgctgatatagccgttttaaaccacggcccggacgccatcgtttcggtgcaggtgaatggctacggcgggccaggcgccaattcttacggcggcggaggcggcttctgttgcgtgatggtgcctgatgtctggcgcccgggactgacggcaaaaatcacctggacctccgatcctaactcctggatgaaatcaagtgagatgccagatgattatgagactcactaccagcaccatggaccgattaccgtgccgattgagcgctgggagaaagggcaggcttgtggttttgatatccatattttcccttgcgataaagtgcggatagtgcgttcctgctacggtcgagcggcccctgaatatccgataccccctgagcctgacggaaataaaaaagcacaaaatatactttataaccacattaaggagaatatcgtatgtccgacgccgcagactccactctga

SEQ ID NO: 93628 - DNA, 570 bp, Enterobacter aerogenes
atgataaagcatatccgtattttacctggcgggctgacggtgctggccgccgtttttctctgcctgctgacggcctgtcgcgatcacagtcgcgacggcatgagcgccgccgacatagctgtcttaaaccacggcccggacgctatcgtttcggtggaggtcaacggctacggcgggccaagagcgaactcctacggcggcggcggcggcttctgctgcgtgatggtgccagatgtctggcgtccgggcctgacggcaaaaatcacctggacctctgaccctaactcctggatgaaatccagtgagatgccggatgattatgaaactcactatcagcgccatgggccgatcacggtgcctattgaacgctgggaggaggatcaggcctgcggctttgatatccatattttcccctgcgataaagtgcggatagtgcgttcctgctatggtcgagcggcccctgaatacccaatacagcctgaccctgacggaaataaaaaagcacaaaatatactttataatcacgttaaggagaacatcgtatgtccgacaccgcagactccacgttga

SEQ ID NO: 93629 - DNA, 855 bp, Enterobacter aerogenes
atgttcaaggaaaaaaatgccgcggtaatgaccgtagcggctaccgcgaccctgtgtcttgccgtctggacaattgtggtcctgctgggcggtctgggatggtggaactggcacgccaaccgcacgctgcagtggacggcgatccgcgagatattgaccgtctgtggcctgatctgggcgtatggtctctgtctctggatactgggctttattgctttccacctgtttatcaggcaaaaagccgatgggcaacagcgtcagacgcggacttttattagccagcagacaaaaccggcgcagccgtttgcgtccttaaagcactttctccgtcgccgctacggccgattgtggcgcaataaggtccgcctgctgtgggtcgctggcgaggcggcgcagattgccgccatcgctccaggccttgcgcaacagcaatggctggagggccgcggtacggtgctaattcacggcggtagcctgtcggcgacggtggataacgagcggctcagcgccctgcgtcggctgcgcggccgccggccgctggatggtatcgtgctggcgctggacaatgctcaggccaccgccgcgactctggacgggtatttgcgaacgctggagcagttgcgcaggttctgcgctaccatccgccggtctatctgtggcaactccacgacagcgactggccgcaggatacgcgcattacccagacgctgggggcgttgttcccgccgcgggccgtcccgcaggatgttgaacggcagcttcgcgccattctgcccgccatgctggcgcaggggacccagcagttgtgcgctgattcgtcccacgattacctgctgcgtgtcgctaaatggctga

SEQ ID NO: 93630 - DNA, 1545 bp, Enterobacter aerogenes
atgattaatgcaataaaaaaagaaattaaaagattagcacagaaaagttttcgtaaaaatataatgcgagagcgcaaagagaaaaaatatcagcatcaattcaaaaaacgaacaggaattgaagctggtgctacgaaaaaaagacacaacccgatacttcatagacatttcgatgcagcttactgtgctagaaatgctaattttctagccaagtctatttggcataaagttttaactcttcaatatgagcctacggctgcaataaactatcagattcctaagccagacggatcaaaacgtagtatcatggctttttcaattcctgatgcagcacttgctaatgtaatattaaggagagcacgagatagaaatttaaaacggttatcaccatcatcttttgcgtaccaccctgataaaaatgtatttgatgcaataattgcattaaattcccacgataaaaaagggaaaacatttgctgttcaaattgacttcgaaaaatattttgactcaatcccctcatggtaccttaagcaacagattaatgacgcatcaaaactaagtttaacaccgcatgaacgatatatatttagttcttttttacatcataaatattcaccccatgatgtttacaatagcaatcaacataagagaagaataaatggcacaccacaagggtcatcaatatctcttcttctcgcaaatataacaaatcatgatttagatgttgcactttcagcagcgccaggtaagtttgtgcgatttgctgatgatgtagttgcgctttgtaacgattataatcaggcaaaagagatagaagattgcttttttcatcattgtcaaaaaagtggacttaaacttaacactaagaaatcgccaggaattgcaataatatcttgcgaaaatcaagagatgagaagttatgaatactttgactatttaggttatcgttttaacgatgatgggctttctatccccgacaaaaccatatctaaaataaagcaaaaaatctcacgattaattaatttatatttgatttattacctcaagtttggatttaatggtaaccgcgtatcacgacaagacaggtatgattgggatttattagggctaatatatgagataaggaatttcctatatggcggtttgactgaggaagctatattagatttcttagaaaatggaaaaaaaatacaacacatgcaggggcttatgggcttttactgcttaatagaaaaccctaaaaaactacgtgaactagatggatggatgttaaatataatcaggagagcgttgaaaaaaagagaatatatacttaataacacttatcaggtaaatgcgttaacacctacaaatttagaattaattaaaggaacttggttaaatatgaactcatggactggtgcccatccccctaaccctaaaattccgagtttcattagaggctggagagcagcaagaaaattctatttcacttttggcttagagaaagtttcaccgccgacttatgggcattcttccgatattcaaagctttaatagctattaa

SEQ ID NO: 93631 - DNA, 801 bp, Enterobacter aerogenes
atgcaacgtaaatcatgggttttctcgttagtggtattcacctgcggctatgcgcatgttgccgtcgcgcaggagatcacggtgatgatttccggcggcttctccgcggcgttggataaactggcgcccgactatcagcaaaaaagcggcaataccttacatatcattcatggtccctcgatggggaaatccgcggaggcgataccgaaccgcctggcggcagggcaaaaggcggatgtggtgattatggtgggatacgccctggatgatttgcagaagcagggcaaagtgatgccggggtcgcgtattgaactggcggactcacgtattggcgccgtcgtgccaaagggggccccggtaccggatatcagcagcgtcgccgcgttgaaacaaacattgctgcaggcgaaatccatcgcctattcggatagcgccagtgggcgctatgttgaaaaggagctgttcagcaaactggatattgccgcgcaggcgagccccaaagcaaaaatgatcgaaaaaatccccgttgcttcgctggtggcaaaaggggactacgcgatagggtttcagcaggttagcgaactgttgccggtcagcggcgtgacgttcgttggccgtctgccggatgaagtgcaatacgttacccgcttcgcgggcgccatagttgccgattcatccgcgcagtcgcaggcgaagcagttgctgtgctatctggcttcagtcccggcgcaggcggaaatccgtcgcacaggcatggatcctttaccctccaacgcctgcgaattacctgaagagggctaa

SEQ ID NO: 93632 - DNA, 330 bp, Enterobacter aerogenes
atggtagaagatatcgaaaaacgcgtcatcaagttgttcactattcgtagtgggacctatatcctcaggaacaagaaatacgctacatacacggcagactcgagtattcattttgatgtccagttagatcaagatgacgttgaagagttagttgaagactatgcaaaagagttcaacgtcgacatgtcgaatttccatcttgaaacgtactatcccgaagtcaatttttcatggaatccatttaaaaagcctgaaccagtagatgttccagagttcaccattgatatgtttatccagtctgccaaagccgggagatggctgtacgattaa

SEQ ID NO: 93633 - DNA, 567 bp, Enterobacter aerogenes
gtggcgtctctgtggcaacgtacaaggatgatacaacgacgcgtaatgacggtatgcaaatcagccattatgatggcgctttctgcaaggatcataagggattatgaagtggatactgttgaggaaataaatggaacatacttttttgcggggcgttcaaaccttaccgcctcagaactatttttcatggtctttgtcttcaatactgctgatcaatttggtatcaaagatgttgcctctgtatatgcactgtatgcgggtataaatgatcaggcgacacgggctaaacctggaacggcaattcctggaacatccagactatcgaaaggtgccagacgagtatttggcaatagaatgttcccatttgggttaaaaatgcctacatggattggcggttatactccatggactgtaaaaaggaggatggtgaggaaaattggaacgtgggtgggacggactattcccctcattggtgaagtgatcattgtggctgatgtatcgcagatcatttacaacacgatcattgaatacaataccatcgcgcggggcaacgataagctatggtag

SEQ ID NO: 93634 - DNA, 429 bp, Enterobacter aerogenes
atgatgaaagtgaaacacgtttctatgctgctgctggcactcagcgcagccatcgcgattggttgcagttcaccagcgcagcgtatggccgagtgcgaagcacaggggatcagtaaagatgcctgttatattgcggaacaaaacaaacaggctacggtgaatgccgcagcggagaaacaggcgctggaaaatgcacaggctttatatcccgtgcagaaagcgcaatccagcaaaaaagtgaagatcttcaatggtatgaagctggtcacaaactcaaccgggctgacagttgatggcaaacccgcggccttagacgaaagcaatgctgacgcgaaaacctattctcagggtttatacgtttttattgtctaccaatcaggaaaaattgccgtcatgcaggacggtaaatttttaggctacgccaaatag

SEQ ID NO: 93635 - DNA, 636 bp, Enterobacter aerogenes
gtgaattttcaggatatccatagctattatcagcaactcaacattgatgccttttttccgcaaataattgcgcaaggggaagccctgacggttgcggctaataaaaaattagcaattcagccaggatatatttatttttgcactgaaggttcgctgtcaatattaatgccggataatggccttcatattggtaattccattgagtatatgccgatagggcttatggaaaggtactgcccgctggcgaagtttgaatatatcagcagcgcggcggtgaagctggttaaagtcacttatgatgtctttgaccaaatctttttacacggcggccctgaacgcgtgcaggagctggcgatcattctgacctatatgtcgatttttactatcgatcttcataacgaacgccggcagatgaccagctatcagaccatcaggccgatgctgtttcgttatctttatcgccagagtacccatcagggggaaaacgaaggcctggcgctgtttattattaagcgcactaatctgtcgcgcacgcatgtttttcgggtgctggcggatctgaaagccgggggctatatcacgatgaagcgcggcaaactggtttctatcgaccgaccattgccggaagcctactag

SEQ ID NO: 93636 - DNA, 1158 bp, Enterobacter aerogenes
atggagagaaacgtcacgctggacttcgttcgcggcgtcgccatcctcggcattctgctactgaatatcaccgccttcggcttgccgaaggcggcctatctgaatccggcctgggccgggagtgtttcgccgagcgacgcctggagctgggccatcctcgatctgtttgcgcaggtaaaattcctcaccctgtttgctctgctgttcggcgccggattgcaaatgctgctggtacgcggtaaacgctggatccagtcgcggctaacgctgcttgccctgcttggttttattcacggtctctttttctgggacggcgatattctgctggcctatgcgctggtggggctgattgcctggcgcatggtgcgcgatgcccatcatgtcaaatcgctatttaataccggcgtcgtgctttatctcatcggtattgcggtgctggtattgttgggattaatttccgccaacggcgccagccggtcatgggtgcccgatgccgcgaatgtgcagtatgagcagttctggaagctcaaaggcggtatggaggcggtgagcaatcgcgcggatatgctgtccgataacctggtggcgctgggcgtgcagtacggctggcagctggcggggatgatgctaatgggcgcggcgctaatgcgctgcggctggttgaaagggcagtttagccttagccattatcgccgcgtcggggctgtgctgattattgccgggatgttggtaaatgtgccggccatcgccgcgcagtggtatttgcaatgggactaccgctggtgcggttttctgctgcaggcgccgcgtgaacttggcgcgccgctacaaaccattggctatgccgcgctggcgtggggattctggccgcaattatgccgctttcgtctggttggggcgattgcctgcgttgggcggatggcgctcagtaactatttactgcaaaccctgatctgcaccacgctgttctatcacctgggcctgtttatgaaatttgaccgtttacagctgttggcctttgtgccggcggtgtgggccgttaatctcctcttctcgcagttttggctgcgtcatttccgccaggggcccgttgagtggctatggcgtcagttaaccctgagagcctcagggacatcatccagagatacatctgtataa

SEQ ID NO: 93637 - DNA, 468 bp, Enterobacter aerogenes; identical to SEQ ID NO: 89906

SEQ ID NO: 93638 - DNA, 141 bp, Enterobacter aerogenes
atggcgagcataatggccctcttcgatgaacagcgccagcgcacgctgttccagacgatggccgccgcgcaacagcgcgccgatcgcgccctgagccgcctcggccagcgccgacggcatcaccgcgaagcctattcttaa

SEQ ID NO: 93639 - DNA, 1560 bp, Enterobacter aerogenes
atgacgactcgccatttaatgagtctggttacaggggtgcttattctcgccatcgtgctacccatcgccttaagtatctggctggcaatgcgccaggcgcaggcgcagttttatagcgagctcgaccactactcaaaacgcattgtcatgcgcgtagaacaagtcgccgctcaggccaaagaagcattacaagaagccgatgcgcacagcgccagcgcctgttcaccagaacatttgctgaatatgcgccgtattgcctacacccatcgctatgtgcaggaagtactctggttgcgtaattcggtgccgatgtgctcatcgcttgaggatcaccaggtctcggtgacgtttccgcaacccgaccacgtcaccgccgacggttacagcacctggcttacctcaatcaacgacctcggcctgcaacatcgcatgaccgcgtttggcaacaaaaatcatattgtgatgatcgacccggtgtcgtttattgatgtcatcgccaccggtcaggaaaagatccatacgatattattcggcactgagcacgatcaggtagtgatcagcagccagccgctcgatcccgcggtttggacgcgaattaaaaacctccatagcgagacgctaatgctgaatgacaccgtctatcgcgtgcatatcatccctgaactgggtcttggcgtcgccagttggtcgtccacgcagccactggatgcgcgccttcgccagcagctgctgctatggctgccgatagggctctttaccagcctgttgacctcttttttacttctacgcctgctgcgcagattacgctctccgcgttatggcatgttggatgcgctgcaatccgatgccatccaggtttactatcagccgatcgtctcgctggaggatggcaaaatcgccggcgccgaagcgctggcccgctggcagcagccggatggcacttttttatcgccggatatttttatcccgctggccgagcaaaccgggctgatcacccggttgaccgaggatatcgtgcgtaaaatctttgccgacctcggcccctggctgcgccatcatccgcagatgcacatctctattaatctgtcggtggatgacctgcgatcgcctacgttgccaacgctactcaaggaacaactggcgcgctggggaatcaatgcggaacagatctcccttgagcttaccgaacgcggctttgtcgatccgcaaaccactctgccggtgattattggctatcgccaggcgggacaccggatctcgatcgatgatttcggcaccggctattccagcctcagttacctgcaaacgctggatgtcgatacgctgaagatcgacaagtcatttgtcgataccctggaatataagccgctgacgccgcatatcattgagatggcgaaggcgctgaatctggcgattgtcgccgaaggggtggaaacgcccgctcagcgcgactggctgcgcgcgcatggcgtcaattacgcgcaaggctggctgtactgtaaggcgctaccgaaagaggaatttattcagtgggcggaacataatattaaaacgcattaa

SEQ ID NO: 93640 - DNA, 495 bp, Enterobacter aerogenes
atgtcgttcagattacaattcggtgaagattcggtctcagcaggcgaggtttcccggatagcggctcacgctttatccgggcgacccgcagcgtcgtttttttgtcgggtggcggctacgccttacccgacctacagtccgtgccattgcgcgctgcagaactctaccgttgtatccatggctactgaaactgccggtgttggtggcctcaaaatcgctgagacgttcccggcaggccggggcagcccgcatggatgcgggctgagggccgtgttttgcacggacgctgcctcggcccgacccgaagcctgccgggataagtcgaaggaaccacgaagtggcgattttggcggccagagcccgggggtacagggggcggcggcgactggccgccccctgtgcgctccctgtgccatgagagacataacgcagaagacatttcgggagcgcaatgtgcccggaaacagcatagaacaaccgtttctccaggaatga

SEQ ID NO: 93641 - DNA, 894 bp, Enterobacter aerogenes
atgattgatttacgccagttgaagtactttgtggtggtagcggaagaggagcatgttggccgtgccgccgaacgcttacatatttcacagtcgccgctcagccgccagatagcccagctggaggagcgcctagggctgatgctgtttgaacgtaaccagcagcgtattcgcctgacggcggacgggcagacgtttctggctgaaacgcgctcgttgctgacccatgccaaccgtctcgaatcattaggtaaacgactggggcgcggcgaagatggcgggttgtgtatcggttatatcgaaaacgccatgcactccggcgtgctttctaccgcgctgcgcaccctgcgaacgtcgcgcccggacgtgcatattgcgctgtatagccagccgcccgccacgcagattgagggcctgcgccagcgcagcctggacttctcgctggtggacatgccgccttcggcgggcgaacaggatctggagtatacccaggtgcttgatgaccggatgctgctggctttgccgcagaatcatccgctggccgcggcggaaaacttgcagccggcgcagctggccgatcagcagtggatcgcggttatccataacgacgatgcccattcgcgcgatgatttcgtcgccgcctgcgtgcgcgcgggctttaatccggatattcgtctggaagccggagagccattaacggccctggggctggtggcggcgggactgggcgtggcgctgatccagcacagcctgcggcataacgcccctgagggggtcgtgctgcgggaaattccgtggatgagctattcgacccagctgtgggcggtatggcacaaagccaaccagcgaccgctggtgatgcacttccgcgaggtgctacgcggcgataataattag

SEQ ID NO: 93642 - DNA, 1011 bp, Enterobacter aerogenes
atgagcatcaaacatattctgccaggcaacattggtttaggcggcgcgccgctgggtaacatgttccgtaacatcccggaagacgaggcgcacgccaccgtcgccgccgcctgggatctgggcgttcgttacttcgataccgcaccgctgtacggatccggtctttctgaaatccggatgggcgaagcgctctcgcaataccctcgagaccagttcgttctgagcagcaaagtcggccgcatcatgcttgatgaaatggaagacccggcgacgcgtgattttggtgagaaaggcggtcttttcgaatacggcctgaagaacaaaatcctcaacgactactcggccgacgccaccctgcgttctattgaagacagtttaaaacggctgaaaaccgaccatctcgacatcgtatggatccacgatccggcgcaggatttctacggcgacagctggctggagcagttcaacatcgcccgtaccggcgccttccgcgcgctgacccgcctgcgtgaagaaggcgtaattaaggcatgggggctgggcgtgaaccgcgtcgaaccttgcgaattgaccttagcgctcgacgagccgaaaccggatgcgttcctgctggctggccgctactcgctgctggaccacaaacgcgccctgcagcgcctgatgccggaagcgctggaacagaatgtcgatattgtcgtcggcggcccttacagctcgggcgttctcgccggcggtgaacacttcgaataccagaaagcctctgcggcgatccaccagcaggtggcgcagatcaaggccattgccgcccgtcatcaggtggatgtgaaagccgctgcgctgcagtttgccctggctcatccggcggtggccgccgtaatcccaggctccagccgtccgggccgtatggcggaagatctggccgcgctgaaagcgaccatcccagccgctttctgggatgagatgcgcagccagaatctggtggctgataacgcgccgctgccgattcgttaa

SEQ ID NO: 93643 - DNA, 2265 bp, Enterobacter aerogenes
atgactaataatacccgaggcctgaaacaatacgccggagccgccggcggatggggggccgttaaagcttgtaccacccacgttttggggcaaaaaacgccgctgcgcgataccatcgcgctatttaaaatgaaccaggttaaagggtttgactgccctggctgcgcctggccggacccagaacaccgctcgccgatggagctgtgcgaaaacggcgtcaaggccgtgtcgtgggagacaacggcaaagaaagcgacgcctgaattcttttctcatcatacgcttgcggaactgtggcagcgcagtgattatgagctagaaaattacggtcgtctcactcatccgatgaagtacgacatcatcagcgatacctatcaaccggtcgcctgggaacaggcctttgccgaaatcggcgagatcatgcgtggttttgcgccggacgagatggagttttatacctcggggcgcacctccaacgaagcggcgtttctctatcaactgtatgcccgggaatatggcagcaacaatttccctgactgctccaacatgtgccatagtcccaccggcacggggctgggctcgtctattggtattggtaaaggaaccgttgaacttagcgatttcgaggcggccgatctggtgatttgcgtgggtcataaccccggtacaaaccatccgcgaatgctctctacgctacgggaagtggcgcagcgcggcggtaaaatcatctcagttaatccgctacgcgagcgtggtctggaacgctttagttttccgcagtcgccgtccgatatgttgttaggtcagcataccgacctttccagcgactatttccagatccgcgttggcggcgacgcctggttcttccgcggggcgatgaaagcgctgctggccttagatgcgcagcatccggtcattcatcacgactttattgccgggcacacttcgggctatccggcgctgttggccgatcttgaagcgctatcgtgggacgatatcgagcgcggtgcgggggttaaacgcgaagtggtcgaatacttcgccgggatctacagccgtcatcagcgggtgatcattagctacggtctgggtatcactcaacatcgcaacggcacgcagaacgtacaacaactggttaatctactgttgatgcgcggtaatatggggcgcaaaggggcgggcatctgtccgttgcgcggtcactccaacgtgcagggcgacagaagcgtcggcattaacgaagccccgagtgaagagtttaatctgcgactggagagctactttggcatcaaggcgccgcgccagcatggccgttcctcggtcgaaagtatcaaagcgattgaggataaacgcgcgcgcgggctgatctgcatgggcggtaatctggcggtagcgatgccggatccgctgcgtacgttcccggctatgcgccgcctggaactgcaggtccatatcgccaccaagctgaatcgctcgcatctgttggcgggcaaagatacctttttattcccggcgcttggccgcagcgaacgcgatctgcaaatctcgggcgtacagtcgatcaccgtcgaagattcaatgagcatggtacatgcctctaccggttcgctgaaacctgcttctccgcatctgctttccgaaccggccattgtcgccggactggcccgcgcgacgctgccggatagcccagtctcctgggagcggttggtgggtgattaccgtctgatccgtgacgcgattgaagcggtgatcccggaattccatcagtttaatgcgcgcgttgccgcgccgggtggcttccgccttgataacccggcttcgcgtggcgaataccgtaccgaatcgggtaaagcgacgttccacgtctgcaatctggccgccgttgatgatgcgctaccggtggatagtctggtattgactaccatccgcagccacgatcaatacaacaccaccatctacggcatggatgaccgctatcgcggcgtaaccggccgtcgcgatattatcttcctcagtgaggaagaggcgcgtaagcgtcagttgaggcagggggatcgggtcaatatcatggcgctggatgcgcggggcgaaccggacggcgagaaagcgctgttgaatcagacggtgtttatcgtaccgatggcggcgtcgtcgattgccgcttatctaccggaggccaatattttgctgtcgttggatgcggtcgataaagagagcctgacgccggcttataagagcgcaccggtacttataatccgggcgtga

SEQ ID NO: 93644 - DNA, 189 bp, Enterobacter aerogenes
atggcgctacgcttatccgacctacagtccgtgcggcctgcctttaatttattcaccatgctgaccgaaactgccggtgctggcgatctcaaaacccccggtggcgctgccgcttaccggggctacagcgctttgcgatttggtagcccggagaaggcgcaacgcgccgcgtccgggaaaaacacttaa

SEQ ID NO: 93645 - DNA, 1302 bp, Enterobacter aerogenes
atgagtcaaggcctcaacaatgatatggcagtcagcaaaacgcgccgggtggtgaaaaacctgcgctggtgggtgctggtgctgtttttacttggcgtcaccgtcaactacatcacacgtaactcgctggggattatcgccccggaactgaaagccactctcggtattaccaccgagcaatattcgtggatcgtcggcgcatttcagctggcttataccatcttccaaccgctgtgcggctggcttatcgacgtcatcgggctcaagctgggctttatggtttgcgccacattgtgggcggtagcctgtatcgcgcacgccggagcaggcagctggctgcatctggctattttacgcttctttatgggcggcgcagaggcggccgccaccccggctaacgctaaaaccatcggcgagtggttcccgaaatccgaacggccgatcgccgccggctgggccggcgtcggcttttctatcggcgcgatgctggcaccgcctatcatctacttcgcccacgcctccttcggctggcagggcgcgtttatgtttaccggcgtgctggcgctgctatgggtcgtgctgtggtgggcgttctaccagagcccggaaaaacacccgaatctcagccaaggcgagctggagtacatcaagcaggataacgaagcgccgccggtgaagctgcccttttttaccgcgctaaaaaccgtctcgaagaataaacgtttctacggtatcgccatccccgcttttatggccgagcccgcctgggcggtgctgagcttctgggtgccgctgtacctggcgaaagagcacggtatggatcttaaacagatagcgatgttcgcctggctgccgttcctcgccgccgaccttggcagcgtggtcagcggctacctcacccgcctgtacgtccgttggttcggctgtacgcgagtcaactcggtcatcgccagttccgttaccggcgcgtttctgatgatctcgctggcgctggtcgccattacccgcgatccctatatcaccatcatcctgatctccattggcggtttcggccaccagatcatctcctgcatgctcagcgcgctggtggtggagtctttcgacaagggacaaatggcgacggtcaacggtatgcgcggttccgcggcgtggatcgccagcttcctgttctcattattaatcggggtgaccgccgacaaaatcggcttcaacccgctgtttatcgccatggggttctttgacctgattggcgccgttttcctggtggcatttattgctgaacgtcgcgccaagcgcgcctga

SEQ ID NO: 93646 - DNA, 783 bp, Enterobacter aerogenes
atgaccacccgcaccagccatcctgcatttatctcgcttcaaggcggcatcaactttcgcgacctcggcggtcaacgcgcggccgacggccggcgcgtacgttccggcaaactgctgcgctcgggctcgctgcacaacatgacgccggaggatctcaatcatctcagcgccatcccgctgagccgggtgctggattatcgcgatccgacagaggtcaaccgcagccccgatcggctgaatagcgaagccttttacctcaacgccccggccaatccgctttccagcagcgtcaatgcgaaagtcaccgagtttaacgccgcgaccctcaacaccatggacggcgagcagtttatgctacagctctaccgccagttaccgtttaataacgccgcctatcgccagttgacgcaatggctaatggagccttttgacggcgccctgctgcagcactgcgccgtcggtaaagaccgcaccggcgtcggctgcgccctgacgctgttcgcgctcggctgtgatagcaatacggtcatggaagagtatctgctgacccaggggatgctggcgcaggtcgaaggattcctgctcgacaccttcggcgaaggccttaatgagcacgggcgtaaaaatctcgccgccatcatgaccgtccaggagtcatatctggcgaccgcgttgtccagcattgaacagcattacggtcatgtcgaccgctggctggaacaggaataccgcctgacgccgcaggcgcgtgaagcattgcagtcgcggctgctggaagattaa

SEQ ID NO: 93647 - DNA, 249 bp, Enterobacter aerogenes
gtgctttccgataaacaggtaaatcagatgtgtacgaaatcacaattttttcctgttgctaatagtgtagtgcgcaacgcgccgctttcacggcgaatcgtctggttagtgaaacgtggattaatcttccagcagccgcgactgcaatgcttcacgcgcctgcggcgtcaggcggtattcctgttccagccagcggtcgacatgaccgtaatgctgttcaatgctggacaacgcggtcgccagatatga

SEQ ID NO: 93648 - DNA, 717 bp, Enterobacter aerogenes
atgacggcgaagtatcttaatatcgcgcgggaaataaaaaagcggatcattagccagcagtatcctgccagcgcgccgttacccgaccagtttgcgctggcggcagagttcaataccagccggatgacgatccagcaggcaatgcgtcagctgattgtcgaggggcttatctacacccgcaaagggcagggtacctttgtgcggaaaaatttcctccagctatcgcagtgggaactgcccggcagcgactatttcggcgccaccaaaacctgggagcatctcggcgaggtgcaaagcgaagtcgtgcgctttgaactgcgttttcccagcgagaaggaacagagttcgctgctgatcgacgccgatgcgccggtgtatgactttgtccgcctgcggttgcttaacggcgagccgatttcgctggatttaacggtaatgccggtggcgctggtgccggggctcaataaaagtcatctgcagacttcggtgtttcgttacgtgcaggagacgctggggctgaagctgatggggtcttatcgggtggtgcgggcgatgaagccggatgagctggacaaattacatcttaactgcgagccgaccgacccggtgctggaggttgagcaggttatctatctggaagacggtacgccgctggagtacgcgcactgccactaccgctacgatcatggcggggtcattctggtcaataacggctaa

SEQ ID NO: 93649 - DNA, 708 bp, Enterobacter aerogenes
gtgcgattgtggattctgcgtgcgaactctctttctccctctccctcagggagaggggacgtacggtgcggttatggattctgcgtgcgaactctctttctccctctcctgagggagaaaggacggtacggtgcgattgtggattctgcgtgcgaactctctttctccctctccctcagggagaggggacgtacggtgcggttatggattctgcgtgcgaactctctttctccctctcctgagggagaaaggacggtacggtgcgattgtggattctgcgtgcgaactctctttctccctctccctcagggagaggggacgtacgttgcggctatggattctgcgtgcggactctctttctccctctccctctccctcagggagaggggcggggtgagggcatcggcgactcaagcgcttcaagtattctctccatcaccgcatcttcatactcttcaaactcattattccagaagcgtaaaacccgccatccctggctctgtagccagcgggtgcggcgaacatcgtagacgcgcctctcatcgtgctgaccgccgtccagttcaatcgccagccgtgttgcgcagcaggcaaaatcgagaatgtagggaccaacgggatgttggcggcgaaacttatagcaagcaaaacggcggttgcgcagtaagtaccatagtcgacgttctgttggcgttaagctacgtctga

SEQ ID NO: 93650 - DNA, 1296 bp, Enterobacter aerogenes
atgcatcgtcttcataactaccctgatgtgcaggtgatgttccgtcgcctgatcatcgccacgctcgtcggcatctttgcggcgctggccgtggcgctgtttcgccactcgatggtggcactggaaactttatttctcggtaatgatagcggcagtctggtgaacgccgcgcagtcgctaccgtggtggcgtcggctgctgacgccggcgcttggcggaatcgcggcggggacattactctggttatggcaacggcgcaacgtgtcgcgtccgcacgccccgaccgattacatggaagcgctggaaaccggcgatggctgtttcgatacgccggcaagcctcgtcaaatcgctggcatcgctgctggtggtcgtgaccggcagcgccattggccgcgaaggggccatgatcctgctggccgcgctggccgcctcgctgtttgcccgccgttttaccccgcgcgctgaatggaagctgtgggtcgcctgcggcgccgccgccgggatggccagcgcctatcatgcgccgctggcggggagcctgtttatcgccgaaatcctcttcggcaccctgatgctggcctcgctcgggccggtggtcatttcagcggtgatcgccctgctgctgaccaatttactcaatggcggcgccgcgccgctgtaccacgtcgtcttgcaacaaaacctgaccgcgctgcattacggtttaatgctggcaaccggcctgctggccgggctgtgcgggccgctgttcatctggctgatggactacagccaccgtggcttcgtgaggctgaaactgtcgccgccgtggcagctggcgctggggggactcatcgtcggcatgttatcgcttattaccccggcagtatggggcaatggttatagcgtggtgcaaagctatctgctatcgccgccgctatttagcgtcattatcatcgtctttgtctgtaagctgttggcggtgctggccagcagcggctccggcgcgccgggcggcgtctttaccccgacgctattcgtcgggctggcaataggaatgctattcgccacttttagcgggctgtggttagataacgatcagaacatagcgattatgattgggttaaccggaatggcggcgtttctcgccgcgacaacgcatgcgccgatgatgtcgacgctgatgatttgtgagatgaccgggcagtatgtgctgctgcccggtttattgatcgcctgtgtactggcttcggtagtgtcgcgaacgttacgccgggattcgatctatcgccatcacgttgccgagcacgtctaa

SEQ ID NO: 93651 - DNA, 1158 bp, Enterobacter aerogenes
atgagcaaagcacccgtagttatagatcttttttgcggatgtggtggttttggacttggagccaagttagcaggttttgatgttattgctgctgttgatatagatgctactttgcagtcagcgtatgcccgaaattttccaaacactaaaattataaatggtgatatttctttattgggggagtctgaatggaactcaataatattatccaaaaaaattgatggaataataggcggccctccatgtcaaggctacagtcggatggggcattctgatgttaatgatcctcgacgttcactactgagacatttttttaggacggttaatataataaaacctaaattttttgttatggaaaatgttgaaggtttaatggatgagaaaaacgtatatgaattaaagtcagcgctaaagatattggatgctgattatcaaattttagaccctatgattgttgatgcttctgactttggagctccaacgagaagacgtagggttgtggttatagggtttattcctgaagagtttgcgtgtggattaaatagtgagaatctcaaatctggtgattatgagagaaatactgtcagggatgctataagtgatcttcctgctccgctggagaaatcaaagaacaatgatataactgatttcggttggcataagtataaagatctaaatgtagacaatttatcaaaatatgcaaaagaaatgagagccattccccctactggtatgggatggaaaaatgccatagataaattgaagataggtgaaataagtggtttttttaatacgcttcactctccaaaagttaaagcaagatattcttcgatagtacaggggatggttgatcctgttagtaaatcaaaatgccttttgtgggatggattatgtccaacattgagggcaggaactgggagtgataagggaagtcatcaggctgtacgtcctttacatccagaagaaggaagagtaattaccgttcgagaggcagcccgtcttcagggatttccagattggtttgttttccatcatactaaatggcacagctttagaatgattgggaacagtgtatccccattaatgtcaaaacatatcatgggggaaatttatgatgcattaaataatattgaaacgaatgctattaaggtaggctag

SEQ ID NO: 93652 - DNA, 1245 bp, Enterobacter aerogenes
atggctcttactgatatcaaagtcagaacagttaagcctgcagacaaacctttcaaacttaccgatggtgaggggatgcacctgttggttaaccccaatggctcaaaatactggcgtcttcaatatcgttttagtggcaaacagaagatgctggcgttaggggtttatccaatggtttcgttggcagaggctcgtaagaggcgcgatgcagcaaagaaactgatatctgatggtattgatccctctcaaaagaaaaaagaggataaaattgaagaaagcggagcactaacctttgagactgtagcaagagattggcatgcatcctgtagcaaaaaatggtcggagtcccatagtgagcgggtgcttaaaagcttagtggataatcttttccctgcgttaggtaaacgtaagatttcggaactgaagactcgggatctactcgctccaattaaggtagtagaggcgagtgggcgatatgaagtagcttcgcgtcttcaacagcgaacgaccgcaatcctacgttttgccgtacaaaatggtctacttgattataatccagctcaagatatggctggtgcaatagctgtagctaaacgagtgcaccgcccagcgcttgatttcgaacgccttcccgaattgcttgatcgtatcgaatgctttaaaggtcgaaagttgactaaattagcagtgaaactaacactgttggtattcatacgatcaagtgaactgcgttttgcaagatgggaagaaatcgattttaaaaatgcgctttggacgatacctgcagaacgagaacctctgaagggcgtaaagcactcacatcgtggttctaagatgcgtagccctcatcttgtacctctaagccgtcaggcactgaaaatattagaagagataaaacaaatcagtggggattacgagttggtcttcatcggcgatcatcagcaggataggccgatgagtgagaacactgttaataaggccctgcgctcaatgggctacgacactaaaacggaagtttgtggtcatggtttccgagctatggcctgtagcgcgttgatcgaatcagggttgtggtcaagggatgctgttgagcgtcagatgagccatcaggaacgaaatacagttcgggccgcttacatttataaggctgagcatttggatgaaagacggctcatggttcagtggtgggctgattatttggatataacaactcaaaaaagcatattaccttttgattttaaatga

SEQ ID NO: 93653 - DNA, 2124 bp, Enterobacter aerogenes
atgactaatgaactgtttgaaaaaattacggcgaaagttaatttttcaatactgaaaaaaacgccggtcatattgcaatctgaagccgccgagtgtggcattgcctgtctggcaatggtttgcggccattatggtctcgatatcgatctgttcaatttccgtcaacgctttggcagcccctcccagggggtaacgttgatgtcactgagcaaaacggcagaacatgctggcttaaaaagccgtgcgctgtcgctcgatcttgatgaaatcagacaattaaagctgccctgcgttatccactggggaatgaaccactacgtcgtgctcaccaaagtacgcaaatctagctttgtggttcacgacccggcgctgggtaaacgcattatcggcattcaggaaatgtcgaacaactttaccggcatcgcgttagagttatggcccgatcagaacttccagcaggaaaaagccaaatctcgcctgcgtttgttagatctgatgcgtaatatcgttggcttaaaatcagcgctgctgaaaattttcgccttttccgtcgtcgttgaagcgattggactactgttgccaataggcacgcagttggtcactgaccacgtgatcatggcccacgatcaaagcctgctctcggttatctgtattggtctggtcttctttaccctcttccgcacctttatcagtatgctgcgcgcatggacttcactgacgctcaacacgctaaccaatattcagtggaaaaccactctattcgatcatttggctagcctgccgctggcatttttcgaaaagcgtcatctgggggatattcagtcccgtttctcttcgctggataccattcgctccacgttcactaatagcatcgtcagcggcattatcgactcgatcatgacgatcggcctgctgattatgctcaccctgtacggcggttggctaacatgggtcgtcgttggctttaccttatgttacgcccttatgcgtctgggaacttatcgcttctatcgccgcgttgctgaagaacaggtaatcaaaggcgcgcgctccagttcacactttatggagtcgctatacggtatttcgaccatcaaagcgctgaacctgaaagaacgccgctctcagcactggctgaatatcaacatcgacgcctgtaatgcggggatcaaacagacccgtttcgacatgatgtttagcggtatcaatacctttattaccgccatcgatcaggttgcggtactttggctgggcgccattatggttattgataatgaaatgaccctcggtatgtttatggcttttaacgcctaccggggccagttctcccagcgcgcatccagcctggttgatcttaccatgcagctacgcatgctctcgctgcataacgagcgtctttcagagatcgtcttcagcgaaccagagcaagagctaccgtcacgtgaagtcttttcgaaggatgccggcgccaggcttgaagtcagaaatctcagctatcaatacgatcccttttcgcagccgattttctcaaatctgaacatcaccgttgagccgggggaatccgtcgcgctggtcggcccgtccggcgtcggtaagaccacgctattgaaagtgatgtgcgggctgctctcgcccaccagcggcgacgtcttcgccgataatctcgatatccagaagataggtctaaataactatcgccagggaaccgcctgcgtgctgcaggaggaccgcctcttttccgggtcgcttatcgataatatcagcggttttgaagataacgccgatgtggattttgtcgtcgaatgcgccaaacgctgcaacattcacgacgaaattatgaaaatgccgatgggctatgaaaccatcgttggtgagttgggcctggggatttccgggggccaaaagcaacgtattttgattgcccgcgcgctttaccgtaaaccgagcattctgtttatggatgaggccaccagccatcttgatttaagaaatgagtcggttatcaaccagtctatttcaggcctcagtattacccgcgtcatcgtcgcccaccgcccgtcaaccatcgcctctgccgatcgggttattgacttatcgcagtcaagaataccaatgccagcgtaa

SEQ ID NO: 93654 - DNA, 870 bp, Enterobacter aerogenes
atgcaaggaacgtttattggttttaacaccgccggaattacctacgaagaccatttcatggcgctgctgctgaaagtaaaacatcagaatggcatgtttcagacgtactatttgcaggcgccggtgctggctgacctgctcatggtcctggcaaaccggatgtctattttcttgcagagattacagcaggatggcgagaatgagtctcagaaagtggagcttcttgcctacaatgaaacgctaatagccaacacgccagagatagatatgttggaggtacaaaaccccaacccggagctgcgaatcatgtcgatcaccctgaaaccaggggaaacagaatcgacgctgatattaatgctgcagaacgagcaaatagcaactctacggattgatgaccgccaggtcgaagcgctgatattggggatccaacaatctctcaccatggccgcggacacgaaactgaatgaatatttagctttggctctggacttcgtactgctgtataccgtcgatttaacgacccaacctaatatcgagtaccagcaatacgctcaggaagagtggaagttaaatctgttcaaccatcatcttggcgtgctgtatagctacgagcaggaagagggtaaaaaagtactctctggcgcggtgattaaaaccagcgccgcgcatcagtcagattttgaaaaaagtatcgcgctacgtctgattgaaaagagccagaagctaaaacaagttcacaaccaacatacaccgtatcaaatcttcagcaaggtgattccatccgcaccgggacaaatgctgactaaggatgaatgcttaaagtcattgcacgaattctacgtggctaccaaagcagcgcttgaggcataa

SEQ ID NO: 93655 - DNA, 303 bp, Enterobacter aerogenes
atgagcattattaaacgtcatatggaagatcagcaggataaattcaatgttgccactaatatcgcaattgaagctggggtattagaacgctgcgaatactgtgaagctacggtttttcaaggtgatgaggacattgaagaagcctataagcttggtaacactcaatttagtaaaggcaaatttgaaggtttctttgaatctcgaagagagatgacagatgctatcaaagacgcagtggaatcgggtgaccatgcggcagaatgctgtttctattgtcacgataaaatgtacggtgatgactga

SEQ ID NO: 93656 - DNA, 1647 bp, Enterobacter aerogenes
ttgagtacgttaataaaagtacctgcgctttccggcagggcggaaaattggcaccagattaactggcgtcaggtacaccgtcaggtcagagggctacagatacgaatcgcaaaggcaacggagcagaagcgctggcgtagggtgaaagccctgcaaaggatgctgacgcgctcgtttgcagctaaagcactggctgtcaggcgagttaccgaaaatcgaggcaaaaagacagccggagtggatcgccagttgtggaacactcccggaagtaagtggcaggcgataggccagctaaaacggacgggttacaaaccgtctccgttaaggcgtgtttacattcccaagagcaacggcaaacgccgtcctctgggtataccgacgatgaaagacagagcgatgcaggcgttatacctgctggcacttgaccccgtctcggaaacaacggccgatcgcaacagctatggcttccgtccggctcgttcagcagcagatgcgattgagcaatgttttgttaatctcagtcgtaaaagctctgctgaatgggtattggaaggcgatataaaagggtgttttgacaatatcagtcatgactggttacttgctaacattccgttggataaacaggtactcgggaaatggcttaaagcgggattcatggaatccggtcggttacacccgacggaggctggtacaccacaggggggcattgtttctccggtactggcgaatatggcactggacgggctggaagcggtgttagaaacccatttcgggaagaaaaacaccaaagccagctacaaaaccaaggtcaattatgtgcgttacgcagatgattttatcattacgggtatctctaaagagttgctggaagatgaagtcaaacccctcgttgaagcctttatggcggaacgggggttgcaattatcacccgaaaaaacggtgataacgcatatctccgaagggtttgattttctggggcagaacgtgcgcaagtaccatggcaagatgctgataaagcctgctgctaagggattgcgtaaccacctccagaaagtccggcaaatagtgaagcgcaatgcggcatcaaaacaaggtgatctgataaggcaacttaatccggtacttcggggttgggcaaattatcatcgtcatattgtcgccaaagaaacgtttagctatatcgactatcgcgtctggaagttgctctggcgctggtcatgccgtcggcacggtaatcgcaacaagtactgggtgaaacagaagtattttcactctgtaggtagcgaaaactgggtattccagagtgtcgatgcggataacggcctgcaaaggctgttctcctgcaaagatatccctataagacatcacattaaaatcaggtctgaggctaatccatatgatccggttgacgagttgtacttcgaacagcggcaggttaagcgctggaaagaaggtaaaatgcagcacggaaaactgcggttgatatgggagcgacagggccatcggtgtccggtctgtcaccaactatttaaagataatgatgattgggatgtccatcacattattagacgggtagatggtggcggtgacgaaatcgataatttaatgatgctgcatcctaactgccatcggttggtgcacagttaa

SEQ ID NO: 93657 - DNA, 1248 bp, Enterobacter aerogenes
atgagtgggttaaaacaggagctggggttaggtcagggagtcgggttgctttcaacatcactactgggaaccggcgtgttcgccgtaccggcgctggcggcgctggtcgcaggcgataatagcctgtgggcgtggccggcgctgattctcctggtctttcccatcgctatcgtgtttgccgtgcttgggcgccactttcccagcgctggcggcgtggctcattttgtagatatggcgttcggcccgcgtctggcgcgggtaaccggttggctgtttttgtcggtgatcccggtgggcttacccgccgccctgcatatcgccaccggttttggccaggcgctgttcggctggcacgatactcagctgttgcttgccgagctcggcacgctggcgatcgtctggtgggtgggctcgcgcggcgccagttccagcgctaatctacagacgctggtcgcggtaatgattgtcgcgctgatcgtcgccatctggtggcgcggcggcataaacccggcgcagatccctttcccgcagcctaaagacgtcgacacatcgcagctgtttgctgcgctatcggtaatgttctggtgcttcgtcggccttgaagcctttgctcatctggcatcagagtttaaacgtccggagcgcgacttcccccgggcgctgatgattggcttattgctggcaggaaccgtttattggggctgtaccgtggtggtactgcattttcgcgccttcggtgcggaaatggcggcagcggcctcgctgccaaacatcgtggtacggctgttcggcgtgcaggcgctgtgggtcgcctgcgtgatcggctatctcgcctgcttcgccagcctcaatatctatatccaaagttttgcccgcctggtctggtcgcaggcgcagttcaagccggaaggttatctggcccgcctgtcgccgcgtcaggtaccgcgcaatgcgctgaatgcggtcttaggctgctgcgtactcagtacgctgtgcatttacgggctgaacattaatctcgatgcgctgatcgtctatgccaacggcattttcatcatgatttatctgctgtgcatgctggcgggatgccgactcctgcacggtaaataccgcgtgctggccattgtgggcagcgtgctctgcgttttgctattggcaatggtcggctggaagagcttgtacgccattattatgctggcagtgctgtggttcgccttacctgcacggtcatcctcagcaagccgataa

SEQ ID NO: 93658 - DNA, 1491 bp, Enterobacter aerogenes
atgaaaatgaatccgattctggctatcgatggttataaagtttcccatcgcgttcagtatccacaggggacgactaaggtctattcgaattttacgccgcgcggcgaccgtttctttcagtcgccgctagcggatggcaagttggtattcttcggcttacagggttttttacagtggttcctcatcgatctgtttaacgagggctttttcgctcgtccggaagaggaagtggtcagcgagtataagcaggttatggacggctacctgggacgggatagtgtcgcggtagatcatatccgcgagctgcatcagctaggctacctgccgctgcacatcaaagcgctggatgagggcacgaaagtgccgatgaaggtaccggttttaaccatcaccaataccctgccgcagtttttctggctggtgaactatctggagacggtcctttcggcagaactgtggaaaacgtcaactaatgccactatcgcgcatcactatcgcctgatctgcgaacgctgggcggagcaaacctgtagcgatttgacacatctggattttcaatgccacgacttttcgtttcgcggcatgtccgggctacatgacgccgcacagtctggcagcggacatctgattagctttaaagggacggatagcctgcctgcgctgctctacgctcgtgattactatactcggggtgaagaagacacgatcggcgccagcatccccgctaccgagcatagcgtgatgtgtatgggcgagcgggatcgggagatagaaacttttcgccggctcatcgctgacgtccacccgcaggggtttgtctctattgtttccgatacctgggattactggcaggtactgaccgagtatacccgcgaactgaaagccgtcattatgcaacgccagggacgtgtggtattccgaccggacagcggcgatccggtggctatcctctgcggcactgccgccgatgatgatacccgcagcgatcgttgcgccgaagagaaaggttcggttgaggtgctgtgggaaatctttggcgggacgattaacgagaaggggtataaggtgctggacccccacgtaggtctgatttatggcgattctattacgcttgcgagagcggatgagatcctgcgtcgcctggaagccaaaggctttgccagcgctaacgtggtattcggggtgggttcatatacctaccagtataatacgcgtgatactttcggctttgcgatgaaagccacctggggggaagtgaatagcgaaggaagagcgctctttaaggagccaaaaaccgacaacggcctgaaacgttctgcgcgcgggctgttacgcgtagcgcgcgatgccagcggcgagctacggctgcatgacgatcaaagccaggagcaagaaggtcagggagagctaaccactcgtttccttgatggccagctgtttggttacgaatcattgtcacagatccgcgcccggctggcggcgcagcgttga

SEQ ID NO: 93659 - DNA, 870 bp, Enterobacter aerogenes
atgagcgataaattcacacttttgctggacgatacagcggtaacccttaccagcggcgtcttccctgatggcgctggctggctgaaagtgaccggcgagctgccggcctccgccgcgttaatgcgcatccgggcggtcgcgctacgtgatatgaatgatttcatgctgctggcccagttggtggaggccgttcgccatgtgaccgatgtcgccttcagccatctggaactgccgtggttgccgtgggcgcgccaggatcgccatatggtgccgggcgacagctttgcgctgaaagtgtttgcacagcagcttaatacgctgggattcgacaaaattgtggtccttgacccgcatagtgaggccgcggcggcggcggtaaacaacctggtcgcgattagccaacaacagtgcctgctgcagagctcccatctgcgacgtgccatcgccgccggggaggtaatgctggtggcgccggatgctggagcgttaaagaaaattcagtatgtcgctaaagcctgtggcgccagcgagtttgcgatcctctgtaaggagcgggatgtcgccagcggcgcgttaacgggcttttcgctgctagccggagaggtggcgggtaaagcggtactgatcgttgatgatctgtgcgatgccggtggaacgtttatcggctcggcgcaggtcctgcgcgacgccggcgcgcgtagcgttagcctgtacgtgacgcatggcgtcttttccaaaggcattacgcatctattgaataatggcatcgatgctatttactccaccacctcttatgcctctgcggctttagtccatccacagctggaactgattgatattgataccatttaccgcgcttattggggataa

SEQ ID NO: 93660 - DNA, 720 bp, Enterobacter aerogenes
atgaccaccgacgccgattacctcaaccactacgacgccagccgttttccttcaccgctggtgaccgtcgacagcgtgctgtttacccttcatcagggagcgctgtgcgtactgttggttgaacgcgcaaatccgccacagcaaggcgcatgggggctgcccggcggatttatcgatatggcccatgatgaatccacccgcgctacggcgctgcggaagctgacggaaaaaaccggcgtttccccttcctggctggagcagttcggtaccttttccgggccggaccgcgatccgcgcggttggagcctgaccgttgcctggttcgcgctaatcgcctgggtcgattgtcagccgcatatcgccagcgtcagcgacgcccgctgggtgccggtccagcagcttgacgagtatcgcctggccttcgatcatcagcagatagtcagcgccgcgctggagcgcctgcgccagaaaacgatgtattcgttattgcctgtttactgtttgggggatacctttacccacggccagttgcaggaagcgaccgaaatcatcctcggccagccgattcagcgtaaaagcctaatccgccgttttgaggcctccggcatgttcgaagaaaccggagaaacgcttgcgacaggggcgcgaaaggcgcgattgtggcggctcaagcccggtgcggatatccacctcttctcgcgcaatctgcttgccgattag

SEQ ID NO: 93661 - DNA, 1023 bp, Enterobacter aerogenes
atggttgaaataaccccgacagcagtgacgccccccgataacgattcgcgcgaattccatccgatgcgcggcgtgggcaatcgtcatctgcaaaccatgctgccgcggatcatccgccgcaagctccgatttacgccgcactggcagcgccttgagctgccggatggcgatttcgtcgatctggcctggagcgaagaccccgccggcgcgcgccacaaaccgcgcctggtggtctttcacggtctggaaggcagcctgcacagcccttacgcccacggtttaattcacgccgccatgcagcgcggctggctcggggtggtgatgcattttcgcggctgcagcggcgagccgaatcgcaacagtcgtatttatcactctggcgaaacggaagacggcacctggttcctgcgctggctgcagcgtgaattcggcgccgcgccgacggcggcggtaggctattcgcttggcggcaacatgctgggctgtctgctggcgaaagaaggcgacaatattccgctcgatgcggccgtcattgtctcggcgccctttatgctggaagcctgcagctaccatatggataaaggattttcgcgcgtctatcagcgttacctgctcaacctgctgaaagccaacgcctcgcgcaagctgaaagcctatccaggctcgctgccggtggatcttcgccagctcaaaagcatgcgccgcatccgcgaattcgacgacatgatcaccgccaaaatccacggtttcgccgatgcgctagactattaccgacagtgcagcgcgatgccgcgcttaagcgatatcaccaagccgacgctgatcattcacgcaaaagacgatccatttatggaccatcattcaataccgccgcaggaacagctgccggctaatgtcgaatatcagctcacggaacaaggcggccacgttggctttgtcggcggtacgctgcgaaaaccgcaaatgtggctggagcaacgtattccggattggttaacccgctggctgggaggacaagcatga

SEQ ID NO: 93662 - DNA, 219 bp, Enterobacter aerogenes; identical to SEQ ID NO: 87819

SEQ ID NO: 93663 - DNA, 870 bp, Enterobacter aerogenes
atgtctgccaaacatccagtgatcgcagtcacgggctccagcggcgcgggcaccaccaccaccagcctcgcgtttcgcaaaattttctcgcagctgaacctgcatgccgcggaggtcgaaggggatagcttccatcgctatactcgccctgaaatggacatggcgatccgcaaagcgcgcgatcagggcaaacacatcagctacttcggcccggaagccaacgacttcagcctacttgaacgcacctttttagagtacggcgaattcggcaagggccagtcgcgaaaatatctccatacctatgatgaagcggttccctggaatcaggttcccggcacctttaccccgtggcagccgctgcctgaaccgaccgacgtgctgttttatgaggggctgcacggcggcgtggtgacgccgcagcatgacgtggcgaaacatgtcgacctgctggtcggcgtggtgccgatcgtcaacctcgaatggattcagaagctcattcgcgataccagcgaacgaggccattcgcgcgaagcggtgatggactcagtggtgcgttcgatggaggactacatcaatttcatcaccccccagttctcacgtacccatatcaacttccagcgcgtgccgacggtggatacctcgaatccgtttgccgccaaaggtattccatcgctcgacgaaagcttcgtggtgattcacttccgcaatttgcaggggattgattatccctggctgttggcgatgttacaggggtcgtttatctcgcatatgaacaccctggtggtgccgggcggtaagatggggctggcgatggagctcattatggcgccgctggtcgagcgcttgatggaaggcaaaaccattagttaa

SEQ ID NO: 93664 - DNA, 405 bp, Enterobacter aerogenes
atgcaagcgcgtgtgaaatgggtggaaggtctaaccttcatcggtgagtcggcctccggccaccagattttaatggatggcaactccggggacaaagcgcccagcccgatggagatggtgttaatggcagcgggcggctgtagcgcaattgacgtggtgtctatcctgcaaaaagggcgtcaaaacgtcactaactgcgaagtgaagctgacctccgaacgccgtgaagaggcgccgcgcctgttcactcatatcaatctgcactttatcgtcaccggtaaagagctgaaggatgcggcggtgtcccgtgcggtggatttatccgcggagaagtactgctcggtggcgttgatgctggaaaaggcggtcaacatcacccactcttacgaagtcatcgaagcctga

SEQ ID NO: 93665 - DNA, 633 bp, Enterobacter aerogenes; identical to SEQ ID NO: 87816

SEQ ID NO: 93666 - DNA, 1161 bp, Enterobacter aerogenes
atgaaacgtcaggttattttttatggagcatttgatcgctataattatggcgacaatttgatgccaattttgttaaagaaatattttgaaaagtatcatcaaaccttggttgaggatatagactttgtcttttcttctatcaaaaaatctgatcttagtatatacaagtgcattcccactattcctatgtatgaattactggaagcccctgaaaattcaactgttattgtggtgggtggtgaagttttaggcgcaacagctggtatattatttactcatgtacaagacaatgcgtctttaaggcaagttgtattgttagttaaaaggttgtcaccaagactacttaatcggatagcgaagatattctacaagccagtatgggattatccttatgttgtaaataaaagtagttataaaaaccgagtgaaggttgtgtataatacagttggcggcaaacctgataaaactcaattcgaagttattaaacaggctgactatatttcttcccgggacgatagaacttataattatctcaaggattgtgcatcctctcatttagtccccgactctgtattaatggcttccggtgtcttggaacatgattttttaatttcaaatatccgttcagaaatcagagaattaacttccaataactatataagtgtccaggcttgtccttataaagttggatttacagatgagcagttagcagctaaaatagatgcctttatggcagtcgataatactaaagtcatccttttacctatcggttacgctagtgggcatgatgatgcgatattcttaaaaaatgtcaagtctctatgtaaatcagaggttttgctacttgatcaactgaatgtctgggaaattatgtttattatttctagatcacaagcattctttggcacaagcttgcatggggttattaccgcaatgtcttttggagttgctcatttttcacttaatagtgaaattgaaaaattaacttcattcctgaatacatggagtgtttatccatttaatcaaccagttgatgatgctgatatatctaatgcagtaactaaagttgagagtgagcatttggaatctcttaaggtttcagttagtaatgctcaagctataatatttaaaagtcttaaagatatttcttcaattctgtaa

SEQ ID NO: 93667 - DNA, 840 bp, Enterobacter aerogenes
atgcctaataaaatcatatttcttatagtattatataataaagtcgttgaggagtcgaccacggtaataactttacttgagagcgatattacaaatgcaaaaataataattcataacaatgggcctgcagaggttttattgtcctcacacattttaaatgcttttaatgaaaagcatataaatgtagaattagttaattgtgtgcaaaataaacccttgagcattctctataatcaatttctttctagcaatccagattatgacaaatatgtcttgcttgatgacgattcagtaataacaagagaatatgttgatcaacttcatatgtctgattatgagctgctcttgccaagaatatcttcagttcaggatggaacaatatactatccaatattgaatgagagtgttattactggcgataagtttcttgctactaaaggtcttttctctattggttcaggtcttattctgactagtggttttttagataaatttgtaaaagtaaattttaaaccttttgatgaaaagttcgcattatatggtgttgattttagtctttttagacgaatggatatattatcagagcaaggtgagttttttaaggtcaaaacagcaggtgaaataattcattctttatcaagaactgatggggtagagagcaaatttagaagggaggaacggttgatcgatttttctttaacaaccagaaactatccatcgtattatcaatgttatatttttttgaaacgtagtattaaagaaattctattctttagggttaggaatctttatgtcatgtatgatgcatttcttcatggttcacatcctagatgtcgttaa

SEQ ID NO: 93668 - DNA, 474 bp, Enterobacter aerogenes
atggtttatattaacggtagatttcttacccaacctataactggtgttcagcgctttgcttatgaactatgccttcatctatctcgcatacgcaaagatactgttctccttgtacctgcaatgtcacttattaaaaaagattatattctaacagaattaaacgtcattgaattaaaaggagggagcgggcattattgggagcaaattactctttctttatttctgacaaagaacaacaaagcgttgctagttaatctttgcaatacagggcccgccttttataaaaatcaaatagtaactcagcatgacatttcatatatacgctttcctcatagtttttcaagaaggttcaggtttttctatttgttgttaactccgcttttacttaaaaactcaaaggttataataactgttagtgatttttcacgaaatgaaatatccacatgctgtcggtcatttattttcgatggttaa

SEQ ID NO: 93669 - DNA, 198 bp, Enterobacter aerogenes
atgaaagaagtgctagataaaagtgtgttctattttaaccctgaagttgcctccgagatgattaatgccatcagatttgtaaatgaagatagaatttttcgcgaaaagttaatagaaaaaggaaatgaaaatataaaaagattttcatgggcagagtcggctcgtaaacttaatacgttaattgaagattttttttaa

SEQ ID NO: 93670 - DNA, 2646 bp, Enterobacter aerogenes
atggttgctcaatttttactcacacagaaagaagtcgcagcaatacaatatgccgtattagggaaaaatgcatacacatctcaaacggcttttgattcagttgcacaaggttttcgcaatggaacgttaactcaagaacagtatgttagtaatttacttacatcatcggagggaagcgctttatatgctggtaaaagcgatctcgacattttaaaatctatatatacagttttgtatggttcaccacccgcagacaatatacttcagaataacttacaagataatggacttagtggcgcgatttatagtgccatcagtaacttacttttttataacaaatttgatgcttcgacattggcttcacagcatagccttgacaacactcttaatggtatgatgttcggtgattacgggacaagcacctggaatacctggagtgtagccttgagccagcaagaacaactcatagctgcttatatttctattgcagggcgctctgtagatatgagtgggttgagatactggactaataagttgactcaaccaggacaaacgtttgattctgtacttaaagcgattattgctgctccagagttccaaaataaaggtgcaaatttatcaggcgccgattttattaagcatgtatataatggtgtttttggtgttcaaccttctgacgctatagtcactcaatatttatcattaggtgccaataaaacagctgttattcaggctattattaatgatctacgtacttcaaacttaacaaatccaacagcagttaccagtcaacatgcctttgagtacgaaattggaacaggtttgctttataaaactggcgcgatacttacagctacagcaggcggcggaaatgcaacaggtacagttaatactaacaccagccaccagttaactaatgcggaaactgctgtcttaaccaatgtaatgctcagtgcaaatgctgctacgaccattaatttaaaatttgctgaccatttggcagatctcgaaattggtggcggtagcgcggctacagttaacctttccgacaatggtgtgaaccccggtgtcaacatcaccgttgacaacggtagtattactttaaatgccagttctggtgctgataaggtgcttttgactactgatgctgttgttgcctctgcgactggtcagtttaatcttggcacaggcaatgattccctgaaatggttaggaaatgcgacttcaggaactttcaatacggtaagtacttcaattcgggcagacggtggggctggtgttgatactatctcagcgaatttgatcaccaagaatgttgtgatgacatctagcggtcttggtgggacaacgaagacggcaactattaccactaacactgcccagtttactaactttgaaaaacttgatttggctggatataaaggtaaggcaaatgtcaattccggttcaacggcggcagacaatacttttgatttcggtattttaactgggaaagctgtatcggaatcaaatgtcacaggggttatcaataatgttgtacaaccagcaacatccaccatcggctcgcaagggtttgtactctccgggcttgccaatcaggtacacgtgataaatgctgccggtggcagctcagcgcagctggaagttaccggtgatgcgactgctgccagcagtgttgatatcactttcctcaaggatgcagtaaccagttttggtattaactttaccgcaaccagcaatactgatgtaaacgccggttcgcttgcgttgcatagcagcagtacaacagacattttaggtaatgttactgggccacagttgacgactttaaatatcgcttctggaggcattggtaattttagtaataccttgactctggctgataccaatacccaagtcacagggattaacgttagtggagatcatgttctgaatcttaacgttggttcaggttttagtaacatccataacgtcaatgctgcaagtaatacagctggtctgaatttagacttgggtgccagcggtactggcgatggcattattgtccaattgctgaaaattttgccattgagtgccgttactattggcttactggatacagtgctgggtctggtaggactagggctgaataaaggctatcacattgatgttacggggacttcttcgagtgatcattttgctgttcaggggaatacagttgttgctggcggtaacggtgccaaccagtatgtcctcaaatccagtacagtagataaaggtgtcactgtttctgattttaacagtgcaaaagacactatcattgacaatgtttctggcctgacgattaataatgatacctcacatactgccgttactgattatggttaccgtacttcagatcaggtagatgcattgttgggtactctggtcggcggtgtggtaggcggtgttgctggcctgttggctaatatccttggcctacaaaatggctctttaactcaaaaagttggtgtggcatcagttgtctggtccggacaatcaaacattgcagattcctacttgattattgataacaacaataaccataacctggactcttcagacacaatcgtcttcctttctgggcagaaccatcaacaactggttgatactttgcattacgcataa

SEQ ID NO: 93671 - DNA, 1740 bp, Enterobacter aerogenes
gtggaacattttataccgcgaaatgaaatcgcagatgtaatacgtacccgcagtaaaatattctggacggtcggcgttttcaccgcatttatcaacatattgatgttggtgccctcaatttacatgctccaggtatatgaccgagtgcttccttctggcaatgaaatcacgctcttaatgctgacgctgatcatgctaggcatgtttgggatgatggccctgttagaatatgcacgtagtatggtggttatacgcatcggcgcgcagttggatatgcgcttaaattcgcgtgtatacaccgcagcttatgaagataatcttaagaacaaatcagcagacgccggtaatatgttaaatgacttgaccaatatgcggcagtttatgaccggaagcgctcttttcgcttttttcgatgccccatggttcccgatatatctactggtaattttccttttcaatccctggcttggcctgtttgcgttaattggttcgttgatgttggtgggattagcgattgtcaacgaaatggtgtcaaaaaaacctttggctgaagccagcaggctggctttgcaatcaggcagcctggcaagtacaaatttgcgtaatgctgaggtgattgaagctcttggcatgctacctaacataaagtcccgttggtataatttacatcagagatttctgaatagtcagcgtactgccagtgaaagcgcaacccgagtcgcttctgtgacaaaatttgtgcggctttcattacaatcacttgttctgggattgggggggtggttggcaattgatggccatatcacgccaggtatgatgattgccggttctattcttatgggcagaacccttgcaccgattgagcaggtaattaacgtttggaaaagctggagttcagccagactttcctatcagcgcctggttaaattacttgaccaaaacccacctcgcggcaccaatatgtctttacctgcgccgaaaggggagttatccgtcgagaatgtctccgctatcccccctgggtcccaaggtgaagctgtgttgcataatgtttcgtttgcaatccagcctggagatgtccttggcgttattggtccgagtgcctcagggaaatctactcttgcacgtctaatggtgggaatttggccagtagatgaaggaattgttcgcctggatagcgctgatatctatcagtggaacaaagatgagctaggcccctatatcggatatttaccgcaggatattgaattatttgcaggaacaattgcagaaaatatcgcgcgcttcagtgacattgacgctgaaaaagtgattgatgcagcccgcctggctggcgtgcatgaactgattttacattttccacatgggtatgacactgtcattggaaatagtggcgctggattgtcaggtggacaaaagcagcgtatcggccttgcacgtgctttgtatggcgatccatctttgattgtactcgatgaacccaactcgaacctcgatgatgccggcgagttagcgctgaatcaggcagtgtctattctcaggcaacgtaataaaacggttgttttaattacccatcgtactaatttgctggctatgaccactaagttattgttgctggttaatggcaaggttagtgcttttggtccaactaatcaggtattgcaagctcttaccaatgcccaaaaatcacagacagcgcaacaacatgcagcgcatgcggtgaacagcgatatgcattaa

SEQ ID NO: 93672 - DNA, 1332 bp, Enterobacter aerogenes
atgtctgtacagatcaatatgccacagggaaataatatcgaacaatcacagacagatgaacgcaggtttactcgtctgggatggttggtgatcggcattggattagcgggtttttttctatgggcgagcctggcaccattggataagggagtggcatcccctggatcagttacggtctctggtaatcgtaaaactattcagtctcctgcgggaggaatagtcagaaacatagccgtgaaagagggtgaaaaagttaaggccggtgaggttttagtacagatgagtcaggttcaggctcaagctcaggtcgattccttacaagatcaatattacacaacgctggcaacggcaggcaggttattagcagaaagggataacctcagtaagattcgcttttcccctgtttttgacacgctcaaagatagtcctcgtgtcgcagaaatcatagccttgcaaattcagcttttttcttctcgacagcaagcgctgcgaagtgaaattgatggtttcaggcagtccagtgacggtattcgttttcagttaaaaggattgcaagattctcgcattaacaaacaaattcagttgagtagcatccgtgaacaaatgagtagcatgaagcaactggctgcggaaggatatttaccgaggaaccgttacctggaggcacaacgccagttcgcagaaattaatagcagcattgatgaaacaataggacgaatcggtcaactccagaagcagttgcttgaatcacagcagcgaatcgaacaacggtatgccgattatcaacgtgaagtcagaacacaactcgcacaaactcagatggatgccaatgatttcaagaataagctggatatggccaaatatgatcttggtaacacgtccatcatttctcctgtagatggcacggtagtagggctaactattttcacccaaggtggtgtagtgggggccggagagcatctgatggatatcgtcccaagcgaagcatcactgatcgtcgactctcgactcaaagttgagatgattgataaagtctataaaggtctacctgttgagttgatgtttaccgcgtttaatcagaataaaacgccaaaaatacccggaacggtgacgctggtatctgctgaccgtttggttgataaggggaccggggaacctttttaccagatgcaggtgacggtcacgccagaagggatcaaaatgctacaaggcgctgatattaagcctggcatgccagtagaagtattcgttaaaacagggtcacgttcattgctgagctatttgttcaagccaattttagatcgcgctcgtacatcattgactgaggaataa

SEQ ID NO: 93673 - DNA, 1380 bp, Enterobacter aerogenes
ttgattcaggttaaacggcagatttatggtctgaccataagtacattgacacttatgatttctgcacctgtttattcgttaggaattttggatgcatattctttggcacttgaaaaagatccaatattccaggcagcaattaaagaaaaagaggccgggaatgaaacagagaacattggtcgtgcagggcttttgccaaaagtttcactgaattatcaaaatgccccgcgtaactggcaaacgcagcaatatcagacaagcgatttttttggcaatgtcagtgatgtaacaaagcggcaacaataccgtagctatgcgggttcggtaacattgacccaatccatttttgactatgaagcatatgcaaaatataagtccggtgttgcgcaatcactaatggcggatgaaaaatatcgtggtaaatacttggatttggcagtgagagttataactgcctatgtgggagtcgcgtatgccaaggaccaaatcgcattggctgaagctcaaaaagaggcttataaagagcaactagcgttaaatgatcgcttagttagcgccggagaggggacggtcaccgatgttgctgaaactcaagctcgctatagcctggctgaagcccagcttattgaagcccgggatgcgttagattctgcccaacgtgacctcgaagtgatcattggtatccctctggagcagcttgacgaactgcagactcttcgtgccggaaagttccagatcaggccattacaaccggccagatttgaagattggcagcagattgccatggagcgaaatccgttactaatgtcatcccggcatggcgtggatgccgccaaatatgaggtggagaggaaccgagcgggttttatgccgcaggttcaactttatgcctcgcattcagagaatgattccagcagcgataacacggttaatcagaaataccgaacggatagcattggcgtgcaggtcagtatgccgatctattctggcggaggtgtggctgcatcaacccgccaggcagcggctcgttatggtcaggcaaagtacgagcttgatgcgcaagttggtaatgttattaatgatttacgtaagcagtttaatctatgtattagtagccaggcaaagcttcttgcctatgattttgcggttaagtcagccaccacacaggtggaggcaacacgtaagagtgtgctggcggggcagcgcgtcaacgttgatgttttgaatgccgagcaacaactttatggtgcgcaacgggatcttgcagaggcgaaatatacctacatcaaagcgtggatatcattgctcagcgattccgggaccttgaatgaaaaagatatcagtagggcagcatcatatttttccagacctgtaaactaa

SEQ ID NO: 93674 - DNA, 1416 bp, Enterobacter aerogenes
atgttgcttcctgtaattatggctggtggaacgggtagccgtctatggccgatgtctcgcgagctctatccgaagcagtttttgaggctctatggccagaattcgatgttacaggaaactatcacccgcttatctggacttgatacccaagagccaatggttatctgcaatgaggaacaccgctttctggttgccgagcagttaagacagttagataaactatcccataatatcatgcttgaaccagtagggcggaatactgcgcctgcaatagcccttgctgcactacaagcgacaaagaatggggacgaccctctgctgctggttcttgcggctgaccatatcatcaataatgttcaggtcttccacaatgccatccaggtcgctcagaagtatgctgaagttggccacctcgtgacatttggcatcgtaccgggttcagccgaaactggttatggctatattcagcgtggagatgctttagatgactcccaacagacatcttataaagtagctcgatttgttgaaaaaccagatcgtgcccgcgctgaaacttatcttgcttctggggattactactggaacagcgggatgtttatgttccgcgctaagaaatacctttctgagttggctaagtttcgcccagacattcttgattcttgtaaacaagccatcgctagtgcggatgacgggaatgattttatcagtatagctcatgatattttcagcaattgccctgatgagtctgttgattatgccgtgatggaaaaaacatcagatgctgttgtcgtgggcctggatgctgactggaatgacgtcggctcctggtccgctctgtgggatgttagcccgaaagatcagcagggcaacgttttgactggggactcttgggtgcataatagtcaaaactgttacattaatagtgacggtcagttggttgcagctatcggtgtagagaatctggttattatcagtacaaaagatgctgtactggtcatggataaagaccgtgctcaggatgtaaagaaaattgtagagcatttaaaacacaatcaacgtagtgaatataaacgccatcgtgaaatttatcgcccatgggggcgtagcgatgtcatcgtacagacaccacgctttaatgttaatcggattactgtaaagcctgggggggctttttctatgcaaatgcaccatcatcgtgctgaacattgggttatcctttcaggtactggtcagatcacagttaatggtaaacaatttttactaacggaaaatcaatctaccttcattcccattggtgctgaacattgccttgaaaacccagggaaaattccgttagaagttctggagattcaatccggaacttaccttggtgaagatgatattattcgaattaaagaccagtatggtcgctgctaa

SEQ ID NO: 93675 - DNA, 1371 bp, Enterobacter aerogenes
atggcgcagcttaactgctttaaagcatatgatattcgtggcgaattaggcgatgaactgaatgaagatattgcctaccgtatcgggcgtgcttatggtgagtttttgaaaccaaaacgtattgctgtaggtggtgatgtccgacttactagtgagtctttgaagctggcattggctaatggcctgatggatgccggcactgatgtacttgatattggtctgagtggtaccgaagaaatctactttgccaccttccatcttgggattgatggtgggattgaagtgacggccagtcataatccaatgaactacaatggtatgaaattggtgcgtgataatgcgaagccgattagtggtgatactgggttacgtgatattcagaggcttgctgaagaaaataatttccctcctgttgatattaaccgccgtgggacattgcataagattaccatattgcaggagtacgtcgatcacctgatgagctacgttgaactggcgaactttaatcgtccgcttaagcttgtagtaaattcaggtaatggggcggcaggtcatgtaatcgatgaaattgaaaagcgttttatcgccgctggagctcccgtaacttttgttaaagtgcaccatcatccagatggcaacttccctaatggtatccctaaccctcttttgcctgagtgtcgtcaggataccgctgatgcggttcgtctgaataatgcagatatcggcatcgcatttgatggcgattttgaccgttgctttatgtttgatgatgagtccgaatttattgaaggatactacattgtcggtttacttgccgaagcatttctgcagaaacaaccgggtgctaaaatcattcacgatccgcggttaacatggaatacagtcgatattgttaccgagaatggtgggataccaattatgtccaaaacaggacatgcctttattaaagagcggatgcgccaggaagatgctatttatggtggtgagatgagcgcacatcattatttccgcgattttgcttattgcgatagtggcatgatcccttggctgcttgttgctgaactattgtgcctgaaaaatacttccctgaaagcgctggtggccgatcgtcaggctgcgtttcctgcgtcaggtgagattaaccgtaagctgaagaatgctcctgaagctattgcgcttattcgcgagcgatacgaaccttccgcagcgcatgttgatactacggatggcattagcattgagtaccccgactggcgttttaatctccgtagctctaatactgaacctgtagtgcgtctgaatgtggaatcgaaagccgataccgtcttgatgaacagtaaaacggaagaaatcttagctcttctgcgctag

SEQ ID NO: 93676 - DNA, 1167 bp, Enterobacter aerogenes
atgaaaattacaatttctggtatcggctatgttggtttatcaaacggcatcctgattgcgcaacaccacgaagtggtcgcgctggatatcgtacagtctaaagttgatctgcttaaccagaaggtatctccaattgtcgataaagaaattcaggaatacctggcagaaaaggcactgaatttccgagcgacgactgacaagcaggatgcataccgcgatgctgactatgtcattatcgcgacaccaactgactacgatccaaaaactaactacttcaatacctcaaccgtcgaagccgtcattcgcgatgtgactgagattaaccctgatgctgtgatgatcataaaatcgactattccggttggttttactcgtgatatcaaggaacgactcggtatagacaatgtgattttctctcctgaatttctgcgtgaaggccgggcgttatatgacaatttgcacccgtcgcgtattgttattggtgaacgttctgagcgagcagagcgttttgccaatcttctgaaagaaggggcgattaaacaggatatcccgacgttgtttaccgattcgactgaagccgaggctatcaagttgttcgccaacacctatcttgcgctgcgtgttgcctatttcaacgaacttgatagctatgcagaaagccaggggttgaacagcaagcaaattattgagggggtgtgcctggatccgcgtattggcgatcactacaacaacccgtcattcggctatggtggatactgtctgccgaaagacactaaacagcttttggctaactatgaatccgtaccaaacaatattattggtgctatcgtcgatgcgaaccgtactcgtaaggactttattgcggactccattcttacgcgcaaacctaaagttgttggggtttatcgcctgataatgaagagtggttcagataacttccgcgcctcttcaatccaagggataatgaagcgtattaaagccaaggggatcccggtaattatctatgaaccggtgatgcaagaggatgagttcttcaactctcgcgtggtccgtgatctcaatgccttcaagcaagaagccgatgtcatcatttccaaccgcatggctgaagaattatctgatgtagccgataaggtctatacccgcgatctgttcggcaacgattag

SEQ ID NO: 93677 - DNA, 1005 bp, Enterobacter aerogenes
atgaagtttttagtcactggagccgcaggatttatcggttttcatgtaagcaagcgccttctggaggcaggtcacaaggttgttggcgtcgacaacatgaatgactactacgatgtcagtcttaagcagtctcgtctggatctactgcagtctcccctgttcaccttctataaaaccgaacttgccgatcgagaagaaatggcgcaaattttcgccaatgagaagtttgaacgagtgatccacctggcggcacaggccggtgttcgttactcgttagaaaatcctcacgcctatgctgatgctaacctgatcggttttctaaacattctggaaggctgccggcacaacaaagtacagcatttgctgtatgcctcttccagctcggtgtatggactgaacagcaaaatgcctttctccaccgacgattcggtcgatcatccggtatcgctgtatgccgcgacgaaaaaagccaacgagctgatggcacatacctattctcatctgtatggcattcccaccaccggattacgctttttcactgtgtatggtccatggggccgcccggatatggcgctgtttaaattcaccaaagccatgctggaaggtaaaagcattgacgtctataactacggcaaaatgaagcgcgacttcacctatattgatgacatcgtggaagcgatcattcgtgttcaggatattatcccacagccagatgcagagtggacggtagagaatggctcacccgcaaccagttcagcaccttaccgcgtttacaacatcggtaacagctcaccggtcgagttgatggaatacatcacagccctggaagaagcgatgggaatggaggccgagaagaatatgatgccaatgcagcccggcgatgtcctggaaactagcgcggacaccaagccgttgtatgaccttgtgggttttaaaccgcagacgtctgttaagcacggggttaagaacttcgtgaagtggtacaaagggtattacaacgcctga

SEQ ID NO: 93678 - DNA, 1065 bp, Enterobacter aerogenes
atgaagatccttgtcaccggtggcgctgggtttattggttctgccgttgttcgtcatatcattgagaatactcagaatgacgttcgcgttttggactgcctgacttacgcaggtaatctcgagtctctggcttctgtagccgacaacagccgttattctttctcgcgtacggatatcaccgacgctcagagcgtggctcagcagttcagtgagtttcagcctgatattgtgatgcacctggctgccgaaagccatgttgaccgctctattgacggtccggccgcttttatccagaccaacctgattggcacctttaccctgctggaagcggcccgtcactattggtcctccctcgatgagactgcaaagcagaccttccgcttccaccatatctccacggatgaagtctatggcgacctcgacggtaccgacgatctctttactgaagagacgtcttacgcgccaagcagcccgtactcggcctctaaagccggtagtgaccatctggttcgcgcctggaaccgcacctacggcttgccggtcgtggtgaccaactgctccaacaactatggcccgtaccacttcccggaaaaactgatcccgctgaccattcttaacgccatcgcgggtaaaccgctgccggtgtatggcaacggcgagcagatccgagactggctctacgtcgaagaccatgcccgggcgctgtataaggtagcgactgaaggccggaacggtgaaacctacaatattggcggtcataacgagcgtaaaaatatcgatgtggtccgtacgatttgcagcatcctggacaaggtggtggagcagaagccgggcaatatcagccactttgctgacctgatcacctttgtgaaggaccgtccgggtcacgacctgcgctatgcgatcgatgctgcaaaaattgagcgtgaccttggctgggtgccgcaggagacctttgaaagcgggatcgagaaaaccgttcattggtatctgaacaacaccacctggtggcagcgcgtgctggacggctcgtatgccggtgaacgtcttggcctgaataactga

SEQ ID NO: 93679 - DNA, 822 bp, Enterobacter aerogenes
atgcaaaattcgtttagctcatcaccgtgggaaatagtcagaactttcgtgcggcaccgtaagttaattattaacttgacgaggcgagaaatcaccggtcgatataaaggatccttgtttgggattctatggtcattttttaatccaatatttatgttggttgtttatacctttgtttttagttttatatttaatgcgcgttggagtgtagaaagtacttcaaaagctgaatttgcattggttctgtttgctggacttatcgtttttaatttttttagcgaatgcgctattaaagcgccaggaacgatcttatctaatgttaattatgttaagaaagtaatatttccattggagatattaccaatcgttaatgcattatctgtgttattccatgcttgtgtcagtatcagcgtgtggttgatattttatatcattgagattggtttgcctcatgtaaccgtgttactattccccatatttcttcttccgctatttgtttttgtgcttggtatcggttggctattgtcttctctaggcgtttttttgcgtgacgttggtcaactgatttctatttttgtaaccgcactaatgtttttatctcctatattttatcctgtgactgcaattcctgaaaaatacaggccgttattaaatctcaatcctttagctccggctatttcgcagtttagagagatattttattgggggactattccttcaatgagtatttacgctacttatctctttggttgtgcattatttgcatggtttggattcattgttttccaaaagacaaggaagggatttgctgatgtcctctga

SEQ ID NO: 93680 - DNA, 1323 bp, Enterobacter aerogenes
  misc_feature (12)..(21): n is a, c, g, or t
atgtttataacnnnnnnnnnngtttataacaatcctcatgatagattgaagcagtttgtttttcctaaactaaaccaagtatttggtcgcgaacctaataaatattataaagaattttgggcgttaaatggcatttcattcgaagtcaataaaggtgagaccgtcggtttaattggtaaaaatggtagcggtaagtcgacattactacaaattatttgtggcacccttactcccactagcggttcaatagaaacaagaggtcgcatcgcggccttattggagttaggttcgggatttaatccagaatttactggactggaaaatatttatcttaatgcagctattttggggttaagcaaagaggaaactgagcgtaaattagatgcaattgctgcatttgctgacatcggtgacttcatcagacaacctgttaagacatattccagtggtatggtggtgcgattggcctttgcagttcaggcgcaggtggatccagatattctgattgttgatgaagcgcttgcagttggggatgcaaaatttcaagcaaaatgttttgatcgtttgcgtcagctaaaagataatggaacaagtattttattagttacgcattcaggtgaacaaatagtcactcactgcgatcgtgctgtattgctgagttctggtcaaaaattgtatcagggtgcgccgaaggttgcagtcaataagtacatggatatcctttttggcaaaagtctaccaagcgctcaaagtgaagaaagtactacttcaattgaacgaaaaatcgattttaaattaaatgccaatgaaacacttagtttcgaaagcgataagtttaaggacaagagtaattataataaaaatgaatatcggtggggggataaagcggctgcttggcttgattatcaggtctatgcgggggacagattaaattccactacgatttattcaggtgaaaaaattaagattagatgctctattttatttaatagagatgtacataatcctatcatcggctttgcaattaagacgaaggaaggattaactgtttataatactaactcgcatctattaaataatgaagataccataaagcatggagtcgctggaagctattcaattgtcgaatttgaatttttaaataaattaggtgcaggggactactttatatcccttggtattgcctcaatgattaataatgaagtaattccacatgatcgaaggtatgatgttattcactttttagtgcccacagttgattctttttccggtctcgctgatttagatttaacctttgacataaagtcactttttggtaaataa

SEQ ID NO: 93681 - DNA, 1896 bp, Enterobacter aerogenes
atgcttttagatacaaatatttataattttcgtgaaagtactggcatttgggcaaaaccagattatacaggtatcccttatagtgatggtgacactcaagaaaatatgctattgaatgttattaaaaacactcaggatcgaagtgtatcttctgtagaattaaaatctcaatgtatagattgggttaccacttaccatttttctagtttgcgttcaaacttgctgagaccgctgaaatctatactgcaacccggtactaagattttggaaattggtgctggctgcggtgcaattacgcgatttttaggagaaatgggatgtgaggtgctggcattagaagggagtttacggcgagctacaatcgccagagccaggacggcagagcttgctaatgttacagtgttaagcgaacgatttgatgattttgagagtaatgttctttttgatgttatcactctgattggtgtgcttgagtattcgaatctgtttagtcagggggaggatagtgcagtaaggatgcttgaacaaatcaaaaaacgtcttaaacctggcggcaaattgattatagcgatagagaatcaacttggtttaaaatatttctcaggcgcgcgagaagatcatttgggtcaggcgatgtatggtattgaagggcgttatacaaaagaacaagcggaaaccttcggccatcacattctgaagcaaaaattggaaagtgttggtttacagacggtagaaactttactgccattcccggactataaattgcctgtttccattgttacatctcgcggggccagtgaacctaatttcgatgcttcggtttttgcaacacaatctgtacgtgctgaccttcagttaccagagaagttaaattttgttcttgagttagcgtggccaattgttttcaagaataatttggccactgacctcagtaactcattcttactagttgcaagcgctgtagagtctgaattaattgatgagaaattacttgcggtccattatgggaatgaccgtgcttctccatttagtaaagaaacaatattcagtaaagaacgtgatgggaaaattaaagtcaagcgtcatcttttaaccccagacaaaatagttgaaaatgaatccgttgattttaaattggatggctatgaggaatatattaaaggcgtaccactacccattgaatttattaaaatcgtgaccaccccaggatggaatatagaacaggttactggatattttcggtattacatcgagtgtctggaaatttgtttgaagggagaaggtgtctattatgatgagtttacacaacatactatgttgccatcaacatatttagacgcgattccttccaatatactaatcgatgtagatagacaaccgcgctattttgaacgtgagtggttagctaaaaatggtatatcccttggcaatctgatatttagagctgcgttgtcattgctgggaaaaatttcttcttttgcacctccctccagtgggtactcgctgacgcgtggcgagtttattgaccaacttttcgatgcgctgggtttcactgctgatagggacctattcgcacaatattttcttcttgagtcggagttaaggtttttctccacaggaaccgtaagagttaatacttggtaccctgaacatgtattgccaggactgtatgcattggctgaagctaaaagtaatgagaaaaaattcgctgagactgagttggcgcttcaggataaatgccgcgcctacaacgaaatgctggagtccaagaactatgcagaaaaactggcatttgagcgaatggacgaaattgataccctaaagttagagttaaataatattaaatctggttttctttggcgtatatctaagtttttaaaagggaaaaggaattag

SEQ ID NO: 93682 - DNA, 1632 bp, Enterobacter aerogenes
atgagcaatgaggcacttcattggtcaattgactctatggtcaaaagagatacgactgtattcagttacggttggattttcaatgaaacaaagagcattcagcgagttacattgcttcagattgatcaagatggttccgttactaatatcaatgtcgattatggtaagatcagagacgatgttgcctcttatttttcacaatttgaccatgccgccaactcaggttatgtagtttacggatcattcagtactttaccatcagcatatcgattacaattactttgtacatatcaggatggtacatcggaatgtattgatattccagaaagtcattatattcattcgaatagtgaagaaaacaaagccatcttatctaagaaggtggcttttaagcaaatgttagtactgatcaaacgaggtttgatgttgctcaaaggtggtaatatatcggtcctttgcagcaaaataaaacgttatcgttcccatataccagtcaaggaattaaaaatatcaagtgatatatccaaaatattgaccctcaaggaaagagaaaaagtgatatttttccttgaccatgatttaggtggtggggctaatcattatcggaatcaattgatacatagtaaaattgcagagggttattctgctttagttcttgcctttgatataaagacactttcatataagttgcttgtgatgagtgaaacgtgtgatgctgcatataaaataccaaacgaacagtttatatttgatatgttgagtgtcttgactatcaaggaaatagtctataatacaggtgtgtcttttataaatcctgaaactataccaggatttttgcttgatatgaaattgaaaaccaaggccaaattgacaaccctggcgcacgactttttccctatttgcccctcgcattttctaattaatgacaaagggaaatattgtgatatacctactccagatgtttgtcaatcatgtttgaaaaataataggttcgggtttacaactttatttgaagctggtgatattaaggagtggcgtgatcagtggggcgggttgattattgcctcggataaatttgtcaccttttctcaaagtacgctggatatctaccggcgtgcttatccccaacttcagcctgaaaacacgttgattgtaccgcatatagttggctatatgccaaggagggcggaggtccagcagaaagagagattacgtattggtgtcgtgggccagattgggtttcacaaaggggctgagtttgttaaacaattggcttacgagataaaaaaaacggaacttcctgcggatattgtgattattggagccattgaggcttcatgtccgtctggtgttgtaactcaaacgggcccctatgagcagagtgatttaccagatttacttgaagacaatggagtaaacataattttattcccgtccatctggcctgaaacgttttcctatgttgttcaagaaatggttgagcttggctaccctattgcttgttttaatctgggagctcctgccgaacggcttaagaattatcaaaaaggtttgattttgtcctctatgtctgctggtaacgttctacaagagttgataaaattccaccgtaaaatttatacaatccaatga

SEQ ID NO: 93683 - DNA, 1257 bp, Enterobacter aerogenes
atgtctgagattcatgtttttactagcgcagcatttaactatattccgaaagtgagaatgctgtttcagtctattcgcaaatatcaccctgaatggactattcaccttgccttggctgatgagaaaaggccagaaattgaccttagtaatgagccatttgatgaaattgtctccgtttctgaattagatatacctgattggaaaggttgggcgtactgccacacaattgtggaactggcgacagcaataaaaccatttatgcttgctcgtttattgcaactgccagggtgcaaaaaggttatttaccttgatcctgatactgtggttttctctcgtcttgatgatattttggctgcgttggatacagcgaatgtggtattgacgccgcatcagactaaacccgaaacgtccctttctgcagttatggacaatgagatctgtagcctgaaacatggcgtatacaacctgggattctgtgcagttgcggcaaccgacgttggcctctcttttgcaaaatggtggggggagcgtatctaccacttctgtcgtgcggacattccaaacggattgtttaccgatcagcgctggatcgatctggtacctgcctttttcagcgatgtagcaatcatgcgctccagccggcacaacgtggcaacgtggaatttaactacgcgtgagtttaccgttgatgagcaaggaaattacttcgttgatggtgagcctttaggtttctatcacttcactggctttgacagtggtgcccacagaatcatggctactaaaaatgctggtgagaattctgatgtgcataaactgattaattggtatgacgatcagactaaaaaccttgcgcaagatcctttggctaaagtgtcgtgggcttatggtttgcattctgatggctctccaatttctaaggctcagcgtttggtttaccgtgagcgacttgatttgcaaaaagctttccctacaccttttgatgcagacacttataacaaatggtggttacagcaaggcccgaaagagtaccctgaattattctctaataacaataaagatgatgctttgcgtcaattcagcactgtgcttactcctggattccgtggcggtagtgccgagtttgataaagagcgttttatgggtatcattaagcgttctctttccaacccccgtaccggtgtcactattggtaagaaaggatgggaagtgttaaagaatgaaggcattaaaggtattaaacgtcggtttctgaattag

SEQ ID NO: 93684 - DNA, 207 bp, Enterobacter aerogenes
ttgataaagtttgtctacctcacctttttcaaaaattatatccggattacaaatcaaaaagtaatcggcctgatctttaaatattttaaatacgatattatgcccagcaccaaagccgttattgtccttggttcgaacgacttcaagtttgggctctttaatatccaaaagccaatcgcaatgactaccattatcaagaacaactag

SEQ ID NO: 93685 - DNA, 1137 bp, Enterobacter aerogenes
atgtctaacatagaggaaacactgccgggaagtgcgatcagttcttgggggggctttgtttaccaagggaaagtggctctttatcactgcctgaaattattaacagagaaattatttcaacagagagtaattgatgattttgagttgcaattagatagcactgatgactttgctatttattgtgatggcaaagtgatttcaactcatcaagtgaaagcaaagttatcgcaatatcgttctgaatatgtcaaagctatttataaagcagcatgtatagctactgactgtgatgaaaatacaatcagatattttcatgtagctaaaaaacttgataattttgaaaattacataagcaatgatggaaaaatagttgagttttacagttatggcgatattaaatctactttactctctgaatttatcaccaacaaagtaattttgattcacaacttagttcataagggacaaactcaagactatgctgcctatcataatagaatatcaagtagcatttttttggcactactaacctcccctccccttaatcgtacagacgaagtataccatgcattattaaccaaagaaaaaataacaaatattattgaaactgagttctacaatgacttagacgcttttagcgagaggcaaattgaatcgatatcaaacgttttcagatttatttatagcttaaattataactctgccatacagatgcatacctctttgcagcctcatagacaaaacaatgttataaatgaagatgatgtccgggattatcttgatgtagtatcagcaatatctcacataccaaatctgataggcttgcctcattattcaaaaaaaataaacaaataccttccaacagctttgacaattagagatggaagaagacgaaatacttcattccaagaggagttgaaaaaacatataagggataatgccacgcttgcatcattgctttatgaatataataacataatagcctataaagtatccgatgaaacgatagtatcagcaacctcagaaaaaattacaacagttaacgacactaaagataacaataaccatattgtaagggaatttgatttaagggttatatctactgataaagcagaggctgaactaaatgctaaatga

SEQ ID NO: 93686 - DNA, 267 bp, Enterobacter aerogenes
atgaaaacgacccgttataccgaagaacagatcgcgtttgcgctgaaacaggccgaaaccggcatccgcgtcggggaagtctgccgaaagatgggcatttctgaggccacattttacaactggaagaagaaattcgccggtctgggcgtaacagaactgcggcgtctgcggcaactggaggatgaaaatcagcggctgaagaaactggtggctgatctgagtctggacaaggagatgctgcaggaggtactgaagcaaaagttctga

SEQ ID NO: 93687 - DNA, 1152 bp, Enterobacter aerogenes
atgccctggactgagacccgaccgatgcaacgtcgtgattttatccgtgccagcttcgctggtacggactctttttccgcactgtgccatcgcttcggcatcagtcgtaaaaccgggtataagtggctcgaacgatttgacccgtccgaacccgcttccctttttgatcgctcacgcgcgccacattctcattcccgtattgttccgcctgatatcatcacgcatctgatcgcattacgacaaaaacaccctgactgggggccgaaaaagctgcgtatgtggcttctgaatcatcgggtcgactttccggttccggcagccagcactatcggcgatattctcaaacgcgaaggtctcgtgccggacagaaagcgaaagcacagaaccccaggtaaccgacagccgctgacccccatccgggaaatcaatcaggtctggagcgctgattttaaaggtaagttcaggttgctgagccgggaatactgccatccgtttacgttgacggataaccacagccgctatcttctgagctgcagaagtaaccatcatgagaacaccgctttcgcccggcagtgcctcaccgatgcgttcctggaatatggcctgcccgatgtgctgcggacggataacgggcaaccctttgctggtgtcggcgtggcgggactcagtcgtctgtcggtctggctaatcaaactgggcatcaggccggagcgtatcaggaaggggcatccggaggaaaatggccgccatgaacgaatgcaccgctcgctgaaaagtgcactgaagcacgggaatatcttcagaacactggaggagcagcaggtctggttcagtcattaccggaaagagttcaaccatgaacgtccgcatgaagcgctggacggcgccacccccgatcaggtgtggcgtccttccctgaggcgctggaatggaaaggtccctgactatgagtggcctgagggcgcccgactgtacagggtaatgtcaaagggggtaatacatatcgggaaggaagtgttcctgagcgagtcactgcttggggaatacatcatgctggaagaaaaagatgatggtattgaggccatcatctttaacggaatgacactggcttactatgaccggagagcgcagagtattatccggatagactag

SEQ ID NO: 93688 - DNA, 468 bp, Enterobacter aerogenes
gtgtcggataacctgtttaacggacgacgtttccgggcgctgactgtagtcgataattttagtcgggagtgtctagcgatccatgccggaaagtcgctgaaaggtgaggatgtggtcggtgtgatggaagggttgcgggtgctgggcaagcgcctgccggtacgtattcagacagataacggcagcgagtttatttcgaaaagtctgcataaatgggcgtatgagcacggtgtcacaatggacttctcccgtcccggaaaaccaacggataacccgtttattgaatcatttaacggcagtctgcgggatgaatgcctgaacattcactggttcctctcgctggaagatgcgcaggacaaactcaacaactggcgcagggaatataatcatgagagaacgcattcatcattaaatgacatgactccggctgaattcatccgaagtctccggaaagacgaagatctctga

SEQ ID NO: 93689 - DNA, 921 bp, Enterobacter aerogenes
atggatcagttgcaagaaatcgtccagatgcttagttctggagatgaaggtacgacaaacgctctcttaaaaaccaaagtccttctttattccattggcaaaaaggagttagcctcttgggttaatcatgagctcaatggttacccttcagaagttgaactaccttcgtatagaactgtacctgcccgtttacttgtaaacgcaaataatggagtgcggagttacaaaggtattcaggttccactagcgcatctgaatgatgatgagtatgaagacgttagtaagtctcgagttagagtatcaataagccaaatcgaacacctagttataaacgcaagagacaaaactagtctaatccaatcaatacctcttgaaatcgcatactcaaaatattgcaaatttcttgagagcgattatgagattacgagttgttataaagacatttcagttcattattttacctcaatattaactcaagtcaggtcacggcttttagatttcgtattagagctatcagatcaagttgcagctatacctggaactacctctatggaagaaaagttgaaggaagttgattcgtcaagcctgtttaatcaaacaatttttggtgacaacacagttatcaatttaggagataatagctctttaatcgtcacaaataatgcagcaaagaatgattttccagcattaaaaaaacaattacttgataacgggtttgagaaagaagatgttgaagaattagaagttgcgatcaaaaccgatggaccaattgccggcaaaaaagctcagtacgggtcggctgttggaacatggcttgctaatgtaatatcaaaagctgctaacacaagcataggtattagtgttgctgccgcaacagaagtagcaaccaaagctttaaaacggtactacggttttgattaa

SEQ ID NO: 93690 - DNA, 135 bp, Enterobacter aerogenes
atgctgtttgggcattggataaatcagagagaaattcccgatccttatcggaaaagtgatgaggcgtttgcatctgtatataagttaattgaacaagccggccagcactgggttgataaattacgggataaataa

SEQ ID NO: 93691 - DNA, 2166 bp, Enterobacter aerogenes
atgtcatcagtaaaaactaaaccaactaccaaagatgcagatgaaattgatttaggtcgactgatcggtgaggtaattgatcatcggaaattaatcatttcagttgtttcattgtttacactgctttctcttgtttatgcattatttgcaaccccggtatatcaggctgatgcgctgatacaggttgagcaaaaacaggggaacgcaattctaagtaacctgagtcaaattttgccgacagggcaaacgcagtcagcaccagaaatagctctcttaaattcaagaatgatattgggtaaaactgtagatgatttgaatttacaagccattgttgaacaggactacttccctatcttaggtagaggtttttctagattacttggggagaaaccagggggaataacattatcaagattatatattacgaataaagataatgatgaaacaccaaaatttaaactgagagtggatgatgagaagaattatactatcattggcgatgagtttgagttacgcggtgaggtcggacaattattaaatgaacacgggatttcggtaaaagtagaaaatattaacgctgaacctggcactgtttttaatgtggcatacgtaacacgtttaaaagcaataaccacattacagaatctattaaatgtatccgatcaaggtaaagatacaggcatattaaacctgtcgctcactggcgataatcctgcgctgattaaaaatattgttgacagtataagtaaaaattatctagctcaaaatatagcacggcaggcggctcaagacgcaaaaagtttagattttttatccgaacaattgccaaaagtacgcagtgatttagatactgctgaaaacaagttaaatacgtatagacgtaaaaatgactcggtagatttatctcttgaggcaaagtcagtactggatcagatcgtcaatgtagataatcagttaaatgaactaacatttcgtgaatctgaaatatcacagctttatacacaagaacatccaacatataaggctctgttagaaaaaagaaaaactttacttgatgaaaagacaaagctaaataaacgcgtaagtgcaatgcctgaaactcaacaagaaatacttcgcttaagtagagatgttgagtcgggtagagcggtttatatgcaattgctaaatcgccaacaagagttaagtatctcgaaatcgagtgcaatcggtaatgtcaggataattgatgatgcagtaacacaaccgattccggttaagcctaaaaaaatgctcatagtattggctggtatactatttggtggtatggcctcgatcggtattgtatttttacgagtattcttgcgtaaaggaattgaaagtcctgaacagttagaggaactagggataaatgtgtacgcaagtatccctgtttcagaagacttctctaaaagaacaaataaagcagtagggcggaaaaagaacaactcggatggagagtctgggttactggcaatacaaaatcctgcagatctagctattgaagctatccgtggcctgcgtacgagtcttcattttgcgatgatggaagcacggaataatgtattaatgatttccggagctagcccaaatgcagggaaaacgtttgtaagctcaaatcttgcggcaatagttgctcagacaggaaaaaaagtactatttatagatactgatatgcgtaaaggatatacacataaaatattttctgttggtaatgacaaagggctttcagattacttgtcgggaaaaagtacgcttgagcagtctttgaagaaaatatcagaagctggatttgactatatttcaagggggatggtaccacccaaccctgccgaactgttgatgcacaaaagatttggcgagctcatctcatgggcgaataaaaattacgatattatcatccttgatacgccacctattttagccgtaacggatgccgctataattggtaattatgtaggaacaaccctcttaattgcacgtttcgaattgaatactgcaaaagaaatagatgttagtgttagaagattcgaacagagtggcgtgtctattaaggggtgtatattgaatggcgtggtaaacaaagctagtagttattatagctatggttataatcattatggatattcttacgggaagaaggattaa

SEQ ID NO: 93692 - DNA, 144 bp, Enterobacter aerogenes
atgatcttcttgccgatcgcgaatcaacgcttccgcttcatcttccaaatcccagcgatgttcactaaagagagccagccatcgcgctggctcatcgccaccgaaccgttgctgcagtatctgaccccgaatcgcgcaagttaa

SEQ ID NO: 93693 - DNA, 1440 bp, Enterobacter aerogenes
ttgaacgtcacttcagcagtacgccaggccgtagcgcgcacgtcctggtttaaaaagcgcaagagctatcgtgtgctctactggcgtgaaatcagtccccttgccgtaccgatcctgctggaaaacgcctgcgtattattgatgggcgtgctgagtactttccttgtaagttggctcggcaaagaagcaatggccggggtggggttagccgacagctttaatatggtcatcatgtcgttctttgccgcgattgatcttggcaccaccgtggtagtggccttcagcctcggcaagcgcgacagaaaacgggcgagggcggctgcgcggcaatcgctggcgatcatgaccttgttctcgatcgtgctggcggcggttattcacgcctttggccagcagattatcgatatcgttgccggcgacgccacggttcaggttaaagcgctggccctaacctatctcgaactgaccgtgctgagctatccagcggcggccattgccttaattggtagcggcgcgcttcgcggcgcggggaccaccaaaataccgctgttaattaacggcgggatgaatattctcaatattattatcagcagtatcctgatttacggcattttctcctggccggggctcggctttgtcggcgccgggttggggctgactattgcccgctatattggcgcgttggcaaccatctgggtactgatgacaggttttaacccggcgctgcgtatttcgctgaagagttattttaagccgtttaactttgccattatctgggaggtgatgggtattggtatcccggcgagcatcgaatcggtactgtttaacggcggcaagctgctgacgcagatgtttgttgccggtatggggaccaacgtcatcgccgggaactttattgccttctcggtggcttcgttaattaacctgccgggtaacgcgctgggatcggcttctaccattattaccggtaaacggctggggaaagggcaggttggtcaggcggaacgtcaggcctggttcgtgttctggctgtcgactattatcctgacgcttatcgcctggggcaccgcgccgttcgccggcctgatcgcttcgttctacactagcgaagaagatgtaaaagtggtggttaaagagctattgtggctcaatgccctgtttatgccaatttggtcgctctcctggaccttgccctgcgcctttaaaggcgcgcgcgacgtgcgttacaccatgtgggtgtcgatgctgggtatgtggggctgccgggtggtagctggctatacgctggggatcatgctgggcatgggcgtcatcggcgtctggctgggtatggtgctcgactgggcggtgcgtggcctgttgttctatcgccggatgatcaccgggcgttggttgtggaagtacccgcgattaaaggctcggctggaagaaaagtcatga

SEQ ID NO: 93694 - DNA, 315 bp, Enterobacter aerogenes
atgaatactgaagaactaaataacattaaggactcatcgactaaaacttttactgctatggcgaagaatctttatatcacaggaatacgtatatataaagaacaagaagagcatgaggtattggcagccataatgttagatagcaacagaacggagtcatatattttgcatgttaaagaatatctggcaaaacgctttgatgaacatatggaagaagctggtaaaagagaaagacttatctatgttgatatggataaagttatgtttgaaatgagatatgtgcatactaaagcattactttttagtatgagttaa

SEQ ID NO: 93695 - DNA, 297 bp, Enterobacter aerogenes
atgtctaaagaaagtattgctagtaataaatcaactgaactgttctatgaccttgcttgtaggtcgtttacagcaagttgggagatgttcatggaagtcaatggtgatggggacgcaaatgattatctggatgacccagatttcaagaatctatttattatttatgttattgaccatattcagaataactttgagagattcacagcccaagaaggaaacagtggcgatattcatgaggttaactttgaacaagtcgctgccatgttaacaggatattcagaaagctttagaaagtga

SEQ ID NO: 93696 - DNA, 264 bp, Enterobacter aerogenes
atggtaaacaacaacgaacaaagttctatgacaaataaaatatctgtcacagtaagtatgttgtgcgaagaaacccctgaagtaatgaatactattcaagaacgttttgaagtgtatgttgctattactggatattcagtagaagaaatcatggatgatagcaacttgcttggcgagttaaatcgatttattaataacgaactagttaatgacttagggctggaatatggttccgttatcatcaatatcggttataacaactga

SEQ ID NO: 93697 - DNA, 351 bp, Enterobacter aerogenes
atgaaagagattatatttaatgaaagagaaaaagaaaaaaacgaacttattgctaacatcttacaagggtactgtgatgagatatatgctatttatgaaaaacatcctgaaacagcaatcgatatcttgaatggaggttttctttcaggcgtcatatatgatgttttgataactcgtgagatgaagaaatactctatcaaaaatgatgtatctgatatagatagaagagatttaaaagccacaatattatactggcatcaagaacacatcatagaacttgttatgagaagtctaaagcaggataaaaatcaagatcctatttattggaagctaaagttcacagtgatctga

SEQ ID NO: 93698 - DNA, 243 bp, Enterobacter aerogenes
atgattgatgaattccatgttatgtatatgtacaaaaaaattcaagctgaagcggctactaccgacatcaaaacactggaacagtttttgaagaagttccgccaagttgttgcggagcgccgggaagaatactatcgggagattggtgagaaaaaagcacgtaagttgagaatgaaaagagcacaaagattacttgagaaaatgacatgtgatcgtgtttcaccagaggatctcaaggaatga

SEQ ID NO: 93699 - DNA, 351 bp, Enterobacter aerogenes
atgagctttgaagctaaaaaggaacgtgcaatcgccattatggaaagtaagaagatgtggcgtagtaactatgccccacctttgctacgtctcgcatggaaagctggcctgaaggtgccaccattaccttttgcttcgttctggcaaataactttgttgatgggggtatggtttggtccggcatgggggatttgtatgtggttttcttcatggaaggacagcggtatgcaaccgggtgtagcatttgtctcaagcatagtcgcaggtatttgctttggtgttctcatggctgcgtatcattggtggcgaaaggtagttaacaatcttcctgactgggacagtctggagtaa

SEQ ID NO: 93700 - DNA, 1047 bp, Enterobacter aerogenes
atggactttttcttgccagtaatcagtaaggatttgtttcatgaaaatttcagaagggtgctattaaagaatgatcaactggcccaagctctttttaatcaatgggcaaacggatttgtggacagagataacaaaataataaaagaatttcaaacatcattcaactcaacattttgggaagtctatctttatgcagtgataaaaaattatggcttagatgttgactttaatttctctacaccagatttctgtatatctgatttagactttgtcattgaagctacaacggcaaatgcggcaagggacaaaacacctgagtgggaaaaaaattatacaccagaagagatggtaaagttaaaccgatttggagagttgaatagagaagctattataaggctcagtagtgctataacgcaaaaagacagaaaatataatagcagttattcaaagttggatcatgtcaaaggtaaagcatttgttttggccgtagcaccatttgaacagccatattttaacttgcagtatgatcgtgcaatcagagctgtgctatatagtgattacgtaaacgaagatgcttatttagataatccagagctatatcctgaaggacctccaaatcaacatttagattatattactaaagataatggtacagaagtgccgctcggttttttttgtgataatcagtacgaaaatattagcgccatcatttttaattgcaacgcaacttggggtaaggttgttgcattagcgaataaaaataatccaaatggtcaaatcagctcagtttgggcagttccaccagaaggtaaaccaaaggggataatatgtaagccttcagaatataatgaaaacattctggacggcttgatgatatttcataatccctatgcaaaaaatccactttctccacatgtttttagatctgatcgagtagttcaattcatccccgatcataaaactatgacgctacaagtggaaaactataataactgcctacactccagaagtgtaattgtcgccaattataaaaacacgattacctga

SEQ ID NO: 93701 - DNA, 312 bp, Enterobacter aerogenes
atgagtgatactgataacagtagaaaatcacgagcaggaaaaacaattaagcaaaaaatagcatcagcacagatgcgtctgaatcgtctaaagagtaaggaaaaatccctgactaagagcgctgagacacgcctgaagataatccttggggcagaagtggctaaagctgtgggctgcaaagtagaagaagtggataaagagttaatattaggactgatattgcaatcatcgaatattagtattgaagataaagcaagattaaaattacgaggaaaaaggtttcttgaggatatggttgggagacaggaatga

SEQ ID NO: 93702 - DNA, 1488 bp, Enterobacter aerogenes
atggctatttttcatcttgattttaaaattgtgaaacgaagtgagggcaaatcttccgttgcgaaggctgcttatcatgctcgtacaaggataacagatgaaagaacaggtgatacgtatgattatagccgccgtactgatttatgcgggcatttcatattagcacctgttaatgctccagaacatatcgtaaaagactctacagcattgtggaatgaagttgaaagagtcgagcgtcaacaaaatggtcaaacagcccgctattttgatgtcgccatacctgccgagttaaataatgacgacaagaaaaaacttgtccttgaatactgccagaaaaatttcgttgataaaggcatgattgccgacatcgcttttcatgatcttgatagcgacaacccacatgctcacgttatgttgacattaaaaaccataggccctgaaggttttggtaaaaaagaaagaagctggaacgacagaaaaatgtctgtgatatggcgtgaaacatgggcatctatggcgaacagctaccttgctgctgctggttcgtcagaacgtattgatcatcgttcccttcaggcccagcatgaagaggcattagaaaaagcggcggttgctctggataatgaagaaaaagcactatggcttgccaaagccgctgaaacaaaccgtcctccaatgaagcgtatccacagtgccaaatggcgtagtaaagcagctcaggagcaaagagccgcagaaaaggctgttcgtgactcagcgaagcaggacgcggttgaagtctacaaaacatttagggaacttgatcttgaaatcgtcgttgatgtcagaagctttacgattacacatcttgctgaaccagaagagattgtattaccaaaaacaagctccagttcttctgccaatgaaacgcaaagacctgtacttgtagcaccacctcctcatactcgtatgcgtggagttaaatcctatcgtgataaatccaaagtcagtaaagttgttgctggtaaaaaaccatcggtcagtatttctgattctggatcaaatactattctgcaaacatcctcctctcaaaacccaaacagggcatccagaagcccccctgaacgtgttaagaggaaacagactgctccacgtcaggataatatttttaaacgcttcacaactcttgtcatagattttttcaagcagaagtttgtatgggctaaagcaaacaaatcccaaattgatcttatcagtgaagaacatgataaacgtattgctgaaaactatgtctttgatgaagtattaggtcatcatgtttctcgttctgaatatgagaaaaaagccaagtttaaccaagatgactataagccaatgtctgatgagatcagccgtttcccaaaccgccctaagaacaaacagccggaaagcgatcattgcatggatctcataccacataccagcaaagataaagccccacgtatgaggccaccgggatatagaaaataa

SEQ ID NO: 93703 - DNA, 660 bp, Enterobacter aerogenes
atgaacactatctattgggtgatttccatagggctgctgctgaacataccatcactggcaccagtgctgtttcttcgtaaggcatcaaagaatgtgaaagtatcgatggcgttgaggctttttctgctaaatgccttcttagttatatcgctagtgacggtatcgcagaacacgacacaaaaatacggactgtttcctatatggttggtcattgttgctattgtgctgtttttggtcacactgcttccaacggtgaaattcattcgtaagcatttaaccgtaggtaaaagcagggctgttatcctctcatcattcctgattgtctatgccgtcagatttaatggcgtgttttcagatgtgaatggaagtggatatacgcttaatggatacaatgtggtgtggacgttgttcttcctgtttgcctgcctgctggcttatcttggttgtgctgggagtaaaacattttctggttattctgcatcgtcatctgcatcgcaaccagattattttaagccgaccaaagaatatgagacgcaatcacagattgattacgatattgctgtgaaggggcggagtgttctatctgatcccaatctgagtattgttgagcagcagcgttatcgggatgctcttgagaaaaaagaaagagaagactcgtaa

SEQ ID NO: 93704 - DNA, 558 bp, Enterobacter aerogenes
atgcgtaaatatttaacggttgcagctcttggtattttgttaacaggttgcggcgaaaagagtgatttcgaaaaagccattaatgaaaaaatcagcaaaaacggtgtttgctatggttttagtaaagagaacaacgctaaagttgttgaagatttcagacttggtactcctgtaagggttaatatttatggcagagatgatgtcgatcctgttttaatcgggttgaaaaataccggttttctgaatatttcatatgaacaggaaatgtttaaaagaatcgcaatattagaaacaactgataaaggtcgtaatacaaaattttgggatagcaataatggtgcctgtgttggtcatcgtgctgttgctgaggttaaaagctggactgaaccgagtgaaggcaatggcgttaaaatgacacaagtgacctatacgtggaaactcgatgacgttccgagctgggtggataaaaaagctttctctggcgttaaggggatggctgaacccgaagaagcgaaaattattctggtgaagaccaataacggctgggccgctcggtaa

SEQ ID NO: 93705 - DNA, 567 bp, Enterobacter aerogenes
atgaaaggacataacttattaccactggcggtctctctggtgtttctttctggctgccagcagctaaacgatggcgtgaatacagttaatggggcaatcagttcttcgttgtcttcagtaggtaaagcgctggggggaaccgcctccactcaaagcattggcccggaatcacctgtgtctggccttggccctgtctgcaaagactatgaagaaaacgcaatggcagcagagaaaaaatggacgggcaaacggatctcaatcgcaaatgcgactgttcttgaagttacgaagggcagaagtgccagcgatatgatgacgggaatacccaaatctaaccctaactattaccttttatttaaaacctctgatacgagctactgcggcgggatgatatggctggattactactctggccttgatgacgctgttcttagctataagaaaggccagaaggtcagtgttactggaacagtcaacaacttcgaagtccgtgggttcgctaccgtcaacaacgcggatatgccagttcgtctggttgttctgagaaacggcactatcaaccactaa

SEQ ID NO: 93706 - DNA, 408 bp, Enterobacter aerogenes
atggaaaacaacaacgagcgaagctctatggaaatcttcgaaaaagatcaaaaaatcgcttttgttgactcgttcagcgatgcatctttgtcttacgaatacgaacaggcgggcttcaccattaatttaatgcaacgctcggttcttctctttaaccataatataaagaaaaacgtaatgtcttcgatattgcgtaaaaatttgaacagcacatttatatatccatatagcaacatcagggaaatcaactactcgctgcctgattgcagatccgatgatgccgagatctgtattatgactgatgatgtattaaatccagtctggacgttcaggattccatctcacgcacattatatttgcgagcaatgggtggaagtatttaataaccatattttctttgactcataa

SEQ ID NO: 93707 - DNA, 471 bp, Enterobacter aerogenes
atgtctggaaaaaatccgttttggaattatgattataatgcggcgcaacgtaatagagaaattgtagactcttaccaacaggcaaatgaggcaaggctggattctcagcagtcgcagtttgaagcgtctatggctaatgacagggttagtagaatacagatgcagttgaataacacaatcaatagccataagaaggttgtcgctgattacgagcaacgtctggaagggtttaggcttaacttcttcaaaataatgatgcagtcgaatattttctacagaacgataaacagattgcaagaagaatggcctgaccaaaaagaccatattcttgatgaaattcaacggcagcgagactactgtaatcatccagaatatcgcgaaaaatggtggaatgccgtatctaaaaacaatataggtgaaagtgttttggcgtttccttatccgcaacgcgagctaaaaaagaaaccataa

SEQ ID NO: 93708 - DNA, 279 bp, Enterobacter aerogenes
atgacaactattttgcatccaaattatgttgttgtatcaaagctaatatctaagtttgacattacacatgacagtggagatgagaatattaatatcttgatttctgtcatttatgacttggataacggcaatacaatcgaatactacattaataatcaggaagaggctgagaaaaaatgcattgagaaaaacagattttcaagaaaatttaaaaatcgcattgataatatatcatctgaagaaacccgctcggctaaagataatcacaaacccaaataa

SEQ ID NO: 93709 - DNA, 408 bp, Enterobacter aerogenes
atgtctgatgctttaaagatcatcaacaatattcgtactctccgtgctcaggctcgtgaactgacactcgaaaccttggaagagatgttagaaaaactcactatcgttgtagaagaacgtcgtgaagaagaggcctcatttctaaagcagcaggaagagaaacaggccaagctggaagcattccgtcagaagttgttggaagatggcatagacccggcagagttgctttcagctgttagcccatctccttccaagaccggagcgaaacgcgccccacgtccagctaagtataaatacatcgataacgatggttctgaaaagacatggacaggtcagggccgaactcctcgtgctatcgctgctgcgctcgaagccggtaagacgctggaagatttcgagatcaaataa

SEQ ID NO: 93710 - DNA, 1251 bp, Enterobacter aerogenes
atgaggaacaataaatttaaattaaagagaataacagtggtttcggctttgtgtttttctgtgttatatacaaatacagcttttgctgtctggcccgtcacagaagaggttttgacaccgtatcttatgggggcttcaccccaatctatgggcaatggaataattgaaacattagtttcaatgaacgacaagctggcacaagcaaccataacagcaaatgagaatcagaagaatgctgttgtcagtaatgccagtcaggcaatccaagaacagcgtatgaaaaatatcttaaacagaatacctgatgccaacgcctgtgaagaagtcacgagcgcaggtggtcgtggttcagcaggatccaatacaagctcagcgaaagaggctttatctgaaaacagcgttaagatgtttacacaagcaaataccggaataaatgaggccaagaaaaacatcatgggcagagtatcaataagtgtttgctccgaagatgatgtgaaatataacagaggtgggtgcaatactataggtcagtatcctgataaagataagtcggcatcaagcctaattacaccaccattatctaaatccgatgcattgtctaataaggtttcgaatcagtcctattctgttgagcagattgaaattgctgaagcggcaaaaagaaatctgatagggaacttacccgttgaaccattaaagaacaagggattagaagatacaactgaaggacgagaatatttatcggccttttcgagctttgtctccagaagcactgctggaacaaacgccattgattccgtactggcaatgaaaaaagcaagtaatgtatcagtgaactcaagaggagccaaaataggatccacattaggttctacgcagggagcaaaccttgcttggtcagatgcttccgtaaaaaacaagtatgcaactctatttcccggcacaacattcccggataatccttcagagtgggaaatgttaagatatgagatctattcacgctatgcagatacaacaggtgctgacgcttggcaggtaaaaatcagtagtgctgatgaaaaagaaactgcgcatgagcaggcaagaatgcaggcacttgatttaagattacaaatgcttcaaatcgaaagaacagaagacacaaatattttgcttgcggctctgttaggacaacaactacaaccagttgataagcaaatgctgaataatttaaaaacaaatgctacaagagcgactcaggcaacaaaataa

SEQ ID NO: 93711 - DNA, 2658 bp, Enterobacter aerogenes
atgatgataaatataaataaaaaagaagtatcgatattattagcaatattagcttgcctgttattaactcagtcagcttatgccgcagatttatttaccgtcccggagacagacaaatcaaagctgtggtttctggatatcttattcccggagaatttagcggaaagccccttagccagcacaatgacgatcctcaacagcgctgttttactggttggtggcattttagctgcctacacactgattgccggaaccatgtcaacggcacatgacggagaaatgctgggtaagaaatggtcttccatgtggttgcccgtaagaactgcattaggcacggcaatgatacttccggcagcaggtggtttctgtgccgctcaggttatggtgctgtggatgattaatcagggagtcggtctggcggataccgtctggaatacttatgcctccaacccctcagatggagcagttatcacaacatcagcgtcttatcaggaacttgaccgtatagcgaaaactgcttttatcaataacgtctgtatgttgaaggcaagtgagttatggaagaaatcagcggcagccgatcccttcccgcacgtcacgcctgcgtttgaaatgacgccagagaaaggtgcctatttatacacatacagttatggagccagcaatgccggtaatgatatgaataaaaatttactggtatccaaggctgcatgtggaagcatcacgcttacagaccccaaggccaaagcttcttatgacgaacaggctaaagctcaggcaaccatcgctgctgggggcatgtatatggcttatatgccacaggatataaagacaaatatttcagatgttattgaggcacaaaatgctgcattcatcggccttgataatagtatgaaaacgctggctgaacagtatgtggccgataataatattgatattcagaccggaataaacagcgcaacagcctcatatgtatccattattgatactgcagtacgaacagttttctccactggcgaccagtgggatgatttcaaagagaatgtccagaaagacggatggtttatggctggcgcatggagtatgaaactgatccgtgtgcaggatgcgattaatggagcagctcataatcttcctgtagctggacaagcaacaatggaatacggcgatatattcgataacagtctgaacgcgattatggcaaaagtagctcaggatatggcgaaatcaacgacagcttcaagatatgcgaatggtattgatgcgcaaagccgaacagaagccaataccagtggtaaaagtggcgcaggtcctaaaacggatgatgccgggaaaattgtttcctctcttcagagtgaagccaataagagcatttctggtgcaatggcgggttttctcagctccagcgttatcaatggcagaaaacaagggaaaattgtttcgttttcaaccgacacaactgctgccaatttacaggcgataaacccgttattagccgttaaaggacttggggatacgatcagtgccgctggctggacgttattaggaagttctgcggttgttggcgcaggtctaggtgcatggacatcagcgactgcaagctgggtatcgggtgcatttggcgctatggggattgttatgccactggttatccctttatggatagctggtgataccttagccgtcgttattcctatgttgccttacgtcatgtggtttggtgtttgcgtcggctggatgatcctgtgccttgaagcaatggtcgcagcaccattatgggtaataacacatttacatccagacggtgatggcgtagtgggtcgtggtggggctggttatggtctggttttatcgttaaccatgcgaccagcgctgatgataacaggattgatagcagcctatacgatgctccctatccttggtgggatcgtcaatgaaacattctccggcgcgtttggcatgatgtcagccaatgccgggataggtatcatcgagtcactggctctcattgctgtttatattgcgatgatgttcacggtagtgaagaaatcactttctctgattcacatcatccctgatgaaattatgaagtggcttggtgttcatggtggtcagagcatgtcgggttacgcacagtcggcatcaaaaggtgttgaaggtgctatgtttaccaaaaccgtgttggatcaggtttctcatacctcaaatgcgatgggtaatcagattaggaatgcgcaaatcaacaaagaccgtgaacagcaacgtgagcttcaacaacagcaacaggctaaacaggggaaagcacaggcagctaataaagccaatgatacgggatctgcattcagaactcatatgagtaatgctggcccactggatcagcaggatgaatatcagtctcttgaaagtgctaactcggcttacaatgcggctgaagcagcagatgctgttggtgatacagcaggcgctgcaggttatatgaatgtagcccaaaaggctgctaacagagcggtatcgtttggtgaacataacagaccgttgctgcctataaaccttcaggcccaagcttcaccaattgaaagctttaaggctccagataaagggaatggtggtggatcttccggtggtagttcatcacccactgaaagtaatgacagataa

SEQ ID NO: 93712 - DNA, 525 bp, Enterobacter aerogenes
atgaataaacttaataaaaacaaatggcgaacaaatgtctgtgtccgcattttcaaaataatccttcccgcaacaatgttaatttcagcaaccacagctaacgcagcagtctgtagcccggatgtcagctcatcattaaaacaagcacaatataacgccatgaagcaggatgcggctcagttagagccggtagcgaagaatttcatggataacatcaatcagtcacttgagacgattggttgtacggacgtttggcctgtgggaaacctcggcatcaacctgccatctgtggattcaataattaaaaaaacgaaggaagcagcaataagtaaagcctgttcgattgcgagagaaaaagtcactcaactgaccggaagtatatccgaaagtatttctattgatatgcccgtgattgggaatatcgcaaatagaagtgtttctacaggaactggctcttcatcaggatcgggagcaaccgtcaatggaaccgatgtctggagcagcatcagtaattcaatgaagtaa

SEQ ID NO: 93713 - DNA, 924 bp, Enterobacter aerogenes
atgccattggcaattgagcaattggatttgtcttcacatgatttagtcctgtcaagcagtcatgcagtggcaaaaggggtgttaaccggcccagatcagcttcatattagttatgtccattcaccgatacgatatgcttgggatcttcagcatcaatattttgtcgaggctggtttagataaaggtatgaaaggccttatggcaaaatggatactccacaaaatgagactatgggattatcgtaccgcaaatagtgttgatcactttatagcaaattctaaatttatagctcgtcgtataaagaaagtgtacggacgtgatgctgatgttatttaccctcctgtagatgtagatcgtttttccatttgtgaaaataaggacgagtattatttcactgcatccagactggttccatataaacgcattgaccttatcgtggaagcatttagccagatgccagataagaaacttgttgtgattggtgatgggtcggaaatggcaaaaataaaatctaaagcaaaaatgaacatagaaattcttggatatcaatccaatgcggttatggaagagtatatgtgtaaagcaaaagctttcgtttttgcagccgaagaggattttggaattacacctgtagaagcacaggcttgtggaactccagtaattgccttcggtaaaggtggtgcacttgaaaccgtcagaccccatgatgctgagcaagcaactggagtatttttcaacaagcaagacttgagttctgtcattgatgcagttagaaaatttgaaagtattagtaactccattgagccgatagcatgtcgaaataatgcgctacgattttctaacgaaagattcagaaacgaattatcaagttatataaatacaaaatggtctgcttttaatgataataggaaaatcatatattaa

SEQ ID NO: 93714 - DNA, 1398 bp, Enterobacter aerogenes
atgataacatttccacacagagcacgtgcgaacgctaatgcatctctaatttcgatggtccaaaggttttcagatatacttattatttttatgggattgtatgctatctcctacctccacaatatccatttcaattataattatgttttgatttttttagctgtattagtcattttccaaatgatagggggtattactgacttttatcgttcatggcgtggagtaaaaatatcagcagaattaattcttattttaaaaaactggtcgcttagtttattccttacattaggattggtttcattcctacctgaacttggtattaccagtatagtatttatacagtggtatttgcttgttatggttggttttattgtttgccgttcctcgataagactgggttccggtatcctaaggaaattaggttataatactcgaaatgttgctgttgtaggtactttgccttctggtattaatttattaaaaggatttattgacgaaccatggttaggattcattgttaaaggggtatacgaagatagcataccagacgagcttgatggaattccatatggtgggacactgtcacaacttataaaagatgctcgaaacggtaaattagataggatttatattgctttaaatatgaaagacgaagcaaaaataaaagaagttgtagctcagttagcggatacaacatgttctgttcttcttatacctgatttgtttacttttaatatacttcagtcaagaacagaagagattaatggggtgccggttgttccattgtttgatacaccactcaatggtattaatatggtatttaagcgccttgaggatataattgtcgcatcaattatattaatttttatttcccctgttcttttcgtaatcgcgatggcggtgaagctaacttcaccagggccggttattttcaggcaagttcggtatggcatggatggtaagccgataaaagtatggaaatttaggtccatgtctgtaatggaaaatgatgagaaggtgattcaggcaactaaaaatgacgttcgtataacaaaagtgggtaaatttctcagaagtacatctcttgatgagttaccacagttttttaatgtactttcaggccaaatgtctgtagttggtccgcgaccgcacgcggttgctcataatgaacaatatcgccgcttaatcaagggctacatgctgcgacataaagttaagccaggaatcactggattggcacaaataaatggctggcgcggggaaacagatactctagaaaaaatggaaaaaaggattgagtatgatcttttgtatattcgtggttggagtatatggttggatattaagattatattcatgaccttcttcaaagggtttattaataagtccgcatactaa

SEQ ID NO: 93715 - DNA, 765 bp, Enterobacter aerogenes
atgaatgaaatagaagttgatttagatttaggcttaaaccctttttgctttgagacagagataaagattgaaacaagaaagaaaaatctgactgtttcaaaaggcacagaacttatcgaaaagaaagatacaggtaaaagctacttcgccaatatcgtgcatacgcaagaggtcgataaagaagagttcattaaactctatacctctcagataaaagcatactttgatctcacgaaaacagcatacaaagtgtttttcatatttttacgaatatatcaggatgcgataggcaaagatcatttctacctgagctgtaaaaaagcaatgtctcttgcggaaaagatagatcactttgtcttgtctgaatctatcttttacagagggatcaaagaactcatcgagaaacgtattatcgctaaaaccaatgagaaaaactggtatttcataaaccctgctattgtcttcaatggtgatcgtgctcgctttgtttcagagattataaaaaagaaagaagcaatggaagaacaacccgaaagcacagttgtcaatggcggcggcaatagcaaacttaaagataaaaacaggtcaattgaagcagttatgcaagaagttaataaccacgaagatatagatttgttaatcgcaagattgcaggctaaaaagtctcaagggttagcgaagagtgaaagtataaatggaatcccttctgtagagaacacaagtcttgtgccaccagaagaaccgttagattgggataatatttag

SEQ ID NO: 93716 - DNA, 303 bp, Enterobacter aerogenes
atgcttgtcgacattaaccaagcaagaaagaaattaaccgaagaacatcagaaggctacatctctatcagaaaaaaattgtttactttgcgggcacgactggctcacaaaagatttgttattagccgcgattgatattaaaagtaaattattagaaggctcattagataacataggtaaattactacaaactgaacttaatgaaataaataaatataaggatgctgaaatacagcgtttagtcgaaacacaagcacctgtctcttatacacatctgacgctgccgacgatctactctgtgtag

SEQ ID NO: 93717 - DNA, 519 bp, Enterobacter aerogenes
atggataaagctttaacaaatgctaaaaagaaaattaccacattaaaggaacaactaactatattaaacagagattattctaaaaaaactatcgctgatatagagttaacgttccatatttatagcggtagacttatccaaaactaccaacgtggcttaggactatttatagatgaagggaatggagatagactgaggttctgcacagcagaaaaatcagaacatgacgcaaccatgtcaatgagttctggacaactatcggcattaagtttggcctttttcctatcacttaataaagtgtatgcgaagtccccccttgttctgatagatgatccagctcaatctcttgacgagataaatattgcatctttaagcgacttactacgctgtgagttaagtaataggcagttgatactctcatcacatgaagataatatttcttcatatctcaggtttagatttatgcgtgcaggcttatcgcaaaaaccatttaacatgcaatcacatactaacaaatag

SEQ ID NO: 93718 - DNA, 666 bp, Enterobacter aerogenes
atgacacagataaattttaaatcccttagcagtttatcaccctttcagctaacacagtatattgatgaccatcattttactactgaacagaaagtgcagatattcgaacattaccacagcacacataaagatattaccaatatctattcaagaaaagaaaacatcaaatccatcaagaaagatgttgattatgttcatatgttcacgaaaaacttccagcagctcgcagaacttgatatctcaaagaatgagttaaaagttatcgcaaggatcttaaatatcatggagtttggaaactgcttccatatctcacaggcaaagctatgccgagagttagatattaaaaagtcaaatatgtcccttgtctttaaaaagctcaaaaagaaaggaatcattattgataaagaaggggatctcttcatgaactcaaacatattccttaaaggacaagctcattctattaacgcaaaacagcgacctaatgtcaaaaaggcacagggatttgttgttgatgaaaaggaaagatttgagaacgtttatacttttagaacagatacggatgaaaataatgacgtagatagcaatagccagccatctacggatgatgaagtcttgtctcttcaacgccctaagatacccgaatgtctatttaatgaagtagaataa

SEQ ID NO: 93719 - DNA, 129 bp, Enterobacter aerogenes; identical to SEQ ID NO: 92611

SEQ ID NO: 93720 - DNA, 1563 bp, Enterobacter aerogenes
atgaaatatagagaaagtcagactgacttaagtttaaggaaatggttttcaaattccctagagcacgcacttttaagaaaagtggctctcgagcaaggaaggctacgctccttatcttcatttgaaattaaaatagattatccattgctagcgatagcgggaagaaatggctctggaaaatcgaccctattagctatgattgcatgtgcttatcacagcgctgaggataagcatattatatcaggaaagagaaaaccttattatacttttgcagattttttcattcagcattctgacgaagtgcctcaagaaggaatagcaataggatattatattgcccacaacaactggaaaccgtctaagacagtccccacaggaaaagggattggcaggcaactacgatttaaaaagaaaggaggtaaatggaataattacgataagagagtggaacgtcaagtaatcttccttggaattgagcgaatagttccccacagtgaaaaaagtcaatctaagagttatgctaaattatttatatttgatggccgtgagttaggatgtgaaaacgaaataaaagaaaatgtaggttatatacttaacaaaaaatatgataattttaaatttgtttcacactcaagatataggttgccaattgtcacacatgaaggtaaaacaatatctgggttcaatatgggagctggagagaatgcgctcttcgaaatattctctatattatattcagcagagcctggggcattaataattgtcgatgagatcgagctgggccttcatgcggaagcacaggttaagcttattgaaagattaaaatcagcttctcataaaagaaaactacaaattatatttaccactcactcagatataattttcggatgtattccagatgatgccaggatctacattgaaagtataaattccaaaactataattaatactgaaatatcccctgaatatgcctttggaaaattaagctcggaaaactctcaagaactcgatgtattggttgaggatgtagttgcagcaaaacttttatcaagcgttcttccaagtaatatccgttcaagattgcaaattgaagtaattggctcagctagctcattatcacgtcaaatggctgctatttttcaaaggggaaagaaaaataaggtaataactatttttgatggagaccaaaaaagattatataaagacaacctaaaatgcgctcactctatgctagaaaagaaccacgaagagttcacgcagtggttctcagagaatataaactacatgcccggcgatgagtggcctgaaaaatggattataaataaaaatttagaatatgtagataatctttcaatactggtaaacggggaacctgacgttactacagctgcactaaatcgtggaacaggctcagaaaaacataaagaattttacgaagctgcgctattacttggtgttaatgaatctgaaatgctggatagatgttgcataaacctagcaatgatgtgtcccgacactgtaagttatcttgtcgatttcataaaaaataaattatctgaataa

SEQ ID NO: 93721 - DNA, 1017 bp, Enterobacter aerogenes
atggcgataagtaaattacccaacggtaaatggcaagctcaggtattcccaaacggccgtaacggcaaaagaatacgtcgccagtttgcaactaagggtgaagcacaatcctatgagaagtttataaaagagcaggctcaggaaaagccttggctgggcgagaaagcagataagcggcgagtaatcgaactggttgaattgtggttcaacacgcatggcattacgttggcggatggtgagaagcggcgaaccacaatgacttttgcctgcgagtcgatgggaaacccactcgcaaccgagtttaacgctaagatttttgcatcttatcgcgagcagcgattaagtggaaagataacccgttccactcgagtgaagacggttacgcctcgcacagtaaatttagaactggcgtatttcagggcgatgtttaatgaactgcgccggttggacgaatggaccgctccaaatccgttagagaatatgcgcgagtttaaaatcagtgagccggagatggcgtatcttaccattgaggaaattaaaatcctcctcgccgaatgtgagaaaagccgttccaaagacctgactaccattgtgaaaatctgcttggcaactggcgcacgatggagcgaggcagaaggcttgaaaggaaaccaaatccgcgccggccagatcatcttcgtaaaaaccaaaggcaagaaaaatcgcgcggttccgataactgaaaaattacaggttgagctaccatcaagcaggaaggcgctgttgctttttaaaccatgttattcagcttttagaaaagctatgcaacgtgctggcattgagacaccagccggacagcttacgcatgttttgcgtcataccttcgcctctcatttcatgatgaacggcggcaatatactagtgcttcaacgtatacttgggcacacagacattaaagtgacaatgcggtatgcccactttgcaccagaacatttatcagacgctatgttgcttaaccctcttgataggctgggttaa

SEQ ID NO: 93722 - DNA, 606 bp, Enterobacter aerogenes
ttggaaaggtcaacgaaagattttacgattcgtaaagcaccaactttacctgaaggtggtagagaacccattgaacgcatcgtccaggcatatggcttttcgtcccgacaggcgctatgcagacatctaaatgtctctcagagcacgatggctaaccgtataatgcgcgggaactttcctgctgattgggtgctggtttgcgcgatggaaactggcacctctcttgagtggctgacctatggccgcggtgattcgaacatcacaaatcaagagcagccatcagccaaaattgaactaaaaaaaatcacaaatgggaatttttcatcatctaattgggttgaatatgacgctcagctcttaccaagtgatgttaatgcaccactattagtacatttcgagaaacagaattacttagtagatatgatcgccacagagatcaccgacgggctgtggctcattgagattgataagctcattagcattaaagagctgtaccgttttcctggagggcgcatccgcgttgagaatggaaaagcctcatttgaatgcaaggcagatgaaatcagagttttagggaaagtcgttgcacgcactgagtatctataa

SEQ ID NO: 93723 - DNA, 237 bp, Enterobacter aerogenes
atgacccgtaaactttcaatgcgcccttcgatcaatctcgtgatctcggaaccgtacattactgtcgaagagttctgccgtcgcacaggttacaaggaaggcactgttcgacagatgtaccgcgagaatcgtttgcccatcaggaagaaagaaggcttaaatggacttatcgaaatcaacatggttgctctcactatcgaagctgctgctggctgtgaaatcacaatgcaaggttaa

SEQ ID NO: 93724 - DNA, 510 bp, Enterobacter aerogenes
atgtttgattttcgtgtttctaaacatcctcactttgatgaagcctgccgttcttttgcgttgcgtcacaacatggcgaagctggcagagcgtgcgggaatgaacgtccagacgctgcgtaacaaactgaacccggagcaaccgcatcagctcaatccgtcggaaatctggctgcttactgatctaaccgaggattccgcattggttgatggcttcctggcgcagatccactgcctcccgtgcgtgccgctaaacgaagtcgctcgcgaaaagatgccggattatgttctaaaagccacggcagaaatcggccgcgtggctgccggcgctgtttccggtgaagtgcacacaacggcagggcgccgccagattgttgatagcatcaattcagttactcgactgatggcattaaccgcagtgacgttgcaggcgcgcctgcaggcaagcccggcgatggcaagcgcggtagataccgtgaccggcctcggcgcatcgttcggtctgatctga

SEQ ID NO: 93725 - DNA, 201 bp, Enterobacter aerogenes
atgctgactaaagaaccatcttttgcatcacttcttgtaaagcaaagttcggcaatgcattacggtcatggctggttcatggggaaggatggcaaacgctggcacccgtgccgctctcaggatgaactgatggctgacctgtccacaaccaaacaggggaaatcatggctattgaaggcgctacggcgactgttccattaa

SEQ ID NO: 93726 - DNA, 342 bp, Enterobacter aerogenes
atggctattgaaggcgctacggcgactgttccattaagccccggtaaacgcctggatggactgaaccatattgcggaattgagggctaaagtgtttggtctgaatattgagccggagcttgaaaggtttattaaagatatgcgcgacccacgcgacgtaaataataaacagaatgagcgggcactggcggccattttttatatggcaaaaattccggcagaacgtcacggcgtcaatattagtgatctgactactgacgaaaagcgggaactggtgaaagcaatgaatcattttcgtgcagtggtgagcttatttcccaaacggctaaccatgccgaattaa

SEQ ID NO: 93727 - DNA, 234 bp, Enterobacter aerogenes
atgcgaaatattgaaacccgattcaccaaaagcggccctgatgatgctggtattaaccagttactgacggatgcccgcatggaagagcgccgcgcgcgagctgcagcaatggctgtccgcctcgatagcctggctagccgtattgcttcccgccagcttaaccatgttgaggctgcggagctgctgcgtgtcgcagctgaaaacatccagaaagaagcgcaggagatcctctaa

SEQ ID NO: 93728 - DNA, 228 bp, Enterobacter aerogenes
atggttgattcaatggacctcgtacagcagcgcgttgaagaagaacgccagcgccacatccacaccgcccttaataaagcaccgggagtttcccgtgttctctgtactgattgcgatgcgccgatcccgccagctcgccgccgcgccattccaggcgtgcagtgctgcgtcacttgtcaggaaatcgcagagttgaaaggcaaacactacaacggaggtgttgtatga

SEQ ID NO: 93729 - DNA, 861 bp, Enterobacter aerogenes
atgaggactatactgaaatgggcgggaaataaaaccgccatcatgccggaactgaaaaagcacctgccagcaggccagcgccttgttgaacctttcgcgggttcgtgcgctgtgatgatggcgacagactatcctcattatcttgtcgcagatattaatcctgaccttatcagcctttacagcgtcattaaaaaccagtctgaattactaattactattgcgaaagggttatttgataagaataacaccgcagaagattattacggtatacgtaaggaatttaattgtgatcgccactggcccgcagaatggcgcgcagctatgtttctttatcttaatcgccattgttatcgtggattatgccgttataaccagaaagggcagtttaacgctccatacggtaactataaaagttcttattttcctgaaagtgaaatactcgcttttgcagaaaaggctcaacgcgcaacgtttatttgtgccagctatgaagaaacactggcgttgctgcaggctggtgatgttgtttattgtgatccgccatacgatggcacgtttagcggttatcacactgccggttttacggaggacgatcagtatcatctggcgtctattcttgaacgtcggtcatcagaaggtcatccggttatcgtgtccaacagcgacacatccctgacccgttcgctttatcgtaattttacccgccatcgcatcactgcaaagcgcagcatgggtgtggctgccggtgagagtaaatctgcatctgaaatcatcgccacaaaatcagcaggctggtttggtgtcgatctggcgtccggtccagatatctcggtggaaactgaggtgcgggcgtggcagtga

SEQ ID NO: 93730 - DNA, 2421 bp, Enterobacter aerogenes
gtggcagtgagtaaaatcacattacataatgcaccaaccaccggcggctcgaatgagtccgccgtggccttttcatggaataaccctaaaaaagcggttaatccctatctggacccggcggaggttgcgccggagtctgcgctttcaaacctgatcgctctttacgctgcggataacgagcaggagcagctacgccgtgaggcgctgagcgataaggtctgggaacgctatttcttcaatgaatcccgtgatcctgtccagcgtgaaatggagcaggaccggctgattagccatgccaaaatggcgcgcgagcagcagcattttaatcccgatctggtcattctggctgacgttaacgccatgccgtcccatatcagcaagcctctgctggagcggattaaatatttccatagtctgggcagagcaaaagcctattcccgctacctgcgtgaaaccatcaggccttgtcttgagcggctggagcgcgtgcgtgacagccaggtgtctgcgtctttccggttcatggcgagccatgacgggctggaggggcttctggtactgcctgaaatgaatcaggatcaggtcaagcgcctttcaacgctggtagcggcacatatgagtatgtgtcttgatacggcatgcggtgatctgtttgtcagcgacgatgttaaaccagaagaaatccgccaggcatgggaaaggatggctgcagaagtcttgcggcttgacgttatcccgccagcatttgagaaactgcgcaggaagaagcgccgccgtaagcccgtaccttatgagctgatccccccttcgcttttacgcatgatgtgcgcggactggtggtatagcaaactgtggcagatgcgctgcgaatggcgggaggaacagctgcgcgccgtctgcctggtcaacaaaaaagcgtccccgtatgtcagctatgaagccgtgatccataaacgcgagcagcgccgcaaatcgctggagttcttccgctcgcatgagttggtcaacgaagacggcgacacactggatatggaagacgtggtgaacgccagcaacagcaacccggcacaccgccgtaatgaaatgatggcctgtgttaagggactggagctgatagcggaaatgcgcggcgactgtgcggtgttctataccatcacctgcccgtcacgcttccacgcaaccctcaacaacggcagacctaatccgaaatggaccagcgccactgtccggcagagcagtgattatctggttgataccttcgccgctttccgcaaggcaatgcacaaggccgggctgcgctggtatggcgtccgggtggcagagccgcaccacgacggcaccgtgcactggcatctgttgtgcttcatgcgcaaaaaagaccgccgttccatcaccgcactgctgcgtaagtttgccatccgtgaagaccgcgaggagctgggcaccaataccgggccgcgcttcaagtccgagcttatcaatccgcgtaaggggacgccgaccagctatatcgccaaatacatcagcaagaacatcgacgggcgcggactggctaaagaaatcagcaaagaaaccggcagatcactgcgtgacagcgccgagcatgtcagcgcctgggcgtcactgcatcgtgtccagcagttccgtttctttggtattccggggcgtcaggcataccgcgagctgcgcttgctggctggtcaggcggcaagagtgcagggtgaacgcaaagcgggcgcgccggtactggataatccgcgtctggatgcggtactggcggcggctgatgcgggctgctttgccacctacatcatgaagcagggcggtgtgctggttccccgcaaacatcaccttgtccgcacggcctatgagcttaacgaagaaccgagcgcttacggcgatcacggtatccgtatctatggtgtctggtccccgattgtagagggcaagatttgcacgcacgcggtgaagtggaaaaaggttcgtaaggccgttgacgttcaggaggcgacagccgaccagggcgcttgcgccccttggactcgtggcaataactgtccccctgtggaaataatgaacgaaaacggggccggaaaaagatcggagttacctgatattgcgggtatggatgagcgggagctgcaggatcatctccatagcatgagcaaaaaggagttgagggagctaaacgcgcggcttcgcatggtgaagtctaagcgccggaaaggatactggcaggaagtggataatcagcagtacctgcagttggagtatgaactgaaatcgagaggctttgatggttcagaggcggagatcgatctgcttctacgtggcggcagtattccatccggtgccgggctgcgggtcttttaccggaatcaacggctgcaggaagatgataaatggcaccagtggtactaa

SEQ ID NO: 93731 - DNA, 189 bp, Enterobacter aerogenes
atgcaggactattttatggagtcgttgaaactccagcgcattgatttttttgtgaagcttgtagcggcgagtgaatgcgatgatgaagagaagcgactggcaatccagtgggtttcggagctgactgatgagttgatggcgaaaatccgtactcatgagtacaaccgttcaatagatctctccagttag

SEQ ID NO: 93732 - DNA, 975 bp, Enterobacter aerogenes
atggggttaggattaaaagacggtattttgcatacagcagcatttcataataaagacactaacgagttgcttttgcctaacaaccactgccacccaggatttataactgtattggcagcttatattaaccatcatcggattaccgaagaaaactgctctttacctggcccagactatatgagtgcaatcaatctgcacggtgctctttgggggacagacaggtatcagcaggaaagggtaaacgtaggccggcattacagcttagttactgctcttactagtgttgatgcggtggatatcgctacaagcagtatcaataattgcgttagacagttaacttttcctgggcgagctccgggagactatccgaaggggctaaccgacctgacgcatgttatcggagaattgcatgacaacgtttggtcgcatggaaaatcgtcaggtttctcatttgctcaacgatctgctgttccgtatacgcaaagaagagagcattacctcgagttctccctggcggactgcgggttaggttttttgagagagttaaggcgggctgatatccctggtatagcgtcacatcaggatgcaattgaatggtgcatacaagagggtaactcctcaaagcatgccgatctgcaggatgactgggctcagcaggtacctggtgactacatgggaggtaacctgttcggtgcaggcgttaaagtaaaagaaaaagagaataatcatcaagggcttggccttcatcacttgatgaaattggttaaaacttacaacggagaattgcaactggctacaggaaatgtatgcttagaggcaagtggtgacgaagtaacctacactgagttgagaagtgcttggcctggagtggctatttcttgtcgttttaagattaatgaactggctgttgataaagataacgaagaaaatgatcctcagcttatggaaatcatgcgggcgttaggaggggagtaa

SEQ ID NO: 93733 - DNA, 339 bp, Enterobacter aerogenes
atgaacagaatcgcatacaagttgcccgagggtgacctggcttcgcgcaatcaggctatccctcaacggcacaaaattgaagtcctcatcaaaaatggcagctcagtggatctggatttgagcggtgtatactcgatttctgagtcttactcagatgagattttcggggtgttggttgtgaaatttggtgttacgaaggtacttagccaagttaaagtccgtaacgcttcaccttcaatcctgaagagtattgctaaagtaatccagcgccgcagtaacgaagttgcaacaaagaaggttcagtctgctggatttgacggtgtatgtgcagcttgctaa

SEQ ID NO: 93734 - DNA, 1038 bp, Enterobacter aerogenes
atgagcaaacgcaaaaaccggaataaccgcgcagcggtagatcacaacgcacaatcaggtggcgcagtagcggaagcgttcagctttggcgacccggtgccggtgttagaccgtcgagaattgctggactacgtggaatgtgtgcagatggaccgctggtatgagccgccggtgagttttgacgggctggcgcggacctatcgcgccgccgtgcatcacagctcaccaattgccgttaagcgtgacattctcagcagtacctacatcccgcaccgcctgctcagccagcaggcttttgcccgtttcgtccaggactatctggtgtttggtaacgcctatctggaaaaacgtaccaaccggctcggcggagttctctcactggagccagcactggcgaagtacacacggcgcggcgtggacctcgacacctactggtttgtacagtatggcctgaccacgcagccctatgaatttacgcagggcaacatttttcatctgctggagccggatattaaccaggagatttacgggctgcccggctatctctccgccattccgtcaaccctgctcaacgagtccgcaacgttgttccgccggaagtattacatcaatggcagccacgcgggcttcatcatgtacatgaccgacgcagcacagaatcaggaggacgtgaacaatatccgccaggcaatgaaaagcgccaaagggccgggcaacttccgcaacctgtttatgtactcgcccaacggtaaaaaggacggcatccagatcatcccgttgtcggaagttgcggcaaaggatgaatttctgaacatcaagaacgtgagccgcgatgacatgatggcagcgcaccgcgtaccaccgcagatgatgggaattattcccaacaataccggcggctttggtgatgtagaaaaggccagccgcgtctttgtgcgcaacgaattaatgccactgcaaaagcggatgcaagagctgaacatatggcttggtgaagaggtgataaagttcgccccttacactttggacattgactga

SEQ ID NO: 93735 - DNA, 708 bp, Enterobacter aerogenes
atgcactcaaccccaactaacctcatgaccaccgccagcctgcctgtagatcgccctttcttttcttatcagcatgaatggaatagcggcgcacgcagcagaaaccgcgtgcttacaaaaatgcgtcaggctggcgtagatttctttttcgcctacgaagccctgaatgatgcgctgcataccggacgaaaccagatttttctgggctgctccccggcatctgccctgaccgtcaaaaactatatgtcagcctttttagagcaggccgcagcctggacacacccaggaaaaataaaatcaggtaaagcgcatctggaactaccaaacggtgcggtcatttattttatcgggccggaaagtctcgctgccgcgctccatggaaacgtctacgtgtcagaatatgcctgggcggattccccgaaaaatatgattgcgctcgccaaaggcctgtccatgcatgcgcgttatcacgcaacctactacaccaccccaagccccagcccggaagcatggcaggaatacaaaaagctgatttcccgcaacagcacaaccaacatgacctttaccgctgatgacgctgcagcatccggggcaacgctctttgatgatgaatggctgaatacaatgaaaagcgaattatcagcagcggactggagaatgttatttatgtgcgaatggccccaggctgataaggagcaggtggcatga

SEQ ID NO: 93736 - DNA, 1779 bp, Enterobacter aerogenes
atgttgggggccatgaacacgacactgacccccgcagacctcgatccccgtcggcaggctatgctgctgtactttcagggataccgcgtagcccgcattgctgaaatgctgggcgaaaaagttgcaaccgttcacagctggaagaagcgcgataaatggggcgagtatgggccgctggatcagatgcagctcaccaccgccgcccgttactgccagctcatcatgaaggagcagaaagaagggaaagacttcaaggaaattgacctgcttgcgcgccagtcagaacgccacgcccggatcggtaagtttaacgatggcgggaacgaagcagacttaaacccgaaagttgccaaccgtaacaaagggccacgccgccagcccgaaaagaatgttttcactgatgaacagaccgaaaagctggaagaaatcttccgcaacggcatgtttgaatatcagcgccactggtggcaggcaggcgtaaaacaccgcattcgcaacctgcttaaatcacgccagatcggggcaacatacttttttgcccgcgaagcgctgattgacgccatcaccacggggcgcaaccagatttttctctcagccagtaaggcacaggcgcacgtttttaagcaatacatcatcgactttgcaaaagaggtggatgttgagctgaaaggcgacccgatgaccctcagcaacggcgcgtgcctgtacttcctcggcaccaacgcccgcacggcgcagagctaccacggcaacctgtaccttgatgaatatttctggataccgaaattccaggagctgcgcaaggttgcctccggtatggccattcacaagaaatggcgacaaacctacttttccacgccgtccagcctgacccacagcgcctatccgttctggtccggcgcactgttcaaccggggccgcgccaaagcggacaaggtggatattgacctgacccacagcaaccttgcacgcggcgtgctctgcccggacggacagtatcgccagatcgtcaccgtggaggatgcggtgcgcggcggctgtaatctgttcgacctcgaccagctgcgcatggaatacagcccggacgaataccagaacctgctgatgtgcgagtttattgacgatctggcgtcagtattcccgctcagcgagctgcaggcgtgcatggtggacagctgggaagtgtgggcagattttcaggcgctggcgctgcgcccgtttggctggcgcgaagtctggatcggatacgacccggcgaaagggacgcagaacggtgacagtgccgggtgcgtggtagtggcaccgccaaccgtgccgggcggtaagttccgcattcttgagcggcatcagtggcgcgggatggacttccgcgcccaggctgacgccatcaaaaagctgacgcagcagtacaacgtgacctatatcggcattgactcgaccggtgtcggtcacggtgtctacgagaacgtgaaagcgttctttcctgccgtgcgggagtttgtctacaaccccaacgtcaaaaacgccctagtgctcaaggcatacgacattatcagccaccgccgtctggagtttgacgccgggcacaccgacattgcgcagtcctttatggctatccgccgcgccaccaccgccagcggaaaccgccctacctacgaagccagccgcagcgaagaagccagccatgcggatttggcctgggcaacgatgcacgcactgtttaacgaaccactgcagggcgaagccgccaataccagcaacattgtggagattttctga

SEQ ID NO: 93737 - DNA, 834 bp, Enterobacter aerogenes
atgacagtgaaagcaaagcgtttccgcatcggggtggaaggtgccaccactgacggacgcgagatccagcgtgagtggctggtacaaatggctgccagctacaacccgacggtctataccgcgttgattaaccttgagcacatcaagtcttatctgccggacagcacctttaaccgctacggcagggtaacggggctggttgcagaagaaatcaaggacgggccgctggcgggcaagatggcgctttatgccgacatcgaacccacggacgccctggtggaactggtgaaaaagggccagaagcttttcacctccatggaggtcagcacgaagtttgccgacaccggcaaagcctaccttgtggggctgggtgcgacggatgatccggcgagtctgggcaccgaaatgctggcattcagcgccagcgccgcgcataacccgctggcgaaccgtaagcagaaccctgaaaacctgttttcggaagcagttgaaacgctgatcgaactggaagaagtccaggacgaaaagccgtccctctttgcccgcatcaccgcgctgttaaccaaaaaagagcagaccgatgaggcgagtttctccgacgtgcataaagccgtggaactggttgccaccgagcagcagaacctgagcgagcgcacggataaatccctgaccgaacaggacaagcgcctttctgagctggagtcctcactgctggagcagcaggccgcctttgccgagcttgagcagaagctgagccgtgaggacagccgtaaagactaccgccagcgcgcgccgggcggtgacgcaccggcagccaccctgaccaattgctga

SEQ ID NO: 93738 - DNA, 1062 bp, Enterobacter aerogenes
atgaaaaagaatacccgctttgcctttaacgcttacctgcagcaactggcgcgtctgaacggtgtggaagttgaagaactgtccagcaagttcaccgtagagccgtctgtgcagcagacgctggaagaccagatccagcagtctgctgctttcctgacgctgattaacatcacgccggtcactgagcagtccgggcagttgctggggctgggcgttggcagcaccattgccgggaccaccgataccaccaccaaagagcgcgagcctaccgatccgacgctgatggaagacgtggaatacaaatgcgagcagaccaactttgatacggtgctgacctacgcaaaactggacctgtgggcgaaattccaggacttccaggtgcgtatccgcaacgccattgttaagcgtcaggcactggaccgcatcatgatcggctttaacggcgtgaagcgcgccaaaacctccaatcgtgctgaaaatccgctgctgcaggacgtcaataaaggctggctgcaaaaaatccgcgaagacgcgccggatcacgtcatgggcagcacaacaaaagacggtgcaacgactgcaggcgcggtcaaggtggggaaagggggcgactatgccaacctggacgccgtggtgatggatgccgtcaatgagttgatcgatgtggtttatcaggatgatgacgatctggttgtcgtctgcggacgagaactgctttctgacaaatatttcccgctggtcaacaaagagcaggacaacagcgagaaaatcgccgccgatctgatcatcagtcagaaacgtatgggcggcctgcaggctgtacgcgcgcctttcttcccggcaaaagccctgctgatcacccgtctggataacctgtccatctactggcaggaagacacccgccgacgttctgttatcgacaacccgaaacgtgaccggattgaaaactttgaatccgtcaacgaggcgtatgtggtcgaggactaccgctgcgcggcgttggttgaaaacatcgaaatcggtgatttcagcgcgcctgccgcaccggaaggtggggaataa

SEQ ID NO: 93739 - DNA, 651 bp, Enterobacter aerogenes
atgagcctgagtcccgcacggcagcaccgcctgcgcattcaggccgaacaggccgcccgtgagggcggcagtgttcgccatgcgtcgggctatgacctgatgctgctgcaacttgcagaagaccgtcgccgcctcaagggcgtccagtccacggtgaaaaaggcggaaatcaaggtggagctgctgccgaaatattccgcctgggcggagggggtgctggctgccggaggtgcgcagcaggatgacgtgctgatgtacgtgatgctgtggcgtatcgatgccggtgattatgccggtgcgctggaaatcgggcgtcatgcgctgcgccatggctgggtgatgccgctgggcaaccgtaacgtgcagaccgtgctggcagaagaaatggcagacgcggcgcaaagcgctctgctagccgctgccggttttgatgccgatctgcttttgcagacgctggacctgacagccgatctggatatgccggaccagtcgcgggcacgtctgcataaagccatcggcgctgtactgagcgaaagcaacccggcatctgccctgaatcaccttacccatgcgctgcagctcgatccccgctgtggcgttaaaaaagaaaagcagcagctggagcgcagactgcgcaatgacagccgctaa

SEQ ID NO: 93740 - DNA, 465 bp, Enterobacter aerogenes
atgaagtttgttgcgcccgaacaggcaccggaacaggcggaggtcatcaaaaatacgccgttctggcctgatgtggacctgtcggaatttcgcagtgtgatgcgtactgacggcacggtgacgcagccgcgtttaaagcaggttgtgctgacggctatttctgaggttaacgctgagctgtacgacttccgccaccgtcagcagatgttgggctggcagacacttgcagacgttcctgcagaaatgctggacggcaaaagcgagcgtatccagcactaccacaacgctgttttttgctgggcgcgcgctgtgctcaatgagcgttatcaggactatgacgccacggcgtcaggcgtgaagcgaggggaggagctggcggaggccagcggcgatctgtggcgtgatgcccgctgggcaatcagccgggtgcaggatgcaccgcactgtacggtggagcttatctga

SEQ ID NO: 93741 - DNA, 204 bp, Enterobacter aerogenes
atgaaagtgcgtgcgcatcagtatgacacggtggacgcgctttgctggcgtcattacaggcgcacgcagggtgtcactgagcaggttctgcaggcaaatccggggctggctgagtacggcccatttttaccgcacgggctgcaggtggagctgccggacattacggcgtcaaccacggcgcagaccgtccagctatgggactga

SEQ ID NO: 93742 - DNA, 216 bp, Enterobacter aerogenes
atgacgcttgaacgaatcagcgcctttatcacttactgcatcgccgtgctgctggcatggctgggcgatctgtcgctcaaggatgcgtcaacggttggcggcgtactgattggtgtactgatgctggctatcaactggtactacaaacaccagtctttcaaattgttacgtggcggcaagatttcgcggggggaatatgaatccttcaatcgttaa

SEQ ID NO: 93743 - DNA, 510 bp, Enterobacter aerogenes
atgaatccttcaatcgttaagcgctgccttgtcggggcggtgctggctattgctgccacgctgcccggtttccagtcgcttcatacctccgttgaggggttgaaactgattgccgattacgaggggtgccgcctgcagccttatcagtgcagcgcgggcgtgtggaccgacgggatcggcaatacgtccggtgttgtgccgggcaaaaccatcacggaatggcaggcggcgcagggacttatcaccaacgtactgcgcgtggagcgggcgctggataaatgtgtggtgcagccgatgccgcaaaaagtctatgacgcggtggtgtcgtttgctttcaacgtgggcaccggaaacgcctgcagctccacgctggttaagttgctgaaccagcggcgctgggcagatgcctgccatcagctgccgcgctgggtatatgtcaaaggtgtgtttaatcaggggctggacaatcgccgcgcgcgggaaatggcctggtgcttaaaaggagcataa

SEQ ID NO: 93744 - DNA, 378 bp, Enterobacter aerogenes
atgaaaaagaaagtcatgagcgtttttttccagctggcatgggctgcgctgttggttatcagtctgctgtatccgcgcagcggtgcgccggttctggttggcgcgtctgtctgggtgtcatgcttcctcgcctggctacttgctgcgctgtgcgctgtcgggtggttcgccggagagcgggcgcgcgatgaggtcaggtcggcattaatcaaattcagggcgcaccccgtaaaacccgtgcgtacctgggttatcaggttgcttattgttctgtgcctggcgttttctggatggatgatcaccctggtgttttatctgctgacgctggttttgtatcagattgcccgcgcgcagcttcatgagccgatggcggcctga

SEQ ID NO: 93745 - DNA, 426 bp, Enterobacter aerogenes
atgcgtgcgctggcggtagtgctggcgctggcgcttgcggcgctgggctggcagtcgtggcggctaaacaatgccagccaaaccatagaaacgcagggcgcggcgctgaaaagcaaaacgcaggagctgacgaagaaaaacagccagctgatcggcctgtccattctgaccgaaaccaacagccgggagctgacgaggctttatgcagcagcggagcaaaccaccgcactgttgcgcaaccgtcagcgccggatcgaggagctaaaacgtgaaaacgaggatttgcgccgctgggctgacactcctttgcctgctgacattatccggctgcgggagcgtccggccctcgccggaggtgcagcttaccgtgagtggctgtcccagagtgacgcagtgccgcctggaaaggtcagcgccgcgcagtaa

SEQ ID NO: 93746 - DNA, 621 bp, Enterobacter aerogenes
atgaacaaatacaacactgatttacctacggcaaaactgaataaaagcggcattgccaccgttgccggctggctcacggtgtacaacgtggagcctaagcagcgcgaatttcaggcggtgacgatggaatatttagccgcgggtgtaggcttgcctgctttcagttatgccgataagccagcattaccgggtgatggctttgcactggtgcgcagcgcggatgaaaaacaatgggaaactattgcggattatcgcggtttaacggcttacagcactgagaccgggcaaccggaaatcatcgcttttctcggcgaattgccggatacgctgacgttactggcacctgtcacggcgtatgataaatgggacggtaaccagtgggtgaccgacacggcggcgcaacatgctgatgagattgccgtcgcagaacagcaaaagcaggctctgctttctgaggcgcagcagcaaatcaccggatggcaaacagagctgcagctcggcatcatcagtgatgatgataaggccagactgattagctggatgaactacatcaaagccgtgcaggcagtggacacctctaaagcgccggatattagctggcctgagcgtccggaagattaa

SEQ ID NO: 93747 - DNA, 1173 bp, Enterobacter aerogenes
atggctcaggattaccaccacggggtgcgcgttgttgaagtcaacgagggcacccgatccattaccacggtgagcaccgccatcgtgggcatggtctgcaccggcgatgatgctgatgcgtccatgtttccccttaataagccggttctgctgaccgatgtgctgaccgccagcggcaaagcgggcgagtccggcacgctggcccgctcgctggatgccattgccgaccaggctaaacccgtgaccgtcgttgtgcgcgtggcgcagggcgaaaccgaagcggaaaccacctccaacattatcggcggtgtgaccgctgacggtaaaaaaacgggcatgaaagcgctgctttcggcgcagtcgcagctcggcgttaagccgcgcattctcggcgtgccggggcacgacacgcaggcggttgccactgagctgctgggcgtggcgcagagcctgcgcgggtttgcttacctgtcagcttacggctgcaaaacggtggaagaagtgattgcctaccgtgacaatttcagccagcgcgaggggatgctgatctggcctgactttatcaactttgacaccgtgctgaatgccgatgcgacggcttatgcctccgcccgtgcgctcggcctgcgtgccaaaattgacgagcagaccggctggcacaaaaccctgtccaacgtgggcgtgaatggtgtcaccggtatttccgctgatgtgttctgggatctgcaggacccggcaaccgatgcggggctgctgaaccagaacgacgtcaccacgcttatccgcaaagatggcttccgcttctggggctcccgctgcctcagcgatgatccgctgtttgcatttgagaactatacccgcacggcgcaggtgctggctgacaccattgcagaggcgcacatgtgggcggtggatggcgtgcttaacccgtcgctggcccgcgacattatcgaaggtatccgcgccaaactgcgcagcctgaaaacgcagggctacatcatcggcgcagactgctggctggatgagtcggtgaacgataaagactccctgaaagccgggaagctcaccatcgactacgactacacgccagtgccgccgcttgaaaacctgatgctgcgccagcgcatcaccgatcgatacctgctggatttctccagccaggtcagcgcgtaa

SEQ ID NO: 93748 - DNA, 516 bp, Enterobacter aerogenes
atggctttaccacgcaagttaaaacacctgaacctgttcaacgacgggaacaactggcaggggatcgttgagtctctgaccctgccgaaatttacccgcaagtttgagaagtatcgcggcggtggtatgccgggtgcggtggacgtggatatggggctggatgacggcgcactggacacggaattttcaatcggcggcaccgaattgctgttattcaagcagatgggcaaggccaccgttgacggcatccagttgcgtttcaccggctccattcagcgtgacgataccggcgaagtgcaggccgttgagctggttgtgcgcgggcgtcataaagaagtggattccggcgagtggaaaaccggagagagtagcgccaccaaagtcagcagcaccaacagctacgcgaagctgaccattaacggtgaggtgctctatgaggttgatgtggtcaacatgattgaaatcgttgacggcgtggacctgatggaagcacaccgtaatgccctcggcctctga

SEQ ID NO: 93749 - DNA, 303 bp, Enterobacter aerogenes
atgagcgacaagcttactgaaaagaccgtaaaactggatacgcccatcatgcgcggtaaaactgaaattaccgaaattgtgctacgtaagccgcaatccggcgcactgcgtggcacccgtctgcaggccattatggatatggatgtgggcgcaatgatgactgtgatccctcgcatctccaccccgacgctgaccgcgcaggaaatggcagagctggaccccgccgatctgaccgcaatggctgtagaggtggttacttttttgttgccgaagtcggtgcttgccgatttgccgacaacctga

SEQ ID NO: 93750 - DNA, 2829 bp, Enterobacter aerogenes
atgtgctggagtggcgacacaaagccattcagcgaagcggggccagcgatgagtgataataacctgcgactgcaggtagttctgggggcggtggataagttaacccgcccatttaaaaatgcacaggctggctctaaggagctggcatcagctattcgacaaactcgcgatcaaattaaaaagctgagtgatgctggaggtcagcttaaatctttcgatcagttaactctgagtgttagccgtactggtgccgaactggatcaggcgaggctacgcactcaaatgatgacgcgtgaaatgtcatctttggaatccccgacaaaaaagcaaacgcaggcgcttgaggctcagtggcgggctgtttcacgtcttgaacaaaaacagcaacaggaaactcgccagatggcggcagccagggctgagctttatcggctggggttatctgctgggggcggagcgcgtgaaacggcacgtattgcacgagaaactgagcggtataatcgacagttggctgagcaggagcgcaggctgcgtgaagttggcgagcgtcagcgaaagctcaacgctatcaaagctaaggctgaaaagacccgcgagttaaggaactctctggcaggtaatggtgcaggggcgatggcggctggggtaactactggcatgacgttgttggctccagtaaaagcctattcagaatcagaaaatgcggcgaatcagctcgccggttcaatgatgggaccgggcggaaaggtagcgcctgaatttgaaaaaattaaccggcttgcagttgctttgggcgataagctgccgggcacaacagccgactttcagaacatgatgactatgctacgccgtcagggtatgtcggcgcaggtcatcctgggaggcttgggagagtcagcagcttatcttggtgtgcagttacagatggctcccactgcagcagctgagtttgcggctaagttacaagatgctactcagacctccgaaaaagacatgatgaatctgatggacgtgatccagaaaggattctatgcgggggtagactcagggaatatgctgcaggggttctcaaaaatcagcagcgcgatggatattattcataaaaagggattggacgcggctaagacatttgcccctcttctggtgatggctgatcaggcgagcatggcgggagagtctgcgggaaatgcctaccgcaagatttttcaggctactctgaacaataaaaagattgggaaggcaaacgacgcactggcaggaatgggaataaagctaagttttcagaataataaggggcaatttgctggcctagaaaatctgtatgcgcagctggagaagcttagaaaaattactgacgatggcaagaggcagtccgttattaataccctttttggtgatgatgctgaaaccctccaagctctgaacatcatgatcaataaagggattgaaggatacagagaaacggcggctaaactcgaaaatcaggcttctctgcgcgagcgtgttgatgcctccttgaatacacttggtaataaatgggaagccgctacaggttcctttaccaatgctatggcaagtatcggtgaaacagttgcccctgcattaaagaagctggctgactggttgggtgaactggcgtcgcgtctggatggttttgttaaacgacacccacaattgacctctgctctgtttaagttggcagctggttttgccattgttgccaccgccgctggggttgtttcactggcgctggcgtccgtgctagggccgatggcagtagtgcgaatgagcgcaggggtgatggggctaaaattttcatctgcatttggtcttattgggaaagcaatcagttctgttggcaagtcaattatatggctgggccgattgatgtttgcaaatcctatactggctgtcattgggttgatcgccgccggtgctatttatatctggcaaaactgggacacgcttgagccaaaatttaaggcaatgtgggatgcagtatgtaatgccacaagtacagcatgggattggattaaagagaaggccagcgccgcatgggaggggattaagtcactgttctttaattataccttgccgggattaatcgctaaaaattgggatgcaataaaaactggcgtttctgaagcgtgggccaatatcagacaatctattagtgataaatggaattcgatcctggctgatgttgccgcgcttcctgcgaagttccaggacatgggcagcgccattattgacagcattctcaatggaattaatgccaaatgggagacactcaaaagcaagctttcctcagtcaccgattatctgcctgactggatgaccggaaataataaaacacaagacaaagcacaggtgcaggtggttggtggagcagcggctgctgccgttccgtttgccgggatgtatgacagtggtgggattattccgcgcggtcaattcggtattgttggggagaacggccctgaaattgtgaacggccccgcaaatgtgaccagcaggcggcgcactgccgcgctggcttccgtcgttgcaggtgtcatgggcgtagcggcagcgcctgcagaggctgctccattacatccttatagtctgcctactgtggcatataaacaaagccagcctgctaaatctgccagtgcgccgccagtgatgcactttgaaactcacgcgccgatcactatctatgctcagccagggcaaagtgcgcaggatattgcccgtgaagttgccagacagcttgacgaacgcgagcgcaagaccagggctaaagcacgcagcaatttcagtgatcaagggggatatgaatcgtga

SEQ ID NO: 93751 - DNA, 483 bp, Enterobacter aerogenes
atgatggtactggggttatatgtcttcatgctgcgcacagtgccatatcaggagctgcagtatcagcgaagctggcgacatgccgtcaacagccgggtgaaccgccgaccatcaacgcagtttcttggaccggataacgattcgctgacgttatctggtgtactgctgccggaagtcaccggcggcaggctgtcattgttggcactagagcaaatggctgagctgggcaaagcgtggcccttgattgaggggagcgggaccatttacggcatgtttgtgatcgaggggctgagccagacaaaaacggagttttttacaagcggaatgcctcgccgtattgagtttacgctgaccctgaaaagggttgatgagtcgctgtcagatatgttcggtaatctcagcgatcagctcagtaatctgcagaactctgcaacgtctgcaataggtaatattaaaaacacggttggagggatgctgcagtga

SEQ ID NO: 93752 - DNA, 1101 bp, Enterobacter aerogenes
gtgaatgttagttctgaactttttgatctcaacagcaaaagcccggctttcagtatcaccattgaaggtaaggacgtaactaccgtactggatgcacgtctgctgagtctgacgctgaccgataaccggggttttgaagcagaccagcttgatctggagctggacgacgctgacgggcagattgttctgccgcgacgtggtgctgttatacagctggcgctgggatggaagggccaactgcttttcccaaaaggagcattcactgtggatgagattgagcatagcggtgcccctgatcgtcttaccatccgggcgcggagtgctgatttccgggaaaccctcaatacccggcgtgaaaagtcatggcaccagacaacggtgggggaggttgtaaaggaaattgccgcgcggcataagctcaaaatggcgctgggtaaagacctgacagataaggcgctggatcatatggaccagaccaatgaaagcgatgccagttttctgatgaaactggcgcgccagtttggcgcgattgcttccgttaaggatggaaacctgctgtttatccggcaggggcagggaagaacggcgagcggtaagccattacctgttatcaccattgagcgtaaagccggtgacggtcatcgttttaccctggctgatcgtggtgcttataccggcgtaattgccagttggctgcatacccgcgaacctaagaaaaaagaaacaacgaaagttaagcgccgtcggaagaaaaccaccacacctaaggaggcggaagcaaaacagggtgattatctggtgggaacggatgaaaacgtgctggtactaaatcgcacctatgcaaaccgcagtaatgctgagcgtgcggcaaaaatgcaatgggagcgcctgcagcgtggtgttgcgtcattctccctgcagcttgcagagggccgggcagatctctatacagaaatgccagtaaaggtgaacggttttaagcagcctatcgacgaggccgaatggaccattacaactttgacgcataccgtcagcccggataatggctttactaccagtctggagcttgaagtaaaaattgatgatttagaaatggaataa

SEQ ID NO: 93753 - DNA, 219 bp, Enterobacter aerogenes
atgatgaattgtccgaaatgcggacatgctgcacatactcgtagtagctttcgggtgtctgataacactaaagaacgctactgccagtgccagaacattaattgtggcagcacatttgtcacccatgaaaccgtcgtgcgctacattgttactcctggacttgtggatcatgcaccgccacacccattaaatagtggtcagggacacatgaatttctaa

SEQ ID NO: 93754 - DNA, 1413 bp, Enterobacter aerogenes
atgaatcattttaccactgaagatacctttattattgttggcattgtcatcgcctatatcttatttaccacctggctgacgttccgtattagaagtaaaaactccggggattttatggagggctcgcgcgcgatgccggcctttattgtcggtatcctgctgatgtcggaatatatcggcgccaagtccactatcggaaccgcacaggccgcgtttgagagcgggattgccgcctcctggtcggtgctgggcgccgccattggctttccactatttggcctgatactggttaagcgcatctataacactggcaaaattactatttccggggcgattgccgagaaatacggcaccagcaccaagaatattatttccattattatgatttacgccctgttgctggtgaacgtcggtaactacgtcagcggcgcggcggccatttccacggtattaaagatcaatttacccttcgcggcgtttattaccgccatcgtcagtactttctattttgcctttggcggtatgaaaggcgtggcctgggtaaccatgctgcacagcgctttaaaatatgccggcctgcttattattatgggtttcgcgctggcaaaaaccggcggttttacgccgatgatcgagaaaatgccagattactactggacctgggatggtaatatcggcgccggcacgatctgcgcctggcttatcggcaccatcggctccatcttctgtacccagtttgtcattcaggccatcagctcgacaaaaaacgtaaaatcggcgaaacgctctacctggattgcctttttcttctgcctgcctatcgccttcgcgatcgccattatcggcgtggcggcgaagtttttacacccggaaatcaacagcctgtacgccctgccggtgttcctgcaggatatgaacccgtggcttgccgggttagtgacaacgtcacttgtagcttcaattttcgttagcgtcagtaccgttgccctggcgattgcctcgctggtggtaaaagatttttacgtgccgtggcgcaatccaacgccggagcaggagtttaaagccacccgttgggcctcgctgatcatcggttttctgccgcttatttttgtgctgctggtaccggaagtgctgaagctctccttctttacccgcgccatcaggctctctatcaccgtcgtcgcggtcatcgccttctatgcgccgttctttaagagcgcccgcggcgcgaacgctggccttatcggcgcctgcgtggtgacttcggcgtggtatttgctcggcgatccgttcggcatcaataacatgtacatcgcgctgatcaccccggccctgattatggtgatcgaccgcctgatccccaataaagcgcaacaatcatccccggcccccattgaacaacgtggagtgtaa

SEQ ID NO: 93755 - DNA, 246 bp, Enterobacter aerogenes
ttgaataacgaagagaaatctcatgcgctggtctgctggctggcgcaactggtgaaacgcctggcgctgcccgacaacctcgccgcgctgggcgtaccaccagagagtattgaaacgctgagcgccgcggcgctggaagtaaaacgattaatgaacaatgccccatgcagcgtgaaccaggacgaagtccaggcgatttaccagacgctgtttccacagtcatctcatcagggagaagagaaataa

SEQ ID NO: 93756 - DNA, 2196 bp, Enterobacter aerogenes; identical to SEQ ID NO: 91973

SEQ ID NO: 93757 - DNA, 324 bp, Enterobacter aerogenes
ttggattatatcgcgccgcagttgtactggccgttcgcccgcgacgccgcgcgctatgatgtgctggctaagtggtgggccgatgtcgtgaaacccactcacacccggctctatatcggcgtggcgctgtataaagtcggcgaaccgtcaaaaaatgaaccagactggatggtcgacggcggcgtgccggagctgaaaaaacagatcgacctcaatgaaaccacaccgggtattcaggggacgattctgtttcgtgaaaacaaccttaaccagccgcaaacccagcaggcggttcagtatctgcagcagcgctggggtagctaa

SEQ ID NO: 93758 - DNA, 978 bp, Enterobacter aerogenes
atgcaaaaccattctgttagccatattctcggtattgaaaaacctgtcattcaggggccgctatcctggctaaccgacgcccggttagtcgccgcagtcagtaatgccggcgggctgggcgtattagggccgaacgcaggtttaaccgcacaaaccgctgtctcgacgccgcaggaaacggcagaaaagatgcgtgaagagatccgtaaaacgaaacgactcaccgagaaacctttcgctgtaaatctcattccgacggttgaaaacgatatctggacgccgccgattgtagaggcagtcaaggaagagggggttaaagcggtggtttataccggctatggtcaaggagctatcattccctcgctgtttgccacgcttaagcaggccgggatcagcattatttatcgtgatattaacccgacgccggaaaacagccgcgaggccgaggagatgggcgctgatgttattgtcgccaccggcttcgacgaaggcggaacgcttccgggaacggcgctagggacgttttccatcgtgccattgattgttgatgcggtgaagcgtgtgccggtgctggcggctggcgggattaccgaccggcgcaccgccagggccgcccacgcgctgggcgcgcagggggtatttgccggctccgtgtttatcagcaccaccgagagccgcgtgccgccatcggtgaaagagatgatcgtgcaagctaacggtctggatttgcagctatttcgcacattgccagattactatcgttcgctgccgggtaaattagccgccaggctggtggcgttagataaatccggcgccagtaatgaaaccatagccgcggaaatgggcggtttacgcggcctgcgaattggtatgctggagggcaacactgacgaaggctacatttcactgggaaccggcatcggcagtattcagcggatcaagagcgtagcggaagtggtggaggaactgacggtttaa

SEQ ID NO: 93759 - DNA, 1761 bp, Enterobacter aerogenes; identical to SEQ ID NO: 92009

SEQ ID NO: 93760 - DNA, 2073 bp, Enterobacter aerogenes
atgctcggcaaaaacatgacggtggcggttcccggccaatggggacaggagcgttatctttccggcaaaatcaccgccgttaccgtacgcgccgaagatcttggcgagacgcgctacgccgtctatcagaccacgctggaacccgatttctggccgatgatgcgcgaccgcaacttccgtattttccagcagcagcgggtgccggatatcgtggccaaactgtttagcgagcataacgttaagtttgaggacaaacttacgcgtagctaccggcagtgggattattgtgtacagtacgcggaaagcagcttccatttcatcagccgtttgctggagctggaaggtattagctatctgttccgccacgataaagacggccataccctggtgctgatggatgactatcagcagactgaatccttccccggttatgaaactattccctggcatgcgcaaccgggcggcggcgcggtcggcgaagagggcatcagccagctgatggcgagccacgtcgtcacgccggggctttacagcaccgatgactatgattttcgcaagccccacgcctggatgctgcaaacgctgcagaatccggtctcgccgacaccgggcaaaatcgacgtttacgactggccggggcgctttatggagcacggcgacggcgaagcctacgcccgtattcgtcagcagtcctggcaggccgaacagcagcaaacgcagggtatcgccaccgcgaccggtatcgtcccgggacacacgtttaccctgacgcatgcgcctaacatggctgataacgctaaatggctggtggtgggcgcccgctatgattttgaagagaatcagtatgcctccggtggcggaaataccgcgcagcaccgcatcgcattcaccgttattcccgccgcgacgccatttgtccctgcgtcaaggaccgactggccgcgcacctacgggccgcaaaccgcccgcgtggtagggccgaaaggagaatcgatctggaccgataaatatggccggattaaggtgaaattccactgggaccgcgaaagccagggcgatgaaaatagctcctgttgggtgcgcgtttccagcgcctgggccggccagggttacggcggggtgcagatcccacgcgtcggtgatgaagtggtggtggactttattaacggtgagccggaccggccgattgtcattggccgcgtctataacgaagccagtatgccgccgtgggcgctaccggcggcagccacgcagatgggttttatgagccgttcaaaggatggttcgccggacaacgccaacgccctgcgttttgaagataaacccggcgaagagcagctctggctgcacgccgagcgcaacatggatactgaagtcgaaaacgacgagacccatgatgtcggcaataaccgcaccaaaaccgtcggcaaagacgaaaccagccatatcaaacagaaccgcacccgcacggtggatggcaatgaaagcgttaccgtcggcaaagatcgcagcaaaaccatcaatggtaatgaaaccaccaccgttgagcagaaccgtaccgaaagcgtgaaggggaatgagaccctaagcgttgagcagaaccgcgatgaaaccatcagcggcaaccataccaccacggtgaaaagcgaccataccgcgaccgtcgaaggcaagcagtcactgacggtcgtacaggatcgcacccgtcaggtgcagggtaacgaaagcgtcagcgtccagcagaaccgtaacgtgcaggtcaccggcaaccagacgctaggagtgaccggcaatcacgatatttccgtgaccggtaagcaaacgcagaccatcaccagtaagcaagaggtgacgatcggcgccgggcgtaccctgagcatcaccggcggtgatacccgctttacgcaagggagcgtaaccgacagcgctaccgataccgtacatatcaacgtgggcgaaagcggcattctgataagcaacggcagcgtggagattaccgctggcgggtcgacgatcaccattaacgccgccggcgtgatggtgaatggtaagaagattgagctcaatgcctga

SEQ ID NO: 93761 - DNA, 171 bp, Enterobacter aerogenes
atgagtacaacaacaaagttatcggcaagctatgtggtcatcggcgtaaaagaaaagataggctatggcttaggcgatttcgcctctaatttatcgttcggttttgtctcgttattcttactgttttttatactaatgtttatggcatcagcgcggtacaggcgagtctga

SEQ ID NO: 93762 - DNA, 1311 bp, Enterobacter aerogenes
atgacaaccttttacacggtcgtaaactggctggtcattctggggtactggctgctgattgccggcgttacattacgtattttaatgaaacgccgtgcggtgccgtccgccatggcatggttgctaattatatatatcctgccgctggtgggaattatcgcctatctttcctttggagaattgcatcttggcaaacggcgcgccgagcgcgcgcgcgccatgtggccctctaccgccaaatggctaacggacctgaaaagctgcaagcatatctttgcgcaagaaaatagcccggttgccgaatcgctgttcaaactctgtgaacgtcgccaggggatcgccggcgttaagggtaaccaactgcagttgctaaccgaatccgatgacgtgatgcaggcgctgattcgcgatattcagctctcacgacacaatattgagatggtgttctatatctggcagcccggcggaatggccgatcaggtcgccgagtcgctgatggccgccgcgcgccgcggcgtgcattgtcggctaatgcttgattcagccggcagcgtcgccttcttccgcagcccgtgggcggctatgatgcgtaacgctggtatcgaggtggttgaagcgcttaaagttaatctgatgcgcgtgttcttacgccgcatggatctacgtcagcatcgtaaaatggtgatgatcgacaactatatcgcctacaccggcagtatgaatatggtcgatccgcgctacttcaaacaagattccggcgtcggtcagtgggtcgatctgatggcgcgaatggaaggcccggtggctacggcaatggggattgtctactcctgcgactgggaaattgaaaccggcaagcgaattttacccccgccgccggacgtcaatatcatgccgtttgaagaggctaacgggcataccattcatactattgcttccggccccggcttcccggaagatttgattcatcaggcgttgttaactgcggcttatgcggcgaaagaacatctgatcatgaccaccccctacttcgtccccagtgatgatctgctgcacgccatctgtaccgcagcccagcgcggcgtcgaggtcagtattattatgccgcgcaaaaacgactccctgctggtaggctgggccagccgcgccttcttcactgaactgcttgccgctggcgtgaaaatttaccaattcgaaggcggtctgctacataccaaaagcgtgctggtggatgcaaaactgtgggccaaacgtccgctatggcagcggatcgcagagcgactgttttacttcttcagcccgttgctgtaa

SEQ ID NO: 93763 - DNA, 1947 bp, Enterobacter aerogenes
atgacggcgctgcttgaactgcgtgatattcgccgcagttacccctctggcgacggtgaagttgacgtgctgaaggggataaccctcagtattgccgccggggaaatggtggcgatcgtcggggcttcagggtccgggaaatcgacgctgatgaacatccttggctgccttgataagcccaccagcggcacctatcaggttgccggggtcgatgtggtgcatctgagcggagatgaactggccaggctgcgccgcgagcacttcggctttattttccagcgttaccatctgttatcgcacctcacggcggcgcaaaacgtcgaggtccctgctatctatgccggtaaagagcgccggattcgtcttgaacgggcgcgagatttactcacccgattaggtctgggcgagcgagcggaatacttcccgtcgcagctctccggcggccagcagcagcgcgtgagtatcgcgcgcgccctgatgaacggcggtgaggtgatcctcgccgatgaaccgaccggggcgctggatagccgctcaggcgaagaggttatggccatcctgcatcagctaaaggcgcaggggcatacggtgattatcgtcacccacgacccgcaggtcgcggctcaggcggagagaatcatcgagctgcgcgacggtgaaattgtgcgtaacccgccgccgtcatcgccggagaaaggcggcgtgcttcgcgccgaatcccgtgcggagccttccgtctggcgtcagttcagtagcggttttcgcgaggcgctggtgatggcctggcgggcgatggcggcgaataaaatgcgtacgctgcttactatgctcggcatcattattggtatcgcttcggtggtctctattgtggtggttggcgatgcggcgaaacaactggtcttagccgatattcgcgctatcggcaccaataccatcgacgtttaccccggcaaagattttggcgatgacgatccgcgttatcagcaggcgttaaaatatgatgatctgctggcaattcaaaaacagccgtgggtgagctctgcgacgccggcggtatcgaaaagcctgcgcctgcgcgccaataatatcgatgtggccgccagcgccgaaggcgttggcgcgcaatatttcaatgtttacggtatgacgttcagcgagggaaatacgttcaatgagctgcagctgaatagccgggcgcaggtggtggtgctggatagcaatgcccgccgccagctatttcctcacaaggcgaaagtggttggcgaggtgattttggtcggtaatatgccggcgacgattgtcggcgtggccgatgagaagcaatcgatgttcggcagcagcaaaattcttcgcgtctggctaccttactccacgatggccggacgggtgatggggcaatcgtggctaaactcgataaccgtccgcgtgcaggagggctacgatagcgccaccgctgaacagcagctggtgcgattgcttgagctccgccatggcaaaaaagatgttttcacctggaatatggacagtgtcttgaaaacggcggaaaggaccacacatactttacagctgttcctgaccctggtggcggtgatcgcgctggtcgtcggcggaatcggggtgatgaatatcatgctggtgtcagtgacggaacgtacccgtgaaatcggcatcagaatggcggttggcgcccgggccagggatgttctgcagcagtttcttattgaagcggtgctggtttgtctggtgggcggcgccatcggcgtgagtttatcgttgatgattgcgttcattttgcaactgttcttacccggttgggaaatcggtttttcgccgctggcgctattgaccgcatttttatgttcgacgttgaccggggtgctgtttggctggttgccggcgcgtaatgccgcgcgattagaccctgtggatgcgttggcacgagagtaa

SEQ ID NO: 93764 - DNA, 753 bp, Enterobacter aerogenes
atgagctatttattcacccgtctgtctttcgatgtgccattcgataacccaacctatgttgatgaaagctcagtgcgccgcctcattaatccggaatttaatccggaggctggttttgtaaactggatgtttggtggaagtgctgacagcctcacttcactgtctggtggccatgtgatgacgccttcggctggtgctttaccaacctataaaaactcatcactggttcttcctgcggtagcgacaggttttaacggcctcagcactgaatataatgactcaaacagcatgacacttactgcagtgattcaatattccggagagccttcacaaattctgttaggagtgaacacaggtactcagggtgagtgcatttatatgagcggggcaagtgtgatgcttcatcttgtgcgcaatgcgcagggggcatcagtgactactgaaattcctgtaccggctggacttacagctgggcagtatattttcctcgcgtttagcagaaacggaaacaacctgatttcaatggtaggcggtgcatccacgcaagtgaacctgacggattcagttaaaaccccggcaacagcggcaaaagttggtcccggaaacacggcatacaacaccaatggtttttcaaaacagttggaggtggtcgagtgtctgtatcgggatgccccgacaacgcttgcagatcttcagacaacctatgctaatgccaaaacccgctgcgcactccgcggcatttctcttctctaa

SEQ ID NO: 93765 - DNA, 1401 bp, Enterobacter aerogenes
atgacttctactctgacatccagaccaaccctgaatccggttcttagagatttttggacgactcaggcgcgaaacaaagtgctttttggtgggcgttcatcttctaagtcatgggatgcagcgggaatagctatattcctctccaacaaatataaccttcgtttctgctgtgctcgccagatccagaacaaaattgaggaatcggtatacaccctgctgaaaattcagatagaccggtttggtctacggcatcgcttccgtattctgaataacaaaattattaaccgggtgactggttctgaatttgtcttttacggcctatggcgaaatatcgaagagattaaatctctggaaggtatcagcgttctgtggctagaagaagctcatgcgctgacggagtaccagtggaagatactggagccgacgatccgtaaagaaggttcggagtgctggtttatctttaaccctggtttggtaactgattttgtatggcgtaactttgtggtggatcctcccgaagatacgctaatccgcaaaatcaactacgacgaaaaccctttcctgtcagatacgatgctgaaggttatcgaagccgccaggcgacgtgatcccgatggtttcaagcatgtttacgagggcgtgccggaatcagacgatgatgcagcaattattaaattgtcgtggattgaagcggcggttgatgcgcataaggttcttaatttcgaacctagcgggcgtaagcgcattgggttcgacgtagcagacagcggcgcggataaatgcgctaacgtctaccgtcacggctctgtcgtctactgggctgatgaatggaaggccaaggaagacgaattactcaagagttgccagagaacatatcaggcagctatggagcgagaagcggatatcgtatacgactcgataggcgtaggtgcttccgctggcgctaagttctcggaaattaacgagggtagacgccgggaaaatacagatgcccgtagagttaactatcagcgctttaatgctggcgcaggagttaacgagcccgatgacgactataacgatatccccaataaggattttttcgccaaccttaaagctcaggcatggtggttggtagctgaccgtttccgcaataccttcaatgcagttaaaaatggcgaacagtacgcggtagatgaattgattagcattgattcttcatgccccttgctggagaaactcaagctggagctaacaactccacaccgagatttcgataagaacggtcgcgttatggtagagagcaaaaaagacctggcgaagcgtgatgttccatcgccgaacgtcgctgacgctttcattatggcctttgcccctacagagtctgctttggatatctgggacgcgttaggccgaaattag

SEQ ID NO: 93766 - DNA, 762 bp, Enterobacter aerogenes
atgtcaaaaccggactgggaggccatcgaatcggcataccgggccggagttcttagcctccgtgaaataggtgctcaatacggtgttacagagggggcaatcaggaagagagccaagaaactggaatgggtacgcaagggaggtacgcaggtacgcaaatccggtacgcaaaaaagtaaggcgcgtaccactgaaaagcccgcgtcgtctggagcttcgaaaaagaacgcagaagaaaaaggcgagcctctcacagatacgaaaccgattcgtggttcgcgtaccgcccctcctgttaatccgtttcaacctggtaaccagcacgctctgaagcacggtggttatgccaggcggctattactgaaagatgaagttatagaagatgccagggcgttgactcttgaggatgaactttttcgtcttcgcgccaataacctggtggcggcagagaacatcgggcgttggataacactgctggaagatgcaggggaagatcaagccagaaagatactgatggaaaatatcagtgccgcagaaaaggccatgatgcgcaatacagtgcgtattgagtccatcgtaggaacactggcgacagttaacaaaatatttgctgatactgattaccgcatagctgcaacagataaggtctctctggaagcggatcgccttcgccgtgatgctggtattgatgatggcaatggagagcgagatctgaatgacttctactctgacatccagaccaaccctgaatccggttcttag

SEQ ID NO: 93767 - DNA, 258 bp, Enterobacter aerogenes
atgagcctactgaagaaaattaaagacgtcgtgtctcctcccgttccggaagagtgccaagaagagagttatgattcggtgctgaaaaatcttgataccctgtccaaagaatcatctgagctgaaagccttgatggctgagttgggtgaaggaaagataactcaggagcagtgcattgccactggtgtagcgattgtcaccaaagaattactcgaattccgctacgtccaaaacaagattgattctcaggcctggtaa

SEQ ID NO: 93768 - DNA, 468 bp, Enterobacter aerogenes
atgagtcgtatcacagccattataagcgcagtgattatctgccttatcgtctgccttggatggttggcgaaccactactacaccaacgcaaccgaattcaaacggcagcgtgatgaaaaggttaaggtgctggaactggcgaacgccaccatcaccgatatgcagacccggcagcgagacgttgccgcattggatgctaaatacacgaaggagttagccgatgcaaaagctgaaaatgatgctctgcagcgcaagcttgataatggtggccgggtgctcgtcaaaggcaagtgtccagtgtcaaccacaacccaaacctccggctccgccagcatgggcgatgatgacaccgtcgaactctcttcagttgctggacgaaacgttctcggtatccgatccggtattaagcgagatcaatcagcactgaaagtgctgcaggaatacatcacaacgcagtgtttgcagtaa

SEQ ID NO: 93769 - DNA, 675 bp, Enterobacter aerogenes
atgtctgatgaaattgaaactatagataaaaatccaaaatcatgggctgcatggaaacgggaagcggagagactacaagggattatcgacggcatggcgctggccgcaatggacagcgagccggtggcttacaccgagaagcacgaaatttcgaacatgcatgcgacagggctttatcttcgtgcgtggcccgctgaccgggcgcggaatgctgtcgaaggttacacaatcccgctctatccccacgcgcagccagcgccggtagtgccggaagatgtgctggacgcattacagaaggttgctcgtatacgcctcgaactgaatgacttcgacggcgatcgccgtggtattgctgattgtctttgggaggccgaggaggcgttgcttgaggtggtaaaacagcgcgccgccatgctccaggctgaacctgtaacgacggctaacaagttgggcaactctccggtaattcctgatacatggattccggtaagcgagcggcttccagaggaaggtggtcgttactggtgctatgtggaagagcaaaatagcctgggtaaaagccactatcagtggaattgctcatggaatggcgaaatatggggaggcgctatgatgtatgggcgcgtcactcactggatgccgctgccagccgccccgcaggaggtgaaaccataa

SEQ ID NO: 93770 - DNA, 171 bp, Enterobacter aerogenes
atgcgcgactggagactggttttacgcgatatggagcgagaagaggagcgtaagcgctctatggtcaaaattattcctggtgaattacgcaatcaaaaatgcccgtgtggtagcggacggaaagctaaaaattgccagtgcgacatgttcaagggggcgaaaaatgtctga

SEQ ID NO: 93771 - DNA, 363 bp, Enterobacter aerogenes
atggcactgaccacaaaacagcgcgccgagctgcgcatgaagtttggcggccgctgcgcttactgcggatgtgagcttggcgataaatggcacgctgaccacgtccagcctgttatccggttcgatgggcagatgcttcatcaggagcgagacgacatcaacaacatggttcccgcatgtcatccatgcaatcttcacaagcactgcaatagcctggatgactatcgacgaattattgacgatgggcgcagagagttcctggtatccgggaaaggaaaggcgctggttcgcatggggctggttgaaatgaaacctgacccggtagtgttctggttcgaaaagtatcaaggggaggctgagtga

SEQ ID NO: 93772 - DNA, 324 bp, Enterobacter aerogenes
atgattgatatcaacaaactgttagccagcctcaaacgccgttcttcccacataaaagagtttggcgacgatattacgtttgtaaagcttgaagacctcgacgcgctggtagaggcgctggataaggcgcaggagacgattgcatttcagcaaggagaaattaaagcgcttttgtcgtcgttggagtcccgcaccgtcaccgtgaagctgccttcgcttaatcctgcaatgttcaacggagatgtgatgtttggctatcacaaagcgcagaaagaagctgtcgagttttgcgccgctgctggcatcaaggtggaggctgagtag

SEQ ID NO: 93773 - DNA, 480 bp, Enterobacter aerogenes
atgaaacacgaatcaggattaactctgaaccagttggcagagcgtaacgcgaatctggttactgaaattgagaaatgccgcgagctttcaggctgcccagctggcgtagacctgcaggactgggtgaagcagctggcggcggagaatgtggcgatgattcgcttgctgacagatatcagcgagaaccacgttgaatacttctccgaaggcgaaagcggaatgtttgccggtgttcctctggattatgtatccgaaatcaacatgtacgtttcccgtgacgttaatgcagaaaatccattccccgccaccgatcgcatctttgccgaagctgaggcgcgtggggttgagaaattcgctgatgaagttgaacgagaagctgatggttatgggatggacagccatgattggcgccgaatgatgaaggctcgtgctgatgctatcgagttttcccagcagctgcgcgagggggccgacaaatga

SEQ ID NO: 93774 - DNA, 789 bp, Enterobacter aerogenes
atggctaaaaactcaatagacgcatacggcgccagcggaaaaagcaatgttctttttttcgaaccggaaagtttgcatctggttaccgataagacgcatccgctttacgacgagcggatccatctgccaatcaatgagccgatggtactgaacatcatggaccagggcgttcttgagccgatcatcgtctggaaagatccggagacagggcgctcctgtgttgttgatggtcgccagcgtgtgcgtcacaccatcgaggcgaacaagcgtttagcgaaagaaggtaaacctttgctgatggttccggctgttactaaacgtggctctgccgttcgtatggcacaggcgatggtaagcgctaacgaaatccgccaggcagatacgccgctgggtcgcgctaaaaaaatggctgatgcgctggaacgtggacacgacgagcaagacctctctctgatgtttgggtgtagcgtccagaccgtacgcgcgacgctgtccctgctggacgctacccaggctgtaaaggatgccgttgaatccggaacggtcacagtaacccaggctcgtcagctcgcatcactggaaccagaagcgcagcgcgagaaggtgaaagagattgaaacggtaaccgcgggtaccactggtcatgaaaaagcccgtcggcagcgtcaggttcttggcgaggctaagccacgcctgaaaacccgtaaagaaattaacaaagccctggaatctgctgagggcgagtatgccagcgctctccgctgggtgcttggggaggaagtcgcatga

SEQ ID NO: 93775 - DNA, 291 bp, Enterobacter aerogenes
atgaaaacgacgaaatctcaaaaaacacaatatcgcggtgaaatcacgatgcttgagttcctcaaagttaaccccggcttgaccgccagggagatcgctaaagtgctggaccgcagcatgtgctccgtaagcggtcaacttcgccaactgcatagcgcaggccgtatcacccaggatggtatccgtgacggtgtcgctacctggatcatcaacgatatgccgtttggatgcgccaaccagcttcgaatgatgttcgacaacctgctgaaagaatgccgcgcgacggcctga

SEQ ID NO: 93776 - DNA, 270 bp, Enterobacter aerogenes
atgcttacaccatataaaaacattacggagaaagccgttagagcgattgggaatgtttcctatgtcgctcgcatgttcgactttaagtcgagtcagtcagtagcaaattggattaatcgaaattgcgtcccaagcgatcgcgttatccctctctgccgtatggggggctgggtagtcacgcctcatgaactccgcccagatctccatccaacaccacttagtgggcttacggaagaaattatcaccaagcgccagaaggagtctgattga

SEQ ID NO: 93777 - DNA, 450 bp, Enterobacter aerogenes
atggtagaaaaatcgaataagcatcaagacttcgcagaccgccttaaccaagagatgagtaaaaagaacttgtctgttaagcaattaagtcatgcgggacaggtcacctacgaaatggctaggcggtacacgctcggcacagcaaaaccacgcgatgaaaagctaattagaattgcggaatggttgaacgtgcctccagcctggctggactacggggcagtagaaaacgtagctgaatccaatatcgttccagaggcttcgaacccctcccatccagataaagccgacgaaacagaattcaccagcttaagcgatgaagagaaacgcctgattcgagtctttcgaaaattccctgatgccgaggcaaacaacatgcttctggcctttgagattcgctataagaagctcctggagttctacagcgaatacgcagaccccgacaaaaaataa

SEQ ID NO: 93778 - DNA, 1287 bp, Enterobacter aerogenes
atgaatatgcctgctggcgtagagctgcatggaaaagcaataagaattagctttctatatcgtggcgttcgttgccgcgaagttttacggggctggacagtatctaatagcaatatacgcaaagccggtaatcttcgtgcattaattgtaagtgaaattcaacagggaaaattcgattacgccgaacacttccctgaatcaaaagcgttaaaaaaattcacctccacgcaaaagattaagactttcggcgaattatgcgatgtttatctggcatccaaaaaactggaggtatcagcagcatcctacaagggggctcagtcacgtatagccaccctctccgcaatagttggaagtaataccctgcttagtgaaattcagcacacagatttacttaattacaggaatgcactcttaacgggtaatacattaagcgagcatgcgccgtggctgcaaaagaaaggacgcgcggtatctacggttaacgggttaatgaataatctgacagctttactgaagatggctaacctgagtggttttatcagtcatacgccacacgaaggcattaaatcacttaaaaggtccaggcgggatccggaccctcttctgcagagtgagtttgacggttttataaattcactttcccgcagacatgctttgctatggactgtagctatttttaccgggcttcgacatggagagctcactgcgcttgcgtgggaggatgtgaaccttgagacaggagagatctatgtccggcgaaaccagacaaacgaggggctattcgttccgcccaaaactgaagcggggatccgaactgttacccttctacaacctgcgctggatgcgttgagagaacaatttcagctaacaggtgcattaagtaaaactgaaatcaccttccatcaccgcgagcacgggctgaccgaacagcagaaactacgctttgtgtttgtgcctccaaaaaactggcgcggtgaaacaaggtactatggctctcaatctctgggttatagctgggaaagaggtttaaaacaggcgggaatacgcaacagacgtccttatcagtcgcgccatacttttgcgtgctggcttttaacggcaggagctaacccctcgtttattgccggacagatgggccacgaaaatgcgaagatggtttatgagatttactcgaagtggattggtgagatggatcgtaaccaggtggaaatgctgaacgcccgtttttctgaggcgttgccccaagggtgccccacaaagagagtggttgggataaaaagcgtttaa

SEQ ID NO: 93779 - DNA, 1515 bp, Enterobacter aerogenes; identical to SEQ ID NO: 92695

SEQ ID NO: 93780 - DNA, 582 bp, Enterobacter aerogenes
gtggtcaccctgctcgatacgctggaagccctcaccgaattccagcgcgccgggaaaattcgctatatcggcgtctctaacgaaaccgcctttggcgtcatgcgctatctgcacctggccgataagcacgacctgccgcgcatcgtcacgattcaaaacccgtacagcctgcttaaccgcagctacgaagtggggctggcggaagtgagccaatatgagggcgtagagctgctggcgtattcatgcctggcgttcggtacgctgaccggtaagtacctcaacggcgcgcagccggctggcgcacgcaatacgctattcagccgctttacccgctacagcggcgagcaggcgcagaaagcggtggccgcttatgtggacattgccaaacgccacaatctcgagccggcgcaaatggcgttggcctttgtgcgccgccagccgtttgtcgccagcaccctgctcggggccacgaccatggagcagctcaagaccaacgtcgaaagtttgcatcttgagctgagcgaagaggtgttagcggagattgaagcggtgcataaggtatatacctacccggcgccttaa

SEQ ID NO: 93781 - DNA, 1392 bp, Enterobacter aerogenes
atgcaaaagatttcacctaatactcaagcgattctgctactgacggcaccactgattgcaggacgtgggatgccgtcagctgagcttttaactccgggagaatacaagcgtcttgctcgtcatttgcgtgagattcaccgtcaaccagcagaccttttaaccccagacgctgatgagattttacgcgcttgtcaaacagtgattgatcagagtcgtatgcaacgtctattggctcgtggttttctattaagtcaggtgctggaacgctggcaagcgagagctatttgggttgtaagtcgtgcagatcctggatatccacgccgccttaaagctcggctgcgtgaagacgctccagcaatactttatggctgtggcgatattaggctacttgacgcaggtgggctagcagttgttggatcgcgcaatgtgagtgagccattaattgactataccatgtccattggacggttagccgcctgtgctggacgggccattgtgtctgggggggcaagaggcattgatcaagctgccatgcgtggtgcattggagtcaggcggaaagagtattggtgtgcttgctgaacaccttgaaaaggccgtaatgaatcgtgaagaaagaaatcgtttacgtgacggtaacctcacactagtttctgcctacgatccaaacgctggtttcaacattgggcatgctatgcagcgcaataagttgatttatgcattggcggatacatcgttggtggtgaattccgaccttaataaaggggggacatgggctggtgccattgaacaattggagacactaaggttcgtccctgtttttattcgatcgacgggcgaagcttccgaaggtttaaccggattacaaaaaaaaggcgcacttccttggcccaacccgcaaagcgttgaatccttcaaagacgtattcagtatagcgatgccaatgcctgcagcctctccacagttagatctttctctgtcgtcgaaagagggcacgttgttggctgacgtcaaaacagcagagcaagtctcatgcagaacggattcgcagaccgagattgagctgtcagaacctgctgacattcttcttgaagaacagccaacagctgaggcatcggaagaattatccccattaacaaaagagtctttagcatccacaaaggacattaaaaaatttgagcatgctgaagcaacgccggccgaggtgctcttcacagctgtacgcgcagcgatccagcaacttttgagcactccgatgaatgacgccgaagtagcggttgcgttgaatgtgtcgaacttacaggcaaaggcatggttacaacgtctgattgatgagggcgttttggagaagcagagtagacccttgcgttacgttgttaagaaaaaaggataa

SEQ ID NO: 93782 - DNA, 2079 bp, Enterobacter aerogenes
atggtctttgatccaaaacgcgcgttacaacttcttcaaatcggctccggacgcggggatgcaagttttcgtgatggccaagaagatgccatacgtcatattgtcgaaggcaagggtcgtttgctggtcgtgcaaaagactggttggggtaagagctttgtctactttatcgcgactaaaatattgcgagaaaatggaaatggccctgcgttattgatttctccgctgttggctctcatgcgaaaccagatagctgctgcacagcggatgggtgttcgtgccgcgacaataaactctgataatatggatgaatgggctgtaattgaaggtgaattggccaagggtaaaatcgatatactactgatctcacctgagcgtttggcgaatgagcgcttcagaacacaggttctgtccagtatcgcagcacaaatttcgatgctggtcattgatgaagcacattgcatttcagactggggccacgactttcggccacactatcgcctgcttgagagaatcgtcaaaactctcccgccaaacctgcggttgctcgccaccactgctacggcgaacaaccgagtgatggaagatcttgcttctgtcctaggtccgaatctccatgtttcacgtggagacttaaacaggacctccctctccctgcaaactatccgcttaccaagtcaggccgagcgtctagcttggctggcagaacagctaggtacgctaaaaggtaatggcatcatttatacgttgactgtacgtgatgctaatcaagtggcgcaatggttgaaagctcaaggctacaatgttgaagcctatacaggtgaaaccggtgctcagcgcgagcagttggaagaggcgttgctcaacaatgaagtcaaagctctggttgcaacaactgcattaggtatgggttatgacaaaccagatttggcgtttgttattcacttccagatgccgggctcggttgtcgcctactatcagcaagtggggcgtgcagggcgagcaatggagtccgcttatggtatcctcctaagtggtcaggaagagtcagatatcactgactggtttatccgtagcgccttcccgacacggcatgaggttagagacgtattggaagcgcttgaagacgagcccgaggggttatcagttcccgagttgttgaaccgtatcaatctcagtaaagggcgtgtagataagacgattgcacttctttctcttgagtcaccggcccccattgcaaaacatggcagtaaatggcagctcaccgttgcaacgctgagcgaatcgttctgggagcgggctgaacgcctcacagcgctccgtcaggaagagcatcaacagatgcagcattacgcaagcctacagtacggtgatcatatgggattcctaattggagctctagatggcgatccatctagtgttacagcacctaccttacccccactgccctcaaccgttaatgaagcactggtcaaagcagccatagaatttctttgtcgcactagcttgcctattgaaccccgcaagaagtggcctgatggcggaatgcctaagtatgacgttagaggagtcatcgctcctgcatatcgagctaattcgggtaaagcactttgtgtatggggggatgctggttggggacgtattgtaagagaaaatcgctataaagatggatatttttctgaacaattggttcaggcatgtgctgagatgtttcatcaatgggggcccacaccagcccctgaatgggtcacagctatcccatctttgaagcatccagatattgttccgaattttgctaaaagacttgccgctgccgtagggctaccttttcatcaagtgcttgtaaaaactgaagataggccagagcaaaagactatggcgaactcatctcagcaggcacgtaaccttgatggctctcttgcattagccaatgagcctattcctagtggaccagtgttacttgttgatgacattgttaattctcgatggacgctaacagtggcagcatggctcctccgaaaggctgggagcggtgaggtttggccaatagctctttcacaaactgggcacgaggactga

SEQ ID NO: 93783 - DNA, 1806 bp, Enterobacter aerogenes
atgtggggccaaatgaagttatctagactctattctaacaagcctgacttgttcgatcccgtggagtttgtccaaggcatgaatgtcgttatggctgaaatccgcttgccggagaacagaagtaaggacacgcataatctcggcaagactacgctagggcgcttgctcgactttggtttcttagccaaacgtgaccctaagttctttcttttcaagcactccgatttgttcaaagaatttatattcttccttgagattgagttggaagatgcatcgttcgtaacgattcggcgtagtgttaaagaagccactaaaattagttttaagcgtcatcaagcaggccatcaagacttgtcggggttagcactgactgagtgggatcatgtgaacatgcctttcgagcgtgcacgtgagttgttggatggggtattggattggcgagcaatcaaaccttgggcatatcgcaaaggcttaggatatctactacgctcgcaggacgatttccgagatgtattccatctacgcaaatttgcggcagcacattcagattggaagcctttcttggctcacgtccttgtttttgacgctcaactcatcgttgaacattatgaaaaagaagagcaactctccaagaaacaagccattgcacagactatcaaaaatgaattgggtggctctattgaggatatcagcaagatcgagggcattctgttacttaagcagaaagaggctgagaaaaagcagacattgcttgatgcctttgatttccgtactcaggataaggatagtactaagcagttggtcgatgacatcgacgtaaaaattgcgtctttaaatgctgaacgttactcatacaatcagaccaaaaagaaaataatatcctcgttggaagaagatcagattctctttaatcccgatgaggcgcagcgtctatttgaggaggctggagtcctgtttaaaggacagattaaaaaggatttccaacagctaatcgacttcaatcgggctattacagatgagcgtcgtggctatctgcaggaagagcgggaagaagtcgaagctgagctaaaacgcatcaatgcagaattgaatttcctaggaaaaaaacgctcggagatgctttcatttctaagtgaaactgacatttttggtaaatataaacaagtctcggacgagatggtgattttgcgtgctgatattacgtcgttagagcgtcagcgaggcttcttacatcgtttgcaggaacttcgaaaagaaattagggctttgacagaagagcgtggaaatctacaggcccagattgaagctaatgtcgagaagcaaaactctgatcaggacagcttattttctgcaataagagtgttctttaacgaaatagttgaagaggtcattgatcgcaaagctctgctgagcgtatcgcccaatcaactaggacatctagagtttaaggcagaaatacttgacgagtcaggtaatgctactagtgccgatcttgggcatacataccgcaaactgctttgtattgccttcgatttggctgtattgcgtgctcacttggacgaaaaatatcctcgttttgtttatcatgatggtgtgtttgagtctttggatgatcgtaagaaagaaaaccttttggctatcattcgtcgttatgcggagttggggctacagccaatcattactcttatagattcggacatgcctgtgcgtgctggtgatcagccagtattttcgtctgatgagattgtgattacgttacacgatgagggagagaaaggtcgaatcttcaaaatgagggcttggtaa

SEQ ID NO: 93784 - DNA, 249 bp, Enterobacter aerogenes
atgctacggccaacgaagcactctcatcctgatcgaacagtcatcaatgtctcactgttactattggctcgcttgaaaactcggcgtattgatgattatgacgctctacgtaaatttgcgaaaaaaagcgttatcggtggagaggtgctgttcttacctgctcttaattttctttatctcatgggattgattgagtatcgccccaaaaccgatgctctagaatatgtggggccaaatgaagttatctag

SEQ ID NO: 93785 - DNA, 981 bp, Enterobacter aerogenes
atgaaatttgcatacgaagatctaagcgatggtcagttcgagaccttgatcgttcttctgtgccagcggttgcttggagccgccgtacagggatttgcaaagggccctgatggtgggcgcgatgccaagtttatgggaacagctgaactgcacccaagtaagaacgcgccatgggtaggtacaaccatagttcaggcaaagcacaccaatgggtataaccgaaatttctccgaatctgacttcttcagtgttacgtctgcgaacaccgtgctgggtaaagaaattcctcgtataaaaaaacttcgtgatgccaagcagttagatcattacatgctattcgctaatcgtcgcctatctggtaatgctgaaacggagatacgtgattacctctcgtctcaatgtaacatttccagttcatcactttatctttgtgggctagaacaactggagatctggcttaagcgtttccccgatgtagcgagggaagcagaccttgatccagttgattcgccgctgattgttagtcccgatgacttgtctgatgttgtacaggctctggctcaaaataaagagagcttggtcgaaatgcttgatgatccgccgactgcgcgagtgacatacgagcaaaaaaatacactcaacaatatgagtgttgagtatgccagggcacagcggaagagatacttgaaggaaacggctcaaattcgggctttcttggctgctccggaaaacctcgaattattacgtatgtacgagtcggtagtcgatgagttccaactcaagatcattgcaaagcgtaaggactatcaaacttttgatgaggtaatggaatatctggttgacatgttgttcagccgtgatcctatcttgcggcagcacgctcacaagcgcttgacgcgtgctgtactgttttacatgtactggaattgtgatattggggaggtagacgatgctacggccaacgaagcactctcatcctga

SEQ ID NO: 93786 - DNA, 435 bp, Enterobacter aerogenes
atgtctaggactccctatacacggttacgcattgagggcttccgcaatgcagaggcttccctgagacttgaaggaatggaccccagtggtacgccactgtacgagtccgttaaggcacgtattatttcaggcgagctgacgtatgagcaggggcgttcagagattcttgcatactacacaaaagcagataccgccgggcctgtgacagtgggagaaattctgacagaagaatttttgaaaccgctgaacatgtctaatgatgaactggcggaagctatgggtagctgcaagcagtatattgacgatattctctgcggcttgcgtcgtcttacaaatgaagatgctcgcattcttgctgccatatttgggactgatgaagacttttggagtaacctgcaggagatgcaagttcaccgagagcaacagcataagtaa

SEQ ID NO: 93787 - DNA, 1392 bp, Enterobacter aerogenes
atgaaaatagtaagtaagctcacctttttaggtatcatacttttcttttctattaatgcctatgctggtcaattagatagtagcgggctacttgatactttattagataagtttcaacaagtagccagtacatggacagcagtaattgctgactatgcaaattggctcttctgggggctggtattaataagtatggtttggacatttggtatgatggcgatgcaaggggaagggttgacaggggtacttgctgaaatagttcgcttttttgccgtcattggttttttttattatcttttaatcaacggtccatccatatcgcaatccataattaattcaatgagacaacttgcagcaaacgctttagaaataagtattggtatttctccctcaagcatagttgatatggcgtttgcgatattaaccaagatcagttcagccgcatcaatttggtcgccaatgatatccaccattatgataacagtcgcgataatcgttttggtagtgatgtcccttatagcgataaatatgctaatcatgttggtttctgcatgggtgttatgttatgcaggagttatattgcttgggtttggtggttcgaaatggacctctgatatagcaattaattacttacgaactgttttatcgattggcattcaattattcacgatgacattaattattgggattggacaatcatttatagatcaatatttttctcttattaaagatgatgttcctgatcttaatagtcttatagttttgcttctggcgtcaattatcctgttagtattaactaataagctaccactgttgttatcaggtgttgtaggaggggcttctttacaagggattggtggatttggggcgggtatgattaccggcgcagccgctactgccatcagcggtgctggagcaatggcaatgggggcatcagctcaagtcagcggcggagcttcagcattaaaggcagcattcgagtctgcgcaagctgccatggccgaagaatctggttcaggcagcggaggcggttccggtggaggatttggcggcggggaagataccggttctgtagatacttctggaggccaaacctcaggcggttacagtggttcgtctgcagggagcagttcaggtagcgccagtggaggaagtcaggggtttgcttcattctcgcgtgctggccgcatggcaagccatatgggaagcagcatggctaacggagctgctgagtaccagagaatgaagcgaagtagcagttcttctcgtgcccaacaaactattggagaggagttggcgactcagataagtaaacaaacagctactcgtcgggataaccgcgaacatgatgattttgccggtgatagcttatcgggtaataataaatcttga

SEQ ID NO: 93788 - DNA, 174 bp, Enterobacter aerogenes
atgaaagataattttttgattgtatttattctgatcagtttattggccatatgttcttgcgataaaaatgataaagattgtttatcgatgccagataataaatttgatgaacataaatacgataaatgtgctctacggagtaataataaaccaagccctaaacgagaatggtaa

SEQ ID NO: 93789 - DNA, 795 bp, Enterobacter aerogenes
atgaatttaaagttccgagtggtttcatcacaaagagggattttagccgctaaaaaagctttaatagttcctttcgtggcgtccgtcatggcattaccggtgaaggccggaattcccgttattgatggcactaatgtggttcagaccacaatcagcgcagttaacaacgttcaggctgtgactaaacaaatccagcagtaccagacgcagctgcagcagtatgaaaacatgctgcagaacaccgtagctcctgcggcctatatctgggaccaggcaaattcaacaattaataaattgttgcaggtgcaggatacccttaattactacaagaatcaggccgggagtctcgatgcgtacctgaaacgctatcaggatgttaactactacaggacatcgtcttgctttaacagcaatgttgaatgtaccgcgtctgaaattagtgcactgcgtgaagctgaacagaatagctcaggggcgcgtaaaaaggccaatgacgcagtatttaaggtaattgacgagcagcagaacaccctgcagagcgatgctgataatcttgccgaattacaaactcaggcaagcggcgcacaagggcaaatggaagctattcaggcggcaaaccagcttgccagtgcacagacaaatcagttactgcaaatccgctcacttctggtagcccaacaaaacgctgcagcaacactggcacaggctcaggcagataaagaatcacaacagatagccgctgatgaaaaagcgttagctggagagaatacaccaagcccgaagcgaatttggtga

SEQ ID NO: 93790 - DNA, 762 bp, Enterobacter aerogenes
atgataactggtaataaagttacacctactagcacagctctgcaggctagagtcattctgtaccaaccaagtcaacgtcccttggcgctgaaggggcagtggatggagactagttttggtcgttgtcgagttaccggaagactaggacaacgtcatgcggatattgtggaaacaatgctctatgtggccgagaaacgtcgagaaatttctgatggaggaatcgagttattagtagatccagcgaaagtacgccgaactctatccgatgcacaatacagttatgatcgaattaaaaaactactcgttgatctacgtgtggcaactgttgaaatagtaacgccagatttagaaaaaaacggttattgcattctaggcggtttaattgaccatgtcgtaccctcaccaatgactaggcgtaatcctctaactggtggtgaacgtaacctatggagagtacgcttgggtgttgcattggtaatgttgttgaagcgagatttgcattttcatcatgatccaggtcctattgctcgtctccagcatggtattagccaagcagttgcacgtcatatattaacacataagcacgatcctaaaggcggctggcatattgatacattaattttagctgtcagtggtgaaggtaccaataatatgacattacgtaactatcggcggagattaaaagaagatagcaaacaatttctagcgattggcattgagatacaaaattctaggataaaacgagctacaacggcccggtaa

SEQ ID NO: 93791 - DNA, 858 bp, Enterobacter aerogenes
atgtcattgaacataatggaagcatttgaagctaagccgcaaccaattgattacgtcttgcctaatttggctattggtactatcggagcgattgtttctccgggaggcgttggaaagtcaatgctggcattgcaactggctgtgcagattacttgtggtgtagatcttttaaactttggtgaatatccaacggggttagtggcatatttacctgtggaggactctgcaaccatcattcaccatcgtctatatgctttgggaaaatatctaacagcacgtcagcagcagattgttgctgataagctacttgtcgaacctttggtagggaagtgtccaaatattttctcgccaggttggagcaacttgattaatgagatttcaaaaagtagacggttaataattttggatactcttcgccgtttccaccaggaagatgaaaataatagcggagcaatgtccaaagtcattggaaagctagaaggtattgctgctgatacagggtgttcgattatatttctacaccattcaaacaaaggctctgccacgatgggagttggtgatatacagcaggcaagcaggggtagtagcgtcctggttgataatatacggtggcaatcttatctggcgggcatgaccgccttagaagcgaagacgtatgatatttctgatgatgttcgaggtcaatttgttagatttggaataaataaagcaaattatggagaacgtacgccagaacgttggttacagagacatgaggggggagtattaaggataacgcaactcaaatcgaagaataaaaaacaaatagcaaaagaatgtatgtcttcattgagtggtgcagaaaatgataactggtaa

SEQ ID NO: 93792 - DNA, 231 bp, Enterobacter aerogenes
atgcaaacaaaggcacatagcacgctcattaacagaaaaacacttctggaaatgatcccattgtcagcccgcactatttataaccttgaacagcgaggcgagtttcctcgccgtatagcacttacgagccgaaatgttgcatggcagttatccgaagtggaacagtggattgcggatcgtaaatcagcaatgtttaaagcagccagacccggtattgttttaggtaggtaa

SEQ ID NO: 93793 - DNA, 972 bp, Enterobacter aerogenes
atggttgacatgaaaattactatctgggaaggctgtgacctcacagttgcagctgcaattaaattatttgtagagcgtagttctccgtactccatattttcacggaggtatccaatactgcgtctcatacaggaagttattgatccagcagtagctgattatgtaaattccctgccaccaagtcataaagactacatttctggagtaaatctaggatttagtgaagtacttaaaaaattgggtttaaacgtcgtagtacaggcacaaagacttcttttgcgtaatttcgttctgactttagatcaacaaacttctcttgataaatgctttaccgctacgattgagtctcttattgaattagtcagtgaatgcgcatccaagcggccgaagaaatcctctcctgcaaaaggagtaactataaattcacagcgtaagctcggttattgcgagttctgcggtaatctaaccgaattttccaagttgatcagtgagatatcagaatttgttgctaacgataatgagttccccgttcatgaaaaacaggtccttagtcatcgatattgttctgaccataggcccaaactcaccaatggtctatggaatcccaaatacagacaaggaaagcggtctctcgaacagttcaataaagaattaataaggcttagacggcaatgcgctaaacctcataaagctaacgcaaacacaggggatatattgattgatacatattttcatgagtggatgcagggtcaaactttaaccccagcagatctagataaacttaggaatatcgccagacgaatggttgactccaaattcactgatactaagaaaaaaataatcatattaaaacaccaaggttttaaccagtttgaaaccgcacaggttttagaaaaaaatcactacacaactatgacaaagcaggctgtgtccaaggccttagcgtctgtgaggaaagaattttatatttaa

SEQ ID NO: 93794 - DNA, 630 bp, Enterobacter aerogenes
gtgcctgagttgtctgtaattatacaatggatgaatcaataccctaagaccggctggctattgctgtgtatctatattgcactcggtgtagttcgtcacagagtaattaatgctgaatctggaagtgtatttcgtggactactcaatcttaggaagcgccggctagagcaaatgctgacacagccatatttgaataaaaatgcggtccgtctggcaaagcgtgagcttcgtcagcgcagcctttatcggctcacaggcttgtataattatcggctgcaggatttggctgtaataatgtgtgatcgttatgggttgcgggctggttatctcaagccgtggcgtaactggctcgaagaacgggatggacggattgtgttcaacaggaaatggcattgttttcgctggcgtctttttctggtaggtcagattgtaaacacagttctactaatattattcattatgtatatagtttctcattcttcggccgaaatgatcgcaccgcttatgttactcttcatgcttgtatggtggtttccttggctaatgatcacctcggtacctacccctaggtggactcgcgaaatggaagtctatcttgagaaatttaacgctgaacagaccatggtttaa

SEQ ID NO: 93795 - DNA, 1191 bp, Enterobacter aerogenes
atgttgactgacaccaggctgcgtcaccttaagccgaaggagaaactctataaagttaatgaccgtgatggtctgtatgttgcggtcactccggctggaactatttcatttcgttataactattcaataaacggaagacaggagactgttatttttggccgctatggtgttggagggatcacgcttgcagaagcgcgtgaacggctcaatgaagccaaaaaaatggttgccagtggaatatcgcctgcgagggaaaaagccagagataaagcgcgtattaaagatgcggagacttttggtgcgtggactgagaaatggttacgcggttatcaaatggctgaatcgacgcgtgatatgcggcgttcggtatatcaaagggagttgaagtcaaaatttgcccagcagaaacttagtgagattacacatgaagacttacgcgcattaaccgataacattgtcgagagaggggcaccagcgacagctgtacacgccagagagattgtattgcaagtctatcgctgggctattgagcgcggtcagaaggtggagaatcctgctgatctggtacggcctgcaagcatagcgaaatttgagcctcgagacagggcattgacgccaattgaaattggtctgatgtatcggtacatggaacgggtaggaacgacgccatcaatcagagcagcggttaaacttttgctgttaacgatggtacgtaaaagtgagcttactaacgcaacctggaacgagatcaattttagtgaggcattatggacgataccaaaggaaaggatgaaacgacgtaatccacatttggtttttctttccagacaggcaatggatattatgattgctctcaaaacctttgccggtagctctgattttatccttccttcgcggtacgattccgatgcgccaatgagtagcgctactttaaaccgggttttgacactgacgtatcgcctggctcagaaagaaggggagttgttgcctaagtttggtccccatgacttacggcgtacagccagcaccttgctacatgaggccgggtacaatactgactggattgagaagagccttgcccatgaacaaaaaggggtacgagctgtttataacaaggcagaatatcgtgagcagagggctgagatgctacaagattgggcgaatatgattgatgaatggactagtaagtag

SEQ ID NO: 93796 - DNA, 1653 bp, Enterobacter aerogenes
atgcctcgtcgcgaagctaatccttatgtgccccacgactgggcgccgcatgaaaaaccggcgatgctcggctcgccgtcgacgccgattcacagtacgccaaaacgcgtcgcttacggcatcgtcgggctgctggtgtgcctgaccggcgcgctgggtaacgccgtcgttaccgccaacctgcagctgctgcagggcacttttgccgcctggtcgacggaaatcgcatggctgccggcggtctacgttatgactaacgtttccatcaacctgctgctggtgaaatttcgccaacagttcggcctgcgcgcctttaccgaaggcttcctggtactgtatgtactggtcactttcttccacctgttcgtcaacgacctcagctcggcaatgatggtgcgcgcggcgcacggcatggtggcagcggcgttgagttcactgggaatttactatcaggtgcaggcctggccggcgcgccaccgcctgaaggcgttgaccatcggtatcaccggatcgtcgctggcgatcccgctggcgcgtctgttctcgaccgaactgctgcagattgacgaatggcgcgggctctacttctttgagctcggcctggcgctggtgtcgctggcctgcgtcatcgcgctgaaactgccgccaagcgaccgcaaaaaggtgtttgagaagaaggactttattaccttcttcctgctggcgcccggtatggctttagtctgcgcggtcctgtcgctgggccgtctggactggtggtttgaggcgccgtggcttggctggtcgctggcgggagcggtggtgctgatcgtttcggctatcgccttcgagcataatcgcactaacccgctgcttaacaccaaatggctttccagcggcagtatccttcgtctgggactgattatgttgctgattcgcatcgtgctggcggaacagaataccggggtcatcggttggctgcagtacgtcggcttgcaaaacgagcagatgaccaacctggcatggtcgattttcgccggtatcgtctgcggtatcgtcgccagttgcctgacgcttaacccgcagcgcctctactggcccaccgcgaccgcgctggcgttgattatgattgcgtcattgcttgatagccagtccactgccctgacccgtccggaacagttgatgttcagccagtttttacttggcttcggcagtgccttcttcctcgcgccggccatgctggcgggaattggcggggtgattgccgaccagcggaatctggtcagcttctcggttctgtttggcatgagccaaaatatcggcggcctgctcggctcagctatcctcggtacttttcagacctggcgcgaaaaatttcattccagccagttggccgatcagataaccacgctgaacccgttgatcgccgagcgactgcagcagtacagccagatgtatcaaagccagattggcgacagcacgctattgaacgtgcaggctaccacgctgctgcaaaacgcctcgacgctacaggccaatattctcgcctacaatgacacttatctcctgacggcggcgatctctgccgcaacgctggtgtggattttctggcgcttaatcagattgcgaatcaccgcccgtatcgcgttaaaacgcgcaaccggcaacaaataa

SEQ ID NO: 93797 - DNA, 1206 bp, Enterobacter aerogenes
atgtcaggcagtatcactcgcgaagattttgatgcttatatggttccgtgtttcgctcccgcgccgtttatcccggtgaaagcggcgggctcccgtgtctgggaccagcagggtaaagagtacattgacgtggctggcggcattgcggttaacgcgctgggtcatgcgaatccggcgctggctaacgcgctgaaagcgcagctggataagctgtggcacatcggcaacggctataccaacgaaccggtactgcagctggcgaaaaccctggtggagtcgaccttcgccgataaaattttcttctgtaactccggtgctgaagccaacgaagccgcgctgaagctggcgcgcaagtatgctcacgacaaattcggcgccgacaagagcgaaattatcgccttcaaaaactctttccatggccgcactctgtttaccgtaaccgtaggggggcagccgaaatactccagcgactatgcgccattaccgcaggacatcacccatctgccgtataacgatatcgacgcggtgaaagcggcgttctcttcccgcacctgcgcggtcatcgtcgagccgattatcggcgaaggcggcgtcatgccagcggatccgcaattcctgcaggcactgcgcgagctgtgtgatgagcatgaagcgacgctgatttttgatgaagtgcagaccggcgccgggcgtaccggccaactgtatgcttaccagcactacaacgtggttccggacattctcaccagcgcgaaagggctgggcggcggcttcccaattggcgcgatgctggcgaaagaggcctgggcgcaggtgttccagccgggtacccacggcacgactttcggcggcaacccgctggcggcgaccgtcgccaatagcgtgctggcgcaaatagatagtgcgctgctggcgggcgtgggcgaacgccatacccttatcgtcgataaactcaatgcgctgaacgccaaatatgatctctttagcgccgtgcgtgggatggggctgctgattggcgccgaactggcaagccatctgcgcggcaaagccaaagcgctgaccaatctggcggcggaagagggactgatcgcgctgatagccgggccggacgtactgcgtttcgccccggcgctcaatattcccctggcggatattgatgaagccttcgtgcgccttgagcgcgccgtcgcccgcttaaccagctaa

SEQ ID NO: 93798 - DNA, 186 bp, Enterobacter aerogenes
atgacgccgcaggcgacgccaaccatcgtcgccaacggacagtttgataatttccgcgcggtgctcatcgcgcaagagacgccgggagcgctcgatcagcaggcgctggacgccctgcaggtcaatgccaccgaccgggttcacgcggtgacactcaatccagaggaaaacagatcatggcggtaa

SEQ ID NO: 93799 - DNA, 1011 bp, Enterobacter aerogenes
atgggtattgatttatcggttatttggtttgttatcatcgtgtttgccaccctgatgtatatcgtcatggacggtttcgacttagggatcggcattctgtttgccgccgtacgcggcggcgatgagcgcgacgtgatggtcaacagcgtcgccccggtatgggatggcaatgaaacctggctggtgcttggcggcgctggtctcttcggcgcctttccgctggcctatgcggtgattatcgacgcgctgtcggtacccttaaccctgatgctgattggcctaatttttcgcggtgtggccttcgagtttcgcttcaaagcgaccccttcgcaccgtcctttctgggataaagcttttctgggcggatcgctactggcgacattcacccagggcatggtcgtcggcgcggtcattcatggttttccggtcagcggtcgcagctttagcggtggaatgtgggattggctgacgccatttaccctattctgcggtttcggcctcaccgttgcatacgcgttactgggcgctagttggctggtaatgaagagcgagaatccgctgcagaatatcatgcgcagaatttcacgccttctgctgctggccttactgatgataatagccgtgattagcctatggacgccgctctcccagccggcgatcgccgagcgctggtttagtctgccgaatctgttttacctgctgccggtgccgctattggttatcgccatcagcgtctggttatggcgcacgcttgggcaacgagatgctcacaccctgccgttcgtgttgacgctggggctcgtcttccttgggtttagcggacttgggatcagcatttggccgaatattattccgccagggatttcgttatggcaggccgcggcgccgccgcaaagtcagggctttatgctggttggcacgttactgattattcccgtcattcttgggtataccttctggagctactacgttttccgcggcaaagttcaaactggcgagggatatcactga

SEQ ID NO: 93800 - DNA, 1089 bp, Enterobacter aerogenes
atgcctgatgccgccattcctgtcagccaatatattactcaggtgaatacggataacagtgtgactttccggttatttgcccccgatgccaggcgtgtttccgtcgtcacggggtcgacgccggatacctttgtctctcatgacatgaccaaagatacccagggcgtatggacgtggaagagcgatcgcctggccgccaatctttatgagtactacttcgacgtggacggttttcgttctgtcgataccggcagccgttatcagaagccgcagcgccaggtgaataccagcctgatcctggtgcccggcagcattcttgacgaacgggcagtcccgcacggcgatctgcgtaccgtcacctaccattcgacggcgctcaagtcagagcgtcgcatctacgtctggacgccaccgggctataatggcagcggcgagcctttgccggtgctctacttctaccacggttttggcgatagcggtctgtcggccatcgaccaggggcgcatcccgcaaatgatggataacctgctggcggagggcaaaatcaagccgatgctggtggtggtgccggataccgaaaccgatattcctcaagcgatcgcggaaaacttcccgccgcaggagcggcgtaaaaacttctatccactcaatgcgaaagccgcagacaacgaattgatgcacgacatcattccgctgatcgattcccgatttaacgtgcgtaaagatgccgacggccgggcgctggcagggctgtcgcagggcggttaccaggcgctggtgtccgggatgaaccatcttgagagcttcgggtggcttgccacctttagcggggttacgacaaccacggttcccgatgctggcgtggaggcgcagctgaataaccctgacgccatcaataagcaactgcgtaactttacgctggtggttggcgaaaaagactccgtcactggcaaagatattgccggcctgaaaagcgaactggaaaagcagaagatcaaatttgattatcactcttatcctggcctgaatcatgaaatggacgtctggcgtccggcctatgccgagtttgtgcaaaagctctttaaataa

SEQ ID NO: 93801 - DNA, 414 bp, Enterobacter aerogenes
atgtcgctcaacctggagcaggcgtctgacatcgtcgagcgaatgggcagcgagatcgccgataaatcactggcggcgcggcgcgcattttccgtcgaggggctaaaagagctggatgcgttatacgagctactgcttagtaacctgcagctggcaatgtcggtcttcttttccggcgacgtgccgagcgcccgtcggttgcgccgcagtaagcaccgttttcgtattcttaaccgccgttactcgcacgcgcatgttgaccgcctgcatcagcaaaacgtgcagagtattgaaaccagtacgttgcatctggcgctgctgggcgatatgaagcgtctgaactcgctgttctgcgctgttgcctatagcgtgatggagcagccggatgaagacgacgagcgggatgattattag

SEQ ID NO: 93802 - DNA, 690 bp, Enterobacter aerogenes
atggaactgctgttactgagtaactcaacgctaccgggcaaagcctggatggaacatgcgctgccgctgattgccggccaggtcaaaggccgccgttcggcggtatttattcccttcgccggggtgacgcaaagctgggatgattacaccgccaaagccgccgccgtcatggcgcctatgggcgtcagcgtgaccggtattcacagcgtcgccgaccctatcgccgccattgaaaacaccgagatggttatcgtcggcggcgggaacaccttccagcttctgaaagagtgtcgcagccgcgggctgctggcgccgattgtcgatgtcgtcaagcgcggagcgttgtatatcggctggagcgcgggatctaacctcgcctgcccgaccattcgcaccaccaacgatatgccaattgtcgatcctcaggggtttgacgcgttagggctgttcccgctgcagattaacccgcacttcaccaacgcgctgccgaccgggcatcagggtgagacccgcgagcaacgtattcgcgaattgctggtcgtggcgccggaattaacggtgattggcctgccggaggggaactggattcaggtcagcgacggacacgccacgctcggcggcccgaacccgacgctgttgttcaaagcgggagaagaagcggtaaccctggccgcgggacaccgtttctag

SEQ ID NO: 93803 - DNA, 315 bp, Enterobacter aerogenes
atgaatatcgaagaatttgtgagtgaagataaccatatgtgtaatctgggtcaggaccttttttgtgaaattttcgaacccggagcgatttacgatttacctgataatgagtttaacagaaagattgtttactggttaagccagtatttagtggggaatctaagagaaccattagattcgatctctgagcttaatattttcgaacagttttatgtttatgagacatggttctcgctaattaaatgccctgatgaaattaggaatttatcgaaacggataattcgatatcagattgggctgaaaactcttttataa

SEQ ID NO: 93804 - DNA, 681 bp, Enterobacter aerogenes
atgagttacttctcaaagattttcaccggcaacccttttttgattccagaagggcaacttggatacatgactcctgccaacaaactttttcaacctccccatttttttctaacaactcttgatcgccttgctgaaacgagcattattgctatgcaacgcggaggttttgtttggcatcaaggtgacaattattctataaacgcagagcttcgagaggaatcactttcagacattatgcccgatcagtttacacgaacagtcatgttcgagattgatttggcaagtggcacagacgaagagattgcagagtcgcttaaagctgcattaccgcaatggcgtaaagttaagggtattgatgaaaacccattggaatctgttcgttttggatacggaactatcaagaaactcatcagctatcgtgtaatacctatgctagatatcctagtgtgggcagccgttaaaaaaatccgtgtctctgacgacaggttatccagactactatatacagacgatgacgaagaaagcgaaatgaggcagtccagtcaaatcaaagataccgacaggcctttggctcttaaatcctgcacaactgactttatccgacaattccattacttcatgaacaaaaatagccatttgaagcaaatgaaagtctctgatgtaatgaaactatcggattag

SEQ ID NO: 93805 - DNA, 372 bp, Enterobacter aerogenes
atgtctatcactaaagatcaaatcattgaagcagtatccgctatgtccgtaatggacgttgttgagctgatctctgcaatggaagaaaaattcggtgtttccgctgctgctgctgtagctgtagctgtagctgctggcccggctgaagctgctgaagaaaaaactgaattcgacgtaattctgaaagctgctggcgctaacaaagttgctgttatcaaagcagtacgtggcgcgactggcctgggtctgaaagaagctaaagacctggtagaatctgcaccggctgcactgaaagaaggcatcagcaaagacgacgctgaagctctgaaaaaatctctggaagaagctggcgctgaagttgaagttaaataa

SEQ ID NO: 93806 - DNA, 531 bp, Enterobacter aerogenes
atgatgttcgtcgatgagcttggcttcaccacttccgaatggctgcaggtgtgggcggcgttcttcttcaccaccatcttctccaacgtcttctggggtatcgtggcggagaaactgggctggatgaaagtggtgcgctggttcggctgcatcggcatggcgctgtcgagcctggcgttttactacctgccgcagcacttcggccataacttcgccatggcgctggtgccggccattgcgctggggatttttgtcgcggcgttcgtgccgatggcggcggtatttccggcgctggagccagagcataaaggggcggcgatttcggtctataacctgtcggccgggctgtcgaacttcctcgcaccggcgattgcggtggtgctgctgccgtatttcagcaccatcggcgtggtggtggcctataccgcgctctatctgctggcgttttgtctgtgcccgtttattcgcgtcgatcagccgggctttgcccgtaaggcaagcggcgtcagggaaggggtagaatattcataa

SEQ ID NO: 93807 - DNA, 468 bp, Enterobacter aerogenes
  misc_feature (403)..(412): n is a, c, g, or t
atgacctcatcattaaagaaaactgcagttactggattaatctggagtgcaattgaacgcttctcagtccagggtacacagttcattgttaccattatcctagcaaggctgatatctcctgaagactttggccttattggtatgataactgtgtttattgttttgtcggatcttattatcaatggtgggttttctcaggcactgatccaaaaaaagcatagaacacaggatgattactcaacagttttttactttaacgtattaatcgctatatttatttatggcataatctacttagcagcacccttcgtcgctaagttttacaaccaaatacctttagttgatatattgaggctgcttgcagtatcaatagttttaaagtcattttgtgttgtccagaatnnnnnnnnnngcaattctatccataaagttaaatttcaaattaaggacaaaaataaatcttattag

SEQ ID NO: 93808 - DNA, 1557 bp, Enterobacter aerogenes
atgactagcgaaaatgacaaaaatcataaagttagggtcgcacagtacttgaggatgtctaccgaccatcagcaatattctttacataatcagtccgaatatatcaaagattatgctgaaaagaacaatatggaaatcgcttatacctacgatgatgcaggtaagagcggagtcagtatcataggccggcattctttgcagcagttacttagtgatgtagaacaaaagaaaatagatatacaggctgtattattttatgatgtgagccgttttggtcgttttcaaaatagtgatgaagctgcatattattcctttctatttgagagaaacggtgtagatcttatatactgttctgaacctattcccactaaagatttccctttagagtcttctgttatactgaatataaaaagatctagtgccgcatatcacagcaggaatttatcagaaaaggtatttatagggcaagtaaatttaataaagcttggttatcatcaaggcggaatggctggttatgggctgagacgtcttttagtagatgaaaatggcatagctaaagaaatattgggctttcgcaagagaaagagtattcaaacagatagggtgatattaattccgggaccaaaaaatgagataaaaattgtaaatagcatctatgatctttttatagatgataacatgccagaattcattattgctgagagactaaatgaacagaatatacctgcagaaaatggaacattatggactcgtgcaaaaatacatcaaatcttgacaaatgaaaaatatattggaaataatatatataacaaaacctcatctaaactaaaaagcaggcttgtaaaaaaccccaaaaatgaatgggttagatgcgacaaggcatataaacccattatttcaaagaaaaaatataataaagctcaagaaataattcagctccgatccgtacatttgactaatgaagagcttttagaaaagctaaaacaaaaattagaatctaatggaaaactatctggctttatcattgatgaagatgatacaggcccttcatcttctgtttacagaacccgatttggtggtcttttaagagcatatactttgattggttataagccagaacatgattacagctatatccaaataaatgaagcactaagatcattttactcaggaataattgaggattttaaggtggaaattttaaaaagcaactgctatatagacgaatataaatatgcaccaatgctttacatcaatgatgagcttttaatttccgtccttattactaaatgcacacatatgaaatcgggtaaacttagatggaaagtccggtttgataactcacagaaagcagacataacaattgttatacgaatggattcacaaaatatttcaccacttgatttttatatcataccaaagattgaaaacgaatatagtaaaatatgtatgacggaaacaaacaacattcgattagatctgtatagatttgataatctggataaacttctacaaattattactcgcatgaaagtgaggaaactatatgctgcctga

SEQ ID NO: 93809 - DNA, 1230 bp, Enterobacter aerogenes
atggccaaaatcgctaagaaactcactgacactgaaatcaaaagcaccaaacctgccgagaaagagattaacctttttgacggcgatggtttgctgttgcgaatcgctcccttggcgaagggagggaagaaaaattggtatttcagatatgcagtgcctgtgaccaaaaagcgaactaaggtgagcttaggaacctatcctcaccttacacttgcgaaggcacgagctttacgtgatgaatacttgtcgttgcttgcaaatggtatagacccccaagttcataacacccaaaaaaccaatgcactgaaagatgccacggaacatacatttcaagcagtagccaagaagtggcttgatgagaaagtcaaaacgtcaggcatctcccaagatcatgctaacgacatctggcgaagcctagagagaaatatctttcccacattgggtgatacccccattaaggagattcgccctaaaatgcttaaacagcatttagaacctatagaaaaacgaggtgtccttgaaacacttcgccgcatcatatcccgcctgaatgaaattttccgctatgcagcaacagaagaactcatagaattcaacccggcagacaatctggggcaacggttcagcaagccaaaaaaacagaatatgccagcattacccccttccgaactccctcgcttcctggttgctctaaacaatgcttctatccgtttggaaacaaggctactgattgagtggcaacttctcacatgggttcgcccaggtgaagctgttcgcacaagatggtcagatattgatattgaaactggcatgtggaacatcccggcggagtttatgaaaatgaagaagcctcacaaagttccactgagcaaagaagctttgcgagttttggatttaatgaaagccatcagtgggcatagagagtgggttttccccagtatcaaagctccactcaatcacatgcatgaacaaacagctaatgcggccataatccgtatgggtttcggaggtgagcttgtagctcacggtatgcgatcaatcgccagaacagctgcggaggagtctggcaaatttaggactgatgtcttagaagccgcccttgcccactcgaagaaagatgaaataattgcagcctacaatcgtgcagagtatctcacagaacgggtgattctcatgcagtggtggagtgactttgtttcgtctcaaaaatacaaaattattgccgcataa

SEQ ID NO: 93810 - DNA, 438 bp, Enterobacter aerogenes
atgaaagagaatatttatacagataatatagatctatccaaaacttcccgccgtggtagttttaataaaaggaaattcccttcagaagcagtaagaagctattgtgtcagtgtccgtttgaatgttgaagaactgcaactcctgaatattaagcgaggctcttataaaaagggagagtggcttcgtatggcttcccttcaaaagttacctcctgttattccagcgattaataccaaagcatggatagctttaaccgacatatcgcaaaaactaaatcgcattgcggcccacatagatggtaagagcaaagatagtcaccttactcatacagagcttttcgctgtgaagcgacaacttgaagagcttcgcactaatcttttaagtgacagtatctggagcctcccgaatgaagggtatgcggaagattcgcaggggtaa

SEQ ID NO: 93811 - DNA, 1185 bp, Enterobacter aerogenes
atgaagggtatgcggaagattcgcaggggtaagaactttgctggtgtggtccaatacgcattgaaaccgggagaacatcataaaagcgatccaatcgtaatcgggggcaatatgctgagtgattcagcctttgaactgattgcggaatttgatggtaccaaacagcttcggccagatgttcagaaggccgtttggcacaactcgcttcgattacccgatggtgaatcactaacggctgaacaatggtccagcatcgcagatgactatatgaggagaatgggattcagtgatacccatctccgttgctatgtcttacatgacgacgatggccagcacatacacattatcgcaagtcgcatagatctcaatggtgggaagctctaccttggcaggaatgagaaccttataagtacccgcataatcagtgagcttgaaatcactcataatctaacagtgaccaaaacagcctcagccgttgcaccaaagcaaccgaagcgaagaaaggtttcccgtaatgaacagatgctatcggcccggactggtgttccctcccctaaggaagctctccaacagatacttgataaaagtttggcagataagcctgaccttttgactttcacaaaacggctggaagaagctgaagtatcctggacggcgaatgtcgccagcacaggcaaaatgaacggcttctctttctcttaccgcgatatagccttcaaagcttcgcaattgggtaagagctactcctgggcaaatctcagtaatcggcttaactacaaccccgaccacttagaagctctgcgaagcgacatatcgataaaagaccaacctgctgttcctgctcctgctcctgctcctgctcctgctcctgctcctgctcctgctcctgctcctgcaacaattttgaaaaccagggagcaaaaggaaagtatcagtgaaaaaattgctgaactcgaactgcgactcagagaagaaagacgaaacgaaatcgtagagaacattcttcaaaagaatgcagcacaacagcaaaagcatcttcttttccttaggtggcttgcttctctaaagcagttcatagagcttctccgaagctatggtaagagcatccttcacactcacccagcaagcttctcagaagtctattcaacacatgatttaaaaccttcaagaaaaattcatttatag

SEQ ID NO: 93812 - DNA, 315 bp, Enterobacter aerogenes
atgaaaacatactcaattctcgcagttatcctttctacttttctattaacagcctgtaattccgaaccttctgaaaaagacatatacaatgctttcaaaagtgttgtagatagatcaaatgcaagtatgaaagctctgaactcaagtattcccgaaaaagatcttttaagaatcgattatgtgaagaaagttacctgcacagaagaagcaaacaatgtttacaactgcattgtcgatgcttcaattagcaacatgaaacaaacaaagcctgttaagcttgtgaaagctgatggtgtctggaaagaagttcagtag

SEQ ID NO: 93813 - DNA, 225 bp, Enterobacter aerogenes
atggctatgtttagctcagtttacaaaagtctgacaagcaatctactacaacgattaaataacaaagaaggggttctaagagagctaaactcgcttgttaatttcatagataacaatcaggaaaaagcagaagagatctataatactataagaacacagtatgaagtgaaggttatcgagaaagagttaacccatgaagttcgcgtaagagccgtcaggttatag

SEQ ID NO: 93814 - DNA, 1113 bp, Enterobacter aerogenes
atgtctgaggtgctgagaaacgacattttcagatttacggcagatctgccagttcagcaaggtttctatcgcttgtgcaaatctaagcccgaaaatcctcaattctatctgccaaatttactggtcagtgaaactcaacttgattccagacttcctgcatattttgcagacttcgttgtgagcactgatcttttcaattccatagaagatggtgatatagggattgttaacaatggcaacatgattagggtgattttgtcacggagagcaaaccataacactgttctggtaactgaaaggtgcaacaaccgttgccttttttgttctcagcctcctaagacaggaaacgatgactggcttcttaaccagtcagcacttgccatcgcctctttctccctgaatggtgtagtaggagtgagtgggggagaacctctactgtatggcgaagatttcttgcaatttctggacttcataatcgaaaactcacctgagacagctttacatgttttgaccaatggacgaaagtttgcagatgtcagttttactcaacagatgaaagagcgaagcgaaaagctcaaaataactttcggtattccgctttattcttcaaggtcgtcagttcatgactatctggttggaagcgaaggggcatttgatgagacagttatggggcttatcaatgccggtaactcagggatcaacattgagttaagaatcattccgacactggctaactatatggaactggacaaaatcatagagttcgctggtcgcgtgttttccaatatcaaccagatttctcttatggggttagaatctatcggctgggcacgtaaaaactggtcatcaatcttcattgagcatgatagctatagtgagaaaattctctctgccataggaacagcacaaaggtcaggcatcaccctaacaatcttcaattacccattgtgtcatcttcctgaaagagcttggggatttgctactcagtcaatttctgactggaaaaattactaccccaaagaatgtgatgaatgtactcagaagtcttcctgtgctggttatttcagttcatcaaaaggccgttttcatcaaccaccgagaccaattttatga

SEQ ID NO: 93815 - DNA, 1389 bp, Enterobacter aerogenes
atgatactgatgcctttcaacttcgacaggatgcctgacggccgggtattcatcagtaacctcgctggctttcatcattttttaggagagcaggaatttctcgatctggtaaacggtcacatcagtcaagaacagtcctcatcgcttgaaagcaaacttttcatttgcggagatgaatcttcctccgttaccccttatgcactaagttcggcttttgccaaacgactcatgaatgaactggcgatcaggccaatcttcatgattgtacctactcttcgttgtgatcatacttgcaaatattgccaggtcagtagggcatcggtcaccgctgatggttatgacctcaatcctgaactgataccgcaaattgtcagcaccataaagaaactaggtacacctccctacaagatagaagtacagggcggtgaaccacttctcaggttcgatcttgttcagtcaatctatcacgagtgtgagatttcattgggtagtgatgcttttgaaatggtgattgctacaagtctgtcattactcgatgaaagcattctctcatgggttaaagagcggaatatcaccttctcggtctcgctcgatgggaatgaagctgtccataacaagaatcgcatccttactgactttcaagctcataacaaagcagtaactggtattcggaaaatcacagaagaacttggcgcaaaccgggtagctacggttaccacagttactaaggagctgactaaagagccagcttccatagtagatgctcatttgtctctgggtcttacagacatgtttatcaggcctgttagtccttatgggtttgctcagaagcagagcttcactttttcaatgccagagtattttgctttttataaagagttgatgcaggaagtgttgattcagaatgaaaagggaatacctgtcattgagcactcggctgctattcatctcaagcgaattttcaatccaggcttcagtggttatgcagatctaaaatcgccaagcggagttgtgctgaactgcatcctgttcaattatgacggtaaagtctacggtagtgatgaaagtcgtatgcttcagaaagtaaacccggaagcagatttcagtgcaggagagtttgcctcactctcattcagtagcaacgaatactaccgttccgctctctcatcttcatttaacttcgccatgccaggttgtgacacctgtgcataccagcctttctgtggagcagatccttgccagaacattagtgttcatggcgaacctgttggtgacaagagtcgttctactttctgccagtatcacaaaggcatgttccgcttccttctgaatgaaatctctcaggatggaccgatggcaaagatgcttaaagggtgggcttatgtctga

SEQ ID NO: 93816 - DNA, 213 bp, Enterobacter aerogenes
atggttaacagaatgagatctattgtgagaacggcgacagacgaatctggtaagttcaggactggtgtcttagaagcggcccttgcccactcgaagaaagatgaaataattgcagcttacaatcgcccagaatatctggcagaacgagtgattctcatgcagtggtggagtgattatgtcattgctcaaaaatttaaagctattgcggcataa

SEQ ID NO: 93817 - DNA, 897 bp, Enterobacter aerogenes
atgattcagatacgttttggcgataattttatttacctggaaacaaataagttaattccatctaaggaattattagaaaacgtaaagcgaagccataaatatcatcaaatagttacctctatcgaaagcttaggtattattgaaccaataatagtattctatgacaaagataaagatgtcactaagatacttgatggccatttaagggttgaggctttaaaagacttaggtatagaaaaagctccatgtatactttcgagcatagatgatgctttcactcctaacaaacaagtgaatcatataaatgtagttgaagaacatagaatgataattaagtctctggcaaaagtatcaattgaaaaacttagtgctgctttgggcatatctgttgatgccataaaagataaagcgaatgtgatgaacggcatagatccaagtgtaattgcgaaactttctgataaaccgatacctaaggctacatttgatgtattgagaaaaatgaagccaattcgtcaaattgaagcagtcggtacaatgattaattttgataattatagtaaaaaatttgcaatgagcatcttggatgctacaccggcatcaatgatagtaaataaagggaaaaacactccctataaaaaggacataaaaaaaaccatacttcgtctggaacaggaaatggcaacaacttcggaagaaacaaaaaaacttcaaaccgagtatggttcagatatgttgaaattcgtgataatccagtcatatattaataaattactgggtaactctaaagttcttcattggttcttggaaaacgaggttgattatcttaatgagttaaaaagaatttcgaaaattaattctttagatgataagactcttgctgaaaacagccagtcatag

SEQ ID NO: 93818 - DNA, 534 bp, Enterobacter aerogenes
atgactcttaatgagcatgatttagttatagctccacttaacacggaagtacctttctacattgcagggcatcgtagtcatagctcccatcgaagccatagttctcatagatcttcgtctggtggtgggtactatggtggaagcactccttattatcctaaaacatacagttcaccaagctcatcaggctcatccacttcaggtacaaattcgccatcgtcttcttcatctgttcgttcgcttcgctctaatgacaccgatgcctctacgaccacaaactctgctggaatgaatggaactactcgtgcaagtagtgggctggcttctgatactgaaaagcgtaagcgtttgatcatgcgagtgcagttcgcattactggataaagggttttataacggcaatatagacggaagtatggggcctgcgacacgaactgctatcaaaaattacagagttgcatatgggcttcctactccagtaagagaaacattagatgctcagttattgaactctttgaatatactggctcgttaa

SEQ ID NO: 93819 - DNA, 207 bp, Enterobacter aerogenes
atgacaagtattttacgttttttagggcttgctcctggtaaagatgaggaagaaatggttaggaaactaaagaatacctattcatcgttaaaagtggtcggtcgcgggactataacagtttctgctgatgaagttatcaataatcctgagttcaaagagttgtacatacgagctagtaacattgtagaacgcagtaaaaatcaatga

SEQ ID NO: 93820 - DNA, 918 bp, Enterobacter aerogenes
atgaaacgttatgccttattcggcgtactattgctcaccgcattttcatcccaggctacggaaaaagaaaacaatcattcgataaatgaatactcatttcgcattgatacaaataatgcattatgtattgctcacgccaatgatattgaagccttatctaactattatcaaaaagaaccgattatggcgagcatcaatgtcgccccttttcttgaaaatggaaaaaatactttaaaactttatttcgccagcttgactgcgttaacaggggatgaaacttttcctgccgacgctcgttgccagggttcggtatccctggtcaaaaacaatgaccgtcgcaataaaactaaactcgctgagttaattgcatcagttgatgacaaactgcaacccacaggcaagttatccgtggcgtatcagggaaacacagacatttccgccgtttctgaaggaccattaaacaatactattctgtatcaggtcagccgcgagtttaccgtcaagggattgccggaatggacctggacaaaggccacgccatttcaagccacagaggaaaacattaagaaactgcgcgcggcgtatacggaaatgtggcatctcctgaataataaagagagccaaaaaatcaaggaaaaatacgaaattgcttctcaggaacaggatctggcaaacgatttgcctcccggcacgtggtatcaatctctggcagtcaagaaaaacatggagaaaagccacggtgctattcctatcaattgggatgaatatgagttaaaaattcttaaccatggtcgacttgtgcagtatgaagatcgcggaatttcccccttgagtctgaaagataaagacggcgaacttcttatgagctttactccttatttttctttgatcaacggccagatgataattacgcgctaa

SEQ ID NO: 93821 - DNA, 228 bp, Enterobacter aerogenes
atgagaaagagcttatgtgtttttgcctttatcgtgctgacaatcctattcgtgtgtatccttcctgacgatttcatctatcattatgtagagaaaaacgtggagattagtggtgacggtgaggcagcggtggataactttgaatctgttattctgctaatcaagctgggtgcatccgcagtgctctccttgctcatagtttgggtagctaaccgtcgatacaaatag

SEQ ID NO: 93822 - DNA, 537 bp, Enterobacter aerogenes
atgcaaatttgcagaatgaactataacgacctatccccggatggaagaacggtaaaactacattgctatggtgtcggctcgtttgatgtgttgtctggcattgaccgctatatcaataatcctaattgttcagaccgagagaaagcggcaattcccccgggcacatattggatagttgatcgacctgttgggagcatagttaaccaagtccgggcggaagtgatcgatatggcacacctttacaaaaatcatcattcggaatggttcggcttgttcagtaacgacaccatgagtgatcatatcttcgttaatggcatgatgcgtggtagcttccgtctccatcctctgaatactgacggcagcggagtttcatggggctgcatcactctctataaatctgctgagtttcagattctccggcactcactgttgaatcgtaagaaagtccgggttcccggtggacgtggccttatggcttacgggcgaatcgacgttcaaggtattccagattatagcaaatgcgtggtatcacgatga

SEQ ID NO: 93823 - DNA, 903 bp, Enterobacter aerogenes
atgaaaaagaaaatcgttattgcgctgggtggtaatgcactgctgcagcgcggagaagtgctcagcgcggaaaatcagcagcgcagcattcaactttttgcccggatggcggcggaattagcccgcgattaccaactggtgatcgtacacggcaatggcccgcaggtcggattgctggcgctgcaaaacgccgcctatcaggaatctcccgcctggccgctggatattctggtcgcggaaagtcaggggatgataggcttcgctatcgctcaggaactgatgcagtacgccggtgcgccggtcagcaccctgatgacgcgcgtagaggtggcggcaaatgatgacgctttcgcggcgccggggaaatatattggcccggtttatccgccgcagcagcaggcggagctggaaaaacgctatggttggcagatgaaagcggatggcgactatatccgtcgggtggtcccttcccccaagccgctaaatattgttgatagcgcggccattcagacgctgatggatgccggtcatctggtgatttgctgcggcggaggcgggatcccggtggttgccgatacgcacggttaccggggagtcgaagcggttatcgataaagatctgacggcggcggcgcttgccagcgccattcatgccgaccacctgctgattctgacggatgccgatgcggtctatgttgactgggggacgccgcaggctcgcccgttgcatcacgccaccattgcgacgctcgcgccatttgccgcgccggacggcgcaatggggccgaaggcggaagcggtcattcagtttgtcaaacagaccggaaataacgcctttatcggcgcgttaaaggatgcgccacagatattagccggggagaaagggacctgtgtaagccgctaa

SEQ ID NO: 93824 - DNA, 1164 bp, Enterobacter aerogenes
atgtctgtaattaagatgaccgatttggatctggctggtaaacgcgttttcatccgtgctgatctgaacgtaccggttaaagatggcaaagtgaccagcgacgcgcgtatccgcgcctccctgccgaccatcgaactggcgctgaaacagggtgctaaagtaatggttacttctcacctgggtcgtccgaccgaaggcgagtacaacgaagaattctctctgttgccggttgttaattacctgaaagacaaactgtctaacccggttcgtctggttaaagattacctggatggcgttgacgttgctgccggtgaactggtggttctggaaaacgttcgcttcaacaaaggcgagaaaaaagacgacgaagaactgtctaagaaatacgctgcgctgtgcgacgtattcgtcatggacgctttcggtaccgcgcaccgcgcgcaggcttccacccacggtatcggtaaattcgccgatgtcgcttgtgcaggcccgctgctggccgctgaactcgacgcgctgggtaaagcgctgaaagagccggctcgtccgatggttgctatcgttggcggttctaaagtttccaccaaactgaccgttctcgactctctgtccaaaatcgctgaccagctgatcgtcggcggcggtatcgctaacaccttcgttgccgctcaaggccacaacgtcggtaaatccctgtacgaagcggacctggttgacgaagctaagcgcctgctgagcacttgcgatatcccggttccgactgacgttcgcgtcgctaccgagttctctgaaaccgccactgcgaccctgaaatccgttaacgacatcaaagatgacgagcagattctggacctcggcgacgtttccgcacagaaactggctgaaatcctgaaaaacgccaaaaccattctgtggaatggcccggttggcgtattcgaattcccgaacttccgtaaaggtactgaaatcgtcgctaatgctatcgcagacagcgaaggcttctctatcgcaggcggcggtgacaccctggcggcgatcgacctgttcggcatcgctgacaaaatctcctacatctccactggcggcggcgcattcctcgaattcgtggaaggcaaagttctgccggcagtagcaatgctcgaagagcgcgctaagcagtaa

SEQ ID NO: 93825 - DNA, 1020 bp, Enterobacter aerogenes
atgaccatacgcatcgcgattaatggcttcggtcgcataggacgcaacgtggttcgcgctttgtatgaatccgggcgtcgtgcggaaatcaccgtggtggcgatcaatgaactggcggatgccgcaggcatcgcgcatttattgaagtacgacaccagccatggccgtttttcctgggatgttcgccaggagcgggaacagctgtatgtcggcgatgacgtcattcgtctactgcatgagccttctatcgccgcgctgccctggcaggagctggcggtagatgtggtgctggactgtaccggcgtatacggtagccgtgaacatggcgaagcccatcttcaggctggcgcgaagaaagtgctcttttcacatcctggcggcaacgatctcgacgcaacggtagtcttcggcgtcaaccatgatgaactgcgcgcggagcaccgcattgtctccaacgcctcctgcactaccaactgcattattccggtcattaaactgctagatgatgcctacggcattgagtcaggaacggtcacgacaatccactccgcgatgcacgaccagcaggtgatcgatgcctatcacccggatctgcggcgcacccgtgcggccagccagtcaattattccggttgatactaaacttgcggcggggatcacccgtattttcccgcagtttaacgaccgttttgaggcgatcgcggtacgcgtaccgacgattaacgtcaccgcaatagacctgagcgtgacggtgaaaaaaccggtaaaggcctgtgaagtcaaccagttgctgcaaaaagcagcacagggagcatttcatggtatagttgactatacggaattaccgttggtctcgacagattttaaccacgacccgcacagcgccatcgtcgatggcacgcaaaccagggtcagtggcgcgcatctgatcaaaacgttggtctggtgcgataacgaatggggctttgctaaccggatgctcgacacgacgttagcgatggccgcgcaaggtttcaggtaa

SEQ ID NO: 93826 - DNA, 1641 bp, Enterobacter aerogenes
atgagcgaaatgataaccgtcggcgatgccatcgccagaacgctggagcagtatcacgttgaagccatttatggcgtcatttctatccataacctgccgatcgccgacgccgtcggccagcgggaaaaaatccgctttgttccggcgcgcggtgaagcgggctcggtgaccatggctgacgcccacggccgtttttccgggctcggcgtggcgctgaccagtaccggcgcgggcgcgggtaatgcggttggcgcgctggttgaggcgatgaacgccggtacgccgctgctgcacctcaccggacaggtcgaaaaagcctggctggacgccgacaccggttttattcatgaaacccgcgatcagttgaccttcctgaaagccagttcgaagcgcgcttaccgcattagcaacgccaaccaggcggtggctatcctgcataaggcgattcaggaggcgcagacgccaccgtgcggcccggtatcggtggaaattcccatcgatattcagagcgccaaaattccgctttcactgctgaccgcgccgttggaacgcgctccggcggttgagccggaagtgtcgctggtcgatgcgctgtgggcgcagcttaagcaggcgaagcagccgctgctgtggcttggcggcggcgcgttagagagcggcgaggcggtgaagacgctggcggatgccggggtgacggtgatttccagtacccacggccgcggcattctggcggacagccatcgcgccagcctacgcgcgtttcataattctccctcggttgaagcgctgatttcacaatgtgatttcacacttgtggccggttcccggctacgcagtaacgaaacgcgctcgtggacgctggaactgcccacgccgcgggtgcagattgatattgacccggcggcggccagccgtaactacctgatggacaacacgctggtggcggactgccgcgctttattagacgcgctggcgacgcgagtacagggccggatgtggggcgatgcgcgttgggatagccagcttaaagcggcggtagaggcggcggagcaggggctgcgcgaccagtgcggcgcttacgctaaattgaatgacgcgattgcgcaggcgctgcccgatgacggcatcctggtgcgcgatattaccgtttccggcagcctgtggggcagccgtctgttccgcgcttacggcccgttgatgaatatccattctctggccggcgccatcggtatggggctaccgatggcggtgggtaccgcgattgccaatccgcaacggaaagtggtcggcctggtcggcgacggcggcctgagcctcaaccttggcgaactggcgactctggcgcaggagaaggccaacgtgacgctgttgattatgaacgatggcggctacggcgtgatgcgcggtattcaggataagtactttggcggccgccagtattacaacgagctgcacacgccggactttaccctgttggcgcaggcgattggcctgcaggcgtggagcgtggaacgcgctgaggatttccaggcggtgatgaccgaggcgctggcgatgccggggccatcggtggtggaagtgaaaatgggccagattggcgcactgcgctttgccggcccgccgcagaagacgctgtattaa

SEQ ID NO: 93827 - DNA, 765 bp, Enterobacter aerogenes
atgaataaaaaatacaagggtatcggcgtgctggcttttgccgccggttcgttattacccggcgcgacggccaatgccgccgatcaaaatgcggctgcccccagcgatggtgcggcaaagaagcccaatattatcctgatcgtctctgacgataccggctatggcgacctcggcgtctacggcggcggcgaaggccgcggtatgccgacgccaaacctcgacagaatggccgatgaggggatgacctttttcgacttctacggtcaaccgagcagtacgccgggccgcgcggcgatgcagaccgggcgcattcccaaccgcagcggtatgaccaccgtggctttccaggggcagggcggcggtttaccgaaagaagagtggacgctggcctcggtactgaaaaccggcggctataaaactttctttaccggtaagtggcatctcggcgaagcggattacgcgttacctaatgctcagggctacgacgaaatgaaatacgtcggcctctaccacctgaacgcctatacctatgccgacccgacctggttcccggatatggatccgcaactgcgtgaaatgtttgctcgcgtcacccgcggcgcgctctccggcaaggcgggcgaagcgccgaaggaagagttcaaaattaacggccagtatgtgaataccccggtcgttgatggcaaagagggcgtggtcgggatcccattcttcgaccgctacgtcgagaaggcctcgctggactatctcgaagcaaacgcataa

SEQ ID NO: 93828 - DNA, 174 bp, Enterobacter aerogenes
atgctttttagccatccagaaggaaagcaggttatccgcccgggcgtatcgattgctggaataacggttttttgtcttgtttttaagcaaattagccgctggcgttggctggtctatgcattttccggcaaagcattactgaaaattatcgatagcttgactctccaggcatag

SEQ ID NO: 93829 - DNA, 645 bp, Enterobacter aerogenes
atgtttgctgattttggtgtcgtgaatttctggacgtacctgcttggtgcgacgctgatagtccttgtgcctggccctgaaaccatgttcgtgattaaaacgagcattaccagcggcatcaagcggggctttgctgcaatattttccattctgctgagcgacgttattctggttctgctggcatggtgtgggctggcggcggtcataagctcaacccctgccttgtttaacgccatcaagtacgcaggcgctgcttatcttttctatctcggtgtccagacgatacgcgctatctttaagccagttctcgaaacgagtcaggaaaagaaatcgtctgctgatgctaaggggatcatcgggcgcggaatgctggttactctattgaatccaaagacgctgctgttctatatctctttcttcgcccagtttatcaatgttcaggctgaacattcctggatggcatttatcattcttgctgcggtaatgttcgcgattactctcgtttatttcggcttcctcgttttctgcggctcttatctgctaagccgtctgaaaggcaatcgtagattatcaaccattggaaacgcgctggtaggcatgttctttattggatttgcagcacgactcgcaagcgcaacttcctaa

SEQ ID NO: 93830 - DNA, 696 bp, Enterobacter aerogenes
atgagtttaaagccgcgtaaaatcgttttaattcccgggtttatgctgaatgaaatgctttggcatgaatttgaaacatacctgccgtcaaactgtattgttcatcatgcatctgtaactgaaggacgaaccattcatgatgtcgttcagcatctgattactcttctgcctgagaagttttctttgataggcttttcgatgggagggtatattgcccgacaactggcagcagaattccctgaacgtgtagagtccttagtgcttattgccagttccttacgggaagatacgccgttagaggctgaagcaaagcgaaaaagcgtgcagtcattgtcccccacaacgtttaaggggctgagcagccatgctattgcccggacactccatcctataaacacatcaaatcaggatatgatttcagctattcagaaaatgggatgctctctgggatttgaagccttcatcacgcaatcatccttatcccggcaaggtataccttatgcaacgatatgttgtccaacattggttatcgccagtgaagatgatgccatccgttcgatgaaggaggcagaagagttggtcgaagccataccttatgcgtcgtttagaatcattcggaattgcggccatatgattccgctcgaacaacctagggagttggcaaaaactattgttgaatggctcccgcctacgtaa

SEQ ID NO: 93831 - DNA, 717 bp, Enterobacter aerogenes
atgggaccttatcgtacttttcttattacaggcgcaaccagaggtatagggagagcactcagtgacaaattatcagaacagggtcacctggttgtgggtattgcccgtaatagtgatgccagctttccaggggttttatatacgaccgatctgagtagctctgatgaaacaaatttaattctaatgaaaattgccaaaaatcacgaagttcacggtatcgtaaataacgtaggggtggccttacctcaacaactgggaagtattgatattccgaccttcctgaatgtcatggatatcaatgtacgggtagcagttcagataacacaggcgctggttgccaaaatgaagcgcagaggctggggaagaattgtgaatgtatgtagccgtgctatttacggtgcgactgaccgaacagcttacgcagcagcaaaaagtgcgctggtaggttgtacacgaacctgggcattagagcttgctcaattcgggatcaccgcaaacgcgattgctcctgggccaatagagacagagctttttcataaaacacgacctgttggaagtgaagcagaacaacgtgttttatcgacaatccctatgggcagactgggctctcctgctgaagtggcttcagcaatagcctttcttttatcatcagaagcgagttttattactggcgtagtactgcctgttgatggtggaggaagcctgggaggacgttag

SEQ ID NO: 93832 - DNA, 741 bp, Enterobacter aerogenes
atggaagcccagttcaaagccgtacacatggccgctcaaaacggtatgtcaagaagagacatgtacacgacttgtgttattattaccgtatatttatggattttcccttgttatgggtattacgaaatgaagaaggttattttattcctttgtcagggattagaagaatatgaagccagtgcatttactgatgctattggctggacaacaacttacggaatggaacccgtagaattggtaacagttggtctacgaaaaaaagttaaatgtgcctggaatttcaccatcgaaccagaatatcaactggatgaaattgatggtgatagctttgatgccattgccattcccggcggaatgagccgggctggtttttacgaggatgcatttgatgagcggctggtcagccttattcgaaaatttaacaaccaaaacaaaattatcgcttctgtctgtgttggcgctttaccagtagcaaaaagcggtgctcttcaaggtagaatgggtacgacgtatcatctgagcagtaaacgtcaaacgcagttatctgaaatgggtgtcaatgtcattgaccgcccaattgtagtggatggtaatatcattacatcgcaaagtcctgcaacagctattaatgtcgcatttactttaatagaaaagctgacgtccagagctaacgtagaaaaaattaaagagggaatgggattccccctcattgtgaatgaacaaaattcgttaaaaatgtga

SEQ ID NO: 93833 - DNA, 519 bp, Enterobacter aerogenes
atgcgaatattgactgttgttgattatgatgacatgtggcctacattatttgagaacgaacgttctctgttgcaggtaacacttggtcatgtgatatcccagattcaccatattggtagcacctcggtgcctggattatcagctaaaccagtgatagatatattaattgaagttactaatcttgatgaactggacagcatgaatcaggcaatggagcgtgccggatatactgtgcgtggtgaaaatggaatttccaatcgtaggtacttcacaaaaggtgaaaaccagcgcagtcatcacatccatgctttcaccaccggggatgctcaaataataaaacatctggcatttcgcgattatcttattagaaacaatgatatagcaactcagtacgctttaatgaaaaaaaacgcggtgcttttatgtgataacgatacccaccgatacagcatttataaagcagatttcattcaaaaacatcttcgtatggcgcttattgatgcagggcatctgagctga

SEQ ID NO: 93834 - DNA, 879 bp, Enterobacter aerogenes
atgcagcggagttttttacattggatgaagttaaccgactattttgaggccacacgaggctacctggaaaaacatggtaaaccgctggcgttatacagtgacaaagccagtgtattcagaataaacaacaaaaatgccactggtggtgatggctttacccagtttgggcgtgcgatgcatgaactgaatatccagactatctgcgcgaataccagctctgccaaaggccgcgtggaacgcgctcatctgacgcttcaggaccgactggtaaaagaactccggctcaggggaatttcttctgttgacgcagccaatgagtatgctgatgaatttatggacgattataaccggcgctttgccaaagctccgcgacatgactttgatgtgcatcggccacttgaacatgatgatgatctggctgcctttttcacatggcgggaaccgcgtcgcgtttcgaaatctctgacggttcagtatgataaagtgctctatcttattgatgacagtgaaatcagtcgcaaagccatcgggaaatacatcgaggtctggcattatccggatggccgaaaagaactcaggcttaacggcgttgctcttccctactccacttatgatcgcctgtcggaaatcgaccagggagctatcgtggacaacaagcggctcggacgtacactagaatatattaaactggttcaggacaaacgcgacaataaccgttctcaggcaatacctgctggcgatggaccttcacggcggcgcaggaaaccaactgataagaaatcccagcgatcactgaacggcgatgatatgctggaagctttgaaagttttacagagtcgttccggtgaaatattcggttctaatactcaaaaaacatag

SEQ ID NO: 93835 - DNA, 2196 bp, Enterobacter aerogenes
atggctttcccgattcgaaaacttctgctcgtctccttactgtccgcgctgggaagcgcgggggcgctggcggcggaacaatcccattttgaacattttattactcgtgatggtgctgcgttaaaagacggcgatcggctctttcgctttgccgggatccatgccccggagctgcatcgtatagaggatgacgcgagaggaacctgcaaagcggatccgcgcgggtgggggcaatatttcaaatggcctactgctgaagagcaagaaaactggattaaagccctggtgcaaacgggtgctaaagcacagcgcgtgtatgtgctatccgttcagcaggaaaacgacgcggcctgcggacgtgaaacgcatatcctgtcgccggaaacgcctgacggcatgccgcggctgaatgaagcggcaatgaaagtttatgacaacatgattgctgaagcagataagcaggggcttcgcctgattctaccgtttatcgatcactggtggtggtggggtgggagagaacagcttgcctcattttatcatgaaaaacctgaggatttttatcggacggacagtaaaaccttccaggcttatcttgacgtgattcgtcaggttataacccggacgaacaccattacgggacgccactactacgatgaaaaggcgattatggcgtgggaaacgggtaatgagctggaggacactaacgccgattttcttcatcagacatctgcctggatccgtaaatgggcaccccatcagcttgtcgtagatgggacttataaaaaggtgaatgatttcgcgctcagcgatccgaacgtcgacatcatcagcaatcactattacaccaatgccaataacaaccaccccgggcaggttcgtaaagatctggaggcgattggtggcaaaaaagtctatctggttggcgaatttggtctcctcgaccaaaaagaccttaacgctatcatgcagtctattgtgcatactgaggtcaatggcgtgcaggccgcgggcggctttatctggggttttcgcggtcatcggcatgatggcggtttttactggcacaaagagtataccggacactatagctaccatctgcctggcttcccggatgaggggaaagcgaatcaggagatggaggttgtcaacctggtacggactgccgccgcacaaatggctggtctgagcaaggtgccagatttgccggtaccagaagcaccgaggttacgcgagagcgattccccctttgccattaactggatggggtcacccgttggtcgttattacgacgtggaaagagctgtgcagccacagggcccatggacacgcgtcggaaaggacatttccgacggcaaaaatgaatgggatccatcgaaaatgagtcttttccgcgataattatcgcagcctgacgctcggccagacttactactatcgggtaatcgctaagaatgatagtggtcagtcagcaccttcaaacgtgattcgcctgaaacatatgcagaaaaaccttccaccggttattaccctgcaggacatgctttctaccactgtcgataaaggcgttcaactcaatgctgcctggcaggatgacaatctacctggcccgaaagtcagcgtagcgtggagccatgacggtaagaataacgttcacttctgtaacagcagtaaagaggaaacccgagtctggttctccgcgccggacgactatgcgttgacctttactgctgatgacgggttgctggaaagcagcaaaacgataaatgtcagcgtgaagcccgctgtgaggcctgtaccggcagattattgcagctttggcagcgggactatggatgttagcaagggaacacttaactccattaaaagtgaaaaagatacgttagccatcggagaagacggtttcctcgggcctttcgcgcatgacggagacagcgtgagctggcaggttagcgctccctgggacggtaaatttaccctacacgtgaaatttaacggcaaatggggaagcaagaaaaactcgttcatcgtgaacgacagaacgccagtcagcattgaatttccgcaaacggatgagaagggcaagaccatagtcgttcctgtttcgctcaaagaggggggtaataccatcagttttggaaagtttaccggcgactggggatatatgttcatcaaatcaattgaagttactgcagagtaa

SEQ ID NO: 93836 - DNA, 174 bp, Enterobacter aerogenes
atgaaattcaccaatgtgcgttatgtgcaaagtgaagcttatgaatatatacgaaatttgccagatgacgagtttgactggatgttgaaattacatcggtattatataattcaggcatgtgttttcactttatggattgtgattggtctaatttttataagttatattgaatag

SEQ ID NO: 93837 - DNA, 990 bp, Enterobacter aerogenes
atgaagggacaatcaaacctattaccaggttactgtattgtacagcagccgggaacattggattttcaagctcgcttattattcaataatatcaattgtgaatccgcccgttactttatgcagcttaatagtgatacgcagtggttaaagcctgggcaaataatggtcattaatgacccgagtaatcaaaatgcatttcaattacaggctttaaaacttgcaaagtgtaatgttaatggtgttatggctgggttgaactcagatgaagcgggttttttgaatcagcactttggtactatagcagcattaactaatgttatggataaatctcttggaattgtttctgatgctggtgaaaggtatttcacggaaatagagagaaaattaaaagaaatagaactggcttatcaaaggcaatatagaacccaaggggttttaatcggacagcaatttttcattgaacgacatagacttttctcagagctaaacgtactattaaacaagttatccaggttaacgctaaaaataaagccatacaatgatctaagacatgcacttggtttatcaagtaaagccattgtccatgaatggagtacggtaggagttggttctattcgtggttattcgacatatgttaataatgctgcaaaagctgctcgctttcttaaggctggagggtggctcgccattggttttgccagtgttaatacgactaatgaggtatacaatgcttgcagcgtgggaagagagcaaagctgctctaaaatagctgtaaaaaaatatagccaatttagtgcaagtcttgctggtggcatttatggaggtaaatatggagcaatggctggagctggtgtatgtgtgaccttcggcattgctactggtggtctcgggttactcgcatgctctattgctggggccgcagcaggtggttatattggtggtgaaattgctgatggggctaccgaatatatcatggataaattactgtga

SEQ ID NO: 93838 - DNA, 270 bp, Enterobacter aerogenes
atgtctttaatgaaaggcgcaggagcgctgctttttgtcgtgttgctaacaggatgcgcccacaatgaaccgcaacagctatatcgccatgattttgtgcttaagcacccgcttacgggtacacctatccccaattttccctataaaatcactacgccagacggcaaggtcttcaaaggcagaaccgataaaaatggcttaaccgtcgaagcggtatcaactaagccgggggattttattctcagcatgattcctgcgtcagagttatga

SEQ ID NO: 93839 - DNA, 420 bp, Enterobacter aerogenes
atgaaaaagagcattgcactgacgatggtggcgctggcctgcctggcggctaacgtccaggcagcagagaaacttgctggtaatgaaatacttgccgtacagaaaggcggggtgccggataaagtctatacccaacatcagccgaaattacgtatagcaacctataatatcggcaagaatgaagcgtctgataatgtggccgattttacggcacttaattcagcgattaaaaaaattaacgccgatattattgccgtcccggaagtcgatcacaaaactcagcgcagccagaaaatcgatcagcttaagacgattgccgatgctaacaatatgcattatgcctttggtaaagcgttagatttcgacggtggcgaatacggactggggctgctgtcaaaatataaaatcctgcattcttag

SEQ ID NO: 93840 - DNA, 297 bp, Enterobacter aerogenes
atgcagaatcacataggtagctttcgtgatgtatggttggaagagttttttttgcactcggcaccacataaaaaaattcctccagacatacataccacgctagctcgcaaactcgatatcatcaatgccgccgttacctatctggatttacgctcgccacctggtaatagatatgaagagctaaacggcaaattggaaggttattcgtcaattagaattaaccagcagtaccgcttaatatttaagtgggtggatggaaaagcggaagacctttacctggatcctcacaagtactaa

SEQ ID NO: 93841 - DNA, 336 bp, Enterobacter aerogenes
atgaaacaggcaaccagaaaaccaactaccgtaggtgacatcctgcagtttgaatacctggagccgctagatttaaaaatcaacgaacttgcggaaatgatacatgtgcatcgtaatagtgtaagtgcattagttaacaacaaccgcaaactaactactgacatggcatttcgcctgtctaaagccttcaataccaccgttgatttctggcttaaccttcaggctgctgtagatttgtgggaggtggagaatgacacccgcgcgcaggaagagtttagccgcattgttcctgcctcgaaatttatcgccagcaaagctgataagaaagtcgcctga

SEQ ID NO: 93842 - DNA, 1341 bp, Enterobacter aerogenes
atgacaacttatcctaagcgccacctgactaccggtggcgacccgcgcacgctggcagactacgcaaagctgcgtgaagaaatgcataaactcagccacccggcgcgccccgacgttgactggctatacgcagaacggctttgtctgtcgctgtttgaccgtaacggcgtagagctgcagactgcggcctggtatacgcttgcccgtacgcagttaaccggtttatccggcctgaatgaaggcctggctatcctggaaacgctgattacccgtcagtgggggagcctttggccacagctggtacacgcgcggatggaaatcctctgcggtttgggtaaacggctacagcaagcgctacgtacgctaacgctgacctatgccgatcttagtttgatttatgaggtggaagcgcatctgaaagcgctggatgctgcgctacagcgtctggaattaaagcatgccagtcagtttgatgcgttgctcaatttaatgcataacgcggcggtacggctggagaacagcgatggcgtaactagcgctgataccctaccgcacgtagtcgcgatggagaatgcttccacccatttggatgagcgggttgagcgaacgaagtgggtttatattgcgccgccggaaacgctaccacacgagcaagccggcaatgagcgtcagaattctgaaaaacgatggcgaccttttgtggccggtatgctgacgatgctggcgctggccgctgcggcgggatgggggtggcaggcgatggctaaaccagagccggaacagcggcaattcgctctcagtctggcgccattgccgacggtactttcgtcagatcagttacgctccttttctcagcacgcaccgccggcagacggtgggataaagcagacccggcagcagctgtcagatctggcccaactcaagccgaattgggccatcgactatagcgagcaactggtacaacaggcacaagtgctatggccggagcaggcgaaagcattgtcctcgcagtggcggcagcagatcatagccgccgcgctgccggcggaaaacctcaccgggtggtatcagggaatgcagcaactgcagcaattaactcagcgtctggatgcccttgatgaacagaagggcaaatacatgacggttagtgaactgaaatccgcggtgttcgccattactcagtcttttaatcgaaccgtcccggctgaagaacagttacgccaactgtcagcgatgacagaaggacaaatcagccgcgccgcgcagcaacaacaggcggaacaacacctgcagcagctgatagtctcttatgcgctactgaaaagtaaaacgccggaatag

SEQ ID NO: 93843 - DNA, 444 bp, Enterobacter aerogenes
atgccgcgcccctcactttacgacaccctgtttggtaatttctccggcggtctcgatctgcatcagatcggtgaagaaaatcaggtcattttatcggtgcttgataatatgcagcgtatcctcaactgccgggcgggcacgctggcgcatcttccggattacggtctgccggatatgacaaaaattctccaggggatgccgggtagcgcgcaccagttaatgaccacgctgtccgcggtactgctcaaatacgaaccgcggctgaatagcctccgtgtggagatgctcgaacagacacagccgggcgaactgcgttatgccatcgacgcggaactgaaagaaattggtctggtacgctatggcacggaatttatgcctgaaggcagggttctccttcgccatctgaaacagcaacagtatctgaatgcccgcaccgctatttag

SEQ ID NO: 93844 - DNA, 492 bp, Enterobacter aerogenes
gtggttgcttatcgacgttattacatcaaggggggaacctggttctttaccgttaatttgaaagaccgtagaagcaggcttctgactgaaagaattgcattatttcgctactccatctccgttgtaaaacaacgtcgcccttttatcattaatgcctgggtggtattgcctgaacatctccactgtatctggacacttcccaataatgatgacgatttttcttcacgctggcgcgatatcaaaggctgctttagcagaacattaaaacgacaacatatctggcaacctcgcttctgggagcatgccatacgtgatgaagaagattatcgccgccatgttgattacatatatatcaatccattaaaacatggctgggttacgcaggttatagattggccattttcaacctttcatcgagatgtccaacgcgggctatatcctgcaaactgggctggcgaaagctttgagcttagctgcggcgaacgccgatag

SEQ ID NO: 93845 - DNA, 345 bp, Enterobacter aerogenes
atgaataaaaaaactaaacattatgcatactgtttggctcgcgttaacgaaccggagatttttgaagtcaatacaaatgaaacagatagcgaaatactccgaatgtttaaacaagcccgtttagggcatgacatggagcatggtagtggagattaccaccttcaccggaaacgtgagaagtttaaagaaatgtgggaggaaaagagttcttctctaagcctctacgctgtttttataggtgagagggatgttacagagaaggatattattgatactagtgatgatgcactgctaccagaggaacttgcatatttgattgagtttcgtaaaaacaatgatctataa

SEQ ID NO: 93846 - DNA, 135 bp, Enterobacter aerogenes
atgccgaacaaccatattatggcgttagcgctcgcgctgtgcaacgccggaacaaatagctgggtgacaatcccccgtttaactgggaaagagcttagagaactgctagattttattaacgtattacggggatga

SEQ ID NO: 93847 - DNA, 207 bp, Enterobacter aerogenes
atgaaaaagctaattttattgggtctattgattctcagtggtcaggctacggcaactaaaatcacaatgacggatccacaggaggaacagacggagaacggtaagacgctttgcatctatgagaacagtatctacacattcacctacctaactaaggggaaatgcccgtatgcaaaaacattcaatacagaggattcaggaaagtga

SEQ ID NO: 93848 - DNA, 552 bp, Enterobacter aerogenes
atgacaacgactattggatacgtgagggtatccacctctgaccagacaatagagaaccagaaacagcagattaaagaagctggttatcacattagtaagtggtatgtagacgaagcggtaagcggttctgtgagagccgtagagcgttctgggtttggtgaactactcaactatgtacgagagggcgatacgctggttgtagttggtatagaccgcctagggcgtaacaccatagacgtattatcaacggttgagactttacaggccaaaggtgtgaaggttatcagtctccgtgaaggattcgacctgtcaacgccagttggtaaagcgatgctaaccatgatggcagggcttgccagcctggagaaagagctgatagcagagcgtagaaccgctggcattaaacgtgctcagtcagaaggggttcactgtggtagaccaaataaagcaacctcagaacaggttcagcagcttctttcacagggaatgtcaccaaagcaggtgcaggacgagttacatattagcaaagctactttttaccgtctgaaataa

SEQ ID NO: 93849 - DNA, 354 bp, Enterobacter aerogenes
gtgaaagaccagcatgcgtacatcgtgcgggtaggcgaaagcatttataaaatttcctggactgaaccaaccggtaccgacgtcagcctgatcgtcaacctgggcgacaaactgttccacggcaccattttcttcccccgctggatcatgaataacccggaaaaaaccgtctgcttccagaacgatcatattccgttaatgaacgcctaccgtgacgccggcccggcctacccgaccgaagtgattgatgaattcgcgactatcacctttgttcgcgattgcggcgcggataataacgatgtaattaattgcccggctaatgaattacccgcagattttcctgcaaatttgtaa

SEQ ID NO: 93850 - DNA, 729 bp, Enterobacter aerogenes
atggccctctctatttttattagccgtctttggcgattgaagaatattatcttaccggtgctactgctttttatgagctttggcattttagctgaacaaaggcttgagcatggcgtgctgcaagcctactggaaagcgcaatggagtgataatgctaccattaatgttcctgccctcggatttcgctattattggcttgatgaccagggtaacttaaaaaaagttatccatatttatatgaaaggcacgatgaaagaacaactggcgtttattcgccagaattttagtgagatcccggagaattttatcaggtttcgcgagtggtatgttaaccagtcgggcagtctgttggttaataatgtcgcgcagtatgccgaatgcaacagtgagaactatagcgccttattgctttcttttattccctcgcaagataaaccattatccaatatggacgatatgaatgcgcagatctcctgcggcggggacggacgctatccctggttaacgacttaccatttacatcatgaatggaataaagattcttttaaagagtggccagatgataatgcgaataatacatattccgttatgcgtgatgacgtggtgattaaaatacgtactatcaacaagttctgggtctatgccgccctttacgatgacagcaaaacggatggtatgagtgaaaaacgagggtacatcagggtaagtcatctgaaaccagataattga

SEQ ID NO: 93851 - DNA, 1191 bp, Enterobacter aerogenes
atgtctcttcgtttcagacaaacttttactctgtttccgggtgttagactcaacattggtaagcgcgggataagtgcgagcatcggtgtacctggtgcaactgtcaatgttggtcaaaatggaattagagcgacagttggactaccaggtagtggcttgtcgtatacaacccctaccttgtcctatggcgataggaactcagttagtattccattaaatccctcttctacagaacctcattttgtaattcctgaggattcctcaagccccctcccatcaagcgctaaaatttatatgcccaaggctggcatgaatgaaatctcaagcgcttcggtagaagtcctgacaagttcctctcttttacctttacgagatttgatcggtaaagcaagagaacaacgagcagaagttaaagctgatttacaagaggctcttgctgaggagtcaaaacaaaagagcgaactggttcgacgcaagtcaagtctattccgttggttttacaaacgacgcattactgaacttgagacagaacttcccctgacccaagcagaaatatctcgcctaaggtcatgggaagacaacacaaaaatagtcatagcattcgagaatagtgatgcctcacagcgagcatatgcagcaatggttcgcgcattcgatacgttaaaatctagcataaaaaaatgggatatcaccgctgacaaagcaacagaccagtttaccgaaagaacgttagcaactcgatctgtagatcgtcatcctgttacctttgactacagctcaacggatctcattcaatttacgggtcgtgcaatgcggtttgaaaatgtaaatggcgacgatatattgctttatcctggagttgctgtcataccacgtgttgatggagcattcgctctgattgatatacgcgaattacaaatcagtgcagaacatcggagattccaagaggaagacgatgttcccaaggatacacgtatagatggccatacttgggcaaaaacgaataagaatggctcaccagatcgccgatttaaggacaactatcaaatcccgatttgtgtttatgggaatcttaccttccattctcatacaggggtaactgaagaatatatggtatcgaatgcagatgccgcacaagcttttgctgaggcagtaaaatattatcaagcatcacttactgaatctgaatag

SEQ ID NO: 93852 - DNA, 393 bp, Enterobacter aerogenes
atgggatttccatcaccagcgcaagactatgaagataagggaatatctcttgatgagcggtttataagagacccgtctgcaacgtactttatgcgagcagcaagtacctactatcaagcggggatcattcatggggctttacttgtaatcgattcttcgctgagcccatgtgatggttcgttactcatttgcgcggtcgacggtgagcttaagataaagagatacagagtgatgcctcgaccttatctggaagatctgcagacagggagaagggaagagatacctagagacaatgacgatggctacagtaaccagcgcgctgtatttggagtcattacttatattatcaatgatgcacgtttgggggagtttgatgattgccctgttatgtga

SEQ ID NO: 93853 - DNA, 243 bp, Enterobacter aerogenes
atgtttgttgaactcatctacgacaaaagaaacttcgaaggcctgccagatgcgaaagcgctaatccatggcgaactaaccaagcgcatacatcgcatctttcctgatgctgatattagggtaaagccaatgatgtcattacccgctatcaacactgatgcaagcaaacacgaaaaagaaaggattagtgcagctattcaagaaatgtttgaagaagcagatatgtggctgggggaagaatga

SEQ ID NO: 93854 - DNA, 177 bp, Enterobacter aerogenes
atgaaagacgaaaacgaccctaagcaacttgaagaaatgacaaaaaaattaactgaatatcttaggaaaaaaggtctggttctacctactactgaatgcgagctgatagtgaaacttgaaaaaggtgaaattacttgggtcgcatttcagcaaggagcgccacatactttgcactaa

SEQ ID NO: 93855 - DNA, 1134 bp, Enterobacter aerogenes
atggctaacattagtgacgaattagcggccagtattcaaaagtgcttcgaccgcacctacgtagatttagcgaaccaacaacaattcttgttcgggactggcgacgtgacgatcacgaagccggacggtacaacggggacggtaaaatcgtgggcgcagttcctgagcgaatacgccacgcgacagcagaacatcgacacggcgctgaaggacgtagcgaagacgacggcagccaacacgtggacacaggcgcagacgtggaatgtaagcagcacctttaaaaacaacctgacggtcgacaagaatctaacggttaacggaaatttaaacggcgtacagattgccgggtctcatatcgagctaaccgcaccaacgccttacattgattttcactatggcaatagtacggctgactacacgcatcgcctcatccccgaagacggcgcgcttgccgtgtcacctggctggcgtgtgtacggtaatcagcggacgtttggggctaatacccttgaaggcaatctctggtggggattcattgctacgcgattcgacgaacctggcgcgccagctaacggcactatcctgacgtctcctaactcatgctggcggttcaagacgcgaggcaaagacagcaagggtgcagaggcggggatggctacggcatggtttgaagagcaggtgggaacgaaccaccgtctgacgtttagcgtccagggattcaacgctaaccagcaatggtggagcttttacagcgacggaaggatcgcaagtagtcagaacgggaacgtgcagttccagggaacgtctgacgctcgcatgaagcacgacatcaaaccgaccgatgggcagctatctgttgaccgcatcagggcgcttaagttggtcacgttcgtctataacgacgacgagcaggaaaggacgcgccgggggattatcgcgcagcaggcgcagaaggttgactctcagtacgtgaagaacgtcgccatgtcctacatgaaggacggtgagcagttgaattttgaccgcctgcagctggataacaacgtgattctgatggacacactggctgcggtacaagtattgattaagcgagtagacgaactggaggatagattgaataaaatttcagattaa

SEQ ID NO: 93856 - DNA, 591 bp, Enterobacter aerogenes
atgcaagatgtcatgatgcgtattgaattaagcggggcgctcggtaaaaaatttgggaaagttcaccaccgattgatttctacaatccatgaagctggtgtagcattggcaaaaaccatacctggttttgaaaaattcatgatatccagtaaggaccgtggattaacttatgcagtatttaaggacgagaaaaatattagtgttgatgatttaggatttcctgtttctggggaagtaattcgtatcgtaccagtggttattggaagtaaaaaggctggagttctccaaacaattttaggtgttgtattggttgttgccggagcagtagttaactggtggactggcggtactgcagggacacctattatgcagtttggcgcggcaatggctttaggcggcgtagttcaaatgctctctccacaaccagcaggactggcacgaaaagaatcccccgacaataaagctagctatgcatttggcggtgtgaccaatacagcctcacagggttatcccgttggtttgctttatggtaagcgacgaattggcggggcaattatttctgcaggtatctatgttgaagaccagcaataa

SEQ ID NO: 93857 - DNA, 414 bp, Enterobacter aerogenes
atgaaaaaaattgcactggcgttagtgatcgtgggaattacagggtgtgcgactaaacctgttactaatgaccaagcaaaaaacataccttctaaacaaattttaaattcatcgcttttttctaaaaaagagggtacgggcgaggtgatcataaaaagagattctggttttatgggcagtgcttgtatgactcgaatttatattgatggtaaagaaattgctgatttggatacggcggaaaaagcggttatttatcctgttacaggttctcatatctttagtgcttggcctaaaggtatgtgtggtggcggaatgagtgaacagtcaggagatgttatcgaagggaaaacgttaatgtatcgtgtaggttatgggaccaatggtgattttggcatataccccacagcattttaa

SEQ ID NO: 93858 - DNA, 711 bp, Enterobacter aerogenes
atgcgccagaaaacgattgaggcgatacagattcatgctgcagctgaatacccgcgtgaggcttgcggcttgattgcccaaaaggggcgaatggagcgctatttcccctgcataaatatggccagcgagtcgaataataatttcgtactggcaccggaggattatgcagcggtagaggactggggaacgatcatcggcattgttcacagccaccctgatgcgaccacgcaacccagcgaactggataaggcacagtgcgatgcaacgctgctcccctggcatattatcagctggccggagggggattttcggactatccatccccgcggtgaactgcctctccttgagcgcccgttcgtacttggtcattatgattgctgggggctggtaatgagctatttccgacagactcatggcatcgagctgcacgattaccgcgttgattacccctggtgggaaaacgactatcccgaaaacttctaccaagattgctggtatgaatgcggatttcgtgaatttgagggtccaccgcagccgggtgatatggtgatcatgcaggtgcagtcggacaaatggaaccatgccggggttttgctggaaggtaacatgctgctgcaccacctttatggccatctcagccagcgcgtgccgtatggtggttactggttagacaggacgatgaaaatcgtccgatatcattctctgtgttaa

SEQ ID NO: 93859 - DNA, 756 bp, Enterobacter aerogenes
atgagtcttcacgctgattatcaaaaactggagccgggagatgaaatccggctttttgaaattgatggtagtgcttttaatatgggggatattttatatttccacggatataacattccccatactgaagcggaaattttagccgctggtggcgatgaatcgaaattgcccgctaaaagtatctggtggcagggaaccgaatataaagcgtggccgtgtgaattagagggaatcgaatcctcgacttcaggaagcgacgcgcagccgacactgagggtgggcaacattgatggttcgatttccgcgttgtgtttgcattatgacgatcttgcgatggctcgggtcattatccatgagacacaaaagcagtatctggatgcgcgaaatttccctgagggtaatgccaccgcagatccaacgcaggaaaaacggcacctttattttatcgacaccaaaagtcttgaaaccgatgaaacggtggagtttgcgctcgatagcccgatggggttgcaggggaaactgatccctacccgtcaatatcattcggtttgtacctggtgtattcgcaataaataccgtagcggcgatggttgcgattatgccgggacaaagtatttcgacaagaataacaagccggttgatgatccatcgaaggacgtctgcaacggaacactcactgcctgcaaactgcgttttggcgagcataacgagctgccgtttggcgggttccctggcacgtcgctgataaggagctaa

SEQ ID NO: 93860 - DNA, 348 bp, Enterobacter aerogenes
atgactattgaaacattttcctggcgaattcaggccgccagtcagccggcgacaacgagtaaggataatattcgcaaggcgcaatttggcgatggatatgcgcaggtttcaggggagggaataaacccggaaaccttaaattatgcattttcatttaccggagatctgcacaccggcctggatatttataaattcctgcgacggcataaaactaaatcctttgcctttaaaccaccgtatgacgagttagcactatggcgggttcaggctgacagcctgcaaaaagccattctgaatagcaaagtcatgacagtcaccgcaacatttgaacaggcattcgtaccatga

SEQ ID NO: 93861 - DNA, 3147 bp, Enterobacter aerogenes
atggcccagcagattagcgaccttgtcattaacctggatgtcgacagcgccacatttaccgaacagattgccaggattaaggggcaactgtccggtatggcgaatgaatcggacaaagtgcagacgcgcatgcgtagcgcggcagaggcacaaatcagtgcgctgaaaactaccagcgccgccagcgcaggcgccgtgtccgatatgcagaagcgacaggcggatgccgctgccgggcttcagagcgaactgcaacgggtttccaaatcggtcgatgagacttaccagcgcgttaccgggttaaaccagcgctatcgcgagaacgatgcgcaggctgaggcgctggcgcggcggcaggatgcgctggcggagtcattctttcggcagatagatggcgttcgatccctcagcggtgaaacacggtcgctggccagtatccaggaacaattccgcaaggcccgcgcacagggaaacatcactcagggtgattatctctccctgatttcccgcaccacggcccggcagaaagaacttcagcaggttgaggaaaaagcgaaccaggcgcgcgagaaatttcttcgccagctgaaggcgcaggttgtcgagcaaaagctatctggtacagagctcctgagaatgaaagcggcgcaggtgggcgccggcgatgccgctgaagtttatatccgcaaactggaagcggcaaaggtcgccacgcacagccttggtctcgagagcgctggcgcacgtcgggaacttggcgtgctggcgggggaattattgcgtggtaatttcggcgcgttgcgtggctccgggataaccctggcgaaccaggccgggtggctcgaaaaaatgatgacgccacgcggactggggatcgccggcgtggtcggtggcatagcggcatccgtcgttctgctgggaaaggcatggtacgagggcgggaaggaagccgaagagtttaacaaacagcttattctcaccgggaactatgccgggaaaacatcgggacaactgcaggcgctggcgcggaacatctcaggaaatggagtcactcagcacgccgcggcagccgtattagcgcaggttgtcggaagtggggcattcggtggcgccgacgtcgagcgcgttgccaacgtggctgcaaggctccagcaggcgaccggccaggcggtggaggaaactattaaccagttcaaacggctgaaagaggatccggttaatgcggttgcaacgctgaatgagtcgctgcattttctgaccgcaagccagtttgaacagatttcagctgctcaggcgatgggggattcacaccgcgctgcagagctcgcgatgcgggcctattccgacagcgttatccagcgcgcaaatgcggtgaaggaaaacctggggacactggaaactgcgtggaactgggtgaaaaatgccgccagcggcgcctgggatgccatgatgggcattggtcggaatcctgatactgccatgaagcggcagggggcttttgcggactggcagtcagccgaaaaggtataccgcgcgctgtcgtccaaccttaaagtcgatcctgactatgcaggaaacaatccgctggtgagagctgatgcagagcgtcttcgcaacgcccgtgagcagttatctctcaaaaaacaggcctatgatgaggctgataaagcatatgctcaggaggggttagccgcggcgcgcgagaagctgcgcaatgaccagcagcagcaggcaataaggaatcagcagcagtttaaccagcttcttgatgctggcctgaaacctgccgagcggcgggcccgtgctcaggaagaatttaataagctggttgcgaaaaataaacaggatgccatcgatgggattgctacccgctggacggacagcgatatcgcgaaaatccgcgcaggcatcgatagcaaatacaaagatccgaaaacgccgaaaggcaggcaatataccacgcccgctggcagtaaagctgaggaaggggcacaggcggagctgctgacgctacaggcgcagcttaaaaccctgcagcagcataccgacgttaacgatgtgatcagtaagcagcgccgcgacctctggcagacggaaaaccagtatgccgttttacaggaggccgccggccgccgccagttgtccacgcaggaaaaatccctgctggcccacaaaaacgaaacgctggaatacaaacgccagctggccgatctcggtgataaggtcgcccggcagcagaagctgaataatctggctgatcaggccaataaattcgcgcagcagcagagtgcgatccgggcggggatcaaggctcaggccgaggggctttctggcagggagtcgaacagaaggagcacgcttgaaaagctgagtgaaacgtacgccttcaatcctgatgcgcagcggagggtgctggcggaacagcaagccacctatgaagctgaggatgcattgcgcggtaactggctggccggtgccaaacagggctgggcggagtatcaggattccgcgactaatgtattttcctctgttcaacaaatatcccaggccaccttcgggggtctggccaatcagctgacgttgctcaataccaccggcaaagcgagttttaaggaattcaccacatccattctgaagatgatcgctcaggtcattgatcagcttattgtggcctacacctttcaggctgcgatggggtggatcagcggcgggagcagttcttctaattctggtcagtcttttgccgtcccttcctatcgtccctctggctttgatggtggtggttataccgggcatggtggtaagtacgagcccgccggggttgttcaccgcggtgagtttgtattcaccaaagaggcgaccagccgcatcggcgtgagcaacctttaccggatgatgcgcggttatgcctccggcgggtatgtcggcaacgcttccagtccagcaagtgtgtcccctggtggtgtaatggtcaacatgggcggcgtctatatcagtagtggcaacgaacagcagtctacgcagcggtcagcgattgacagtaacggtatcctcaagcaactgaaacccgccatcattagtgtcgtcagtgaacaggcccaacggcccggcacgccactctggaaggcaataaaagaagggcgttaa

SEQ ID NO: 93862 - DNA, 429 bp, Enterobacter aerogenes
atgagcatgtttttgaagaaagacgaatttacccataacggcgctacggtgacgatcaccgaattgtcggcactgcagcgcattacttatctcgaatatctggccgcagaagaaaaagccttatccaccatttctgatgacgtggatgaccagacaatgtccgccgggctggtcagcatgagtattcgcgcaggcgcgcgcctgattgcgctctcgctctggcataacgatccgaaggggccatctgaagaggaactccaccagcaggtgatgagtacctggccggcggaagcgattggcaaagcggaaatgcagatcaagctactctccggcatgctggcgcccgttgctgaagaagatcaacccattgatgccactgcgctgggcgatgaaccgggtgatgaacctgttactgcggaaaagccctag

SEQ ID NO: 93863 - DNA, 744 bp, Enterobacter aerogenes
atgccaacacctaatccacttgatccggtaaaaggggcgggaacaacactttggttgtacacggggaccggggatgcttatgcaaaccctttgtccgatgctgactggcaacgcctggcaaaaattaaggagctgacgccgggtgaaatgacggcggagtcctacgatgatacctatcttgatgatgaagatgcagactggaccgcgaccgcacagggggcaaaatcggcaggtgatacatcattaacgctggcctggaaaccgggagaagagggtcaaaaatcgctggtggcctggttcgtcgatggctctgtacgggcgtacaaaattaagtatccgaatggcactgtggatgtgttcaaaggctggtgcagtagcctgggtaaagccatccccgcgaaggaagtgatcacgcgtaccgccaaaatcaccaataccgggaaaccggaactggcggaagaaagcggcaacccgccgatcgcagtgaccggcatcaaattcgacaaggcaacggccagcgtggccgtcggcgcaaccacaacgctaaacgtcactttcctgcctgccagcgcgtcggaacagtctttccgtgcggcgacctcggatagcgcgaaggcgaccgtggccgtgagtggcaaatctctgattgttaccggcgtggcggctggcgcggccgacattattgtcatgagtaatgacggtaattttgtggcgacctgcaaaactaccgtgacggcgtcctga

SEQ ID NO: 93864 - DNA, 399 bp, Enterobacter aerogenes
atgaaacataccgaaatacgccaggccgtgatcgatggtctggaaagcgtgatagggaatagtgccattttttttgatggtcgtccggctgtcattgaggaagaagattttcctgctgtggcggtttatctgaccgatgccgaatacaccggggaggagctggatgctgatacctggcaggccactctgcatatcgaagttttccttcctgcccaggtacctgactccgaacttgatgagtggatggaaacccgggtttacccggcaatctcaggtatctccgcgctgagtggactgattaccgtgatggtacagcagggttacgaataccagagggatgacagcctcgggctctggagctccgcagatatgaaatattcaattacttatgacatgtga

SEQ ID NO: 93865 - DNA, 585 bp, Enterobacter aerogenes
atgggtattaaggggctggagcaagtcattgcgaacctgaacagccttgatcgcaatatggtgcctaaggccagcgcctgggcaatcaaccgcgtcgccagaactgccgttaccgcagcgacccgaaaagtggctaaggaaaccatcgcaggggataaccgcgttaaaggcctcccggtcaaactggttaaacagagggtaagggtcagcaaagcatcttcaaatggccgaatgaacgccaggataaaggtcaaccggggtaacttgccggcgatcaaactgggcgctgcccaggtccgcttaaccagaaagaaaggggcgcttctacggagagggagtgtcctgaagatcgggaaatatcttttcagggacgctttcattcagcaattagccaacggtcgctggcatgtcatgaagcgtattgaaggtaaaaatcgctaccccatcgatgttgtgaaaatcccactggctgcaccgcttacaactgctttcgaagcggagaagaaacgcatgcttgatgtggagatgccaaagcaactggccgctgcgctcaagcaacaactgaggttacacctgaaacgatga

SEQ ID NO: 93866 - DNA, 354 bp, Enterobacter aerogenes
atgaccgatttcgataatgttttcgacgctgctatatcgcgggctgatgaaacgatccgctcaactatgggaacggtggcgtttatcacctctggcgggctctccgggttgagtatttctggtgtctttgatgatccagaaaatattggttatgcggttcccggcgtgagagtagagggcacaagcccttcattttttgtgaaatcgactgatgccagcgagttacagcggctggattccctcaccattaacggagtttcttactggattgaccggattggcccggacgattgcggatcctgtcatctctggctgggcaccggacacccccccgccggaaaccgccgccgatag

SEQ ID NO: 93867 - DNA, 420 bp, Enterobacter aerogenes
atgaccaaagaagagttaattacccgcctgaaagagctgggcagcatgctgaaccgtgaggtcagtctggccggatcgaaagaagagctggcgctacgtattgctgagctggaagaagagcttggggatgatgccgacgatggtgacgatagcaatgaaacgggtaccggaactacggcatccggcagtgaggagaaggatagcgatgcgcagggtaacgcattaacgccggtgccccaggaaacaaagtctgcatcagatgacctggtcgcggttaaaacgctcacgacgttacacctcgaagcgctgcacgcggtaaagaatgaacaggtgagtcttgttttgccgggaaccaccgttcgtgtcagcgccggggatgcagaagagctgattgcacggggactggctgtcgaactatag

SEQ ID NO: 93868 - DNA, 1026 bp, Enterobacter aerogenes
atgtcagtttatacaacagcccaactgctggcggtcaatgagaagaaattcaaattcgatccgcttttcctgcgcatcttcttccgtgaaagttatcccttcacgactgagaaggtctacctgtcgcaaattccaggcctggtcaacatggcgctgtatgtgtcgccgattgtctccgggaaagtgattcgctctcgaggcggcagcacgtcagaatttacgcctggctatgtgaagccgaaacacgaagttaacccacaaatgactctccgccgcctgcctgatgaagatccacagaatctggcagatcctgcttatcgccgtcgccgcatcattcttcagaatatgaaagatgaggagctggcgattgcccaggtcgaagagaagcaagcaatcgaagctgtgctctatgggaaatacaccatgagtggggaagcatttgagccagttgaagtggatatggggcgcagtgccggcaataacattatccaggcgggggcggcagcatggtctggccgtgataaaaaaacctatgatccgaccgatgacattgaagcctatgcgctaaatgccagcggtacgatcaacattatcgtgttcgatccgaagggctgggcactgttccgttctttcgatgccgttaaggagaagctggatactcgccgcggctcgaattctgaactggaaactgccctgaaagacctgggtaaagtcgtttcttataagggcatgtacggtgatgtcgccattgtggtttatgccggtcagctcgttgaaaatgacgtcaaaaaaaatgcactgccggacctgtcaatggtactgggtaacacccaggcccgtggtctgcgcacctatggttgcatccttgatgcagacgcccagcgagaaggtattaacgcttcaacccgctacccaaaaaactgggttcagtcgggagaccctgctcgcgaattcaccatgattcagtcagcaccgctgatgttgctggctgatccggatgagttcgtctccgtaaaactggcctaa

SEQ ID NO: 93869 - DNA, 333 bp, Enterobacter aerogenes
atggctaacactgaagagtttacacactaccagccgctgggtaatagcgacccagctcacaccgcttatggcgctggcgcactggcagcggaaacacccgctatgactccgttaatgctggaggcgacggcgggaaaactggttgcctgggacggcgagcatgccggcgcggcatgcggcatcctggcggtagccgccgaccagaacagcaccgaacttaccttttataaatccggctccttccgtgttgaagatattcactggccggatgcagtcaccgacgacagcattaaacgtaatgcgtttgctggtactgctatcagcatcgtttaa

SEQ ID NO: 93870 - DNA, 1332 bp, Enterobacter aerogenes
atgacgcccgagctgcgtaaccttccacatattgccagcctggcatttaacgaaccgctgctccttgaacccgcctatgcgcgggttttcttttgcgcgctggcaggccaactgggcattacccgcctgactgataccgtatcgggtaccaccctgggcaccgagcaaatggcggaaccactgatgctattcggtaacgaggaggccgggccgcgcccggctcgtagctatcaggtaatgaatggtattgcggtattacctgttgccgggaccctggtcaataaaacccgctcactccagccgtattccggcatgaccgggtacaacggtgtaattgcccgcctgcaacaggctatcagcgatcctgatgttgacggtgttttgctggatatggatacgccaggtgggatggtcgccggagcgtttgactgcgccgacattattgcccgggcccgcgatactaaacccgtctgggcgctggcgaacgatatgaactgcagcgccgggcagcttatcgccagtgcggcatcacgccggctggtgacacagaccgcaaggacggggtccatcggtgtgatgatggcccacagcaattatgggcaggtgctgaaatctcagggggtcgaggtcacgttgatttacagcggcgaccacaaggttgatggcaacccttacgaaaaattgccaaaagatgttcgtgaagcttttcagtcccgtatcgatgccacccggcagatgtttgctgaaaaagtggcaggttatacgggaatgtcggtgagggcggtactcgatactgaggctgcggtcttctccgggcaggagtccattgatcatgggctggcggacgaacttgttaacagtacagatgcgatcggcgtaatgcgcagcgcgctggataccaaaaagaccatccatatcggaggaacgatgaagacaacgacgacgaatgcagctgcaacccaaccagacgccaatgccgcaccggaagccaatggagcaattgtaactgctccggcagcgccagcagctgctgcacccacaccggatgtaaatgctcaggttgccgcggcggtctctgctgagaatgcccgaattatggggatcctgaactgtgaggctgcaagcggtcgggaggaacaggcccgtgcgctggccgaaacgccgggaatgacggttgagcatgcacaacgcattctggcggcggcgccgcaaagttcacaggcccgaagcgaaaccgcgctggaccgcctgatggaaaccgcaccagaaacgctggcgtccggagcaccggctgccagtgaaaccgatgatttgatgaatacccctgtttaa

SEQ ID NO: 93871 - DNA, 1593 bp, Enterobacter aerogenes
atgaaattaccagcacttgttggacccgacggtaaaacgtcgctccgggaatatgccggataccatggtggggctggtggctttggtggccagctgcgcgcgtggaatccacccagtgaaagtggtgatgccgcactactgccgaacttccagcgtggaaacgcccgcgccgacgatcttgtccgtaataacggcctcgcggcgaatgcggtacagcttcaccaggatcatattgttggttcatttttccgtcttagccaccggcctgcatggcgctatcttgggatcagcgaagaggatgcgcgtgcgtttgcccgtgagtgcgaggatgcctggaaagaatacgcggaggacgaccactgttttattgatgccgaacgtaaacgcacgttcaccatgatgatccgtgaaggggtggccatgcacacttttaacggagagttatttactcaggcgacctgggataccagcgcgaacaggctatttcgaacacagtttaagatggtcagtcctaagcggatcggtaatccaggcaatcagggcgatacccgaaattgccgggcaggggtaaggattaatgatgctggtgccgcccagggttactacgtcagcgaggataactatcccgggtggatggctcagaagtggaattatattccgcgtgaactacctggcgggcgaacggcctttatccatgtgtttgagccaatggaagatggacagacaaggggagcgaatcagttttatagcgttatggagcagatgaaaatgctcgatacgctgcaaaacacccaactgcaaagcgccatcgtcaaggcgatgtatgccgccacgattgaaagtgaaatggatacccagacagcgatggatttcatcctcggtgcggacaatccggagcagacgaaaaagctgaccggatggcttggggaaatcgcaacgtattatgcggccgccccggtcagacttggaggggcgaaggtgccacacctgatgcccggggattcactgaatctgcagtctgctcagaataccgataatgggtattccgtattcgagcaatcgctcttacgttacatcgccgcggggcttggcgtttcttacgagcagttgtcccgcaactactcacagatgagttactccaccgcacgcgctagcgccaatgagtcctgggcttatttcatgggccggcgcaaatttatcgctgcccggcaggcgagcatgatgtttttgtgctggctggaagaggcgatcgtccgtcgtgtcgtcagcctgccatcccgcgcccgttacagtttccaggaggccaggacaagctgggcgaactgcgactggatcggctccggcaggatggcgattgacggacttaaggaggtgcaggaggcggttatgctgattgaagcaggcctcagtacctatgaaaaagaatgcgcgaagcgcggcgatgattatcaggaaatctttgcccagcaggtgcgtgaaacgatggaacggcgacaggcagggttaagaccgccttcgtgggcaactgcggcgttccagtctggtctggagaattccggcaaggaggaacaagatgacgcccgagctgcgtaa

SEQ ID NO: 93872 - DNA, 207 bp, Enterobacter aerogenes
atggcaacacagtctgaactggacagtgcccgcgccgcacttcatgacctgatgacagggaaacgcgttgcgacggtacagaaagatggccgccgcgttgagtttactgccacgtcagttgctgatttgaaaaaatatattgccgaacttgaagttcagattggcatcaccagtcgccggcgcgggccagcaggattttacgcatga

SEQ ID NO: 93873 - DNA, 1923 bp, Enterobacter aerogenes
gtgaatatatcgaacagtcagattaaggggctgcagtcatccgcacgcgccgggctgcgctcactctatcgcccggagccgcaaacggcagtggaatgggcagacaaaaattattacctgccgaaagagtcggcataccaggaagggcgctgggtcacgctgccttttcaacgcgcgataatgaatgcgatgggaaatgactacatacgggaagtgaacgttgttaaatctgcccgtgtcggttactcaaagatgctgctgggcgtctattcctattttattgagcataagcagcgaaattccctcatctggctgccgaccgacggcgatgccgaaaactttatgaagtcgcacgttgagccgacgatccgtgatattccagcattgctggcgctggcgccgtggtatgggaaaaaacaccgcaataacacgctcagcatgaaacgattctctaacggacgtggcttctggtgtctcggcggtaaggctgccaagaactaccgtgagaaatcggtcgatgttgccggttatgatgaactggcggcattcgatgaggacatcgagaaagaaggttcgccaacgtttctgggtgataagcgaattgagggctctgtatggcccaaatcgatccgcggctctaccccaaaaattcgtggtacctgccagattgagcgagccgccagcgaatcgcagcattttatgcgtttccatgttgcgtgcccgcattgcggggaagagcaatacctcaagttcggcgatagggaaacgccttttggttttaaatggtctcccggtgagcctgccagcgttttttacctgtgcgagcataacggatgcgtcattaagcaacaggagctggatttcactcatgcgcgctatatctgtgagcgaaccggcatctggacgggggacggtctgaactggttctcttcctcgggtggcgaaatagacccgcctgacagtgtgaccttccatatctggacggcttacagcccgttcaccacatgggtacagattgttaaagagtggattaaaaccaagggtgatacaggcaaacgcaaaactttcaccaataccactctcggggaaacctgggaggcgaaaattggtgaacggcctgatgccgatcttatcgaagagcgaaaggaactctttgctgccgcagtgccggatcgcgttgtctatcttactgccggaattgactcacagcttgatcgttatgaaatgcgagtctggggttggggacctggtgaagaaagctggctggtggaccgacagataatcatggggcgtcatgatgacgagcagacccttcaacgcgtcgatgaggcgatcaacaagacctataaacgccgaaatggcgcggagatgagcatttcccgcatctgctgggatatcggggggattgacccaacaatcgtttatgtccgttcgaaaaagcatggtctttttcgcgtaatccccatcaaaggtgcttctgtatacggtaaacctgtagcgaatatgccccgtaaacgaaataaaaacggggtgtatctgacggaggtgggtaccgatacggcgaaggagcagatttataaccgattaacgcttattccggttggtgatgagccaatggccggcgccgttcattttcctaacaacccggaaatcttcgacctgaccgaggctcagcagctgacagcagaggagcaggttgaaaaatgggtaaacggcgagcggaaaatactctgggacagtaagaaacgtcgtaacgaggcgctggactgttttgtctacgcgctggcagccctgcggataagtgtttcccgttggcagctgaatcttgagtctcttctgataagcatgcaggaggacgaacttacctctaaaccgaaaaagaccctggcggattatgcccgggcattagccggagatgaataa

SEQ ID NO: 93874 - DNA, 546 bp, Enterobacter aerogenes
atggaggtaaacaaaaaacagctctccgatatttttggtgtcagcgttcgtacgatccagaactggcaggatcaggggatgccggttgtacgcggcggcggcaaaggtaatgaggtgctttacgattccgctgctgcgattaagtggtttgccgagcgcgatgctgatatcgaaaacgaaaagttgagaaaggaagtggaagagctccgtaaggctggtgaatcagatctacagcctggaacgattgattatgagcgctaccgtctgacccggtcgcaggctgatgcccaggagctaaaaaacgccaaaagttctgctgaggtggtggagaccgcattctgcacgttcgtgctttcacgcgtggccggcgaaatagccagtatcctggacgggatccccctgtcggtgcagcggcggtttcctgagctggagaatcgacacattgatttccttaaaaagaacgtaatcaaagccatgaacaaggcagctgcgctggatgaaattataccggggttgctgagtgaatatatcgaacagtcagattaa

SEQ ID NO: 93875 - DNA, 420 bp, Enterobacter aerogenes
atgcttaatcgtaatgatctgaccctttcgcttttctatgcttccagcacgaatgtagaaggcgaaaaagtcgcgacattgaccgttcaggtgaacaattccgacatggtggccatgcagagcaacaagctgcagtgcatcactgataaggctggtaagaaggcttattccatcggcgagcagatggtctccaatggctctgatccgttgctggttgctctggagagctactggcgccagaacactgaggcggtcgtaaccgggttactggtcgatgttggtgacttcattgcaggccacatcagccagtcctcaacgttcctcggcttcaatgggttgaaggtcttcgagaatgaacccctgccggcacgcatccccgaggatgtgctgcaggccgacggcggcgcatccgcaggctga

SEQ ID NO: 93876 - DNA, 255 bp, Enterobacter aerogenes
atgctcaagctcaaaccgctgcagcgcgtgctgctgccgctaatctctctggcactgttaaccagctgcgccagcaggcaaaagcctttgccacccgcctggacgccgcaaagcacaccacaagtcttgccgctaccgtcagaagcaaaacaaccggcgccaccgccggaatgctcgccgacatgcttggagaccttgcagaagaggctcgacgatatgctgcaatcgctgacgaacgctacacagcagggatga

SEQ ID NO: 93877 - DNA, 528 bp, Enterobacter aerogenes
atgacgaacaaagtaaagtttagcgctgccatgctggcgcttctcgctgccggagcaacagcaccagaattgtttgaccagttcatgagtgagaaagaaggtaatgcgctggtggctgtcgttgatcctggcggcgtctggtcgttatgtcatggcgttatctttatcgatggcaagcgtgtcgtaaaaggtatgacggcgactgagtctcaatgtcgaaaagtgaatgcaatcgagcgtgataaggcgctgtcgtgggttgaccgcaatatcaatgttcccctgaccgagccgcaaaaagtcggtattgcgtcattctgcccatacaacatcggcccaggtaaatgctttccttcgacgttttataagcgcatcaatgcaggtgaccgtaaaggggcatgcgaagcaatccgctggtggattaaggacggtgggaaggattgccgcatacgctctaataactgctacgggcaggtaactcgccgggatcaggaaagtgcgctgacgtgctgggggattgaccagtga

SEQ ID NO: 93878 - DNA, 216 bp, Enterobacter aerogenes
atgtatcgaatggacaaactgactacaggcattgcttacggtgcgtcagccggtaacgccggattctgggtgcttcagttgctggacagagtcagcccgtcgcaatgggctgccatcggcgttctcggaagtctgatgtttggcctgatgacgtacctgacaaacctctatttcaaaatcaaagatgatcggcgaaaggccgcgcggggtgagtga

SEQ ID NO: 93879 - DNA, 189 bp, Enterobacter aerogenes
atgaaagaaggctattactggattcagcacggcggaattgtgcaagttgcgtacttcacgccggaagagtttgaagatattgaaaccggcaagatagttattggtgtatggcatctggccatgaatgacgacatttgccacaacggtgaagcagaggtgctcgaagggccgctgattccgccgcaataa

SEQ ID NO: 93880 - DNA, 906 bp, Enterobacter aerogenes
atgcaaaatgatactgaatatgattctttttctactaaagatttcacggttgaagtctatgaagaattactggatgaatttgatgctgtaatgtgtgaagccttatctatgaatcaatttacagcaggtcgatatgttgcgcctcatattggttatggctctcaaatatttacaaggttatgcattcatggggaatgcttgttaagttctgcgccaatgtcaagatggttcaaaaaagacttccacttttgggatttaagttgcatagctccgcatgtgagggcaatcatggaggggtatctgttatatatgtatatttcggaagagcctctttcagaaaatgaatggaaggcaaagctatggactatgcatatgaatgattgcagtaagcgattgaagctcatgcagtcgatgggggattttgaaaaagccaatttctttgagactgaacgagctaagattagcgatgagttaaattctaatcgatttttccttgagttaccatcttcagtaagaaaaggttgtcttaacggtaagtatttgatgatttatcctagggatgagttggttttaaaatacggactaaataagaatgtatttgataatatgtttgatatattatctaattatattcatatactacctatttcatactatagtcatgaggcaaataaaagaggctcaggcctttttaatgatactgacttgggatacatgtgtatgtgcctaggcatagtcatacatttaatgcgtacatgtaatgacaggttagaagcttttttccctgattcaggtgtgtgccgaaaaggaaaaaaatctacgttctctcctggtcctaaggagaatctaccccagcttgtgagagagcgtcaaaacagaaataaaaaaaagaaaagaaaaaaataa

SEQ ID NO: 93881 - DNA, 348 bp, Enterobacter aerogenes
atgcgtgatatgtacgaagtaatggatttatggggagcatgggcggctgctgatagcagcggtgttgactggcaaccaatagctgctggttttagggggctactaccacatggtaaaaaaacacgtctgcaatgcaatgatgatgaaggtatcatgattgacggttgtgtaactcgactgcggaagcacaagccggaagaatatgaactagttattgcacattttgtggttggtatatcattacgaatgattgcaaagaaaatgaattgttctgatggaaccgttagacataagttacaatctgggttgggctttatttccggagtaatggcgatgataaaggaataa

SEQ ID NO: 93882 - DNA, 1320 bp, Enterobacter aerogenes
gtgacaaaaaaccaatattgccaggccttagacgcattgcgtaaccagaaggcccattatttgaaagaagttggcgatcaatggcggacgccggatctgttgttctggggggttaacgctatgtttggtccgctggtcctggatttgtttgccgacgatagcaacgccaaatgcccggcatggtacaccgctgaagttaacgcattaacgcaggactggtctgatcggctggctgagctcggtggcgcagcctttggcaacccaccgtatagccgttctcagtatcatgaaaagcaggctattacgggcatgacgcacatcatgagttatgcgtctcagcagcgcgaaaacggcggtcgctacgttttcctgttgaagtcagcaacgagtgagacatggtggcctgaagatgccgatcacgtctgttttatccgtggccgtattggcttcgatctgccgacctggtttgtgccggcggatgataaacagaaacccaccagcgccttctttgctggcgcgatagtgatcttcgataagtcctggcgcggcgagcgttttagctatatcgatcgtgtcgatctggaagcaaaagggcgcgcaagtatggcgctggcacagttcgcagtcggtaagcaggctcagccagtagaaacgaaaacaatcccgaaaaccgcggttgaaaccgagataccgctgcagcagctggcaatcctcgatcagagtggtattcaggcatgggcctgtgtagtagcagcctttggcgataagccagagtatacctttgccgaatctaagttcgggcatacatgggcggcggattccgtagataaaccagagattactccggtgcaccctgatgtaattgcaaaggctcaatctttaattgcctataaaaattcgctagaggcgctggtgggatggctgaacgatgaagaattcgaatctgatgcagcccggtctgaaactatcgagcgcatgagttctgtctttagtgagtttgcggatgaatgcaaggtcacggactttattgtcattgtagctaatctggaaaagtcgaattggttcaatagccgagtgatccgcaaccatgttcgtaaaaatatcactccagccgttgagaatcaggtagaagcacggatctggcctttggaagttaatctcgtttttgaacaggtggatggtgcttcagaactgggtgagcctcagcaaaataaggtaaaggcccagatcaatcagctctggctggagcgtatggcaaaggatgaaattattgcattggcagccggtatggtgagtgagctatcaggagtagcggcatga

SEQ ID NO: 93883 - DNA, 882 bp, Enterobacter aerogenes
gtgagcgtcaaattatccgcatatgtctgggatggttgcgccgctgcaggcatcaaaggcaataagttattgatcatgctgcgtctggctgactatgccagcgatgagggcatcgcatacccaagcgttgcgactattgcgcgccagcttggcgccgggcgcagtaccgttattactttgatcggcgagctggttaaagatggctggctgaccaaaaaagaacgtcgcctgggccagcgcagcaccagcaacctttacactctgaacgttaccaagcttcgtcaggctgcaaatgaacattatgagggtccaaaatctggacgttcagaatctgaaccttcggaatctggacgtccagaatctgaacgtccgaaagagccaaaaaatcagggttctcagggtccagaaactggacacgatccgtcagtaaattcaaatacagatccatcagtaggatctaaaccttcttgtccggttcctgcggaacccgacccggaagtagtcatcaccgatcttgctaaacaggccctttctcacctgaacctcacaaccggttcacgttttcaggtatgcaaaacctctctggaacacatccggggcaggctgcgcgaaggatttacacctgaagaactggcgctggtggttgattacagcgctgagaagtgggggaaagatttaaaaatggctgaatatctgcggcctaccacgttatttcttcagtcaaaattccccggctatctccagtctgcaaccaagtggaatgccgccggtcgcccgaaatgctttgatggaaaatggaccaaagccggaggcgaagaccaggcgttcaagtccaactattccagcgttgaatacagcacaccgaaggggttccgctcgtga

SEQ ID NO: 93884 - DNA, 180 bp, Enterobacter aerogenes
ttggaagagaatattcaaccaatggaccgcctttatcgcgaccagcacggcattgttgtgcatgtaactggctatgacgctggccgccagcgtgtgatttaccgccgcccgggatatgagtgggagtgtgtggctccgatgattatcttccgcgccagattcaagaggattgataagtga

SEQ ID NO: 93885 - DNA, 558 bp, Enterobacter aerogenes
gtgggtaatgagccaatttggaaagtagagcgtcaaccagcatggctggtggccgcgatcaagaaaacaattactgaactgccaggaggttatgccgaggcagctgaatggctgggtgtcactgaaaacgccttattcaaccgcctgcgcgtcgatggtgatcagatcttcccgcttggatgggcgatggtgctgcagcgtgctggtggtacaagtcatatcgctgacgcgatagcgcgccaatccggtggggtttttgttccgcttgcggatattgaagaagtggataacgcggatatcaatcagcgcctgcttgaggttatcgaacagataacagcctattcgcaacagattcgcgcagcgatcgaagatggtgtgattgagccgcatgaacgggcggcgatcgatggggagctatatagctctattcaaaaacttcaggagcattcggctcttgtttatcgcattttctgccagccagaaaagaatgacgcccgcgagtgtgcagctccgggcgtcgtggcgaataaatcaatgtgtatggagaaatccgcatga

SEQ ID NO: 93886 - DNA, 198 bp, Enterobacter aerogenes
atgaaaaaaagtgacgttatttcttacttcgggggcgtcgggaaaaccgctaaggcgctgaatatctctcacgcttccgtatcaggttgggatgaggttatcccaaaagggcgggcgtttgagatacaggcgcttacgaaaggtgatttgaaagttgaccaatcactttatgagaagcgtagccactcggtcgcatga

SEQ ID NO: 93887 - DNA, 657 bp, Enterobacter aerogenes
atgaaaatgaatgatcgaatccgaagcagacgcaaagagctaaagatgacgcaagccgttctggcaaagctcgtcggggttaatcgcgtcaccatcaccggctgggagtcaggtgactacaaacccggcggtgaaaacctccaggcgctttcggctgcattagaaaagacaccgcagtggctattggaaggcaaggatgatgagagccagcaacctccaaccataaacccagaacaaagattcggaattaggtcagtcccagtgcttacatgggttcaggccggtgaatggacggctaatagcggtgcaattacagaacgtgatattcgggactgggtctacacctcagcagccgtctctgagaaagcattcgctctaattgttcgtggtgattcgatgaccaacccaaccggcgccccaagcattccggaggggtcaattgtcgtcgttgaacctgattttggagatgctaaccaagctaatggcaaaattgtcattgctcagctcattggtagcgatgaggcaaccattaaaaagttcgtcatcgatggtccgctgaaatacctggtacctctcaatcctaattacaggatgttagaggtcaatggcaactgccgattggtagggttagtaaaacaggtaataatggatttataa

SEQ ID NO: 93888 - DNA, 501 bp, Enterobacter aerogenes
atgaacaacaactggtggcaggaactggttcgttttttcctgcaaaaactggatatcaaccggattgttcatatgctgataattttcataattcttgttatctgcgtacccacttcgtttaaggaagctgttaacgcccataatcccgaaatttttggtaactactggatgtattaccttttgctttcctgcctcgcatttgtcatttcggcattgactcgcggtatagaaaatttactagccaagctaatgaacacattcgcacgcgacgcaaaaatacgattcctttcacaggctgaaaaatcctgtcttgttgagctacttaagcagcctggtgctacagctcagcgctctgatcacaactccatagtcgaaggtttggttgataaaggcatcctcataaagacaacgccaataagtccgatttatccctactcgacatacttcattagcgataagcactacgcaaaaatcgtcaaacacctacagcactatctataa

SEQ ID NO: 93889 - DNA, 867 bp, Enterobacter aerogenes
gtgaatcaaaatccattctcgttctatgattttcttggatatctaatacctggtggattttttatcctgttgatgtatttctgtggtttgacatttgatttagatattgttgttgatttaactgaattgctcagaggtaaaagtcaaatttttggtattttgaactatgcctcaattgtcattatatcttacatagcggggcattttatatcgattacatcagcattttttattgaaaaatatatgaacgaaaagttggggtatccttcccaatatctattcaataagttattagatgacttagaaatcgtttgtacaccatcaagttgtaaacaagatgaagatatcaaaagaaaaataaaataccgcataatcaaagcagtgctattaccaataacgctatgggattacgccactcaaaagttatgttattcccgatcattgccatttcaattagctaatactacatggcaaatgattaaagacggctatgagaaaaagttcatattagacaatggattattaaaagttggaactggtcttcatgatgatcttttcagactggcctaccattatgtctatgaattttcgaatcaacatcaatcaaaaattcaaaactatgttgcattatatggcttttgcagaaatatttgtttggtatttataattacattttggatatccttaccaacctttatttttcgtttggtagaaggtagtggtatttcttatagtttaatttctgtgctacttagctttttcttcgtctatgttttctacgtcgggtttgtgaagttttatagacgatatactttagaggtattaatggcgttcgcagtactacaaagaaaagacaatattaattaa

SEQ ID NO: 93890 - DNA, 207 bp, Enterobacter aerogenes
atgctgagcctcgattgtgttcccatctcaacttattgcaaagagactggcgaaactccggatgccataaacaaacgcgtgcagcgcggagtatggcgtgaaggggttcaagtgctgaaggtcgaaggcgttaaggaaagatggatagatcttagtgaggttgcaaaatgggctcgacagaatcgcctaaactcccgcgcggcgtaa

SEQ ID NO: 93891 - DNA, 1164 bp, Enterobacter aerogenes
atgggctcgacagaatcgcctaaactcccgcgcggcgtaaccatcaggaaacacagcagcggcgaaaccatcaatataacgttcacatacaaaggggtgaaatgcagggagcccctttcgaatcttgaagtgaacaacaaaaaccttaaatatgccgagcgcacgctcggcgaaatccacaacaaaattgagcgtggaacatttatctatgctgagtatttccctcgttcagcgaggttaaaaatttttggtaatgctgcgaccgggaaaacagtgaaaatgtatctcgatgaatacctgaagatctgcgaaacaagaaatctttccccctccaccattggcgggtataaaaaatgccgtagcgcactgtctgatctgcacattttcccggccagtgagttaacgccggcagcattaaaaacatggattcagaatcagaaaacaacattgaagacgattcgtaaccagttgtcgtttctacgctcatcacttgatgaagctatcactgatggggttttacaaataaatcccgtatctctggtaactgcatcacgctaccaaagccaaaaaacagagtcagaaggtgaatatgtagtagatcctcttactcctgctgaagtggatgctctgcttgcagcagcaggcaataagcaatgggagaatctatttcggtttgcaattcagacaggcatgcgtagctcagaattatgtgcactgcgctggaaagatatcgactttattcagaaaactgcgcacgtgcagagcgcaagtgttgttggggtgactaagggaacaaaaactaaggcaggaacgcgtaaggtagaactgacaaccgaagctttacttgcactcgcaaatcagaagcctttctctttcatgaaagacgcgaccatatttgaggatccaaaaacagggaaagcttgggctagtgctgatgcgataagaaaaaaagcatgggtgccaactctacgaaaagcaggtatccgataccgtaacccatatcagacacgccatacctttgcgacacgcctactaagtcgcggagcaaacttgttctggttagccactcagatgggccataaaggacctgaaatgttgtttagacattatggtcgatatttacgggaatacgacaacagggcatcaagcaacgtagccgaataa

SEQ ID NO: 93892 - DNA, 1266 bp, Enterobacter aerogenes
atgttgattgagttttccgtacagaactataaatctatttcggaaaggcaaacgctaagtcttgttgcatctaaacagaatgagttacaagaaaatctttatagcattgaagaacctaaatctcttgaattgttaaaaagtgcagtgatctacggccccaatgctgctggcaaatcaaatattatcaaagctattacaagcatgtcttcatatattgtaacgtcagcaagtgattataagagcggggataaaattgacgtagcacctttccgcttggactcaaaaaaaattaaagagccttcagaatttgaaattcatttcatttcagaaggtgtccgatatcagtacggtttttctgcaacagaagattttattcatgatgagtggctctttgcatttccaaaaggtagatcacaaaagtggtttattcgcttatggaatgaagaaaaacagatccatgaatgggatttggggccatccttagcaggtgaaaagcagacatggttaaagtcaacaagaccaaatgctctttttctttctacagcagttcaattaaatagcgctcaacttaaaccagtatatgattggttttattataaagttaaattcactgagttatctggatgggacaatgaatttagtgccaaacaatgcctcaatgataaaaaagatgaaattcttaattttctgaaagctgctgatgtaggaattgacgacatccatgtaacaaaagaaaagtttaatccaaacgacctccctgaggaaatgccggctccgattagggaactcgtcattaaaaatatgcaagggaaagaagaatatgtagtaaaaaccctccataaaaatgagtgcggtgatgcaattcctttcgatctagaggatgaatcccaagggaccagaaagatctttagttttgcgggaccattatctcattcccttgaaaccggaaatgttcttttcattgatgaattgaatgacaatttacatccaaagttagttgaatttattgtccgtcttttccataaccccgaaattaatcaaaaaggggctcagttgattttcactacacatgaaacaacaattttaaatcaagatgtcttcagaagagatcaggtttggtttgtagagaaggataatactaaaaaaactactcttttccctcttgctgactttagtccaagaaaaggtagggaaaatttagaggcatcctatctcgacggtagatatggagctttgcctattatcgggaaatgggagagaacttaa

SEQ ID NO: 93893 - DNA, 687 bp, Enterobacter aerogenes
atggggagcgaagatttattcaaaaagagaaaagcacgccgtaacgatgaatttaagcggattagcaaagctcgctctcaaatgaagaaaatattaattatttgtgagggagaaaaaactgaacctgtatatttcaatgattttgttaaacattgtcgtataagtacagcaagcataattgagatatctggagattgtggttcaagtccgttaagtgtattcttttcggcaaaagaaaaatacgcagctgaaaagaaaaagggtgatccctacgacaaggtgtactgtgtttttgatcgagatgctcatccaggatatcaaagtgctgtgacacaaattcaggctatgaatcctaaaggggtttttgaagctattacatcagtaccttgttttgaatattggcttgttcttcattttggctgctgcagaaaagcattttcaccaaaaaatggtaaaagcgaaggtgctcaaatgctatcagaattgaaaaaatttatgcctgattatgagaaaaaagcgtttggcgtctttagcagactgcaagatcgtttacaaaaagcaattgataattgtaaggccgtagaaaaagcttcactccaagatggctcaactaacccggcaactaaagtgggctctctggttacggagctaatgaaggttcgagatgactttgaaaaaaataaataa

SEQ ID NO: 93894 - DNA, 1242 bp, Enterobacter aerogenes
atggcaagaaaaaccaagccgttaaccgatacggaaatcaaagccgccaaacctaaagatgccgattaccagctgtatgatggtgacgggcttactctgctaatcaagtccagtggtagtaagctctggcagttccgttactatcgacctctgacaaagcagcgaactaagcagagctttggagcctaccctgccgtctcactttctgatgcgcgtaaactaagagctgaatctcgagttttattagcaaaagatattgatcctcaggagcatcagaaagaacaggtgaggaattctcaagaagctaaaaccaacaccttcttgttagttgccgagcgttggtggaatgtgaagaaaaccagcgtaacagaggactatgccgacgatatctggcgctcgcttgagagagatgttttcccggcaatcggtgatatcagtgtcactgagattaaggctcatactttggttaaagcagttcagccggttcaggccagaggtgcattagagactgttcgccgcctttgtcagcgtattaacgaagtcatgatttatgcgcagaacacaggcttgattgatgcagttcccagcgtaaacatcgggaaagcgttcgagaaaccgcagaagaaaaacatgcctagtatccgcccggatcaactcccacaactaatgcagactatgcgcacggcaagtatcagcctgtccacacgatgcctgttcatgtggcagcttctcaccattacccgccctgccgaagccgctgaagctcgatgggatgagatcgattttgatgctagcgaatggaaaattcctgctgctcgaatgaagatgaatcgggaccatacggttccattatctgatggagctatcgctattctggaaatgatgaagtctctcagtggtggccgagaatttatctttcccagtcgcatcaaaccaacccagccgatgaacagccaaacagtgaatgcagcactcaagcgtgctggtttaggaggcgttctcgtttcccatggtttgcgttctatcgcaagtacagctctcaatgagcaagggtttccgcctgatgtaattgaggcagcattggctcatgtagacaaaaatgaggtacgacgagcttataatcgaagcgattatcttgagcaacgacgtccaatgatgcaatggtgggctgattttgttagcaaggccgatagcgggagcattgttgaaagcgggaaaacggggttaaaacttgtgggctga

SEQ ID NO: 93895 - DNA, 882 bp, Enterobacter aerogenes
atggaaggcaaggaaatatacgagcatgagttttcagctttgttaactaaatttgaagaggtttgtacttggttcgatagtttgggctttaggtttgcagtaacaagatatggggtataccacaaaaaccttcaaaaattgaaagcactatcaaatggagaaagaattttcaaagatacacccgatgaaaatttagttgcctttatgaaggagatgatgaattctcacgtggaagctaatgagattatacgggtttacaatgatcttaaagggcttgatatccaggaatatctcgatcaaataaagaaggttatcactggtcaagaatttcgtgcgacttctgagaacgatcctgcaagggactttctgtttgagttgtcaatggctgcaagatttctgcgtgcaggatataaaatttctcttaaaagcatttgtgatatcgaagtgaaactctctgacggcagaattctttttgtagaatgcaaacgagttaagtcgttaaaaaaactatctaaaaacataaaagttgcaaaccagcagatcgtgcgcaggataaaggatagctcatcacttaaaaatgttggcatggtggccgttaatgttactgatttgctccctaaaatgtctctcattaattctgaagatgcgagaatggcaataagcgaacatcgtgagttgtcacgaaattttatcttgaggaatttagaggattttatggcaggggaaaacaaaaaatgtataggtgttttatgtgaaagttctttgtccaggctttttcctagagggttgatttattcccggcatattaataacatcccctatgaaaatgatgatttatttgagcgattaatgcctcaactcagcaatcaggatattgcttag

SEQ ID NO: 93896 - DNA, 1086 bp, Enterobacter aerogenes
atgtttcgtgtagatataataaataagacactaatcaaactgaaaccaacaaacttctcggaacttgggctgaaggaacgtttcgatattcaggaatggatcgaaaaaagcccgactattttaggtgaggaactacttgtcattggcaaagaggtcattcttgcctctggtaagcgccttgatttgctttgcgtaaataaatcggcagcacttgttgtggttgagttgaaacgggatgattctggctcgtccgttgaatggcaggcaataaagtatgcatcgtattgctcaagtctcttgcccggtgagatttttaagctatacgcgttctatttaaacaagtctgaatttgatgcgactaaaaaaattgaggaatttattgatgctgacattgagttacttaacgcgaaacagcatattattttggcctcaaaagagtttaactctgaagttatctccgcagtattatggttgcgagaatatggcatagatattcaatgcactcggattactccatttatcgattctgatggtgagctatttatcaagccggaaacaattattccgttgccggaggctaaagattatattgaacgaaaagaagttaagcaaagaacaattgcttctaatcaagatgaatggacgggtagttggttcgtgaatgtgggcgaatgcgaatatcgaacttgggacgataacagacaatttggctttattggagcaggtcaagggaaggtgtattcatctgcacttaatcgtcttgcagttggcgacaaaatttatgcttacatgaagggatgcggttacgtcggttttggggaagtgaccaaaccagcggttatgattcgcgatttcataactgattcgaatgttcctctactctccgcaggattgaaagcggaacacccaaacgcaaactctgacaatgaagagctttccgaatgggttgttggtgttcgttggatcaaatctcttccgagagaacaggcgaaaacattttctggcatcttcgcgaaccaaaatatcgtctgtaaattgcggcatgggcagacattaaaatttgtgcaatctgaattcggtcagtaa

SEQ ID NO: 93897 - DNA, 906 bp, Enterobacter aerogenes
atggatagcttaaaaaagaaagagaatatattcgtcagggtgctcatagtgttgctctgcattttgttgacctcaatgataatgttcaattatttttacctcaaccctagaggggaaataaattcaggcgtaatcatcttactttcattactactcattataattttatcagagagttttgataatttctctcttggaaaattaatttcgattagtcgagaggttaagcgaaaagaacaagaggttaataaacttgaaagagaaaaaatagaactctttaatcaattgattaaatttaccagcattcagcatcagacccagcagcatactaatgtctacggagattatcatgcgggaaagggagcctcagttgaacgcgcatctgagcaggaagttgaggctaaagcttctgacgaacgtctaaaatctaatgatgcaccagggcaaggatatcgtatcgattttcataaagttgaatcaattgcaatgcagaaatatatttcagataagggtatacattctgcaaatgtgattcgtgaagcaaaacttgttacacaatttcatggaatagatcctataagtaataatcagccaatttttgatggttattataagagtgacgaaaaagaaatatttatagagtttaaagcaaatcgcggcatgcacatgatgcttagagatcgaatttatatgatgctttccaaactaaatcattatcaaaatgcaaaaggggtaaacgtatacctcgatttagttttgttgaatcttccagagtatgggagtacgtatagaacaaatgatcgctttatgcaggacttcgaaccagcaatagtatctgggcttttacgcataaaagaaatcgaaataactaaagaggaaatggattcctgcaggcgagaagtatag

SEQ ID NO: 93898 - DNA, 843 bp, Enterobacter aerogenes
atgaaaaaaaactcagttagcaaacgaattgaactatcacaaaattcaaaattgaatggcttttgtcttatatgtggcgcggaaggtaagttaacgaaagaccatgtaccgccaactaactcacttttaactatcgttgatagtcaaaaaacagccgtggagtttttttctagggaaggtagcgtaaaaccacagcgaataacaacaggtaactactcacgcacgctctgttctgattgtaataataatgttttaggttctttagactcagaaataggcattgcgcataaaatgctatcagcagaaatattaaaaaaaataaaaaacaagcaagaatacaatgatgccattaatgtcccagttaatatctccaagtacatgagagcaatggtaggtcatataatatcagcattgccctcgctcttttgctcaatacctttagatacgccactttacacaccattaagaaaatttgtcttaggcgatgaatcaggcactgataatttcgacttctattactggtttttccccatgaactatcagatggttattaataattttgcctttgaggatttgaagcagctccgattcacatcaggttcgataatttcattctacccaatatcatttatgattgtagataagagcagtgaaaaatataacaacggatatagtgttgcaataccacctggagccgtgaaaatggaactggccgatgattcactaaaaataaacctttcatcatggaatgatattaaaacaggatttccttacacagggattaatgagtatgagttactcatattagatgaggatctttcatttataacttataaaaaataa

SEQ ID NO: 93899 - DNA, 411 bp, Enterobacter aerogenes
atgttcggattctttaaaaagaaaaaacctgacgctaagccagggcaaggtccccgactgacggcaaaacaatttatcgcgctgacgctgagtgatgaaaagctgtctatgcccgtgtacctgccggggatccgcagtgaggccgaatgtgacgaaatgggtttatggccactcatctacatctggaatgtggatcgtgccactggcacgttcagcctttctgttaacggtaaggccattgcccacctcctggagcctttcgtaccccgagaagaccctgcgtatgtcgaaattcgtgatgaggcgatgaaggtcatctccgagtcttcaacgcggtccgttctggcgacggttgagaaaaccggtctcatgcccgatgttttgttcgcgtatgacgctgagaacgaatga

SEQ ID NO: 93900 - DNA, 1638 bp, Enterobacter aerogenes
atgcaaagcacagccttagataaaagtcaagaatttcaacttgttgggaatgatgatgttgccgagcagtcaacaattaatgcaacccaagaaataaaagacagtgttactccagagattataatcgcactttgtgggccaattggttcaccgctacatgagactgctgagcagatatcattctcgctgaaaaaatatggctataaaacatatgacatacgtttgagtgatctaatccggattaattcaaaatatacaaatattaatattgatgaaagcactaaactaaagaaattcaagtcgctgataactgtgggtgataaacttcgtgaaatttacggtagtgatattcttgcaaaattagctattgctaaaattagcgccgagcgtaaaaaaaactttggtgagtttgatgatattgtcaatgaatccagcaaaggggaagcgagtaagattaaaaatcaaaaaatttgtcatattattgactcagttaaaaactcctctgagcttgagttgttgaaatcaatctatggaaaaatgattttctctataggtgtgttctcccctttagaggcaaggcgtgaaaatctttcaaaaattaatagcctaagcgttgaagatatcgctgaactaatcaataccgattctggtgaagagttcgaccatgggcaatcagttagagacactttcccgaaatgtgattactttttgcgggttgatagtgggttggcagagccaggaaatgccgaggctaaaggccaaattctatctaaactggaacgtttctttaagctaatttttaggagttcagttatatcaccgactgaagaggaaaatgcaatgtatgcagccacctcagcggctcgtaattctgcatgtctatcaagacaagttggtgctgcagtaacatcttcatctggagaacttctttctaccggttggaatgatgtgcctcgtaatggtggtggcctctatggtaaacaatctatccgcttaaaagttattgatcctgatcatcgttgttatgctttacaaaatagaaattgctcgaatgatgcagaaaagagaatattggctgaagttgtcattgatagccttgtacaggaaaaaatcatccctgtaaaaaaaagagaagctgcgattcaaaccattataaaaaactcacgattaaaagatttaatagagttttcaagagcggttcatgcagaaatgcacgcgattcttggcgcatctcgtgtggcaggagaaagaattttaggtgggaaaatatttgtaacaacttatccatgccattcctgcgcaaggcatattatcgcttctggtatctctgaagtatatttcattgaaccgtatagaaaaagcttagctcttaagcttcattcggatgcgatgaccgaatcagtaatcgagacggatgaaaaagtgaagttgatacaatttgatggagtagctccaactaggtttcttgagctttttgaatctggatctcgaaaatctaaagctggggtgctagagttagcgacagagggtgcggctatgcctgtggatagcgttagtctcaaagcgattcctaaattagaacaggtagttattgctgaagttgatagtaataaacttaacttgttgaggcttgagtga

SEQ ID NO: 93901 - DNA, 1191 bp, Enterobacter aerogenes
atgtaccgtacgatcgatgttcatgttgataaatccagttggccagggatcggcaagattcccagttttccggctgctttcaccgcaggcagcagttccttcaatttgaacatcaactcgatgttattaatcatcggttacctgacaacaccgacgtctgtcacaggtgtttcgcttgcagaattctgggcgtgggtgagatatttggcagcgatcacgccccgagaccaggatctccgcttgacaagaagctatgcagatcttgatgcgcatcagaaaactattctaagtgatgacttcggaatgggagtgccaatggtctggctcatgaagaatttaccattggttgatattgtcgatggccgctattttttgcagcgctacggtgcaagccatggcgcataccagcatcgcaccgcaaagcgagggccaaataagacgcctgacttcgtggttcatgggcacgatggaaaatggcacattatagaatgtaagggaactcaatctggtgaggctttcagggatagccaaatcgattcgggcatatcccagaaactttcaataaagttcccaccagggcatacagggcagaggttggtatcaggtcttagtattggcattgaggacggtaatccaagtcacctgaagatcattgatccagaacctgaagatcctgtaattattaccgaaagtgaaatggagtttgtaaaggacgccgcaacccgtggcgtaatggccaaactgcttcggtcgacaggctttgaaacagcggcagaggcggtagccgcgcctttcgggaaaccgcaagccatgcctccatcgacaaaaaaaacagataaaaagcgtatagagtttcttgcagatcgcgaccgacgcgcacgcgaagagttgctggaaagcacctcaagagctcatcttttcggcggtcgctatcgaggtcgagaagttactttccagttgccgagaccgatctatatttatgacgatatgatttcaaaagttaccgtaaggcaaggaatgaatgtggatgccatcgatttgctcagagagcagccaaccattgagacgctaatcgacccatctcgtaaccattggatcgatatgatgggggctaacattattcaggatgacgagcaaaccgcgacgttgcaattcggaagtattttcaggtccgagttgattcttaattaa

SEQ ID NO: 93902 - DNA, 3852 bp, Enterobacter aerogenes
gtggcaatctttgacattgaaaaggatgaattacttcggctctccgatactcagctagaagagctgatagctcggctagcagaagctgaagtggcaatacatggtcatagccctgcatgtgtaaattggtctggctcaattacagcccctgacggaggaattgatatccatgttcaggttccagttgatcaactgaaagcaggctttcttataaggcctaatacggtctttcaggcaaagaaacataaaatgccaaaggctacaattgagaaggaaatgggcaccggcaacgcgctttcacccataatctctgaacaagccagaaagcaaggtagctacatcattgtcagcctaggtgatgattgctcgccgtcaggaaaggcggatcgtctcaaagcgatgagggatgcagtaaaagatgatcctaacaaaagcaatcttcacctcgatttctacgaccgttccaaactcattcaatggctgcgtcaacatccatcagtaatgctgtgggtaaaagggaagcttgggcaaggatattccggctggcaaccttacggagcctggagcaatccgccccacggtgttacagacactttaatctcagcctcgggtgtaactattactttaccgtcgggaaacgggcaaaaactcaaaattgatgaagcaattagcccaatgcgagaacttatacgttcgacgaataaggcggttcgtattacaggattatctggtgtcgggaagactcggatcgttcaggcgctctttgatgaaactgttggaacagatgcgcttgaccggacagtagctatttatgttgatactggctctgagccagtaccgtcgactacagcaatgcttgataagctgatcgctgaggaccgacgagtaattatgatccttgataattgtccatcagaactccatgcttcgcttgccagcaaggtatcagccgcaggaaaagaagtaagcctcatcacaatcgagtacgacattagggatgacaaaccacagacaactgaggtcatccatattgagacagatggtccagaggtggcagagcaacttcttatccgtcgcttcccttctattggtcagaataatgcccgtcgtattgctgagtttgcagatggaaatgcaagagttgctttggctatagctgaaagaggggtggaaggcgagagtttggctctactctctgatgcacagttgtttaatcgcttgtttgaacagcgtaatcatcctgatggtaatttacgggagaaagctgaaatattgtcactggtgtattcattctcggtatctagtccagatgctgctaccgacgaactggaaatattaggggcgctatttgggtattccagaacccatttatttaaagccgttacgaagctgatggaacgtcatatcgttcagaaaagatctcactggagagctatcttacctcatgccattgctaacagattggcagcatccgcactcgacagtattcccgtcgatcaacttagggcgacttttgaagctccgggtcgtgagcgtttattaatgtctttttcgcatcgcttggggttgttacatgaccatcctgttgcgaaagaaattgtagaagcttggcttcagcctgaagggatgttaggaagcttagccgggttaaatgatatttcgttacgaatacttgggtatatcggaccggttgcacctgaagcattgctcaacagaattgaggccgtactctcatcatctgatttcaaaggtatggaaccgggctacaatccgcagcgacgtagtattctgcgtcttttacaaacgatggcatacgaaccgaacgcctttgaaagatgcgccaggcttcttattcaaatggcagagaacgaagccgataataataacttggattctgctcgaaacatggtcccaaggtttttccaggcgtatctgtctggtactcatgcatccctaagccagcgtattgctttaatgaacgagtgcattgcatccagtattattacgcgtaaatctttgggcttaaagatgctgtcaactgccctggatggcccaccgtggtcagggtttggggttggtgagtttggagctcgaccaagagactatggatacgaacccaactatgatgaacttgtcgaatggcgcagcgcctttattgacgtcattatccaattagcggcatccggagatcctgagcttgaaaggcctgcaagatcaatcttggctgacaaattcagaggaatttggtttcaagaagcaatgcgagacaaactcgtcgatgctgcccgtacattaaatgctttaagtccttggggggaaggctggaaagccgttcgttcaacggtctattttgactataccaagcatggcgatggagatgatgttgagccgttgccggataatcttgctgccttagagaaggagttgaagcccaatgcgttaattccaacaataaagacatacgtgttgagtacaaatcatgattattgggcactggatgcggattttgatcatgaggactccgataaatataccgcagcaggaaaacgacttgaagctaaagcacttcaattgggacaggactttgccttatcaaatcatgttcttgaggagttaggagcagatctgttctctatcggtggaatgccttatcgtgctgtctttggtcgagggcttgctcgaggggcacatgatctacgtattggctggcagcgacttgttgaacaaattgaaaaacagccagatcctaacaaagactttggagttgttgggggattcatcgaagaagttgactctgtcgatccatcattggcacagaagtttctcgaccaatgtgcgcagcatcctgaacttcgacaggtattggttggcttgcatccttgggggaaatttacagtaaatgatttggatcgctgcataaagcatttggatgatccagacattcgcccttttatgtatgagccaattctctggcgagaccaatacgccaatttaccgagagtccgtttacttgatcttgctaagcgcctcctaaataaagttagcggcgacgatgttattttggatgcactatccatgaagcttcatggtaaagatgaatctacagatacgcttggtgcagactttcgattaatcggtctcgcagcagctatccagaggattcaaaaaagcgacagagaccaaggtgggacaatcgattatcgcatggaacaagttatccatgctgcattgcgtttcgatggtaatgacgcaagaaaaatagagtggttggacacaatattcagcgtcattgatgaacattatggatatgtgtctggatttcataaaactatagctacaactgctgcatcgatgccaaaagcatttctcaatcgcatttttgaaggttctgaggaacagcggcaaagaagacaattctttattaatcgtggtggcttacgcacttatcccctggcaaaaataaatacaagcgttctaattgcatggtgccgagccagaaatgatccctttgtttggcccgttgtagctggtggggtaaatctttggtcaaaaagtggtgagcagagtgtactgaccatacacgaaacggctatagaacttctagaggcgtcacctgagccactagctgtactggggtcttttgctgagcgcattactccatcatcctggactggtagccttgccaacataatgcaagctagagcaaggactttaagtacgttgattaaacacgaacgtactgatatcgccgaggctgccaaagtagtttgcgaaaaaatgatgcagtgggtggaatgccgaaaagaacgcgaacaacgggaagaaagtgaaagggaacagcggtttgaataa

SEQ ID NO: 93903 - DNA, 972 bp, Enterobacter aerogenes
atgattcacactctgtctgactcacccttctatagcaaacgacgcatcagcagtatgacagcgctatcaaaagcgctgaacatctctcctatcgaactactttatctagctaatcgtgcggacaatatgtaccgactcgccagcactatcactaagcctgacggaagcacgcgccagacttgggatgcatatgcacctctaaaaaaagtacaacgcaatatcaggcgcaatattcttgattacgttgtttatccagcatatttgacaggtagtctgaaaggttgtgattataaaactaatgcaactttacacgctggttctacgattgttattaatgaagatatcacgcgttttttcccgtcaacttcagacacaatagtgcataacatatggcaacatttctttggcttcgataatgaagtagctgaatgtttgaccaagctgacaacccgacaaggggagctacctcagggggccatcactagttcatttctggctaacctggtgttttggaaagatgaaccggcactgcaagccagttttcgggcaagaggaataatttattcccgctacgttgatgatatcgccgtctcgtcagtaaactttcttgataaaccggctaaaacgaatgtgatagcctcgatttatggcatgctttccaggcacggttaccagcctaaacgagctaaacacgaaatcagaacatctgggcaacggatggaagttaccaagctttcggtgaattcaaaacctggtctctcttccgccaagcaaagtcagatacgatcggcagttcatcatttggagcaagccattcttaggggcgaaattatcgagttcgataagggcccttatgcacaaacattgggactagttcatttattggccagattccatcctggcaaagcaaaaaaacttaaacagcgcttgcttgctcttaagagtgcggtgcgtatgaatatgtatacatag

SEQ ID NO: 93904 - DNA, 291 bp, Enterobacter aerogenes
atgaatatcggacaggctatcaagttatgccgaaccagaaggggaatatcacagacggatttagctcggaaggcagaatgttctgtttcttatctttccatgctcgaaaacaataagcgagatccgacgctttcaacccttaacagcattgcttctgctctcaacattcctgtcagcattattttctttattgcagcagaggccggtgatcttaacggtattgataagggactccagggagaacttgcgcgtactgcgttggagctgcttaatgattcacactctgtctga

SEQ ID NO: 93905 - DNA, 240 bp, Enterobacter aerogenes
atgaatcacgatactttaaagaacaccatcgcaacgcttgaaaagctgcgcgatgctcactgcagccaactcgatgctggcgctctggcagagctggaagatgtattgcgtcagttacgcagacatcgtgacagtccgataagaggcgggttccggtttgacgatatcgtcttccgggcactgcgtattattgacgttgtggttcgtctgatcacaaacattgatgattggatgaaataa

SEQ ID NO: 93906 - DNA, 2340 bp, Enterobacter aerogenes
atgagtaagctgttggtccgtctggcggcatggcgtgctcgccgtcgcgcgaagcctaatgctgatatggtaaggaacgagcagccggacggagggattggggccgaagcgccgattcggacagcatccgaagatcgccttagaaggtacggattcgcggctcgtatagccgacgtgctttcggagcttagtttgcgagaaggccgagtgttcgctattcgcgggggatggggcttcgggaaatcatcactgaaaaaccttatcaccgaacggctcgatgccaagagcagtggagcggactggctcgactttaacccatggcaatggggagacggcgatgcaatcgcccgcgcgctatttggccagatagcagatcgattgggaggcgagcattcgaaggctgcgctcgatcgtgccgaagcactgcgacgctacggagcgatccttaccggggtcagtaagcctcttaaagaggctgggagttcaggtcttctaatctcgacggtgctaacaaatgcttcggttatagctatcgcgtcggctattggatatgaccttccgacagttgcaaaggttgcggctgttcttgcctttctctcggtcggagtacctcttctcggacgcgtactatcgtatctcgggcgtgaccatagcggcgagtctctcgacaaggtacgcaaagcgcttgagactcgtcttcgcgaacttgaccggccgctggttgtcttcgtcgacgacattgaccggctcgagcctgatcagatcaggatgctgcttcggcaggtaaaggcgaatgctaatctaccgaatattgtttttgtgctcctgttccagcccagtatcgtagagcgagcgctagatccggttgcagacaacgacggtcgagccttccttgaaaagattgtgcaggctaactttgatttaccagccgtaccgacatctttcgtgcatcgtatgttcgaggaagaactatctgaaatagcgggcccatacgcgactgaggccaacgggttctctcagagacgctggggtaacgcttgtattggctgcatccaccccctccttcgcaacatgcgtgatgcacgtcgtctcatctcttccattgctgttcacatgccactgcatgtggtcggcgacgtgttcgaggtgaacattgtagatttcctgcttttggaaacactccgggtcttcgaacctgacctccacgatgcactgttccgtgagagaggattggttctccaggaaggtcgcttcttccgtgatggccgacgggaggtggaccaaacagcagctaaggaacttctggagatcgtctcagaagagcgccgcaatatcatttgtgaagcgcttaaagacttatttcctcccctcgaatgggcgtatggggggacgaactatgcagacggcttccatcgccggtggttgacggagaaacgagtatgcacttcgcgctacttcccacgttactttgaactgcagacgtcggttggagaaatatctgagcgccgtttcgttgattttctcaatgcaacagcgacagaggacgagctctttgctgaaatcgcagccatcgaagctgacgggctgttgaattcgctcgttgcgaggctcgatgaatccgtcgaccgattaccaaccgagaatgctactgttctgctcccagaaatgttcagaattgctgaaaaactcgcaggcacgaacagcggctctttcgactcgttatatgtagcagcatggcgagcgacaagttggtacttgaagcgaattcctgaggatgttcgaggcggtttagctcttgaagcactccgtaaaactgaagcgctatccgttacctcaatcctgatccatctcagcgatccctccgatcgtaatgagggtgagcgtggagccttcgagccagcgttagatctcatcacggttgtggcaatgaaagctgaatggttgcgattgataaggatccgcgcagcagacggcgatacgctgattgctgaaccggatctcatatcactgctctatcgctggaaaaactatacagattcaatggacgaacctcgagagtgggtgaggaaagccattcaaaccaaccaaggcttcgcaaccattgtcacacgcctgatgagccgaggtacgagccatacttacggtgatcgcgtctccacgcagcataacagtttcaataaagagacaattgacgactttattggcattgatgtggcgaaagctaagtgtgatgcgattaatcctgcccagttccctgagcacgaagaggccctgcgaacgctgcttagatatctcgaaaagtggctcggattgagagaaaaagacatgtccgatttctag

SEQ ID NO: 93907 - DNA, 726 bp, Enterobacter aerogenes
atggataattttagttttgatgattttctcgttgatttgaaaactacgttcaataataagagcgcaagattgtctcatagactccaggaggctggccgggaacaagaaaaggtggcttcaggtgcaaatgaatatcatgagtttgtactatcgctggttgaaagtattcttacgaacccggtagtacgccgtaggtttgatgatcaagtctacaggatgtcttttgatgaaccggacacggttagcgaaactataggtgagcttgtttttctggctgatgttaactggcacctagggcttgggcttatgaactcgaataaaaatgaagcgataaagtgccaactcctagctattgaataccttgattactgtcgtggtcttgaagatcaagaattgtggcaacagcaacaaaccacaaaattagatgttccggcgcaggggggcagaagtaaagctgctcgctttgattccattaaagccaaaattatcagtctcttgcaggaagcctgcccctcagacggatggaatgctaaatcagaagctttgaagagtatagagaatgggattaacgaactgaaatggccgtctgcccgtgatcagaacaatctgtacaaaactggagctgaaatatttgcaatgaagatgcgccaggttgaggtctggtcaagtcaggatcagaaaatcaaagctgcatttgatagtgtcgtaaagcctaaaaagaaatag

SEQ ID NO: 93908 - DNA, 405 bp, Enterobacter aerogenes
atgaataaatattatactactgctgcagccatgacgctgatggcagccctatcatcaatggccggagcggctgaaaatgacatcattaaggtcgatattcagaagaacatacagggtatcaatgtgaccgttacggctaaaactgacaccgttgtgataaagaatattgacgtcaacaggggtaaatgcccgctgctgacaaaaggaaccgtcacataccagggtaaaagactcgaaggctgggtagcgcagggggctacctttacccccaccactatgcattttgctgacggcctgacctggcatttcggccatacctaccttcagccacccgcaggtgtagtctgcagctttcttgaagccagggtattcaccgaccagggcaccttcacggtgaccgattaa

SEQ ID NO: 93909 - DNA, 465 bp, Enterobacter aerogenes
ttgttactcaaatcgatattccctcttacccttgcactctgtttctcaggccaggcgctggcgttcggtagccacgatacctggaccagcggcttcgcgcagggtacggcggaatacaccatcctcggcaaggggcagtcacagctgtacctcgcctgcgacagctcggggtcacaagccgccaccatcatcttcaccgacgcgaccggccatcaggtcagcatggacagcggtcagaccctgacgatgaaaattgataacgaagaagaggcaaatatcagcgaaagcgactctcacgtgggagaagacaacctgatgtgggcgtggaacaagctgcgtaccggtaaacgtgtgatcgtttccggcactggtgcaaaaccggcggtcttcacgttaaaaggtgctgccggagtgataccggcatttggcgataaaggctgcgtggcgaagtttgatatcccgtaa

SEQ ID NO: 93910 - DNA, 234 bp, Enterobacter aerogenes
gtgcaaaacactgacgatacgccgttaccacccggccctttcacccgccaacaggctgaagccgtggcggcactttactgcaacatcaccattgaagacgacaaggggagccattttcggctggtgatccgtgaccgcgacagtcagttaatctggcgggcatggaattttgaatcggatgccggggagtggtttaaccgttatctggtaagccatgggctcccccagaactga

SEQ ID NO: 93911 - DNA, 819 bp, Enterobacter aerogenes
atgagattagccagccattttggtcgggtgaaccagatccgtcgcgaccgtccgttaaaccgtgaagagctcatgcagcatgtccccagcgtcttcggagaggacaaacatgcttccaggagtgaaaggtacacgtttattcccaccatcaccctgctggagaatctgcagagagaagggttccagccgttctttgcctgccagacacgcgtgcgcgacctgaataaacgcgaccacacaaagcacatgctgcgtcttcggcgtgaggggcaaatcaccggtaaacaggtccccgaaatcatcctgcttaacagtcacgacggctccagctcataccagatgctgccgggattgtttcgctttgtctgccagaatgggctcgtctgtggcgaaacctttggtgaggttcgcgtgccgcacaagggcaatgtggtggagaaagtcattgaaggggcttatgaggtgctggggatatttgaccgggttgaagagaagcgggatgcgatgcaatcgctgctactccctccaccggcacagcaggcgtttgccagagcggcactgacataccgctttggtgaagatcaccagccggtgacggcatcccagatattaacgccccgtcgccatgaagaccgtcaggacgacctgtggtcagttttcaatcgttgccaggagaacctgctgaaagggggtctgccaggacgtactgccagaggcaaacgcagccatacccgcgcggttaacggaattgatggcgacattaagctcaaccgggctttatgggtgatggcggaacagatgcagcaggctctgagttga

SEQ ID NO: 93912 - DNA, 255 bp, Enterobacter aerogenes
atgcggtatattcctgcggacgcccgccaggccggaatatattcggtatctctggcgaaccagccaggctgccgcgccatctctgatgacgacctgtgcgcgtggtgcacccatctgctctaccgccccggcgaactcagcctctgccggttaagcctcaccgacgaccactggccctcacactgtgatgaagacggctatgcgcaatcctgcccgtcactcaggttaaaccggtctccccaacttaatgaatga

SEQ ID NO: 93913 - DNA, 471 bp, Enterobacter aerogenes
atgacccgcaacactctgccactcttcaccccggaagaaagcgttccgcttgcagcgcaacatcagattaacgccacgctcgtacctgatgagcaacgtgtgggcttctggccgcagcacttcggcagcataccgcagtggataatccttgagccgaccatcttcacgtggatggaccgcttctgcgcagactacaacggcggtatctggaatttttatactctcagcaacggcggggcgtttatggccccggaagcggagaacagtgagtcgtggtcgctgttcaacactatgaacggcaacggcggtgaactcagtgccgaagctgccggaatagccgtctgtctgatggcatacagccaccacgcctgccgtaccgaatgcgacgccatgacggagcactactaccgcctgcgcgactatgcgctgaaccacgcggaatgtgttgccatcatgcacatcatcggctga

SEQ ID NO: 93914 - DNA, 480 bp, Enterobacter aerogenes
atggaacaacagttaccgctgtttgcacgtgaattagcccctgctgaccagcaaaccatcagggaagccttaatcctgctggcgtgccagctacgcgaacctggcgtggcatttacctccagtagctcagtacgtgactggttgcgtctgcagctcgcatcactggagcgcgaagagtttaccgcactcttcctcgataaccagcatcgcctgatagcccacgaaacgctctttaccggcaccatcaaccatacgcaggtccatccccgagaagtggtgaagaccggtctgaaatacaactgcgccgctgtcattgtcgcccattgccacccgtcagagcttgccgaacccagcaaggccgatcgtcagatcaccacgcgtattcagcaggcgctggacctggtggatatccgtctgctggatcacctggtggtcggcggcatggaaatagtttcgttttctgagaaaggctggatttaa

SEQ ID NO: 93915 - DNA, 222 bp, Enterobacter aerogenes
atgaaaatcatcagcaaacgtcaggcaatggcgatataccgccagcatccgcagtcccggttatttcccttctgcacgggtaaatacacatggtccggcagtatctgccactacgctggtggtgaggtccaggatatcagcggagtgctcgcggtattcgcggagcgtcgccaggaccgcaatggcccgtatgtcgtattgcgcagcgttaccctgaattaa

SEQ ID NO: 93916 - DNA, 351 bp, Enterobacter aerogenes
atgcagaacacaacacctgtagcaaaccatgatattgccgaaccctggtggggacttaaacccaccgtcatgccatgctttggcgtacgactggtacaggaaggcaaccggctgcattatctggctgaccgggccagtataatcgggtcattcagcgacgcggatttacgccatctcgaccaggcgtttccggtgctgcttaaacagctggagttgatgttcgtttccggtgagctcacctcccaccatcagcaccgcgtcacgctatatcacaatggactgacttgcgaagcggatacactcggctcctgtggttatgtctacatcgctatttatcccgatcagccttaa

SEQ ID NO: 93917 - DNA, 213 bp, Enterobacter aerogenes
atgaaaaaaaccgttattacttgcctgactattctgatctgctgggcgcttctggccattgcccagttgtggttaacgccaatggaagttatcacgtttgtgaaaatatcacttacggcggcagtacttgaagttgttattctgattgcaggcctggctcggcgagaatattgccaggaacaggatctgaaaaagaatggttttcttgattaa

SEQ ID NO: 93918 - DNA, 177 bp, Enterobacter aerogenes
atgctgggtagtctgttgtttggcgcatctaaagttgatccggtaaaattctctgagttcctgaataagaatgcgagagagggctggcgcgtcgtgaccatggaaaaggatatccgtcgcatgatgctctttttcaaacgtgaagcctatgtggttattcttgaaaaagaagcatga

SEQ ID NO: 93919 - DNA, 1056 bp, Enterobacter aerogenes
atggagatcgttaccgcaccgcatcttgcggtcagaaacgagtggcttgcgttacatcgtgagccgccactacaacccgagctgcccattattgatgcgcatcatcatctctgggatcggcaaaccggacgctatctcacccatgagttcagcgacgatatccagacctcagggcatcgcgttttctcctcggtctacgtgcaatgccgctctatgctgcgtcgccacgggccggaaacgttgaaaccgcttggtgaaattgagtttgccagcgggatagccgcgatgttcgccagcggacattatgcaaacgctcttggatgtgaagccatcatcggcggcttgagcttgctggcgggcgatgcgatgcagcctgccatcgagagcgcgctggctttatcaggcgggcggttgcgcggaatgcgtaatccattggcctggcatccggatccgcgggtcacgtccagcccggttacaccaccggcaggactggccctgagcgaaccgttccgccggggcgctgcctgcctcgcacaaaatggattgtcgcttgatgtgtgggtttaccacacgcaactggatgaaattgccgagctggcgcggcaaataccaacgctacagattgtgctcgatcactgcggcgggcctgtcggcgtagggccttattcagaaagagatcctgacatgtttcagcagtggcgaagcagtatgcgacatctggcggaactgccgaacgtatgcgtaaaaattagcggatttggtatgacggtcaggggatttcccttcgcagcggcagaaacgccgccggattcgcaaatgctggcacaggcatggcaaccgtggtttgagaccatcattgctcttttcggtgcggaacgctgcatgtttgcgagtaactttccggtcgacaaaggcatgttcagctacggcgtcttctggaatgcctgcaaacgcctggcgcaacaggcttcccctgatgaacaggcgcaattgttctggcgcactgccgcaacctgctaccggataacctctgtggagaatatcaatgaccagtaa

SEQ ID NO: 93920 - DNA, 1110 bp, Enterobacter aerogenes
atggcgagcatacaaattttgagatttattgcagctgcgttagttgtaattcatcatttgtctttcaagctaaacacaccttcttaccctgggcactttctacagcttggtgcatcgggcgtcgatatgtttttcatcatttctggttttattatgatgttaatctctacccgtgaaaacgaacccgtaaatttcataaaaaagagggtgaaacgaatttacccaatgtactggctatatacatcattggctatttttattttattaatagcacctgaacttattaaaccatctgaaggtaaagatggtattactgttttaggctcattaacccttattcctttttacaaccaagaatttgcacttaaagttggttggtctcttacctatgaaatgttcttttatcttatttttgccacttccttatttttaaagagaaacattgcgataacatccagcctcatcattatagctttttatactacatcattatttactaatttcttccttattgattatttagggcgaagcattgcacttgagttcattctaggaattattgcttacaagctatatattaatcagaaattaaaaaacaactttattttaatctccgttctttcattagcttcatttgtatttttaatatttactgaaataaataacagtacgctagaccctgccgcaccagacagacgatttgcaatgtggggtatcccaatgttctttatatttgtatggttcatctctctcgaggagagcataaaatcctttaaaatccataaagcactttcgacgcttggggatgcatctttctctatctatctcagccacctctttgttgtatctgcttgtgtagctgttttcaaaaaattaccgattctacatggaattaatttttacgtagccacattaattatcgctactatatcaatagcatttggatatttatcatatcgtttcattgaaaaaccaaaattattggaaagaattttcccaattgtaaagctggcattcaaaaaaaatatcaggcataacacttggtcagttttaaactcatatttgacagatggtgagaaatatatcaatgtcacccgccatctgttttaa

SEQ ID NO: 93921 - DNA, 315 bp, Enterobacter aerogenes
ttgggtgacgaaagtgcgggtacttgcagtattattgggggaagaaagacagttctggcgggaaaaaacgggcagaatagcgtaccgcagggagtcagttttgccagtgaactcaccgccgcgctgggtaaaatcagcgatacccagcaggccgcgtgtcaacaggcgcaaaacttcgagctgggcgtgccgggtatcagcctgaatgatgtgatggtcgatttaaagaaatcttcagtttcgttgcagatgggcgtgcaggtgcgcaataagctggtggcggcctatcaggacatcatgaatatgccggtttag

SEQ ID NO: 93922 - DNA, 594 bp, Enterobacter aerogenes
atgtcccgggctttgttgtttttgcaacatttcccccggcggcgctgcgcctggacgggctactggctggtggtgcggcctgtgggattcccggcggcgttgtacctggccgggctactggctggtggtgcggcctgtgggattcccggcggcgctgcgcttggccgggctactggctggtggtgcggcctgtgggatacccggcggcgctgcgcctggactggctactcgttggtggtgcggcctgtgggattcccggcggcgctgcgcctggactggctactggttggtggtgcggcctgcgggtttcccggcggcgctgcgcctggccgggctattggtggtgcggcctgcgggatgggtagcccgggcgaggcatttatgccgaccccgggaaggtttacaggggccatatgcgaaaaaagcccgtactttcgtacgagctctcatctcgaatatggcggtgaggggggattgactcgcttcgctcgcccgtgtggggcagcccgcttactgcgttcgcggtctgtccaactggctgcgccagttgtcgaacccggtcgggggttctcatcccccctacggagaatataa

SEQ ID NO: 93923 - DNA, 240 bp, Enterobacter aerogenes
atgctcagacattcagatatacaaagcgccttcagggactctctatcgcaaagcccaaaggggtatctgtgccttcgtaccagcgacttcattcgtgaactgcgaggacgagggattcacttcaccgatgatgaggctaatcggtggattgaaagacaccaatcgtgttttgctgataagacaacagaccacagtaataaccgcctgtggattctgcgcaacatggggagggtgctctga

SEQ ID NO: 93924 - DNA, 300 bp, Enterobacter aerogenes
atgggaagtgttaaagttgttaagaattgtgaaacgcaagtgttattaccatggtatggcgtgattttaaaatctgataatcgtgatattgagcttgagtttattgactcaaatataagcactataaaaacgaatgacccagatacaaacgaaatgattactgttcatgaagttatttttactgtcaaatgtgatgggcaagcaagacccggcacgcatacggaactaatcaaagggatggataattccacccaggaagaaatatttttagcagccagaaatcaaatttcaggttcgtga

SEQ ID NO: 93925 - DNA, 2256 bp, Enterobacter aerogenes
atggccacgacacctacgcaactttctgtaccgagtgagactccgcgtgatctgaaatttaacgcaggtaaaattgatgaatttgtgacgggggatgtccattattacaccgatcgattcgggaaaagacacatcacaatggctggaatgcatgccgagtttgagactcagctcgccagtcaggaagcgcgatttgatgcctttatcgaaaggtcaggctaccaggtaatcggtgattatgtcgatggtcccctgactgtcactgaatataaccagcttattcgttacggtaacgagttgtggaaactgaatgccgatacagatttgccgtataccacagcaggaactacagatgaaacatggaatgctactgactccttgcatttcgtttctgtaggggatggggctctccgtcagcagcttgcaacgcctagcagagtatcaggtgataaaactggcggctccatggttgccaccccaaccggtgcgactgtggatgatgctttgcctgatgtatatctacctgcatatggtgttttacttcagccggcatcaacgataagtaatggcactgctattgatatgtcggataagttgcaagaagcgatcaatgaagccaagcgtcttggcgttggtttggttacgggggttaggtctattcacggcccggcgccaaccgggtatgtttatgtaacaaaatcgtttgatgtcactaggctgaagagcatttcaggatttttagcaataggggtaataccagaaacattcacgccaacattatttaccgctgagacaccttcccgtggaatggtaatgcgaaatatgaatgcgcgttatgattcaagcggaaaacaatatgcatattctactgaggtggggccagactttgatagtctcgccatctatgcattaagagacatgccggagaatatcatcggtatggttcacacaactgcgtacaatcactttcatggtcaagtttgggcgcgaagatttgccactgggatatatcttgcaaatacctatgatgtctctattgctgcgcaatgggcagcggttgactgtggctcaatgaattaccctccattaatggttggttcttatcctgcagcagatgttgccgatgaatccaatagtattactttccctgatttgttattgcattccaataaatatcgtgatgctgagattgttggtagtaaaataaatgttactcggatacatggtgaggcgtgtgttattggaagccttgacggaatggttccaagaccctttgaccaatacgcgccaaaaggtattgcttctttagtaattgcttcggttggtggggttgctggaaacatagattataacattagcaaaaactcaacaaataatgggtgtttgctcatcaatgttatgaccgatggaattagtagtattttgtgtgaccgtcctgaaatagatactgtaatcaatgatatctattacttaaaaggtggtgggcatattggagttattaaaactgccggaaatctatatacaggaggtggttcaaagcttgttattggcgaagtggttgttggtaagaacctgtatcataaagctgttgaagcccacatcacaaatgcagatgtagatggagatgtggaaaactctggaacaataaacaatctcacctgcaaaggatctttaactgaggaccaatacggaaaagtaaatggcggttctgtcggtgggaatgtaacaatgacagcctctggtaaactcactgatgttactataaatggggatttcattactgcggccgccaagcctaggttaacccgcgttacggtaaatgggcaatggagggcaacaggcggtggagttttttatgactgtacgatgcctgggtttggtatacagtcagttaatttcgtaccagaatacgaaaaatgcaactttacatcgactattacggctccagtagctaattcccgcgcagtgttcaataattgccgcgcaccttataactttgacaacgcagtaaatcctgacatcagaatatataatggctcttcttctggtttatcaatggagaatgttactacaggggctgttataattgatggtcttgtttttacagcaggtaactcaattaaggggtggtcaaaaccagttagcactggggcgggttatggagctaaaactgtcaacccatatactggaaaaggttggatgttgttagattataatagtgctccggcatggttacctattaacatatatcaataa

SEQ ID NO: 93926 - DNA, 417 bp, Enterobacter aerogenes
atgaccccgtcgaatacaccggccttcagtacctctgattttatccggaagatgatcggcgtgccctggtcgaaccgggcgtgcactttcgacagggtcgattgctggggcctggtggtgttgtactttcgccacgtcctcggcactgaactgcaccagacgccggactacgaagccggggctgacttcttcacctgctatcagggtgatgtgactttctggcgcccggtcgataaaccggttgagggcgggattttcgtcggctatcagggatcgcagcctgcgcatgttgggcttgtgctgaaccgtcaggcgctgcacgcgcggggcgatggcggcagcgtccgtatggactcgttgctggttatccagcgggcattcacaaaggtggaattcttcgaatatggcgctgattga

SEQ ID NO: 93927 - DNA, 471 bp, Enterobacter aerogenes
atgccgagttaccgtgaataccgacaacagcgcccgacgcgcggcctgtacgacaccatcacgttctaccacccctcatttggctatgtccgcctggtcaacaagcagttcttcgaaaagacacttggcggccaggtgtacacgccagcacgcttcgaaatcgaagagagccagcagagcggtacgccggtgatcgacgcgacggtgaagttaggccggttgtcggcggatgtgaaagcgctgatgaagaaatggaagggcgcgtcccggctatatcccatcacagcaacccggcagatattcgacagcattgacgtaacggcaccgacaaaatcgtggcagctgtacgtgaaaaccgtcgatatcgacacggacagcgcctcgatcaccttatccatgacgaacccgctgaataacaatatcggaaggctttatgaccccgtcgaatacaccggccttcagtacctctga

SEQ ID NO: 93928 - DNA, 561 bp, Enterobacter aerogenes
atgacagctcaaaatgtcgaggatttagttaataaaattaaaggacgaaatgagttattagggatgcggttgtatcgtgtgttttattacgatgctgaacctttcactggtactaagacacatcctatatccaacgctgttactaactttggcgccacacaaatggccattgattgtaatacattgttagatgagcttaaggtcaagcctttttttgctgtgcgcctaggggaactcaattttagagggtggaaggtttcagataatgctcttcagtctggggcaggggggacagcaacaattaatgctcatgatgtttctcccaatcttcagcagaaaggtgttgatatgaggatcgcattggatatctcatctatgactttaaagaaccaggcagatgttttttgcctggtcacaggtgactcagattttgcacccatcatcaaatttgcgagatctgaaggaaagcaagtattcacatatactctcggtcatagagtcaaaccatctttgcctattcattctgacctccatatttctgaaacgtacgccaatttgtaa

SEQ ID NO: 93929 - DNA, 156 bp, Enterobacter aerogenes
atgaaacgcggcgggttacttcagaacagcaggctttatcggattggcgagatcgtgatgggttcattcaacccaccacatgcactcaagcgtggtgagcaacttaaaggacagggcggaaacgtgacggtagtgctgcgctggaaggagggctga

SEQ ID NO: 93930 - DNA, 273 bp, Enterobacter aerogenes
atgcaaaagttaagaattgaaaaaccgggttgctggggcgcgattgatggcgtattccagcaacttcctgtaggtcacgagttcatcgcagcatccgttccgccagcattctccggtcgagtttcagtcgtcggagaagtcggtgagcaggagcttgaaattccgtcgcgaggcgaaaatgctgcagagcagccggagcagccggagcagccggagcagccggagcagccggagcagccggagaccaccgctaaatcgaagaagggtaaataa

SEQ ID NO: 93931 - DNA, 1056 bp, Enterobacter aerogenes
atgagcatgatcgtatttaacaaaaagctggttactgaacataaccagattaagaaagcgtggaatcaactgctgatgcagcgtgaatccttcaacgtcaaccagaacaccatttccgcccagtacggcggcgcactggaagttaaccaggcagcgctgatctctaaagactactggcgtgaagtggacaacatcaccacccgagtcttccgtaatgacgaaggcaacggcctgttggatgatctgctcggtctcggtacgccgatctctatcggcaagacagcggcgctgtaccgcgtttcgagtgacgctggcaaggttcatcgctcactgacgggccacgttccggaagagctggataaagtcatctacgatgaagctggtgacccaattccgatcttcaataccggctacggccgcgaatggcgtgagtggaacggcatgcaatcggaaaacctcgacgcgatggctgatgaccaggaagcacacgttgcagccatccgcgaggatatggccgattacatgctttcaggtgacgcgaaagtgaaggtgaagggttatgtcggagctggtattactaaccatgccaataccaaccaggtagacttgggcgcttctggtctgaacattgaccttaccacttctacacctgacgaaactgtcgcttttttcactggtccattcgcgaaactgctggacgataactttgtgcaggaaaaggtaaaagcatgggcatctccggatatcatgcgcaacctgaaccgaccgtattccgatgctgcgggtttcaaagaaggtaccgtgctggaatacatcctgcgttatggtcgcatcgagtcgtttaaccagacctttaagctgaccggtaaccacttcattgcctacgtacgcaattcgcagtacatcaagactcgcatcgccgcgccagttggcaccttcatgatcccgcgccagaatccgttcgacaactacaactccctggtctggagtgctgttggtctgcagattaagcgcgacttcaacggtcgttctaaagtgttcaacgcacagggttaa

SEQ ID NO: 93932 - DNA, 462 bp, Enterobacter aerogenes
atggctctcgcacctcgtttccataccgtaatcgcgggcccggcccgtaagaatgacccgcaggtcattgaagcaatcatggcggcggccgtgaaacccggctcactggtgatgctcgacagcaccgggaaactggcagttcacaatgtcgcaggtggtgcaggcgttgctctggctcttcagcacaactatatcggcggtggtgacattcgcgactcggttccagcaggtgataccggcgcggccatcatgtgcgaagacgatgtggattaccacatgctggtcaaggcaggcgaagtgctgctggaaaacgaaggcctggtttctgccggtgacggcacgcttgccaaggcaaccacgccagccaccgaccaggtcctcttttattcacgcgaaaaaatcaccgttggcactgaggcacagctcgtgaaagttcgcaaatcagggaaagctaccgcatga

SEQ ID NO: 93933 - DNA, 1362 bp, Enterobacter aerogenes
gtgaagctatcaagcatccacgttaaatccctcgccatcaacgcctccaacatctcaacgaccaccatcaacggccaggaacactacgtcattcgtggtgcggtcccgatcgtcgatgacattgtgatgaatggtggcctgtacccggcggaggagattaacaacagctaccagacgatggaaggcaagctgatgcctctcccacacccgatggtagatggcaagtatgtcagcgctaatgacccgcgcgccattaacacctatcacgtcggggcttgggcgcagaacgtcagcaaatccggcgatcaggttgtcatggacgtttacatcaacaaggctgttgctgagacaaagcctgatggcaaacgcttgattaatcgcctcgatgagatgatcgccggcaccaacaccgacccgatccacctctcgacgggactgctcaccaacaaagagaaaaagtcaggtgaatcgaaggggaaaaagcactcctggatcgcccgcaacatgcagttcgaccacatcgccatcctgctggatgagccgggcgccggaacgccagaagagggagtcggaatgttcgtgaatgctgacggacaggaaggagaagttgagaacgctagcctcatcgacgcggctaacagccttaaagacgggctgctgaataaagtgaaattcttcttcacccacaactcagacgcctcattcgacgaaatctaccagatgctacgtgaggctattcgcgctccctcaggcagtgatgtctatcgctacgtcgttaccgtctggccggacaaattcatctacgaagagggcaataaactcttccagcagaaatacctcatcgatgacagcggcgtaacgcttgtcggtgagccagtagaagtcgtgcgcaaaccaactgagtacgaagtcaaaaccaacggagaaacaaacccgatgaaagagaagatgatcgccgcgctcaatgccgcaggcgttaaaaccgaggggctgaccgacgatcaggtctgggatgcctacaaccagcagatgcagaagaaaaatggcggcggtgaccatggtcaggctcagattaactctgatgtgattaccgcggctgttaatgcggcgatcaccccgctgaatgaaaagttgagcaagttggaaacccagctacaggcgaacgctgaaagcgaacaaaaagccaagcgtgacgccgttaaagcgaaattctcgtttatgaccgaagcggcgatcaactccttatccggcgacgcgctgaacgacttgtactcacagtgccagaccagcaccggtctgaaccctgcattccaggggaatggcgctcagagtgaaatccttaacatggaggcacctgaataa

SEQ ID NO: 93934 - DNA, 1449 bp, Enterobacter aerogenes
gtgaacgaaagcgaaaataaacaactcgccacgaacgccagcatcgaccgcgagcggatgcgttacgtcaacgcgctgttcaatggcaccagtaacaccaagcgccagcgactgtaccaggagtttgggtaccctaaagagctttgcttcgatgacttttaccgggcgtaccgccgcaacgcaattgctggcgccgcggtgacgcgcatggttgatggctgctgggaagattacccggaggtttacgaaggggaccagacgaaggatgccacccagcaaacagcatgggataagcgcgttaacaagctgcttaagcgatgctggaaacagattaagggcgctgacaaacgcaatctcgtagggcgctactctgctttgctgctccaggttaaagatagcaagccatggtctgaacctgttgataagtcgatggtcggcaagctgcaggaaagggcgcttgtccggctcattccagtttgggaggctcaactagacccggtcagctataacgaggatcagaacagcgagaactatggcgctgtcagcatgtactcgttcacagagataccagttcagcaacaacgcagtgcccagcccgggcgcatcatcaatgtccaccccgaccgcgtcatcatcctggctgaaggctcggatgacgggtgtcttgattccggcgagtcgctgctggaagaaggctttaacaaactgctggacctggaaaaggtgtctggtggcgctgctgaggggttcctgaagaacgccagccgacagctcaacttcaacttcagtgccaagacaagctttgcgcagctggctagagcactgggcgttagcgaagctcaactctcagaagggatggatgaccaggttcgccgactcaatgacagcacagacagcgcagtcattatgcaggagggtgataccagcgttctttcagtggcggtagccgaccccgagccaacatggcgcaccgcgctgagcgagttctgcgcgacggttcctattccagtgaaagagctggttggcatgcagacaggtgagcgagccagcactgaagatgcaaaaggctggggccgcaccaggatgagtcgccgaaaagggttcctgactgacgttatcaccgatgtggtttctcgattctggacgctcgggattattcctccggcgcggaatgaagaaattaccgtaggatggtcagatctcctggcgccgagccaggcagagaagattgccaacatggacaaactcgcggatgtggccgtgaagtcgacgaacgcgtttggccgctcagctatcaccgaaaacgagatacgcgcggcgggtgaactgcaagccctgccagaacttgatgatgaggtgccgccagatggcaaccagccaaagcctgaccctctggccgacccagaatcagaagccgaagagtccggtgataccacggtcgaaagttga

SEQ ID NO: 93935 - DNA, 1569 bp, Enterobacter aerogenes
atgaattacaaagctgtatggaagccactgcctggatctcagtccctggcgctgagctgcccgtgtaacgaaatcctgttcgagggcactcgcggaccgggcaagaccgctgcgcagttagccaggttcaggcgtaatgtcggagtgggctatggctcgttctggcgcggcgtcatcttcgacaccgaatataagaaccttgccgacatcatcactcagtcgaagcgtatgtttcgcctgttcaacgacggtgcgcgctatctgtcatctgcgagcgaattgcgctgggtgtggccaaccggcgaggagcttctatttcgcttcggcaaagaggctgacgactactgggatttccacgggcaggaatttccgtttatcggctttaacgagctgacgaaacaacagtccccagagttctacgaaatgatgttctcctgccgacgctcatcgttcaggccggagaactacccgctggataatggcaagttactgaagccaatcccgctggagacgttcagcactaccaacccgtttggcatcgggcatacctgggtgaagaagcgcttcattgagccggcgccgcgtggaaccgtgcagcgtgaccggcaaatggtgttcaaccctcagacagaacgagaagaggaaatcacgctgacccgcgtggcaatccacggatcgttcaaagagaacccgtacctcgacccgcagtacatcgcgacgctgatggcaattaaagaccctaaccgacgcaaagcgtgggtagagggctcctgggatgtgaccagcggcgggcgattcgaccacctgtggaatgaatctctgcacgtcattaagccgttccacataccggacagttggacagttgaccgctcccatgactggggtgagtcgaagccgttctctaatctgtggtgggcgcaggccgatggcactgctgctgagttgcctgatggtcggcagttctgcccgccggcagggacgttaatcctgatcggagaatggtatggctgcccgcctgatgagctgaacaaaggcctgaatatgtcatccaccaacgtcgcgaaaggcgtggcgtggattgacaagcggctggtgggcgaagacgtcgacgagccggaagagattcaaatagacggtgttacgcagggccaattgaacgttgttccgggaatatgctcggaagttatcccgggcccggctgatagcgccattttcaataccggtgacgatgagttgtcgatcggccagaaaatggaaaatcagggtgtcgaatggcttgaagccaataagaagccaggctcacgaattaacggggcctcggtatttgccgacatgcttgaggctgtagttgaaggtaagaagctggaatctggaatccctgagaagcctgccttttacgtgttcgagcattgccgtggctggattagccgcatacccgtactggttcgcgacagcaaaaacccagatgacgtagatacgcagcaggaagaccacgactgggatgctacccgctaccgagtactgcattcaccacagaaaattaccggcatgttggtgcgctcgcgctga

SEQ ID NO: 93936 - DNA, 651 bp, Enterobacter aerogenes
atgagcaaaccggactgggaggccatcgagacggcgtaccgggccggggtgatgtctctccgagaaatagcgtcacagcacggtatcagcgaaggcgctatccgtaagcgtgccaagcgtgacgactggtcgcgtgacctcaatgcgaagattcagcaaaaggctgacgatctggtacgcaaacaggaggtacgcaaacaggtacgcaacgaaagcactttgaccgagcgcgtactgatagaggcgactgccgaggtgattgccacggtacgcatggagcaccgtggagacatccgccgggctcgtgaactgaccaacatgctattcgatgaacttggtgcgcagtgcgcagacgtaagcgcgctcgagcggttgggcgacatcatgtttgaccccgacgataaagggcgggaccggctcaatgaaatttatcagaaagtgatcagcctgccttcccgcgttaaatccatgaaagacctgagcgacagcttgaagacgctgattggcctcgagcgtgaggcgtacagcatcgagaataaggctgaaacgaaagaggtcacccataacgtcatgctggttccaaccagtgacaacgtggatgactgggaggcggcagcgcagaaacaacaggacggggtgctcggtggatga

SEQ ID NO: 93937 - DNA, 189 bp, Enterobacter aerogenes
atgccgatatgcacgctttcagtagaagtaaaaagccgctggtggctgccgctctatctcaaaatactgacgttattctgccaggtggtacagcgagagccggattacgaaaaggtgtctgcattcatcgtgaagtatggcgtcagccagagcgtgaaggtgcagccagcacaaaagaaaacggagtaa

SEQ ID NO: 93938 - DNA, 228 bp, Enterobacter aerogenes
atgtacagcagactgttagccatatgcctgatgacgatgttgatcgcgagttgcgcgcaaagtttacccgccccggtggtggttgatacggcctgcaactgggtacgaatcatctacctgactgagcacgatatcgatgtgctggataagcagaccaagcgtgacattctggcgcacaacaaatcagtgctggcgaactgtcagaaagaaaccagagcctcgcaatag

SEQ ID NO: 93939 - DNA, 543 bp, Enterobacter aerogenes
atgaccagagacgaaatttttaatgccatccttggcaaagagggcggttacgtaaaccaccctgacgacaaaggcggcccaacaaactggggtatcacgcaagcggtggctcgctctcatggctatacaggagatatgcggaatcttacccgccagcaggcgctggatatcctgagcgctgactactggacaggcccacgatttgaccttgtttcagaagtgtctcccgccatcgccgccgaactctgcgacactggcgtaaacatgggcccgtcggttcagaccaaatggtttcagcggtggctgaatgtgttcaacgtgcagggaacgctctatcccgatcttattgcagatggctttatcggcccccgaactatcagcgcgttaaaaagttatttatcgcgacgcggaaaagagggcgagttggttatgctccgcgccctgaactgcagccaggggcagcgttatcttgaactggcagaacaacgcagcgcgaacgaggcgtttgtttatggctgggtaaaggaacgggtggttatatga

SEQ ID NO: 93940 - DNA, 306 bp, Enterobacter aerogenes
atggtaacaagtgatccgagtgcaatggcaaatgccatcatctgcggggtgatcgttatttcccttatgttctatcagcgtggtgggtcgaggcatcggccactgatatcactgatggcttatttcactgtgctggtgtacgccagcatcccctttcgttatttattcggcctgtatcacgaatcacactggtttgtggtgctggtgaacgtcctgatctgcgctgtcgttctctgggctcggggaaatgtcgcgcggattattgacgccctgaggcattcgcatgaccagagacgaaatttttaa

SEQ ID NO: 93941 - DNA, 396 bp, Enterobacter aerogenes
atgtccgatcctgtttctgccacatcgatagctgccggcgggttgtttggcgccagcctgttcggcctggcaactggcattgattacggcgtggtttttggcgctttcgccggcgcagtattctatgtcgctacggcggtaaatattagtcgtcttaagctggtggcctacttcattacgtcattcatttttggcgttatcggcgcgccacttcttggttctttcttctcaaaatggaccgggtatagcgacaggccgcttgatgctctcggcgccgtaatcgttgcagcaattgctattaagctgctgactttcgtaaacagccaggatttgggtagcctgtttggaattctctctcgcttacgaggtggaggaaccggcaatggtaacaagtga

SEQ ID NO: 93942 - DNA, 156 bp, Enterobacter aerogenes
gtgatcggcaaactgcgctgggcagccgccggggttttgttgttcctggtggttgccatcgacttcaccagcaaaatgatgtctatcctggcggatggcgtgctggtagccggggtcattgctttgctctggccgcttattaaatccagtgattaa

SEQ ID NO: 93943 - DNA, 813 bp, Enterobacter aerogenes
atgaaccttgaatccatcgctaaatactttgcgcctaaatcaccaatgttcagcgattccccgcgcgcgaccgcatctgattcattgaccggaacggatgtgatggccgcccttgggctggttaaagctaaatgtggctttggtttcgatctttacctggcaaaaattggcatcagcaacccggagcccgctattgaggctctttttaatgcttccattgaaatatccagagggtttaaagcagtcactcaactcaatgaggacgctcgccgccgggtactcgaaatcatgtgtgcttttgcataccaggattatgccagaagcgcggccagcgtgcggcagtgtacctgctgtaatggtgctggtttcattgatgcggaggtctttactaccaaggttcattacccggacggaaagccccccaaatgggcggccattaccaaaggtgttttcccttcccactgggaggagtggaaatcagtacgtgaaggggttcgtgtgttgtgctcggtctgcaacggaaagggcgttatcagtaacgcatgccgctgtcatggaaaggggaaagtggttgatcagaaagaaagccaactgcaaggcgtccctgttatgaaggagtgcgggaaatgttctggccgtggctatgctcgcatcccggcagaaaacgtgcgtaaggcgctgtgttcagaagtgatggaaataagccagccgacatggtcccgcaattttaaaccgctatatgaactgctggtgactcgctgtcatgccgaagaatcgcaagcagatgcagaattaaaaaacgtaacacgataa

SEQ ID NO: 93944 - DNA, 477 bp, Enterobacter aerogenes
atgcaggaacttgagaagaaacgcgaaaaacaggctcaggcgaaagcgaagaaagagcgcgccgaatggcgtaaacgcaaagcctcggtgaagcccctcaggcactgggaagatatgacccagcgtgtcgttaacgactatatccgcgaacgtgatcacgacctgccgtgcattagctgcggcacgttcgatacggtgcagtgggaggctggacattaccgttcccgcggtaaagcatcgcatctgcgctacaacgaggacaacattcacaagcagtgccatcactgcaacgtgcagatgtcaggaaaccagcagcagtaccgcattgggctggtagagaaaattggtgctgagcgcgtcgaggcgctggaaaacaacaatacccctcaccgatacaccatcgaagaactggaaggcatcaggcgccattacagcgcgctacgccgtgcgctaataaaacaacgggaggccgcatga

SEQ ID NO: 93945 - DNA, 234 bp, Enterobacter aerogenes
atgaaagtagaagtcacaattgataagcataaaaaactccctgatggtgcagtgccagctctagagaaagagctgcttcgtcgattatcccagtcgtatgacgactgtaagctcataatccggcgcacaagtaacgatggactgagcgttcttggcggtgctgacggcgataaaaaacgagtagagcaaatcctgcaagagacgtgggaaagtgctgacgactggttttattag

SEQ ID NO: 93946 - DNA, 1005 bp, Enterobacter aerogenes
gtgataaataacatacagttgttgagaggaatggctgcattattagttgttatgtaccatatcccagcattggtagaaaaatatggtcttggaacatacaacccactaagcattggtaggtggggtgcgttcggtgtagatgttttttttgttatctctggctacataatggctaaggtttcatcgggaaaaagtaaatccccttttgtttttattacaaaaaggtttgagaggatctatccactttattttatcctgacagtttctcttgttttgattcaatttctttatccctcaatatttaaagaagcaatttatgggttagggcaaaatgttacgtcacttttgtttataagtcgttttttcgactacgagtacccgaccctttatgtaggctggacattagaatttgagatgtttttctatgtcatattctttttgacgctgtttgttaaaaaagaaaatattagatactccttactttccgttgcgatcgtattctcggttgtgacagggatatcgagcgcaattgccattgagttcatatacggcgtagctatctatgagataactagtcgtggaatcatcaagaaaataaacgcaagtccaatgtacttctacatagtcttgctggcatgttgcggagtcgctgctgcaatcaatatcccgatccatcctgattctccaggcaggccatttaactatggattaatagcgtttgttatggttctctctgccgttgtctttaacgattcaaatgaaaatgttttaacaaagttaggtgattcgtcttattctatatatctcacacaggtgtttagcataccactcatattaaaggtggcggtggccgcgaacgttactaatgtgcctgttgttatgtttttcttcacgactgcattcgttggggtatctggcgtatttacatataaatatgttgagagaacgatgaccatgttgtttaaacataaaaagataaatggtgcagtgccaagagtgaagtaa

SEQ ID NO: 93947 - DNA, 228 bp, Enterobacter aerogenes
atggctgttgcaagaatgctttgcgttagctcaactgagccagcctggtttactccgggcaccgtatacgattcagaacctcgcggtgccgatacctgcatttgtggagacaacctcgtttcagacctcaacaaagatgactggtacgaaatgagccagcgcgctgatgggctgtggttcttaatcggttttcaacagtcaattttattccggggggccaaccaatga

SEQ ID NO: 93948 - DNA, 543 bp, Enterobacter aerogenes
atgagcatcactatcgaaaaaatggacgttctgtctttcaccattaccggcgctgaacgattagaccccgtgcgggtgatgattgaaaactatgagcccggcaagggccgcatcaccatcacctgcttcggtgaggcgtggacaggagcctggtttgctatgggtggcgattccgttcaggagttcattaagcgtgtcagcaatgactacctgatcgggtgtttagctccccgccttgaaagctcggttgacgacgacaacgaagcgaatctagcgttcgttaaggcccatatcattaagcttcgtcgcgaacgggaacttgatgctgagaaagctcgcgaaatgtgggatgaagccgaaaatgctgatgacgttaaggcatgttgctgcgactacggcattggtaatgaacttttggagctttttggcgacgacccatgttacgcacaatggccttctgtgcctaacccgaattatcaatacctcgatcgcatactgaatgcggttcgtgtcgggctggtagaaatggagcgtgcggcatga

SEQ ID NO: 93949 - DNA, 231 bp, Enterobacter aerogenes
atgaacaaagagacacaacaaaaaatcagtaaggcagcatctcgtgcctgtatcggaaaacactttggcatcagcggtcaggctgtcggcaagtggatttacgagaatggcgtgcctcaaaaacgcatcgttccgctatgccgttttcttaactgggaagtaacacctcatgaaattgatcctgaggcgtacccaaaccccaccgacggtctgccgaaacaggaagactga

SEQ ID NO: 93950 - DNA, 144 bp, Enterobacter aerogenes
atgacaccgcatgggtgccattggttggacgagtttatgtatttattttttctgattgtttatgaggtcgtaaacgtcgttcttaagcaattcgatatcgtgaagtacacccttagtgtgaaggataagacgcaacttctctga

SEQ ID NO: 93951 - DNA, 144 bp, Enterobacter aerogenes
atgataaaaaaatatgaggatgttcaggttgtagacctgctttgtattcatgaggttcagggagaagaaactccatgtgacgctgacaatcaggaagtcgtcattgaatctgcaacctacgaatggttaacaggtgctttatga

SEQ ID NO: 93952 - DNA, 636 bp, Enterobacter aerogenes
atgacgaaaattattgaacgcgggataatattcaacggggagatggtgcgcgccattcttgacagccggaagacgcagacccggaggattgttaaaggggctgacggcgccgtgaagttctgcaaggaatgggacatcaacggagaagaaatttttgttgtgctcggcgaaaaagaccacacaggaatgaaccctgttttgggtgctatctcatgcccgttcggaggcgtcggagatcgcatctgggtgcgtgagacgtgggcgcgctacaacatcgaccagaacagccacgacatagcgtaccgcgccacaactccagcagactggccagaagaaggccgctggcgtcccagcatccacatgccgcgctgggccagtcgaattctactggaaattacagacgtgcgggttgagcgcctcagagagataagccaagcagatgctgaagctgagggggttggaaaactgaagaaaggtttctggaaaaactatcagccaggctggacggagtttcaacttacagcgcgtggctcgtttgcaactctctggaaatccatctatggcgatgaaagctggtatgccgatccatgggtttgggttatcgagttcaaacgaattgaggagcagacagcatga

SEQ ID NO: 93953 - DNA, 276 bp, Enterobacter aerogenes
atgagcaatgaactcgaattgatgaaaacgcgcgatatctgcgaacaactctgcattacgccgagaacactggatcgctatcgcaagcgtaaaaagagcgaaaaccccttccctgatccagactgctcatatatgggcggcccgaacaaatggctaaaaagcaaagtggtcgcctggcagcaaaaagagatggttagaaagaccagacggccaatgtcacatctaaatttacctcgcgatagcaaaggtcgtcttatccgacctgacgcggcgtga

SEQ ID NO: 93954 - DNA, 1230 bp, Enterobacter aerogenes
atggctatttcagatagttatctaaagtcgtgcctcgggcgcgaacgagacaaggtagaagagaaggctgaccgtgacggcctttgggtgcgaatttctaaaaagggcgccgtcacctttttttaccgtttccgctttctggggaaacaggacaagatgacgatcggcagttatccggagtttggtttaaaggctgcgcgcgatgaagtagccaaatgggctgcgattcttgcccgcggggaaaatcctcgaatcaggcaaagcctcgataaagccaaaataaacagccagtacacattcgaggaacttttccgcgagtggcacgcaatggtttgtatccagaaagaaactgcagggcagatcctacgaacgttcgaacttcacgttttccctaaactcggtaaatacccggcacatcagctgacgctacataactggctaacggttctggacagactggcgcagggttataccgaaatcacccgtcgggtaattagcaacggccggcagtgctattcatgggcggttaaacgccaactactggagaccaaccctctatctgaaatgtctgggcgagatttcgggatccagaagcagatgggagagcgcacccttgaccgaaaagaactggcgatagtctggcgagctattgaagactcccgcttgatggaacggaataaaatactttataaactgtcactgctatgggcatgcagggtcggcgaactgaggcaagctgaagtatcgcatttcgattttgaagagggtatttggaccgttccatgggaaaaccacaaaaccgggcggaagagtaaaaaaccgatacttcgtccgataattccagaaatgctgccattgataaaacgagctattgatcttgcacctggtcgttttgttttctctaagtatgaagataagccgatgagtgaaggcttccatatgagcatcagcagcaacctggtgaagttcatgctgaaagcttataacgagcaagtgcctcacttcacgattcacgatctgcgcagaacagcgcgcacaaacttttctgagctcaccgagccgcatattgccgagataatgctcggacataaactgcctggtgtatggtctgtatatgacaagcatacatatattgaagaaatgagagaggcatatggcaagtggtgggcccgactgatgagcatcatcgagcccgatgtactggagttcacgccgcgtcaggtcggataa

SEQ ID NO: 93955 - DNA, 1620 bp, Enterobacter aerogenes
atgaagacgactcctgacttttcctgtgatgtgttgattatcggcagcggcgctgccggattgtctctggcgctgcgcctggcggaacgccactcggttaccgttctgagcaaaggcccggttagcgaaggctcgacgttctacgcccagggagggattgccgccgttttcgatgaaaccgacagcatcgaatcccacgtcgaagatacgctcatcgccggggccggactttgtgaccgtcatgccgtctccttcgtcgccagcaacgccaaaccctgcgtgcagtggcttatcgatcaaggggtactgtttgatacccaggtgcaggccaacggtgaagagagctaccacctgacccgcgaaggcggccatagtcatcggcggatcctgcatgccgccgatgccaccggcaaagaggttgagacgacgctggttggcaaagcgctggcgcatccgaatatcaccattctggaacgtagtaacgcggttgacctgattatctccgataagattggcctgccgggtacccggcgggtagtcggcgcgtggatctggaaccgtaataaggaaaaggtagaaacctgcagcgcaagagccgtggtgctggcgaccggcggcgcagctaaagtttatcaatacaccaccaatcctgatgtctcctccggcgacggcatcgccatggcctggcgcgcgggatgccgtgtggccaatctcgaatttaaccagttccaccctaccgcgctgtttcatccacaggcgagaaacttcctcttaacggaagccctgcgcggcgaaggcgcgctgttgaaacggcctgacggtagccgctttatgccggacttcgacgaacgcggcgaactggccccgcgcgatatcgtcgcccgcgccatcgaccatgagatgaagcgcctcggcgtcgactgcatgtatctggatattagccataagcccgaagcgtttattcgccagcattttccgatgatttatgaaaagctactcggccttggtattgatttaaccaaagagccggtgcctatcgtacccgccgcccactacacctgcggcggcgtgatggtggatgataacggacgtaccgacgtcgacggtctgtacgccatcggtgaggtaagctacaccgggctgcacggcgccaaccgcatggcctcgaactcattgttggagtgtctggtgtacggctggtcggcagccgaggacatagcgaaacgcctgccgctggcgcaagcggcggaacagctgccgccatgggatgaaagccaggttgagatcccggatgaactggtggtgattcaacataactggcacgaactgcgcctgctaatgtgggactatgtcggaattgtgcgtaccacccgccggctggaacgagcgctgcggcgcattactatgctgcagcaggagctggatgagtattacgcgcgttttcgcgtctccaataacttactggagctgcgcaatctggtgcaggtggccgagcttatcgtgcgttgcgccatgcagcgtaaggagagccgcggcctgcactatacgctcgactacccggacacgctggaaaacagcggcccgtcggtgctctcgccgcttgctcacataaagagatag

SEQ ID NO: 93956 - DNA, 204 bp, Enterobacter aerogenes; identical to SEQ ID NO: 88844

SEQ ID NO: 93957 - DNA, 678 bp, Enterobacter aerogenes
gtgccgcgatcctatccatataataaactacgatacgggcggaaagtaccagaaggtggcgcaggcggtaacggcggcgatgcagggtctggcgggggcaaccttgcgcaggcgacgagtggcgcagtgagcccgtatgtggcggaaatcattcacagccagacgccagactgcgatacagactgtaaaagaaaacttgctgaagatgtggcaaaagggaatgcagtagtatcagcccatctggcaggtactgttgggttaggtatattgccaaagggggctctgataacagcaaccatcagtggcggagccaatactgcaatacaatatgccacgactcgtgaagtgaattacacagatgcgttgatagcgacttgggttggagcagcaaccgcaaaaactggttggttaggaactgtgggatggaatgcggcaggtggagcaacatcaagttatattaaaggagatgaccccatggttggggctataacaagtagtgttggctctggattaggatatggggttggtcattatgtagtgaagcctactgcaaatacaatcggtaaatggataactggtggatgggaccccaaatttgatcccgttagattaaaatatacggaaataaaagggctgattggaatatcgaaagaaatatcgccaagtaaaattccttga

SEQ ID NO: 93958 - DNA, 255 bp, Enterobacter aerogenes
atgagtagttcaatctttcttttaaaaagaaaaatgatcgctagtttttgcatattttttgtctgtatgttctctgtaattattactgggctattggcaaaaattttttttgttacagtactatggattctgggtgatgaatttcaattgtcatggaatgatatcctacaaggcataaaaatcgggagtgtgggaggaggggtactaggtatcggaattattctttcgcgcctttttaaggttgaaggattctag

SEQ ID NO: 93959 - DNA, 945 bp, Enterobacter aerogenes
atggatgttttgcgcatggatttgcaagcaaagttacagattgtcctaacaaaaacagctaatcacctacctgtcgatattggaaactatcttttaacgatgttaactccgcaggcattagcgacaatgtctggagtattaatagtttggggaagtgctcatttttttggagttggtgaaatcgctgatgtgatactcctctgtgcaggatgggttgcaataggtggagttgctcttaatgcagggaagttattgtatacctttgcaataaaaaccatcaatgctaaaacagaagatgagcttgaggatgcggcaagagatctttcagaagcaatcatgttggttggagtgaatactatttttgtcattttacttaaagcgaaaccagccgatacgtttaaaaggcctttcaggggggcttcgatgccccaatatagtaacgaaatagctaaacgcatgagtcttccgagaaatggaggttggcgttatacacccactataaaaataaccaaatataaggatgtggagcagggggcgacgaaaatttggggggatgcaactattgggcgtaactattatcctaacgtaatgtcaaaggatgaagcctatctgaaaatgctgacgacgttgtatcatgaacgagttcatatggcgatcgcacctaagttttatttattacgtgagttgcgtgtattcatgaggcagtcggcttattctaaatcctatatattacgttatcttgaagaggcccttgctgaaactattggtttgttaagagccagaggtatgagtagagagtacatcattcagggatttaaatttccgctaggtaatacttatgagataacattctccttattgaggcatgaagctgctggcatgcttttagggccaatcacggtgggaggaataatgtatagtgtttggtacggagtccaacgatga

SEQ ID NO: 93960 - DNA, 918 bp, Enterobacter aerogenes
atggcgtcaaataattatgggtatgaagattttgaagcatttacttatcttgactatcacaaccttgctgtgtcctggaatttagcgagaggagctttttgttctccctcagaattaccatctaatgaatatagtaatagcttcctttccgttgctattgcaggaatgctatcaaataccgttcctacaaggctttacagcgaattagccattgatagtgttagagaatgtttatttcctgattgtgtatcaagattaagaggtttttttgttttcgatgaaatagaatcaatatctagattttggagttgtaattcttggggggggcatttttctgatcaatatttatctgatgtaggtgtggcagcaactagatctaccagagtagactccaattggatatctcatatagttgatgtggatggcagactaaaagaaggttggcatgataatacagttaactattggcgtggagatgcgtttccaggttctgaacctatatgggaaaggatcgtcgaaggttatttaacggtttggagtcccgttgttagaaaagaagcaatattagaaatagaggctgtctggccaaactctttgaaattattgaactattcttgcctgtgtgctgcttatggctctttagatggaatgattttcccatttttgatgcaagataatgaaggtaatattaaagttacctatttatctagaatggttcaagctaacgacaaaaatttcattgaagcgattattgaaaacgcaaagaaaatgccttcctttagtgttaacttgaacgatacgacaactaatgacgaagagatcagcacacctgatctaacctttttgaatgtctcactatcctctgacgataattgtgcttttgccgactttgttaaactcatgagtcactctcaatga

SEQ ID NO: 93961 - DNA, 342 bp, Enterobacter aerogenes
atgaaatctactgactcagagaacgattcatttctaaaatggggactgaatcgtaatgtgacgccttgctttggcgctcgtctggtacaggagggaaaccgacttcactatctggctgaccgggccagtttcaccggtaagttcagcgaagcagaatgtcttaagctggatgtggcattcccgcattttatcagccagatggaatcgatgctgactactggtgaaatgaatcctcactatgcccactgtgtcaccctgtaccacaatggtttcacctgcgaagccgatacccttggcagttacggctacgtatacatcgccgtttaccccactcatcgttaa

SEQ ID NO: 93962 - DNA, 543 bp, Enterobacter aerogenes
atgaatatcgcattatccccggtatcatcacagcctgaactttttccgctggcggttatggctcaacatgattacctgcttaccgcgacatccggattaacaccctatgctcaacggaccatccgacgcgctaccaatctgctggataaatatctgcgccagcccggtatatcctttacctcaagtactgctgcccgtgactggcttcggttacagctggcaggacaagaacgggaagtgtttatggtgctctatctcgataaccagcatcgtttactggagagtgaaacgctatttgccggttcgattaaccatgtgcaggtccatccccgtgaggtagtgaaatcagcgcttcgtttcaatgctgcggccgttgtgttggcgcataaccatccatccggtgatccggagcccagccaatgtgaccgcaacattacgggcaagcttaaagaagcgctggcactggttgatgtgaacacgctcgatcatctggttatcggttcagatggaattgtgtcgtttgcagagcgaggctggatatga

SEQ ID NO: 93963 - DNA, 441 bp, Enterobacter aerogenes
atgaatacacaaaatcatcagttcgcggagcataccgcaattactgcctcagtggtccctgacgagttacgcatcggcttctggccgcagcactttggctccatcccacaatggataacccttgagccccaaatatttggctggatggatcgtctgtgcgctgattacagcggcggcgtctggagcttttacacactcagcaacggcggcgcatttatggctccggagcccgacggtgagaagtggacgttgttcaacccgatgaatggaaacgatgcggagatgagcggagaggctgccggtatagcggcctgcctgatggcatacagccaccatgcttgtcgcaccgaatgtgacgcgatgactgagcactattatcgcttacgtgactacgcgctaaaccatccggaatgcagcgccattatgcatctaatcgactga

SEQ ID NO: 93964 - DNA, 822 bp, Enterobacter aerogenes
atgcgattagccagccgctttggccgtataaaccagatacgccgtgaccggcctctgacctacgaagagctgatgagtcatgtccccagcgtgttcgggagtgacaaacatgaatctcgttcagacaggtacacctacatcccgaccatcaccatccttgaaagcctgcagcgtgaaggctttgagccgttctttgcctgccagacgaaggttcgggaccagagcaagcgggagcacaccaaacacatgcttcgcctgcgtcgtgccggtcaactgtccggacatcaggtgccggaaatcattctacttaacagccatgacggctcatcaagctaccagatgttgccggggctatttcgaggcgtctgtaccaatggtctggtctgcggccagtcattcggagaagtgcgggtaccgcataaaggcaatgtcgtcgagaaggtgattgaaggggcttacgaagtgctcggggtctttgaccgggtggaggagaagcgcgatgcgatgcagtcactggcgctgccagccccggcccgtaacgccctggcgaatgccgcgctgaagtatcgctttggtgaagaccaccagccggtcacggtatcgcagttgctgaccccacgtcggcgggaggactacagcgatgacctgtggaccgtataccagcgcgtgcaggagaacctgatgaaaggaggtctgtcagggcgaaccactcaggggaaaagcagccgcacccgtgctgttaccggcattgacggcgatgtgaaactcaatcgcgccctgtgggttatggcagaaaacatgctcgaatttttcgggcgttaa

SEQ ID NO: 93965 - DNA, 231 bp, Enterobacter aerogenes
atgactgaactcactgaattgcctgatggaccgtttactcgccagcaggcagaggcggttgcgtctcaatattccaacgttgctatagaggacgacctggggacacatttccgtctggttgtccgtcatgagcgttgcatggtctggcgagcctggaactttgagccggatgccggttaccggctgaaccggtatatcactcgttatggcatccgtaaatttcctgcataa

SEQ ID NO: 93966 - DNA, 450 bp, Enterobacter aerogenes
atgaagaagctgaaaggcgttatctcagttttcgctctgagcctttgtctgctttcaccggctcaggccgaagaacagcgttacatcagtatccgcaacacagacatggtctgggtgccgggcaatgtctgcgtgtggcagtttcgcctggacaacggcggaagtggtgaaggattcgggcctctgacactttccctgcgtctgaaagataaagggggaaacacgctggccatggggaatatggcagtggctgcatttggcgacagcgatgccactcgctctcaggaagcctcgctggagaacgaatgtgtggaaaacgtcagctccgtcgaaatcatgaaggcaacagaagagcgtaatggttaccagattgacctgccactttccgttttcgacccgcagtactaccgacctgtacaagtcacggttgtcggtggtaaggcatcttag

SEQ ID NO: 93967 - DNA, 453 bp, Enterobacter aerogenes
atgaagaaattgtatcgacctgttctcactgttttgatggttatcggtgccatgggggtttctggctgcgaccgcaaggaagatgcgggtgtgaaaacgatagccagttttaaggacctgactcctccaccgttcagcaaggttgtctcgcataaatccgatattgcccaggaatgggtaaagaaggatgctttcggcacaccgcaatatacggtgatgaaaaccaaccagtcgccggaaggctgtgagtcaggcaattattactacattgcggatatgcagcagaaaacggtgcagcctctgattgctgccctgtgtcttgcggacaatatcaccctgagcttccggattgaaaccgacagctacacgggtgaaaaatcggtggtgtattcgcacgatggcaaggaaatggggaaactctatctgccggagaatcaggagaaaaatccatga

SEQ ID NO: 93968 - DNA, 570 bp, Enterobacter aerogenes
atgaagaaattactgattacaacggcactggccgtcagtctctgcgctggcgctacctttccgacgtctgccgaaactgtcgtgggtaccgtcaaattctggcagtacatgcaggcggatggctggaaatcggccgatggcatggataacgacacgctaaacaatacgctctatcaggccagtgtgattggcaattatccctggaccaggcaattcctgctgcgtcagcggggtggtggtgcttattttctcgccgataagaaaacgcatactgtgcgcaaactgaatttgaaacctgccagcggttattactccgacctgacatcggtctatcagggcgaagaccaagggaaagggtgttacttcactatcatcgacacccagtatcagctggagctggctgacgaacctcacagcaaccgggtacttgctgcattcccggaaaactgtgtcaacaaacagcagcaggctgccctggcggcgaagcgttctgcctcagagcagaaactgcagcagtgggtagcccaacagagtctggctgagttgtgccgacgaactggcaactgctga

SEQ ID NO: 93969 - DNA, 705 bp, Enterobacter aerogenes
atgtcccagactgagcgtcgccatgagcggctggcggttcggctgtccctcattatcagccgccttgttgctggcgaaacactggatatgggccttcttgccgcagagtttggtgtatcgctccgtaccctccgccgggattttcgtgagcgactgatgtacctggacctggaatatcgcgacggcacctgtcgtctgctttcaggtagccatcagcgcgaactggcggtgctgacttttgctcgtcagtcaggtgtggaggccttgtttcctgacatggataaccacatggtcagctcactgctgagtgggcccggtgagtctccgtgcctcatatgggcagaatcggagtcattgtcgccgcccaggccaggcatatttacacgccttgtcagggctatatcagagcatcgtcgcgtgacgctgctggctgaaggttgtcgttgctcagggcttgcaccataccgcctcgtactctgcggcgggcattggtatctgactggcgagcatcatcatcgcgtggcagtgtttcccctgaacgatatccatgcggttaccttgcacccggaactgttcgtgcccgaccttcagattcgtaacgttctcgccgaaccggaattactcagagcccttccccattttcacgtttttcactcactgctcgccagaactggcgacggtcttttacctcataaggaatcatga

SEQ ID NO: 93970 - DNA, 876 bp, Enterobacter aerogenes
atgcaaaaatctgacggccttctggccattgagaagcctctggcttcactgcctcatactcttcgcagtctaattcttaaacgccttcgtagtctcacacagtacgagccggttattggcattatgggcaaaagtggggcaggcaaatcgtctctctgcaatgccctgttccagggagaagtcacgtcggtcagcgatgtggaggcctgcacccgcgatgtgctgcgcttcaggctccgcaatggcaatcacagcctgatgattgttgatttacctggtgtgggtgaaagcgagcaacgcgatgaagaatacactgcactgtatcgccgcatcctacctgaactggatttagtgttatgggtcatcaaggctgatgatagggcactgtcagtggatgaacacttctatcgcaaggtgatgctggcgtatcagtaccgggttttgttcgtggttaatcaggtcgacaaggccgaaccctgtcatgaatggtgtaccaccgatagcacgccttcacctgctcagcagttaacgattgagactaagagaatcgcgatgcagcagttgttcctgccgcaccatcctgtctgtgtggtgtcagcccgcacagggtggggcgtggaaacccttgtcgatactatgatgcatagcctgcctgaccgggccaccagtccactgacaacacaactgcatggaaggctctgcaccgagccggtaaaaaagcaggcacgtgagcgctttggtcatgcagttgatgaaatgattggcaatgtggagtcatcatcttttctgccagcgcctgtaagggctgtgattcgaaccgtgcgggaagccgtggtgaccgttgcccgtgccgtctgggactggattttcttctga

SEQ ID NO: 93971 - DNA, 777 bp, Enterobacter aerogenes
atgatcctgagagaccttaataatgaatttaaaaacactcatgagtacaataagttcgtacgggaaatgaaaaatggattattttccagcatcatcccggagacaaattttgaatggataaaggactatagctccgcttattttgcatggaatatactttcaactatgggccctaaggaaattaatccactagaggttgatttttaccgtgaacggcccccggtcattcagcataacttattgcctgttattccggaaacgtataaggatgccctttcagtactctacacctgttttgatagctgggatgtcgatttattctttaagatcaaaacactctcatcattaaaaaatatctggattcagcgaaaccgggagttaccagaaccatttaaatggattgaccttaaaaatcataaacaatgtgcatgggcttttaaatatgttatggagcatatcaaacccgattacatgccttcatttatgactgaaatcagacagcaacaggtgattacgtttctgacggccgtgttgtattcctggcctgcccatcccgatactcggcgtctgatgattcaacggatgaaaaaaacatacaatcagaatgtattccgggaaaacattgctgacaaaaaagtgattaacacctatgtccagaaggacattaaagaaaagctcgatatgcttgcaaagaaaaatggtcgaaaaattaacgaagagcttgaagttatcattatgaatgcctggcacgatgccagatatgcagaagataaatag

SEQ ID NO: 93972 - DNA, 207 bp, Enterobacter aerogenes
atgaccacgcatcccttacttaccgaagaccagttgattgacatggcatttatcaccagtctgctgcaaatgacagataagtggatttataagctcattaaggatggagtctttcccaaacccatcaagctgggccgaagctcccgatggttaaaaagcgaagtcgaaaactggctacaggaacgaatcgatcagtcccgtaaataa

SEQ ID NO: 93973 - DNA, 600 bp, Enterobacter aerogenes
atgaaagattacaagcctcgttacgaagaactttataaattttaccagacctggctgaccgattttacgaagctgacggtcagatcgggtatgtgccaccagaatatatatcatcaccataccctgacggttggtagccttaagtttccgggagaggaagaggttattgctgttgttccccagtgtctgcaccggattatttatggcagagcagcagccccactgactgttaatgatgacctgagcgtcagtttatttactcaggaacatctgctggctcaccatcccatgctggagggtattctactgtctgagtgcgtgcggttaaaacaacgcccactggcaaataaactcatcagtttgtttcggcagttcagcggtagcgagctgcgtctgaagctggtctggctatgctggtacgatttgatgctgggtaattgcctggatgactggaccgaccatctcaaattcaaaaaagataaagagatggatatctgggtcaatgaccggcaggcagaaaactctgcgctgaccagtctgatggacgagtacgtctgctttgcatggcggacgacagccgagtcactgaatcaggcctga

SEQ ID NO: 93974 - DNA, 573 bp, Enterobacter aerogenes
atgcaaaacaaaccgcaatgggagccagactggtatctggaatctcttctgaacatccatattgacgaaatggttgatcgctatgcctgcctgcgggcactccgaatcgacttattctatcagcatcacaccgctaagtactacctgcaaaaccacaatcatcttgaatgggatctccggttactcatggattacatgatgcaaatgggcgcagtcgtgggttatttctgggttatcgaatggacagaagaccatcactaccatgcgcacgtagtcttctgggtagatggtaaccgcagtcggaaggtttatccctgggctgagaaggcccgtgagttctggacgttaattaccgaaggtgacgggggcttccatcgtagtgaatacaaaaaatattacagagccaatatcaatatcccggtgcgttacagcgaaccagacagtatcgacaacatccgacaggtgttggcatatatgaccaaaattcagcagaaacatggcctgctgctgtttggctgcaacgatgtccctgaacgaccagcaaccgggcgaccacgcaagactgacttctga

SEQ ID NO: 93975 - DNA, 390 bp, Enterobacter aerogenes
atgtttgccaaatcctttctcgctctcgacggtaacggtggtctgaacggtgcacgtaccgcgcagatagccccttatgatagcgatacctgccacctctgcggttgtgcgctgcaatgccatcctgagtacaacaacgaatgcccgtggttcgaacacaccgaaacgggtctcaccagcaatggtcgacagcattgtccctataccaatccggatgccagtgaacagcaactggtcagacggttgcagcgcctcctccccgatgccactcccagggtcagtaaagccgactggcaatgcacacaatgcaagagcagttactatggtgaacgttactgcctaacctgtcgtaccagagacttcagccagtcaaaatgggtgacatcatga

SEQ ID NO: 93976 - DNA, 2463 bp, Enterobacter aerogenes
atggctatcaagaagaacgaactttactcctccctttgggcgagctgcgacgagttgcgtggcggaatggatgcttcacagtacaaagactatgtgttgaccctactgtttatgaagtacgtctctgacaaagctaagggcaacccttacgcgatgattgaagtgccggaaggtgcaagtttcgacgatatggttgctctcaagggcaacaaagaaattggcgaaaaaattaacaaaaccatcagattactggctgaagctaatgacctgaaaggtgttatcgacattgccgacttcaatgatgaagacaagctgggcaaaggcaaggagatgatcgaccgcctttccaagctggtggcaatcttcgaagggttggatctctcagccaaccgcgttgacggagacgatctgctgggtgatgcctatgaatatttgatgcgtcactttgctacagagtcaggtaaatccaaggggcagttttacacccctgcagaggtgtcacgcattctggcgaaagtgattggcatcagcaaacagacaccacaagatgctaccgtttatgaccctacctgtggctcaggatcactattgttgaaagctagtgacgaagcaggtccgaaggggctgaccatttatggccaagagatggattatgcgaccagcgcactggcacgcatgaatatgatccttcatggcaacgccaccgctaaaatatggaaaggcaacaccctagccgatccgcactggaaagatggcaacgataatctgaaaaccttcgactttgctgtagctaacccccctttttccaacaaaaactggaccagcgggctggatgctgcgaacgatccatttgaccgctttgtctgggggacaccaccagagaagaacggcgactatgctttcttgctgcacattatcaaaagcctcaagagcacaggtaaaggcgcagtgatcctgcctcacggcgttctgttccgtggcaatgctgaagcacgtattcgtgaaaacctactcaagcagggctacatcaaaggcattattggcctacctgctaacttattctacggtaccggtatcccagcatgcattattgtcatcgataaagaagatgcccagcaccgagcttccaatgctaatggcgagagtcagcaaggcatctttatgatcgatgccagtaagggttttattaaggacggcaataaaaatcgactacgcgcccaagacattcacaaaattgtcgatgcatttaatcgggaacaggaaatcccccgcttcagccgcctggtaccgctttctgaaattgctgacaacgactacaacctcaatattcctcgctatatcgatagcagcgatccggaagatctgcacgacctttctggccatttggctggtggcattccaaatcgcgatattgacgatcttggtgcttactggaacattttcccgactttacgacaagagctgttcgaaccagcccggccaggctacagcaaagctcgagtcgaagcaggtaaggttaagagtacaattctggcgcacccggaatttgccgctttcaaagcaggagcacttataccatttgaagaatggtttacaagttgtcagcttgaagaaattgctcgcggtgattcgccgaaacagcttattgaagagattggcgagcggctcctcgttgcttatgcttcagaaaccacgacagatactcctctgcttgagaactacgccatctatcagttactgatggactactggatggatgtgatgcaggacgacgtttatgtcttgagtcaggatggttggcaggcgggcaaagtgctgcgtgaactaattgtcgaaaaaggcgaaaaactcaaagaaacgccggatctggtaatacgcaagaagaagtataaggctgaactattgccgccagcccttatggtggctcgctattttgctaccgagaagctggaacttgatcaacttcaggtcgattatgatgaagcagcccaagcacttgaaagtttccttgaagaaaacagcggtgaagatgggttacttgctgatgcgatgaacgacaaggaaaaagtgactgcagccagtattaaagtacgacttaaagtcgccactgataaagaagaaaaggcgacgctggaagccgctcagacgttgttcgatgccgaaactcgagctaaaaaagaacataaagaagcacaggaaaaactggatcttgcggtgtttgctcattatccaaagctcactgataacgacattaaaattctgctggtgcatgataaatggcgggccagcctgactaatgcactagtagcggaaattgaacgtgtcacgcagcggctggcgaatcgtgtaaaagaactggaagaacgttatagcgcgactcttcctgaactcactcgacatgtgtctgaattagaggctaaagttacgtcgcacctgaaggttatggggattgagtgggcatga

SEQ ID NO: 93977 - DNA, 1368 bp, Enterobacter aerogenes
atgatggttcatttaacaaaaaaacagagtgtgaagacacttccgatgggttatacgcagactgaagtgggagttattcctgaagattgggtagtatgcacttttggttcgttagttaactaccgaaaaggctttgcatttaaatccaatgattatcaaccctctggaacaagagttattagggtcagtgatactagctttttttctatcgaagatactgaaccagtatatgtttctaacgaggtagcccaaaagcatactagctgggtgattaaagaaaatgatcttatattttcaacagtaggctctaaaccgccgatgtatgactctctagtaggtaaggctattttagtaactaaaagacatagtggatgcctacttaatcaaaatgccgtacgtataagatcaaagagcgttgttattggttttcaagttttactcttgaaccactttcgtacaaaccgctatatagattttatagaagttatttatagaggtaacgcaaatcaagcttctatcactctcgaaaatttgtttgaatataagatcccacttccagctttagcagtagaacaaacagctatcgcaaatgtgctatctgatacagatgcactgattactgaacttgagcagttaatcaccaaaaaagaggccatcaaaaccgcaaccatgcagcaactgctgactggccgtacccgcctgcctaaatttgctaaacattctgatggcactctcaaagattataaatctagcgaattgggtctgattcccgaagattggcaagcagttacactcggttatgttacgcaaaaaatagttggtggcggaactcctagcagagataacccaaattattggggaaacgatattccttgggtgacagtaaaagatttcgcgacgtttataagcacatcagctcaagagttcataacaagaaatggcctggcaaacagctcgagcaatttgatccctcgtgggacgttgattacatcaacgcgcatagcattgggaaaagctgttatatacgatgttgatgttgcaataaatcaggacttaaaggcaatatttactaacgaatatacaacagccttattcttattttattggtttgaaaataatacacggacatttgaagaacttgggagtggaagtacggttaaaggtctttcattaaaagatttgaaaggactcgattttttacttatgagcattgatgaacagatggctatcacaacaatcctctccgatatggatgctgaactcaaagtactagagcaaaaactcgccaagatccgcgatataaaacaaggaatgatgcagcagctgctgaccggacgtatccgtttgccattggaccgccagccatga

SEQ ID NO: 93978 - DNA, 1434 bp, Enterobacter aerogenes
atgaaacatacccttgataagacagttctgtcggtcaagggtctattgagcctgactgatgtcgaaatcccgacctatcagcgtccttataaatggacagcaaaaaatataagcgaactatttgccgatattgatggtcatcttgataaatcagcttaccggttgggctcagtggtgtttcatcacaccgagagtgatgaaaaaaacaagctcgatatcgtcgatggccagcaacgaacactgacattaatactggccgtatgggcccttatcgaaacccggcttgctgagctggaacgtcaagatttgcaggaaacgctagtccatctaagaccctccgttgaaagttttataaaccggcaacgctttgctagccaagtctcggaatacaatctgtaccagaattatcaggagctaaaacgccgggtaagccatcgagaattcagcgagcaacatatcgattttcttctcaatcgctgccaagtggtggtctttgtgctgactgacctgactgaagcctttcagttcttcgattcacaaaatgcccgtgggcgagatctggatccacacgacctgcttaaagccttccatctacgtgagttcgccagccatgaagtggaactgaaagctgcatccgttgcccattgggaaggattgcatagtgatgacctggctaatcttttcgcatcctatctctacagggtacgtcagtggtcacaggggaattcagctcgtttctttggcaaggatgaggtcggcctatttaaagggataaatattgaccagattggtcagttcccttatgtagaatctttgcgcatggctcaccattttgttgatgactataacaatcagttccagcgtaagattgatggccagaaattgcgtttccctttccatctcgatcagatgattatcaatggaagacgctttttcgaaatggcagaacactaccagcaacaggtatcggcaattatcgccagtgaaaatgccagcgcttatactcaaaagccgttaatgattcagggcgtacaccttggtgaaatggcaactaatatactggtaacgttaaataattatagaaatcgccaccgaacaggcgatcaatatatacgtgccatgtttgattgtgctctgatcttttatatcgacaaatttggcgggcagtccttatctacagcgattgaaaaatgctttatctgggcctacagatgccgaattcgacagcaagtggtacaacttgcaaccatggacaagtatgtgctggataacaatctgttccgagtaatcaaggaagccagagtacctggtgatgtgttatctatgccgctactcacaattcgggcttcagaaaataataataaccgccgtaccggtaactatgagcaagatgagttggtgaggctgttcaaggagatgaactactatgagtga

SEQ ID NO: 93979 - DNA, 2031 bp, Enterobacter aerogenes
atgagtgatgcacaggtaacttcctttacggtcagatcattgctgggcgatgcatctcgttatcttatccccatgtaccagcgaaattatgcctggggagagggtgaaatcactcaacttgtgcaggacatactcgactatcagcaaaaaagtctgcattacccacttcctcaaacttactacatcggtacgttggtcgtgtttactcgtcctgatgggcagtcagagataatcgacggacagcaacgttttactaccctatcccttcttgctaactggttaaaaaaacacactaaatcctcgctagatatgagctggtaccaagggattaacttagggtttgagagcagacctaagtctggcgaaacctttgctcggctctggcaaggcgtcgaaccgcataaactgcggagcaaggaatttaatgaagggctgatcaaaggctacgaacttattggcaaggttctaagcgacttgaaattagttggtgagtcattaaaccatttttgtacctatatgtttgaccatgtacaaattgcccgaatagaagtgcctgccgataccgacctcaatcatttttttgaggtgatgaacaatcgaggtgagcaactcgaaaagcatgaggtggtgaaagcacggctcatggcggtactcaaccaaataacagatccgcaggaaagacaaagcagccttaacaccctttcacgagtctgggatgcctgcgcaaacatggaacgttatatccaatacggtttcacacaagacgagcgccatcgattatttgggcagaaaaattgggggcagtttgtgcctgctgattttaaatcgctagctgacatgcttatctcatcggcttcagagcttaacacaacagagaaccaaacaaaccgcacactggctgacattatcaaggcctcctcgatcgtaggtgttgacagcggtgaagaagatgaaggtagctcagaacgttttaacagtgttatcaacttctccaacttcctgctccatgttttacgtatctgtagccaaacgagtaagaacagagtagatgttccgctggacgacaaacaattaatcgaacagttcgaactccggctgttaaagcagaatgacccggttaaagcggtacaggatttcgtctttgcacttctcaaatgcaaatatctttttgatcagttcgtgataaaacgagagtacgccaaaggtagtgatggctggagtttgaagcgcctgcgttggtattcagagaagagtaccagttataccaatacgtttaatgaagatgagggtaacagtaccagcatcaaccgacagattttgatgctgctttccgcattccacgtttcaacccctactctggtttataaacactggttgaatggagctttgtactatctgtttaatgcccattccgctgaaaaccagatagatgcaaggaagtacctcgggtatctggagcatcttgcctcctcgtttgtctttcaaaactttctggcagaacaagaaccaaaatcatattttgagattatctacggtaaagagctacatctccaacctgcggtactgtcggacaagattaagaagaagatgcgctttgggatgatagcaaacaacctggtattcaattacctggactacttactctggtgccgtgacagacataaagctgaggtagtcaaacgtttcgaatttaccttccggagttcagtagagcatttctatccccagcatcccatggatggctataggtcattaccagatacgtcgttgcataccttcggcaacctcagtctgattagccatagcaagaattcgcgactgagtaatttccagccaaaacaaaagcaagagcacttcgaagcgagtctcgaacggaatgaaattgatagtctgaaactactcgccatgatcgagctgatgaagaagaacaatcagtggggggaagaagaaatcgccactcacgaagcggaaatgctggcagtgttaagcagtgtcgatggtagtgatagcgtattaagggaggtgttatga

SEQ ID NO: 93980 - DNA, 3096 bp, Enterobacter aerogenes
atgaacagtgttggccaacgtgaacgcatgacacaaaaacgtgttatccagttattcaccaaacatctcggttatcactatcttggtaactggcataaacgagaagacaaccggaatattgaaccaggcttagtttctgcctggttaacaaaacgcggcgtttcagaaatcctaatcgcccgagcattacggcagctggatcgagccgcaagcctcggtgaaggccgtatcctctatgatgcaaacaaagaggtgtatcgcctgctacgctacggcgtgaaggataaagaaggtgctggtgagcagaatcaaaccgtgtggttggtggactggaaaaatccagaagccaatgattttgctctagctgaagaagtgacctacaacggtgaaaataaaaagcgcccggatttggtgctgtatgttaacggtattgcgcttggtgtcattgagctaaaacgttctacagtgtcagtctcagagggcatccgccaaaacctcgataatcagcaaaaagccttcatccgcaacttcttcactaccatccaattggtgatggccggtaatgatttagaagggcttcgctatggcgtaatagaaacgccggagaaatattatcttcagtggaaagaagccgctgaatcacctcacaccaacatgcttgatcgtcacctggctcagatatgcaataaacagcgcctgctggaattgatccacgactttatcgttttcgatgctggagtgaaaaaaacctgccgtcataaccaatattttggcgtcactgcaacaaaaccgtttattcaacgcaatgaaggcgggattatctggcatacccaaggcagcggtaaaagccttacaatggtttggctagcaaaatggatcagagaaaatattaccgatagccgagttttaatcattaccgaccgtacagaacttgatgaacagatcgagaaagtgtttaacggtgtggaagaagagatccttcgcacccggagcggcgcggatctcgtggctcgtctgaatcaaactaaaccctggcttatatgttcgctagtacataaatttggtcgtcaggaggaggatgacaaagacgctgacacggacgattttatcgaacaaatgaaacgaaatatccctgccgattttagcccgaagggaaaattattcgtgtttgtggatgagtgccaccgaacccaatccggcaaattgcattcggcaatgacaagcattttgccagatgcacaattcattggtttcaccggtaccccactgatgaagaaggataagaagaagtcagtggaggtcttcgggccttatatccacacttataaattcgatgaagcagtaaatgatggggttgttctggacttgcgctacgaagctcgtgacatcgatcagcgggtcaaatctcagaaaaaagtcgaccagtggtttgatgctaagacatctaaactttctcgccttggccagcagcaactcaagcagaaatgggcatcaatgcagaagctattgtcgagccgctcgcgactagaacagattgtcgcggacatccttctcgatttcgaacaaaaaccacgactcgccgacggccgtggtaacgccatgctggtttgttccagcgtctatcaggcctgcaaatgctatgagatgtttagtgaagctggttttgccggtaaatgtgcgattgtgacgagctaccagccaaatgccagtgagattaaaggcgaggagagcggcgaaggactgactgagaaactggccaagtacaacatctatcgcaaaatgcttgcggagtattttgaacagcctgaggctgaagcagccaaacgagtgagtgatttcgaaaaagaggtcaaacaacgcttcatcaaagaaccaggccagatgcgccttctgatagtcgttgataagttattaactggctttgatgctccgtcagccacatacctctatatcgacaagaaaatggccgatcacaaccttttccaggcgatatgtcgcgttaaccggttggatggtgaagataaagaatacggctatattgtcgactataaagaccttttccgctcattggaaaaaacagttcaggactataccgcagaagcctttgacggctacgacaaagaagatgtagccggtttactgaaggatcgattgcagcaggcaaaaatcgatctggatggtgctctggatgccgttcgtaccctttgcgaaccagtaaaaatgccacgaaatcaacttgattatcagcattatttttgtggggaatcaggggcgtcgatagagcagttatctgagaaagaagctttacgtctaacattgtatcaatccgtggcgaagcttatccgtgcttttaccaatctggcaggtgagctaacagatgctggttatagcgagcagcaggcaaatcaaatccgcattgatgttgagttttatacaaaagtccgcgatgaaatcaaaatagccagtggcgattttgtggacatgaagcaattcgagccagggatgcggcagatgctggatctttgggtggatgccgatcctagtgaaacccttatggattttgaggaactaggactgcttgagctgattattgaacgcggagaagaagcactggatggacttccagccgacatgcgtggcaaccaggaggccatggctgaagcgattgaaaataacgttcgcagaactattgttgatgaaaaccccgtcaacccgaaatactacgaaaaaatgtcagtattacttgatgaactgatcgcccttcgtcgtcaacaggctatctcctatcaggagtatctggagcacgtacgtgaactggcgaagcaggttaaacatccgcagtcaggtagtaaaaatacttatccagcaagtattgataccctcgctaagaaagcgttgtttgacaacctcgggcaggatgaagttttggtgacaaagatagatgctgcagtccgtcataccaaaaaggccgactggtatggggatcgttttaaagaacgcgagattagtttcgctatcgcggaagagatcaaaggttattcagtgacggtcgcagatgtaatggccctggtgaaggcacagaaggagtatcgctga

SEQ ID NO: 93981 - DNA, 714 bp, Enterobacter aerogenes
atgccattggttacctttggtgaactcactctcgatttgcagcgtaagacaatcaaaaacttgcatatcagtgtactgcctccggatggccgagtaagagtatcagctcctgtctctctgtcagacacagctatcaggatggctgttgtcagaaggctagtatggatccgacagcagcaagcacaatttcaggctcagccgcgccagagtgaacgagaaatgtgtagtggcgaaacacactacctttggggaagaggatatcggctggatgtagttttagtagataagcccgctgaagtgaaacttcagggtggttggatacgcatgaaagtacctccacattatgatacgacccagcgggaagcggttctcaaccagtggtatcgcggtattttaaaacaaagactgcctaagttaatggcaaaatggcagcaagaggtaaaggctgaagccagttttgttggcatcaagcgaatgaagactaaatggggtagctgtaacccccaaaccgcacgtatctggatcaatctcgaactggtgaaaaaacctcctgaatgccttgaattcattgtggttcacgagctagttcatctacacgaacgcaagcacaatgagcgttttatcggcctgatgaacatgtacctcccgaactggcgcgaacacagagcaaagttgaataagatgcccttggcttataatcattgggggtattga

SEQ ID NO: 93982 - DNA, 1053 bp, Enterobacter aerogenes
atgggtatcagtgtacaagttctacaagccaatcatggtgactgcatcctggtaacacatgaaagtctgaatggcgtatggaacctactaattgatggaggcaacgctgctacctttcagttcggccaaagaggtcgttatagcggtgctcttcgctgtgtgcttgatgaactcaaggagaaagggcaaaaaattgatttagcgattttaactcacatcgatgatgaccacattggcggcctgttaagagcatttgagacaccgggctatctgagtgaaatggtgtcgtcaatctggttcaattcatcgcggttcattactgactacttcaatgttgccgaaatttcagacaacgatattcatctccgggacgattcgcccctgacgagcgtcaggcaaggtaaaaacctggaaacactgttgaatgaaatcagttgcacgcggcaacctgtcgtaatggcttctcaaaaaatcataaaaggtcctttcacatttactatattatctcccgatgaagacaagctcaggaaacttcttcataagtggcctgatgaccctgatccaactactacctcagggcatgctactgattacgacttgagccttgatgacatttgggctgatgatatatttgaaaatgatccttctgattacaatggcagttctattgctttcattcttgaagctgaggggaaaagaatgctttttctcggcgatgctcatgacaaaattattgtgcgtagtctccgggcacttggatatagtgagacgagaaaactgccgcttgattttgtaaagatttctcatcatggcagtcagtacaataccagttcagaatttctttcattgctaaatacacaccggttcattatatctaccaatggagctatgcacggactacctaataaaagaactatcgccagaattttggcctctggtagtgggaatatatattttaattactctgaaattattacgccattactgcatgaagatgagaccgaaacctattcctcacgactcgtagcacttgacggaaaaatcaggctataa

SEQ ID NO: 93983 - DNA, 1311 bp, Enterobacter aerogenes
atgaccgcatcagaaatgaccgcatcagaattaatggcttcctattgcgtcgttgtaaataagggcagcggcgttctggtcaatgccatgtctcaggattattcttacgttcttacggcaaggcatgtgttaacagaggccaacgctaaacctgtcgtcacagacgttcaaggtagagagctcaaggttttatcagttctgaatcacaccgatcaaagtcattcagacacatatgactgtgccgtgatacaggttgagtatattccaacagttgcacaacaatcattcccagcctcatcattgcctgatatggcacctcttaagcttgtcggttttccgggaacagagagaggaagtacagacccaatgaaagtccaagacggacatatgacaagcgtaagggaccatttgattgtcttcacagtcagtggcacaccagggaaagatgcaattgatggtatgtctggtggtggtatttatcatgtagccaatgaacgtccctatttggtgggggttgaatttggtatggatagtatcaacaagcatcaacaatatggtcgtgttcaatgccaagggctagtgagatttgaagaaatcatcgaggcaaataataaagcccccattataccagcctatttggaatgtttttcgcgtctgagagaacagatattcagttttaatgttattaataaaaatactattattaatttaaagactgagttacttaactttgctgatagccttgtcgctcaagggataccgcctccgttcgagctcatgacaaaatataaagacgatttaataatcggaccttttcagcctgctgatataaaagataaaaggttatggattgcttatttcgaatttttgataatttgcgcaattctggataatgtaagcgccactgactattgctatattaaagaattagagcgacgccgaagaatcctatatacaaatgatggttctaactgggttggtaagctagacataattctaaaagccgctagaaaatttcttgataaagacggaactgtgattgttgcgtctccagaacagggagctgatttattgccagatggatttgaagtggacagagttatacaaaatatcgcactgattccgggagccggacctcttgcccctatcgatcaggttgaacgggcgatgtacaaaagttttgtattgacacacctcgagggacttcgtaaacaatgcgtcgtacgtaatgaaagactttttgcaaataccgaacctggtgttgctcagttgcgtgcgtttaaggagcacttcaatgcatttattaaataa

SEQ ID NO: 93984 - DNA, 552 bp, Enterobacter aerogenes
atgcatttattaaataaagaacacgacttaaatttcctgcatacaaaattcaaagagatgagttttcagctttttgtttcaaatgatgaaggttcatatatctcttgtgtggcatgctggtgtgaaagtgcttcccaagttgttgacaactggagtgccatccagaactatttatctgtttattatcagcccccgggggatatagcgttatggaatatttacctagcatttttttgtacagaaacgcttccaatatgggagaaatataaaattgaaaatgataagtatgctgtcagaaagttggtactcgatggaactggaaccattcttcctaatgctgaatccctgactcttctaaacaaccacttgttaggtgctgatctggagcttaccgaacgaaacaagggtacagaggatgagttttccttatctttgggtgattatgttcgaggtactcctttagattcaacttttgaatcaagagagactcgagcccgaagaatcgataacataattgaatttctgagcaaaaatgaaaataaaaaaagttga

SEQ ID NO: 93985 - DNA, 3135 bp, Enterobacter aerogenes
atgaaaataaaaaaagttgagatcgaaggtttccgtgcctacaaatataaggaggatggaattttcgattttacgaacgatgatgaaatgccttctaactttgttgcaatttatgctcctaatggttttggaaaaagctccttttatgatgcagttgaatgggcgattacgaatcatttggaaaggcttggtggtgactataatcgttcaaatcatgaactcgcagctaaaagtactaaagaaaagggcatagctcaaaaaatcctacgcaataaggatgttgatagcagtataccaacacgcgttacagttaccaccactctcccaaaaccgttcaaccgaaaccttagagcgccacgttcaaattcaagtgatatcagaatcggtgtaaataagaataaagaaaatgaatacttcagaaaaattatcctaagccaagatgaaattgatcgatttttaagggaggctaaaccgcaggatcgatataatcgtttcatggaaagttttgggtgtgatgccgagattgcccgtcaggagttaacagttttaattaatgataacaaggttgtactagctgatctggaaaaagagagaaacaaacttctagatcaactacatgaaccagttgatgtatatatgttcgaacaatttaataaaattgtgtctgaattgaataaagacgatgaaaatttgatcttggtggatgatcaattctcattaaatactcaacatgacatggtttcagccatcataacccgtactcaagaattaaaaaaacaagcttctgctaatatcaatttgcgagaatcactaactaaatatttttctaaattgccagaattaaaacttaatcttagcctaatcaaggagcaacaacacaaactgcttaaatttagtaaaggattgcaggaggctgaacgatatcagtcattgttaacttcatactcgactattcagaacgaataccagtacgcaagccagcaattgctaactcttaatgaagtagctgaaaacttaaaagtttttctagatactcaatcagatataacaaatgccactgaaaaacgctcctcgctttctaggcaacatacttatgaagcaaccatacttgttgatcttcaacattcactcagcaaacttgattcagacttaaccgaggctgataatcgctcattgcttctacgtacggcgttagataattgctcctctatttattctgaaataaatgtacaacaagaacgactaaaaaaacttagtgctcaagttgcaaatacaaatttgtcattaactctaaataagaatcttcgagataatattcaggttgagttaacaacgatatcttccctcacagttaattcggaatcattgcttaattctgatttaagctcaattaattttgataagcttaaactagatgaattagggcacatttctgaagaactgaatgcgttactactgcacgatcaatctattaagaaaactcaaatttctttagccgaacaaatggggcttcatgaacgtctggttacctctggtctagagtatctgagtatatggcccactaatatttgccctttatgtaacaagccgcatgattctgagtcggctctccaaaaagaagtaaagaatacagaactattgtcaattctaagtaaggagaatgcagaaaaactcaatgcttccactaaacgacaaagcttactcaaagccaagatggatgcaatcgtccaagaggccgttaggattcagatggatcgcctttctgatctaagaactaaacttaacgacctaggtttgcaagtatctaagctagaagagcaaaaatcattacttcaggcagaggtcaactctctacagttgcaaatcaaatcccttcaactttctgtctgggaacttactaaagaagaactcatatctcggacagaagccgaactcaaagatcttactttaaagaaagaagaattgcttaatagtaaaacagtgttaagccaaaatattgatgaaaaaaaattactcataacgcagattgagtcatcgattaaaatgcttaatttacaaatccaaaccacttcctctaaatcagcttatcaaaaggtaaatgtttaccttactgaaaatagcttgcagccacatgaatttaaagcatattatttcgaaaagcgaacggcaattgaaaaatgcagaaaggaacatttatctaatgcaaaaaaaattgctgagcagtcaaaatccctgaaagagactatgattgctaacgaaactgtgactgatattgaggtattatccgcagagaaaaagcaggcagaaactcatatcgctgagtatgaatcatttatacagtctttcgttgcgtctttaaatcaaatgattggcccgcaggatggcaagactgccgatgagataggaaatactataaccgaaaccattaatctccagatactgcaatatcgaagaattgatagcaaactgaaaaaatttgaactgttatcagaactattgaaagcaacagagttgtatttaacaaatcaagtgctccgtgaaaaccttaccaccgtggagaaacgcttaactcagagaaatcaagttgataaagtgctgctggctgagagagaaaaggttattgatgaacttagaaagctcataagagagttcttctatgaagatcttattgattctatttacagaaaaatcgatccacatccatccctcaaaaaagttgagttccgcccagattttgagacatcagatcgtcctggattaaatattgttctcagcgataaggaagggaaaaccgtgtcgccaattctttttttcagcgctgctcagctgaatattctcagtttaagcgtatttttggctagtgcacttcatgccaaggatgataatggtgatccaatagatgtcattatgattgatgacccgatacagtcaatggactcaattaatgtcttagccacaattgatctcctacgaagcatttctgttcgttttaataagcagattataatctcaacacatgatgataacttctttaatttgcttcagcgcaagatcccttcacaagtaatgggttcaaaattccttaagctggaaaaatttggtgttgtagttcctgtcgaatcattgagtaattaa

SEQ ID NO: 93986 - DNA, 1248 bp, Enterobacter aerogenes
atggctctgagtgatgtgaaggttcgttcggctaagcctgaagcaaaagcctataaactgactgacggcgacggcatggttctgctggttcaccctaacggctccaaatactggcggttgcgttatcgcttcggcggtaaagaaaagatgctggcgttgggaaaatatcccgaagtctcgctggcggatgccaggtcacggcgggatgaagcccgtaaactattagctaatggcgtcgatcccagtgagaacaagaaagccgttaaggtagagctggagcaagaggcgataacgtttgaagtggtagccagagactggcacgccagcaatcagaagtggtcggcatcgcatagtgctcgtgtattgaaaagcctcgaagacaatttatttgcttcagttgggaagcgaaatatcaaagatattggtactcgtgacttactggttccaattaaagcagtggaaaagtcaggacgccttgaagtggctgcgcgtcttcaacagcgaacaacggcaataatgcgctttgcggtacagaacggcttaattgattacaatcctgcacaagagattgctggtgcgatcgcaacagctaaacgaaagcatcgcgctgcgctagatctcaaccgcattcctgagttactccatcgtattgataactacaccggcagaccattaacgcggttagctgtggatttgacgttactggttttcatccgttcgagcgagctacgttttgctcgctggacagaagtggattttgaaacggctatgtggacgattcccggagagcgtgaaccgctggatggtgttaaacattctcagcgtggttcaaagatgcggacacctcatcttgttcccttatcgcgtcaggccttagctattctggaaaagatcaaatgcatgaacgggaatcgagagctgattttcgtgggcgatcacgaccctcgtaagcctatgagtgagaacacggtgaacaaggctcttcgagtgatgggctatgacacaaaaacggaagtctgtgggcatggtttcaggacaatggcctgtagctcattgattgaatcgggtctatggtcgagggatgccgtagagcggcagatgagccatcaggagcgtagctctgttagggctgcctacatccataaagcggaacatctgggggagcgcagattgatgctgcagtggtgggcagattttcttgacgctaatcgtgataaggggattagtccgtttgattttgcgaagtag

SEQ ID NO: 93987 - DNA, 1938 bp, Enterobacter aerogenes
atgaatcgatttattgtggccgatgttgcgaactgtattggatgtcatgcctgcgaagtagcctgcgtcacggcgcatcatcaggatgcctggccggcacagcgcagcgcgtttgttccgcgcatccatgttgtcttccaccggaataccagtactgcgaccacttgccaccattgcaacgacgcgccttgcgtcacctcctgcccgacccaggcgctgtatgtcgccaacgacagcatccagtttacccaggccgagtgtatcggttgcaaaaactgcgttgtcgcttgcccatttggcgcaatcgagatggtcgccagcggggaagatggcccgcagctggcgcaaaaatgcgatctttgtcgcgatcgtccctccgcagagcaggcctgcgtggccagttgcccgactcaagcgctgcgcgtaatggacgagagcgccctgaagcggttgcagcgggaaagacaaatccgctctgcccaggggcagccgctggccgagcgtcgtggcgcaaggcgcgaagcgatcctggataaagcgccgcgggtgggggcgaagaagcttgccgcagaagagcgaaaagggcattttgctgagatctaccagcgccttagcgaatgtgatgccgaatatgaaagcgagcgttgcctgtactgtgcgcaaaaagcctggtgcaactggacctgcccgttacacaaccatattcctgatttcatccgactggtgcgtgagggcaagattattgaggccgcagaactctgccatcaaagtagttcgctgccggaggtctgcggccgggtctgcccacaggacaggctatgcgaaggggcctgtacgttgaaaaacgaaggcggcgcggtggcggttggcaatcttgaacgctatatcaccgataccgcgctggcgatgggctggcggccaaccacaggcgaggtcacgccgcgtcgggagcgcgtggctattatcggcgccggcccggcgggactgggctgcgcggatattctcgcgcgcgccggggtacaggttgatgtttatgataaacatcctgaaattggcgggctgctgactttcggcattccgtctttcaagctggaaaaaacggtaatggcgctgagacgcgagatcttcagcgatatggggattcgtttccatctcaaccaggaagtggggcgcgacgtggtcttcagcgacctggttgctaactatgacgcggtctttttaggcgtcggcacctatgggctgatgggcgcgggtcttgatggcgaagatgcgccgggtgttattcaggcgctgccgttcctgattgccaatacccgtgaggtgatggggcttgaagagagcgccgaatatccgttaaccgacattaagggtaagcgggtggtggtgctgggcggcggtgatacggcgatggactgtttgcgcaccgcggtgcgccgcggagctgagagcgtgacctgcgcctatcgtcgcgatgagttaagcatgccgggctcgaaaaaagaggtggtgaacgcgcgggaggagggcgtggcgtttcagtttaacgttcagccgcaatatatcctgcgtaaccgtaaaggccaggtcagcgccgtcgggatgatccgtaccgaaatgggtgaaccagggccggatggccgccggcgcccgcggccaattgccggttcagaattcgaactcccggccgatgtgctggtgctggcgtttggtttccaggctcacgacatgccgtggctgcgggggcacggcatcaaacttgatcgctgggggcagattgtaacgggcggcaaaggtcgcggcgccacacagaccagccatgacaaaatctatgccggcggcgatgcggtacatggcgccgatctggtggtgacggcaatggttgccgggcgccaggccgcaagcgaaatgctggcgcgatttgaccataaggagcggtga

SEQ ID NO: 93988 - DNA, 432 bp, Enterobacter aerogenes
atgaaaatgaggtttttactgtcgactggtttattgttactggtttcattggaatccagtgctgcccttcccggtgtgcgggacaccacaaatccaccgtttatgactcatccgtacacgaaggcttatcaacaatgtatgaattccggcggaggtaatacacctgaagccattagctgtatgtcaactgagctgaaatactgggatacgcgactgaatcaggtgtaccgggacgtgctgaaaaccagcgcatcgccgcaatcatggaaagaggctcaacgtaagtggctgacgtttcgtgatgcgcagtgccatgcaatgattgcttccccggcgggttcggccggagaaactgactatgaaggctgccagttgaatatgacgctggaacggacacttcaactggaggatgcaaactggccagcggcatag

SEQ ID NO: 93989 - DNA, 474 bp, Enterobacter aerogenes
atgcagaaaaagctgacactttcagcctctgttgccgtttttttctgcgcaggtattctcgcctattacctgtatactacctcatttgaatccagggaagatgttttttgcaattccaacattaaaataaccacagacagcatattatttaccggtgtatttaagctaaaggcaaacgatggtgttggattttttttgattaacggaagttttattcggcagaacggttcgaaaggcgttattaaccggaaggtgacgtttaagtatacgcgcacagaagaaatgtggaccatgaattcggataaaactttcacgttaccctcagataatgccagtagcgatgagcttaaaaaactgcttccgccgttttattttacatcaggcgtaacacacaacgtcgggatttacaatcaagggagtggctatatcttctctggcggagcaataccatttgcatactgtcataaaaattaa

SEQ ID NO: 93990 - DNA, 765 bp, Enterobacter aerogenes
atgatcagaaaatacactattaataatcatgttgtgtttgatgtcatgacccgaacactgaccaggatatctgcgccccctgagaatcaggagtcggccgggataatactccactcaccgaccagcgaatgcctggagctactcattaaaaatttcgggggagttttatcgcaggataaaatactggatagcgtctggctggaaaagggagtgattgtctcctcagccgccgtttatcagaacatcagcttactgaggcgagcatttgaacagcttggtttagaaaaaaatattattataacgaaaccacgccagggtattatgttggcacttgatacgtcgattgttccattatcatcctcaccagaagatatatcacctgaggccatacaagacgatagcgtcgatacggataaaaggataccggaacagaatggttttgctcaccgatatttgatgtccggcatgatgctgatacttcttttattactggcaacacactacgtaaatagcgccagcaattatatggacagctacgaattatggcctgaatcacccccgggttgtaaggtatacgtcaatgacggtttccctgaagttaatatttcacgacttgttaaagttgataaattggattgtgcctcatacccctaccaatatgtcacggcatatccggggggaaaccggcactctgtaataagctgtaagaaagatatcagtgaagtatcacctcgctgtgtttctgaattttatcttgagggctga

SEQ ID NO: 93991 - DNA, 939 bp, Enterobacter aerogenes
atgcgtattcaaaggttaatgatgcttattgcaggacttatccccctttcggcaattgctgccagtaatggagatacacagtcaccgttcagcggtgagcttgcgctgggaagtctgagcggccagacccgtgagcgggtttatgaccctgagtccggcgggcgcaaggtcagccagctcaactggaaattcaataatgcagcagtgattaaaggtgctgtgaactgggacatcctgccccgggtatcattcggtgcgtcaggctggaccacgctcgccagcaaagggggatacatggatgatacagactggatggatgaaggccgcagtgacccgacagaccagagcagacatcccgacacccgactgaactacgccaatgcgtttgattttagcctgacgggctggctcctgaacactccttcgggtcgcctgggcattatggctggctatcaggaaagtcgttacagcttcaaatcagcggggggaacctatgactacaccgatgaggataccggcatgtctgataccggtacgtttacagcgggtgttcccgtcatcggctacaaacagcgtttccgggtaccgtacgttggggtgacagggctttaccaatatgagcgcttcacgttcagtggtacctttaaatacagcggatgggtgcgcgcagatgacaacgacgaacactatctgaccagtaccacttttcgggacagaacgcaaaaccagaatttttattctctgtcgggtcgggccagttataccctggtgccgggcattgatgtttacctcgagggaatatggaacaggaccaccaaccaacgtggaagtcttgccgctaacaattatgataatggggaaaaacaatatgtctctggcgggagcggtatcgaaaactataacttcttgacgatggccggcatgaaatacacgttctga

SEQ ID NO: 93992 - DNA, 789 bp, Enterobacter aerogenes
atgcaattgacaatcaatgatcgtccacgctccttcgccgcccctgtgtacgggctcccgggcgcagtgcggttgcaagagaccctcatcagcacggtatttcgacaacaacctgagtggcaaagccacatcatgttggtgagtgacagcaatgatgaaaacatccactggcctacactgctctggcagatggtcatactcagagctaaccggcccgacctgacgttgtcactgacgacatcgttctcctcactgtcatggtaccggttactggcagggctcggtatcagccctggttctgatacacagccctgcggtatcagtatgcggccttcgcgtcagttgaccccgatcgagagcagaatattgctgtccctgctcgatggcgctcatgtacgtcatattgccgaacaacttcaccgcaacgcgcgtaccgtttccagccacaagcgaagagccatgcgcaaagtggggctcgccagtaacggcgagctctacagcctcggtggcttgctttacgcgggccctcattgccagcaaagggacgagttgtctgttgctgaaaaacgggtactgtcctgtctgctatatagcggcactatcacggaagctgctcgctggcttcacaggagcatcaaaaccgtcagcgtacaaaagcaagccatcatgaaaaaactgggtaccccgcacgaagtggcgctgcatggtctgtgccattcaggtttcttcgaccagagcagtgcgccgctatcgaaccgggaaaccttatcccgaagtgatggaaagtga

SEQ ID NO: 93993 - DNA, 159 bp, Enterobacter aerogenes
atgagcatgattacccctattccagcccgctggcgggcatgtaaagcgcgcctcatccgcttcctcgaacgccgggcatggcagatgttctttctcgcctccggcatcctctggggactggttgtgttattcagcctgttgttgtggaggttgttatga

SEQ ID NO: 93994 - DNA, 1119 bp, Enterobacter aerogenes
atgtggaaactgaaacagatattgacatatgccgtactaccattactgatgggtgcgtattgccagtccacccaggcagaaagaataccgccggcggacaaccaccaggtggttaacctgacctacgacaaaagttcaccgcctgcagatgtgtatatctggaatcttgcatcgggaggatatgatacggatgatgggcctctgtggtcaagaaacacatggcactgcctgtcagacaccgtgccggatacgggccagtgtcggactaattatatgtggggctatgatgcggtcgtcaataatggcctgaaattaaaattcactgaacaacggagtcgcttatcaagcgtaattaatttaaccggtagcagatacatattgtctaatgcactttatggcccgtggcgaatggaaagtgcaaattacgtgcaagggagctatgaagcaaagctctccgtttggatcccgtcagccgaactggccaggctccccactggcggtatctggaaagccaggctggtacttaaagagttgcaatggactccggtaagaccaccggtcgccaccttctccgccgatatcaccctcaatgtcaccgacaggaacaacggcgcgatttacctgccggccttcggcagcgccacgccgcgcgttgaccttaacctgcgcacccggcccctttcgacctccccgggcggcgaggtgtcggggcaggccaatatcgacatgtgcctgtacgacggctacaacagcaacagcccctggctgaaagtgacgctctccgacctgatgagcatccccggccggccgtcggacatcttttcggtaacacgcgacggcacgggcggcgcgaccgccgccgaccgcgtcgattaccgcgtcgccatgacctacaacaaccagccccgggcgatgaacaacagtcaggcaatgactctgagtggcgtcaatacggccctgatacgcccggtggtgttgcccggcatcgcctttccggtggtctgcactccggcgccgctgacgctggacgtgctgccgtttgccaagctaagcaaggctgccgggcacttcagcggtacgctgcgtgtgactctggccgccgatgccctggcgccctga

SEQ ID NO: 93995 - DNA, 2649 bp, Enterobacter aerogenes
ttgaccagggaatttcaacagttaacctttcgtttccgggccggatgtctagccgccgggttgggttgctcagctatgacggccgcgaccgtaccgcccgggtttgaaacgctgctactgggacagacggaacagcttgaggtacgactaccaggccgctcgcttggcctgtttgccgtggaggttaaacccgacacgctcacatttgaggcgccggaatccgtgctggctgcggcaggactacaggcactccctgagccacagcagcaacaggcgctcgctgcgctgagccgtccactgccgcgccacggtcacctggcctgcaacggcggggcaataccggggtgtggttacgtagccaccgacagcgcggccgtcatcatggatgaaagccagggggcggttctgctgttcctgaaacccgaatggttggtctctctgaagcaggatcagcgctggatgacccccacgccggccgcaaaaaatgcgtttatccatcggcagaccgcgaactacagcggtgacaggaacagccagaacctgtccctcaacggtgcaggcgccctgggactgggtgagaggcgttacctcggcggtaactgggcatacacctggaacaggatgcaggatcacagcgccggtcgcttctggttcgacaatctgtacgcccgccaggacctgggcagccgttactacctgcaggccgggcgtatggaccagcgaaacctctccggcccgctgggcggtaatttcgggtttacgctgttgccattaccacgctttgacggcctgcggagcgggaccacgcaggcgtatgtcaacccgggcatcagccgggatgccacaccggtcatggtgcaggtcattcgcaatgcccgtattgacgtttatcgcggcagccagctgctgggcagccagtactttgcccccggcatgcactccctgaacagcgatacttttccggccggcagctacccgctggagctgcgggtgtatgaggacggggtgttgcagcgtactgaaaaccagcccttcagcaagggcggcggcgcgttcagcgaccagtggcagtggttcctgcaggccgggacagtatcccctgaaccctacgcccggtcatcttccggtgagcagagcaccggcgccaccggggtgcaactggcgctggggcgcaatctgcagctgaccagcggtctgtccagaacggagggggttacctataacgaaacccggctggacgctcagcatgcgttcagcatcggcgtactgagcctggccgtcagcggactcaccggcagtaacggctcgcgcggtgacagccagcaactgagctttgtggacggtttttccgccagcctgtaccgctaccgggtacggggggtgggctgcgggggggacggtgatgtcctcaacgatatggggtgctacacctcgttaaacggctctctctctgtccccgtcgctggctggagcgcaacgttgggttacagcgatacccggagcgacgggcgccgctaccggcgcccggcatcggcggatggtctggttcctgcgcaaacgctgcatactgccgcccagcgtaaccgggcctggcagctgggaacggcgcgcgccttcaactggtccggcaccaccgtcagtacccgggcgggtgtttttcacaaccgtgacggccgtacgagcgacaaggggatgtatctcggtttcaccctgtcgcggactgacaacgccacgccggccgggagcagtgacagctacagcagcgccggcgcggactggcgcaacggaagcgggtcgtcgcaaaccagctacaccctcaaccatacccggatgtggcagcaggatacctaccgtgagctggcgcttaatttttccggctacaacgatgacagctacagcggcagcgccgggggacgggtcaatggccgctacggcgacctgaccggtacgctgagcagcggtcgccagcgacacggcagcgcccggacagcgctgaccagtggttattcgtcggcgctggcgctgtcatcggatggcctgttctggggcggtaacggaggcggtgagccggcggccggcctggcagtacgtgtcgcaccggaagaagaccgcggcggagcggctctgataagcggcggcaacgcacgcccgctgacgctggggttcgggcagagtacgctgctgccgctggacggttaccagctggccagcgtgaacgtgcgcgatgtaacggaaacaagcgacggcggtgttgccagcgtgaccggcggcgccggcgatgccagctatttcctgccgcctggacgcttgctggttcgcgacgtcagcgcccgtatcacccgggtttatatcggccaggcgctggggccggacggtcgcccgctggcccgcgcgcaggtgctgaaccaggcgctaccgacccttggggacgacggcggctttaccctgcaagctgagcataaggtgccagtgctgtggctgataagcgacggtcagctgatgcgctgcccgctgacggtaaaaacggtcagggacgtactgcagatagtcggcgaaacacactgtacggcgaccggtgtggagggtttaccgcagtcgctgcgaatgaccccacgggtgatgagactgctggcgacggcaaaacggtga

SEQ ID NO: 93996 - DNA, 519 bp, Enterobacter aerogenes
atgaaaaagctgtatgtatttgccccggccgcactgatggcttttgtctccctgtcgtcactggccgtacagaaagacatcactatcactgcggatatcgatccgacgatagaactgctgcagagtgatggcacccccctgccttccgcgctgaaaatgacctacctgccgggcgtcggcctgctgaagcagacactcagcaccaaaattttcaccaatgacccggctaaaaatgtcgagatgcgtctgctgacgagcccggttctggcctcaaccaccaagccgacggcaaagtccatacccctgagtgtttcctataacggcaaggtgttgactacggcggtcacggcagactccaccctgaaagccacggagcttttcccgaacgggcgtctggataacggttcagtgccgtttgacctggttatcgcccaggccacaccggctgtcgtgaccgagtctggctcttatcagggcgtggtcagcctggtgctgaatacggcaaccgccacgccataa

SEQ ID NO: 93997 - DNA, 729 bp, Enterobacter aerogenes
atgtttgcaccagaccggattaccgccttccgtataactggacttgccgcacttttgatggctgtcagcactgccagcctggccaatctgaccgtgtacccgataacgaaggatattgatgtggggcagaaggccaccacgctgcaggtgtactcaaaatcaccgcaaacccagtatgtacgcgtcagcgtcagacgcatccttaatccggccacaccgcaggagcgtgaagaagctgccggcagccaacagggtctggtggcttcgccagaaaggtttgtgctgccggccggcgcgacgcgcaccgtgcgccttatcagtctggtaacgccgacgcaggaagaagcgtggcgcgtctactttgaacccgtcgcctctcctgacgatgaaatgaatgacaaggcccaaaacgcaaaagttaacgtcaacctcgtctggggggtactgattcgcctgttgccaggcgttgcccggccacagctggctcgcagcgctgacggcacgcagttactgaaccggggcaatgtccgcctcggcatcctgaaagtgggtcactgtatgccggcatgccgctggcaacagattgaccgcagtgtctatcccggcggcgcgctgtcattaccgcccgggatgtcaggtggtgccttacgcgtggaataccgcaccggcaccgccgctccggttacggcagacctgccggccggtgcgtcaacatcaacgttaaaataa

SEQ ID NO: 93998 - DNA, 657 bp, Enterobacter aerogenes
atgcaaaaactgactcgtgacgaaatggcccagcgcgtcgcccgcgatattccggaaggcgcttacgtcaaccttggtatcggtctgccgacccgcatcgccaactatctacctgccgataaagaggtgttcctgcacagtgaaaacgggctactgggaatggggccgaagccgcagcccggcgaagaggatccagaactgatcaacgcgggtaaagagtatgtcaccctgctgcagggcggctgttttttccaccatggcgactccttcgccatgatgcgcggcggacatctggatatctgcgtgctgggcgcctatcaggtttccgccagcggcgatctcgctaactggagcaccggcgcgccggattcgatcccggcggttggaggggcgatggatttggctatcggcgcccgccaggtgtttgtgatgatggaccatctgacccgcgatggcgaatgcaaactggtcgaacagtgcagctacccgctgaccggcgtcggttgcgtcagccgtatctataccgatctggcggtcatcgatattaccgaccgcggcccggtggtgcgcgaaatctttaacggtctctcatttgaagagctacagcgcatcactccggtggcgctaacttttgaacaactggcggaaagtgcgtaa

SEQ ID NO: 93999 - DNA, 228 bp, Enterobacter aerogenes
gtgacgctttcagcgatctggcaacagatttgcttgacattcggccaaaaattcttcgtgctatgcaacctggctcgcaaaagccagcaaactcagctatctggttttatggatgtgaaactgggcgtgcagagggttgatatccatcgacgtggccgcaacatatcaggcacgtcgctagtggatggtgaatcaatgtgcgatgtattcctggatgaattaaattag

SEQ ID NO: 94000 - DNA, 264 bp, Enterobacter aerogenes
atgaaaataacaacaatggctgcgttatctgcaatgttgctgctggcggcgtgcgcttccagcaaaaccgaaaaagaaaaaaagattgaatatgacgatattatcagagggctatcggtttcaggggaagagattttataccggaaagataaaagtactgatttttaccgttatcaatatttggtctatcagtcggcaaactatcattcgtggctgagtcccgagattaaaccgagtggcgcggctaattataaaacagcgtaa

SEQ ID NO: 94001 - DNA, 855 bp, Enterobacter aerogenes
atggcgcacacaaccttacctttcggcgatcagccagccgtaccggtcattggtctgggaacctggtatatgggcgaacagccggactcgcgtaagcaagagatcgctgcactacaggcgggcatcgatcttggactgacccttattgataccgctgagatgtatgccgacgggggcgcggaagaggtggtcggagaggcgctacgcggacggcgcgatcgagtgacgctggtgtcaaaggtctatccgtggaacgctggcgggcaaaaaatgcaggttgcctgtgaagccagtctgcgtcgtttacagacggactatctggacatgtacctgctgcactggcgtggcgaattcccgctacaggagacggtctccgcgctggaaagcctggtccggcaggggaaaatccgccgctggggcgtgtcgaatctcgatattgatgatatgcaggcgctgtggcgcgtcgatggcggccagcgctgcgccaccaatcaagtgttgtatcaccttgcttcgcgcggaattgagcggcagttgctaccttggtgccagcagcaacagatgccggtgatggcctattgtcccctggcgcaggcggggcgtttgcgccagggcctgctgaatgaccccgttgtaaacgagattgccgatgcgcatcaggcgacagcggcgcaaattttgctggcgtgggcgatcgggcatccgggagtcctggctatcccgaaagcggcttcgataccgcatgtggaacaaaatgcgggcgcgttggcgataacgctttcggcggatgagctggcgcgactggataacgcctggccaaggcctgcgaaaaagacaccgttggatatggtctaa

SEQ ID NO: 94002 - DNA, 1029 bp, Enterobacter aerogenes
atgtctccacgtagcgccagcgatctgtacgccgaaatgaaaaatatgtcagtagaagagcgtattcgctttttctcgctttcgcttgcggaaatgcatcgtgagctacaggagagcatcagcgagattgagtcgatgcagcgagcgctggccgaaagcgaggagaaccatcgacagctggttgagactgcacaggatgcggtgattaccatcaatcatgctggggtggtgattaactggaaccaggcagcggaaagaatgttcggctggtccgtaggggaggctatcggcaacaacctgggcgagatgatcgtgccggaagagtttcgcgagcagcatgcgcgtggtttaatgcgctttcaggcggctcagccgtcgaatatccttaatcgcaccatcgaaattaccgccctgcatcgcactaaaggcaagttccctatcgagctgtcgatctggccgcatcaacaatcaggcaagcagattttctccgcgtttattcgcgatatcaccgaccgtaaacagcgggagcaggtggtctggctgcatgccaatttcgacgcgctgaccggattgccaaaccgcagactgttggtaaatcgcctggagctggcgattactcaggccattgccaatgagacagaagtggcgctgctttttatcgatctcgaccgctttaagccagtgaatgacgtttacggccacgccgtgggtgacgaactgctgcggctggtggcgttccgtctacaaagcgttttacgagaaggtgatacggtggcccgcctcggcggcgatgagtttatcgctctgctccccggtttaaaggcaaacgatccgctcccccgacaaacggcggaaaagatcagcaatgcgctaacccagtcatttttgatccacgagcatgttattacgatttccggcagcatcggcattgcgcttttccctcacgatgccgcggatgccgatacattgctgaacagtgcggataaagcgatgtacagtagtaagaaggcgacgccgcgagagaggtaa

SEQ ID NO: 94003 - DNA, 207 bp, Enterobacter aerogenes
gtgtggtcagagaagacgggcgtatggggagaaaaagaggagatctacaccgatcgtatcagcaacccgctgcatttccaggtcctgtattttgccgttgaacggctgtctaatctcacttacctctctcgcggcgtcgccttcttactactgtacatcgctttatccgcactgttcagcaatgtatcggcatccgcggcatcgtga

SEQ ID NO: 94004 - DNA, 768 bp, Enterobacter aerogenes
atgcgcgagtacgtgtactatccgggaagttttcagccgctggcgctgctgacgcaggaagcgggcaggaaggggagctggcactatcattgtgacccgaatggcgcgccggtccgcctgacgtcattgcagggcgagatagtgtggtcagagaagacgggcgtatggggagagaaaggggaggtctatgccgatcgtatctgcaacccgctgcgtttccagggacagtattttgacgctgaaacggggctgcactataatcgacatcgttactatgatcctgaaattgcgggatttattagccaggatccgattggattagccggcgggctgaatgtttatcagtatgcgccgaaccctcttggatgggtggatccgtgggggctgagttgccgaaaaaaatacatgggcagaacccccagcaaaaatagcaaaaccggacgtgaagtcattgcaagaatgcgaggtgaagggcgaataagaggctctggtgataggatgcagtttaaaagttcaactgatggagtatggtaccgtatacaggatgctgatatggcacatttaacggatgcagttaaatattggaaccaaaaaggtgggtattacggacctaaatctcgtgaggtcagagcttttatgagagactccagaaattatgagcttgaatattatggtcacaatcgctctcagggagccttgcttcctgacagatataaacattctggagattttattggcccagaagaaaaatctcagtatttccagtaa

SEQ ID NO: 94005 - DNA, 234 bp, Enterobacter aerogenes
gtgaggttttaccttaaaaacgatgcattatcagaactaaaatcaattggggttaaagattcagcagtacttaccagtattacttatccggacatgccagatgtagggaagggatggaaggagacaagtgcattctttaaagctgaaggggaacagattaatattggattaggtaaaggtaaggcattagatatattcaatcaagggattcagcgattcgagaggttaaattaa

SEQ ID NO: 94006 - DNA, 153 bp, Enterobacter aerogenes
atgttctgccacgccagcaacggcggtgattggcaggttgtccgatcgcggcccccagccaaatgtgaggaccacgatgagagagaagtgttattgcatgagaaatttttcgaggaactgacgagtacgcggctgctgcgggttagcaaatag

SEQ ID NO: 94007 - DNA, 1488 bp, Enterobacter aerogenes
atgaaaaatcccacgttgttgcaatgttttcactggtattacccggaaggtggcgagttatggcgggaagtagaagcccttgcgccaaatctcaatgaaattggcattaatatgatttggttgccgcccgcctataagggcgcttccggcggttattcagttggctacgatagttacgatcttttcgacctcggtgaattcgatcagaaaggatcggttgccaccaaatacggcgataaagctcagctgttagcggcgattaatgcgctaaaagaacatcaaattgccgtacttcttgatgtcgtcgtaaaccacaagatgggcgccgatgagaaagaacgcatccgcgtacaacgcgttgatgaacaggaccgcacgcaaatcgcggaagaaatcatcgaatgtgaagcctggacccgctatacctttccgggccgcggtggcaaatattcacaatttatctgggactataaatgttttagcggtatcgaccatatcgaaaatcccgatgaagatggcgtattcaaagttgttaatgactacaccggcgatggctggaacgatcaggtcgacgatgaaatgggcaacttcgattatctcatgggcgaaaatatcgatttccgtaaccatgccgtgaccgaagagataaaatattgggcccgctgggtcattgaacagaccggctgcgatggtttccgcctggatgccgtcaaacatattccggcatggttttataaagagtggattgagcatgtgcagggggccaccgataaaccgctatttattgttgccgaatactggtcacacgaggtggataagctacagcagtacatcgaccttgttgacggtaataccatgctgtttgatgcgccgctgcagatgaaattccatgaagcctcgcgtcagggccgcgattacgacatgagtcaaatcttcaccgggacgctggtggaagccgacccattccatgcggtcacgttggtcacaaatcatgacacccaaccgcttcaggcgctggaagcgccggtcgaggcctggtttaagccgttagcctatgcgctgattttactgcgtgaaaacggtgttccctcggtattttacgccgacctgtttggcgcaagttatgaagataccggcggagatggccagacatactccatcgagatgccggttatcgagcagcttcacgaactcatcgatgcgcgtcagcgtttcgcccacggcgtacaaacgctgtggttcgatcatcctaactgtatcgccttcagccgcagcggcaccgatgaacatcctggctgcgtagtggtgctctccaacggcgacgatggcgagaaaacgttaccgcttggcgagaattatgccaataaacgctggaaggattttctcaataatcgacaagaggttattgagactgatgacgagggcaatgccgtattcacctgtaatgcaggcagcgtaagcgtgtgggtgattgaagaggtgctttga

SEQ ID NO: 94008 - DNA, 225 bp, Enterobacter aerogenes
atgtatcgcatggaaaagataaccactggtgctgcttatggcgcttcagccgggagcatcctgaatggcatgcttaatgcctacagccccgagcagtggaatgccatcggcgtgctggcgggcattgtcattgccgtacttacgtacctgacgaatttgtatttcaaaatacacgaagacaaccgacgaagcaggagcagagatgaacccgacgctcaggaataa

SEQ ID NO: 94009 - DNA, 627 bp, Enterobacter aerogenes
atgaacccgacgctcaggaataagattgcggcgttgtttgaatcggcgatgtgcgcattgattacccacacactgaatgatgcaaagcgcctgtttcaggaaaaggtgaagtatgcatacgacaaactgccggcggagataaaggcggctaacccagacagcaacgattcgtctggcgaactcgtttttaagaaaggcggctcgctatacgtcagcacgtcgttttgtggcggtacgctgcgctatctgcatgtttccgagttcgggaatatatgcgccaagtatcctgacaaagcccgtgaaatcgtcactggtgcgtttgaggcggtatcgacaggctgcttcgctactatcgagagcacagcggaaggccgggcgggttacttcttcgattactgccagacggcagaaaaagccttgctgcagggtaagccactatccgcgctcgactgtaagttcttcttcttttcctggtggaagaatccgcattacgcaattgacccggttgagtcgctacctcagcgcttagttgaatactttgctgaggtggaggcaaagcacggagtagtcgtcagcgagcgtcaaaaggcctggtattacgccaaaagagaaaacactcggcgatga

SEQ ID NO: 94010 - DNA, 438 bp, Enterobacter aerogenes
atgctgattggctacgcgcgggtgtctaccggcgatcaaaacctcgatttacagaaaaatgcactggttcgcgcagaatgtgagctaattttcgaagataccgccagtgggaagaacgccagacgacctggtttaagaaaagctattcgccgccttcggcccggagattcactggttgtctggaaactcgatcgccttggtcgtagtgtgcgagatctcatcacgttggtatcagagctgcaggatcgaggaattcattttcgcagcctgaccgacagtattgataccagtacgccggcaggacgctttttctttcacgtcatgagcgctctcgcagagatggaaagggagctgatagttgaacgtacccgggcagggttagccgcggcaagagaacaggggagagttggagggcgccgccgggtaatgaccccgtag

SEQ ID NO: 94011 - DNA, 207 bp, Enterobacter aerogenes
atgctcagagtatacttttccaggaattcgattttccgcttgcgaagggaaatatttatatatcgtctttactccaacaccgataacatcagccacctgctgccgggtcgccccattccccagcaatttttggcatcgttccaagacctacggggtcattacccggcggcgccctccaactctcccctgttctcttgccgcggctaa

SEQ ID NO: 94012 - DNA, 207 bp, Enterobacter aerogenes
atgtgcggacgcttttcccagtcaatgacccgtgaagattatctttcctgtcttgtcgatgaagccgatcgcgacatcccatacgacccggaacctattggccggtacaacgtctcgcccggcaccaaagttttgcttctgagcgaacgcgacgaacaactgcatatcgatccagttttctggggttatgcccaggaggtgggataa

SEQ ID NO: 94013 - DNA, 1302 bp, Enterobacter aerogenes
atgagcttaacgtatgacttcaccagtgtgcatgagcattgcgtatttagatgcactgttacggacgatagcggcaagagtcaacacgctgatgcatcctttgctattggagctccagctacagccaaagtacagagcgctacaagctcgttagctgttacacgctatgctactggctcagtggtgagcgatcagcttactgttactccttcccctgctgatgatggaacttatctgtacaactattcgatagataccgatctattcactatcagcgatacagggctaatcactggcgttgcttctactgatggcacctatacagcgtcctgtgttgttatcgatctatacggcaatcaggcaccaactagcagcgcctttagtgttactactgaatacgcacaccttaaaggtgttagtgttagtcctgctaccttgtcagtagttgaaggtgatccggttgatcaggtattcactcttacacctaatccggtagatgatggaacatataaatacagcgcatcgttcagcggagctaatgacggtctgaccattacaaacaataatgatggtacgtttaaagttagtggcactaccactacaaccgggaacgttgttataggcttcacctgtaccgatagctataacgcctcatactctgataacgctgttatcactatcaccgtaccagcggcacacatcaagacagctacagcttcaattgataacactactgctactgtgggaacggcttacacaggacagcttaacgttgtatgtgatgaatccgatgatggaagctatacctatgcctactctctgaacggcactaactatggtctgtccataagcggcacaggagccattacagggacaccaacggcagcaggtacagcaggctttaaagtgacggttacagactcatacggagctaagcagacaggctacgctaacgtagtgatctcagcggctccagcttatgcacagatccagagtgtgggcgctgttactggctacggcactaatccgggtcatcctaaagttggtcacagcttcacgcgccagcttacggcaactcctagcccggcagatgatggttcttatgcttggcgctggtattggaacccaacggcaccagcgggaatgaccttaaccaatgccgatacagcaatagttacatggtctggtactcctactgttaccgatggcggcaagacgttctatctgtatgttgatgttaccgattactacggaacaaccaagacaactacaggcgctggtggaatggctatcgacaaataa

SEQ ID NO: 94014 - DNA, 318 bp, Enterobacter aerogenes
atgaaaaaagttaatgggggaatcacccccgactataattatacaactaatgttgtcttaccgctttggcctaattacacgcctgtagcttgcagaatgggtaactggttttggaatggatacggggcaccgttttattgtgaagatcttgatgctctggatgaatacggatcaagtgtatggcttcagacaataccggaaactacagaaggtttctgtgtgggtatggatacattcttaacggaatacacaggcattgatttagcagtacgtttccagctatgggtaaataatggcgctaaggggcattttaaatga

SEQ ID NO: 94015 - DNA, 738 bp, Enterobacter aerogenes
atgggatctaataaacgtacaccgccaccagttacaacccttgctaaagaagtacaaattgaactagccagatcaagacgccgggaacagcggaaacgttttgatgaacgttggaaaactgttagtgaagagacacgacaactttataaagaaattcagcgccgtgacaatgaagccgctttagatcgagtgaagtctatgaacagacctgtagatcaagatgctattgaggccgggttaatagaatggaacaacgagaagattaaagagaatgcaagttttatctcagagctaaacgccgctaccagttatgagcataaatggaaagaagccataaaaaataggatcacaccagagcgccagcagaaaattaatctccaaaaagaaaagaatgagaagaaagaacaggagaggatagcgcgtgaaattgcaaaagagaaagcaagacaggaacgggaagagagaaaacttaatccacctcctaaacctcctaagcctgttaagcctcctaaaaaatatcaccctcctattgatccagaaacaggggagtatttccctataggattgactacttataccaaaagcaataaacagtattttcaagtaagacgccgggaggaaaataaattaaagcatttaggaacatttaatacaaaagaaaaagctgaattagcgtctatagtttggctgagaaaaacatacggacttgaagaggaattttttaaggatggaaaatga

SEQ ID NO: 94016 - DNA, 141 bp, Enterobacter aerogenes
atgaaatacatctacagaggcttcatgatcgggatcggcttaatggtggctcatgttgtcgtaggggctacggtgatcgccacgctctggagtaccatagaaccagtgataaagcagacgttagcagcatatttccactaa

SEQ ID NO: 94017 - DNA, 198 bp, Enterobacter aerogenes
atgaacccttttcaattctacatggatgctttaggcgctgctgctgatggcctcttttgcttgatgcttattggcgtaggcttagtggtgtgcggtctagtggctgaattctttgcagatcgtaaagagaacattaggcacactgagctagtgagtgaacgtaaacgcagagcgccacggatggagggcgtagaatga

SEQ ID NO: 94018 - DNA, 396 bp, Enterobacter aerogenes
atgaagaatattttattaacagcggctttattagccgtggctggctcagcgtctgcaagtgttatgccgtattcctgctacgtgacaagcaaagaatatacttccccggctttcggggtgatgatgtcttttgctatggctcaaggtgaaggggcttatgatgtagaaggtaaagtgtataactttgaaccagacggtaaatacacttttgatcatccagccccggcacaagatggaagcgtattaaaagcagatgattcaaataaagtgatggcctttaccattacggacaagaaagggaataaatcacattatgcatgttatgcccttactgatcaggacagcacaggcgctgaaagttattatgcctttaaatatttaggtggtaaaaaatga

SEQ ID NO: 94019 - DNA, 216 bp, Enterobacter aerogenes
atgagcgttgaatataacgccgtatgcattgaagaattagatccagagagtattaatttctatcccccgctctggttcgaaatgaaatatcaaatggaacttaatgcaggtattaccctagcggcaaaattaaacgaatggaaaactaaagacacgccagctttaaagaaagcgcgtgaacgttatcaggcataccaatttaaaaaggcttcatga

SEQ ID NO: 94020 - DNA, 735 bp, Enterobacter aerogenes
atggctttatcagatggcactattgaacgttggtcactggctgatgtacttgcagttaaaccgaacttagaaaaccgcactttaaacttcagcggaaactacttgcatggtgaatggaatgattcattaggcgatccgttcgaagtgtgcctattgaataatgaatttatccttgtagacgggcatcacaggcaacacgctttagctcaggaatggttaactaacctccctgatacgtttgcagtgtggcaccgtgaagccgaaacgatggacgatatcagagcgcggcaagatgcacacatggagggtaagagatctcctaacgccactcagagagcctctatcatcgataagcgtctgagccttacagatctggagagcaagcaagctaagcgcataggcattacagcggttaagcagttaggctacaagggcaaagatgcattgatgaagggtaaaacagactacatcgaagagatccgccttatagatacgtggggattgagcttcgaggctgcacgatacccgcaaggcatcttagcggcaatgctcaagacagcgcgcattagccccgctcaggcttgcgacttctggcacaagtacgacgctaaagcaaagggcagcaagtttatcaagcgtgtattagatcgcgttgatcaaggtggattaggtgaagaatacaatgcacagctttacgccacctctgtagatagtttcgattactggatggattaa

SEQ ID NO: 94021 - DNA, 495 bp, Enterobacter aerogenes
atgaatgcttcagattattcaagtgttactcatgctgtaaaagctgtttcaattatcatcgctattgcttttgctcttcagggtaaaggcgggatgaaaactaaagcggataaagttttaagcgctggtaaattctttatttggggtaacattggctttatcgctttcttccttttgggctttatcacgctggcgttaactcaaaacctaagcgcctattatatgatctgctcagtggctgctttctgtctgtgcttcacagcgccagcggggatctattcatgggcggtgttattccgtagcaaggcaaacaaggcaatctattatccctttatgaacaagtggactatagcggcctttattctctctaacggtattatggctgctgtaactcaggtagccccaatgatttactttgtctggattccggttgctaccgttgtaatgtttatgagcaatcgcaagatcaaacaaattatagggatggctaactaa

SEQ ID NO: 94022 - DNA, 297 bp, Enterobacter aerogenes
atgcacatcatctatatgctttttgcagcacagacgcttttaattatttttctctatcgggagctacggtatagcattgtaaggcttagtaactctttagattatgagagaaaaaccttagatatgattgctgatcatatcccagaaactaaaaagaaagtagcagaaattgaaaggcacactactagcaagttcatcaaggatcttgcttcagatatggcctttaaagacctacaaagagccaatgcttattggtatgaaaaagcggtagagcttggctataaggaagaagaataa

SEQ ID NO: 94023 - DNA, 246 bp, Enterobacter aerogenes
atgcaacacgtaacagtaaagagcacacattttcacgcttggacgtctcaccttttgggtacgatcataggcggggctataacaggtgcattgattggcttcctattaggctggagctatgacgattcaggctacatgcttcatcaagatataggcttaacaggcctgtgtggtgtggtgatctacgtgatagctttctttgtctatacgctggtgagagcggcattagggaaacaccatgagtaa

SEQ ID NO: 94024 - DNA, 279 bp, Enterobacter aerogenes
atgagcggtaagcgttatcccgaagagtttaaaattgaagcagtcaaacaggttgttgatcgtggttattctgtttccagcgttgcaacacgtctcgatatcaccacccacagcctttacgcctggataaagaaatacggtccggattcttccactaataaagaacagtcagatgctcaggccgagatccgccgtctccagaaagagctgaagcgggttactgacgaacgggatatattaaaaaaagccgcggcgtacttcgcaaagctgtccgactga

SEQ ID NO: 94025 - DNA, 183 bp, Enterobacter aerogenes
atgtcgagtaagacactcacagtgaatgatgataccgctgagccctggtgggggctgaatcgtaatgtcattccttgttttggtgcgcgtctggtccaggaaggtaaccgcctatattacctgtctgaccgcgccagcataataggcctattcaataaagcagatttgctccgtcttgactag

SEQ ID NO: 94026 - DNA, 222 bp, Enterobacter aerogenes
atgaaaatcatcagtaagcgtcaggcgatggcaatttatcgtctgcatcctgaatcccgattgtttcaattctgtaccgggaaatattgctggtccgggagcgtctgccattactacggtcgtgaagttccggatatcaagggtgttctggctgtctttgccgagcgacgcaaggaccggaacggaccgtatgtctctctgcgcagcgtcactctcaattaa

SEQ ID NO: 94027 - DNA, 474 bp, Enterobacter aerogenes
atgtccgaactgattttaccttcggtcttcccgatgaatgaacaacgtaccatccgtcgtgccctgcgattactggagaaatatcagcggcagcccagtgagtcgttccttgccgctagtttcgcgaaaaactggttacagctctatttggcaaagcaggagcgcgaagtctttgttgttatctatctcgataatcaacatcgtctgctggagcatgaaacgctcttcctcggtacgattaaccataccgaaattcatcctcgcgaaattgtgaaatctgcactgcgtcataatgcagctgcggtaatcatctcccataaccacccatctggcattaccgatgccagtaaagctgacagagccattacgtccagggttatagaggctctggggctggtcgatgtccggctactggatcatttcatcattggtgatggtgaagcgttgtcgtttgctgagcatggatggctataa

SEQ ID NO: 94028 - DNA, 819 bp, Enterobacter aerogenes
atgcgattagcatcccgctttggtgcggtgaacctagttcgccgtgaccgtcccttaacccgtgatgaacttgctcactatgttcccagcgtgtttagtgaggaaaagcatgaatcgcgcagcgagcgctatacctgcatcccgaccatcactctgttggataacctgcagcgcgaaggttttcagccgttctttgcctgccagacccgtgtgcgtaaccccgacaagcgggaacacaccaaacatatgctacgtctgcgccgcgaagggcagattaccggtaaacaggtgccggaaattatcctgcttaacagccatgacggttctagttcctaccagatgctgccgggactgttccgagcggtctgtcagaacggactgatttgcggcgagagctttggagaggtgcgagtgccccataagggcaacgtggtggaaaaggttatcgaaggggcttacgaggtgcttggggtgtttgacagggtggaggaaaaacgcgacgccatgcagtcactaatgcttccgccaccagcacaacaggcattggcaaaagctgcactgacatatcgctttggcgaggagcatcagcccgtgacggaatcacagctattggcccctcgtcgctggcaggatgagtccggagatctctggacaacttatcagcgtattcaggagaacctaataaaaggtggtttgaacggtcacaatgcaaaaggaggacgctcacatacacgtgcaattaaaggtattgatggtgatgtgaagctgaatcgagctctgtgggtgatggcagaaaatatgctgcatctcgcctcatga

SEQ ID NO: 94029 - DNA, 678 bp, Enterobacter aerogenes
atgaaaattcagaccgtgattgcacttgttttgtcagccatttcggtttctgctcaggcgggtaactgggctgtgaaaaacggctggtgccagacgctgaccgataatggtcaggcactggtgatgctgaaaaacaacaccattggcatctttggtcagttgcagggctgccccaatggcccgcaggagctgatggggagtcgcatcagtgtaaacggcaatctggtacccacatctcagttgtgcaaccagcaaacaggatttaaggctgttgaggttgaaggtgggcaggcacctgcagccgccagaaaggcaattgcttcgattgcaggtcaggaaacatcgacccttcaggtctttggtgcgcaactgacattcacccgtggggacatgatggcggtctgcccgaaatacgtatctgcccttgctgccagtaccgggagtcgagcgccggagattaacaaaggctcagtcatgaaagcggccaaagaagcgtacacgaaagagtatgaccgtgacacggctgaggccgctgattttggcagctacaaagtggagggaaatactgtggtttatgaggtctacaatgccggatatcgtacctacgataaggtggtggtgaccgttggtgctgatggtaaggccaccggtgccagggttgaatacatggggcaataa

SEQ ID NO: 94030 - DNA, 894 bp, Enterobacter aerogenes
atgcctcaaatccccgatccgcaggataccagtgatgcggtgcgtacctgcctcaatctcttaccccggcaggctactgaacgtattctgtcccgcctccaggaggcgattaactatgaacccgtgataggcatcatgggcaaaagtggtgcgggcaagagttcattatgcaacgcgctttttcagcaacccgtttgtctgaccagtgatttgctaggctgcacccgcgaaccccagcgtctgttactcaccgttggtgagcgcagcatgacactggtggatttaccgggtgtgggtgagacaccggaatacgacgaggaatatctggcgctctataaggcgttgctgggagagctggatttgattatctgggtactgcgtgccgatgaccgtgcccgggcaacggatatcacggcatacagggcactgatggaagccggtgccgacccttcacgtttcctgtttgtactgactcaggccgaccgcattccacccctcagggatggtgagccctggcaggcatcaccttcttctgaacaatgcctttcattggcttcagtcagtgcgcaggtagccggtcaattgccgtcctctttcccggtcatggctgtctctgcacatacctgctataacctgcccgccctggtggagttgattgtgcatgccttgcccgtacaggccagcagtgccgtgtattgccagctgaaaccagagcatcaaaccccggacactgacgccgctgtacggcagcagtttggtgaggcagcgggtaaggcttttgacacggtgattaatcctaaccacctgccttctgtctggactgctctgttaaggagcctccgacaaaaattagtgcaacttgcctcaacattatgggaccgagtatttggctga

SEQ ID NO: 94031 - DNA, 1152 bp, Enterobacter aerogenes
atggctaaatgtgtacgaaaaaactgcaagcgtttagtgtccccattacctgaagcaaaacgtaaaaggctctgtaaaaaacattatttgcgcttctgcgagctgagtgaacgcaagaaaaaagaccttgtttatcagattaataaatatatccctcgtaaaataaaacgattaaagaaggggcgaatttactattgcgcattcaatagcaggaggggatatgtcagaaagatatcttcaattgaagatgctggattaataagacaggccagagagaagcttgtattaatacgaaaaacaccggcctggagaaacacagaaagctatgtacgccgtataagaatcgggtcagagctccctgtctcattaaatgaagtaacggaactgtatagtatctactcctggattgatttttgtaaaaacagcacgctttatgcaaaaaatcatcttggtggcggcgaaggaaatttaaaattgcaactttataaacttcatttcccaagtaagacagaagattcctcatcccaacaaaacattattatacctattactttaaaaaacaaagtaattaatcaactcgcaaaaaaccgcaacatcaggggtactgctaacataaaaaaaccactcagcctgtacaaatctttaattgcgttagaggatgagcggtctgtggcattaaaattactccaattaacaattgagacacctttacaccctcaccaatatagtaacaacctactatatcttagccctggtgatgctcctccattatttggcctcttattaaatgaactgaaaagattgaatgtcattggtgtgaatgattcgatgttaaaactcgctaaaaaatataaaaatgaatcctttacgttagagttgatagcaatttatattatttttaacatagcaagaaatggcacccctgaggtttattcatttttatcaaacttatttgataaaaatggttatttgtacaggtccgtaatgattaccttcatgatgcttgagttggatttggattcttattctgaattagtagggttttacaactctttctttagtacggatgtaatcaaaatcaaagataatatattgctatgggcgtcaggcaagaaagaaatactcccttttgaataccgacctggaatttaa

SEQ ID NO: 94032 - DNA, 240 bp, Enterobacter aerogenes
atgacaaacaaaactcatccgatatcatccagcacccagacaaccacatctttactgaatgatcagctcgttgatatgacgttcatcaccgcctatacaaacatgacagacaaatggttctaccgattaatttcagagaatgcgttccctgcaccaattaagctgggtcgcagttcacgctggctaaaaagcgaagtggaaaaatggatgctggatagaatacaagcatctcgaggttag

SEQ ID NO: 94033 - DNA, 579 bp, Enterobacter aerogenes
atgctcaaaaattcagatagaaattttaatgaagactggttcctggcttcagttctcaatgcacacatcgatgaaatgataaacagatactcatgccttttggcattacgcatggattttttctacaaaaagaaaagtgccaggtattcacacttaaatcaccaaacacttgaacatgacttgcgtgtactaatggagaaaatgacaaaagagaaaggtgtggtgggctatttctgggttgtcgaatggactgaacgacatagataccatgcgcatgtcgtattctggctggacagacaaaaaacacagcattcttatccctttgcccttacagcaaatacaatttgggaggaaataacgcaccgggacggcgtatcgcaccgatgtgaatatcggccgcagtattctagaaatatcaatatacctgttcggtataacgatccggaaagtattaacaatatccgtcatgttctgagctatctggctaaggaagaacaaaaagaaggtttgtgtgcatacggctgtaatgacgttcctccacgctcagcggcagggcgtccacgtaagccaggcccctga

SEQ ID NO: 94034 - DNA, 333 bp, Enterobacter aerogenes
atgaaccttatgaatctttcaaaagcagcagacaccctgaaagagctgggtcattctacacgactaagcgtgtacagggagctggttaaagccggacataaagggttaccggttggtgaactgcagaagcggctcgaaatcccagcttctacactgagccatcatctttcctcgttgatatcagtttctctgatacggcaggaacgtcagggcagaacgcttttttgccacgctcgatatgaaaaccttgaggctctgattgccttcctgacagaagaatgctgctcagggactaacgactgcctccccctgccccagaagacggagaagtaa

SEQ ID NO: 94035 - DNA, 714 bp, Enterobacter aerogenes
atgacaggtgatcttaagaatgttgatgcgggtttgttcgacacctcaatcacagaagcaagattcggtgttcctgccgttcctcatccgccgcgaatcctcatgctatacggctctgtacgtgaacgctcttacagccgattggcaacggaagaagcggcaagattgctgacagccatgggcgcagaggttcggatcttcaatccctcaggcttgcctcttcctgatgatgcgcctgactcgcatcctaaagtcatggaactgcgcgagttggttcgttggtccgaagggatggtgtggtgttcccctgaacgccatggtgcgatgaccggcatcatgaaagcccagattgattggataccgttatcagaaggcgctgttcgcccttcgcagggtaagacactggccgttatgcaggtctgcggtggctctcagtctttcaatgccgtaaaccagatgcgcattcttggccgctggatgcggatgatcaccatcccaaatcagtcctccgtggcaaaagcctggcaggaatttgatgaagatggacgaatgaaaccgtcgtcttattacgacaggatcgtggatgtgatggaagaactggtgaaatttactctgctgacccgaggtaactcagcctatctcgttgatcgctacagcgaacgaaaagagtctgcagaagaactttcacggcgggttaatcagagcaaaatttga

SEQ ID NO: 94036 - DNA, 546 bp, Enterobacter aerogenes
atgagtgatgtaacggcattcaacaactgcatgagcttgttctggcggcaacatgaagccgaactctctcgctttctgacatcgaagacaggtgatagcgaaaaagcagcagaccttctgcaagagctattcctgcgtgcccgcgctcattcagacagtttctgcgaaatggagaatccgcgagcctggctgtatcgggcggcgaggaatctgctgattgatgagtaccgcaccaccagggaattcgttgagctggaagatgatgccccattaactgatgcatcccctgatgcaatctcaacgctggatatttgcctgcctgaaacattgcaggcattacctgaagatgagcggtggttgattgaagaatccgaccttaaccggcgtccccagcagtccctggccgatgaactgggaatcacgcttacggcgtttaaatcccgactacttcgggccagaaaacacctgaaagagacgatgacagaactttgtcagattgaggcggatgacgcgtcttccgtctgctgccacaaaaaaatgaattaa

SEQ ID NO: 94037 - DNA, 363 bp, Enterobacter aerogenes
atgtcaaaaattgagatctttgaagcagcaggctgctgtgcaaccagcagcgttgtagtcagtgacgaagccgtcaaatggaacgccagcgccgaatgggcgaaaaagaatggcgttgatatacagcgctacagccttgcgaagaacccgcagcagttcctgaattcgccggtcattaaagagtttctgaacacatcagggatggagtctctccctgtcaccttgctcgacggcaagctggtgatggcaggcaaactgccgactcgtgaagatatcgcccgttgggcaggtattccgcttagtcaggactggagtgaagacagcacgcaaccacgctgctgcagcattccacgtatgccttaa

SEQ ID NO: 94038 - DNA, 1758 bp, Enterobacter aerogenes
atgaatatgccatttttaaaagacattcccccgttcatcttcttcactggcaaaggtggcgtgggtaaaacatccctagcctgtgctactgcggtatggctggccgatcagggtaagagaacgcttctggtgagtaccgatccggcttccaatgtcggccaagtctttagccagactatcggccaccgaatcacagatatcagtaccgtagaaaatcttgccgcgatggaagttgatccgatggctgcagcacaggcttatcgtgaccgagtactcgacccggttcgcgggctgatgccagccgatgtggtcagcagcattgaagaacagctctccggttcatgcactacggaaatcgcggcatttgatgagtttactggtcttcttaccaaccatgagttgcgggaaaagtatgaccatatcgtatttgatactgcgccaaccggtcataccatccgtatgcttgagttgccgggggcctggagcggttatctcgaagcgaaccctgatgccgccgctaacctcgggccgctggtggggctggagaaacaacagcaccagtactcagacgcggttaaggcgctgtctgatgcagctctcacgcgcttggttctggttgcccgagcccaagcttcaacactgaaagaagtctctcatacgcacgatgagctttctgctatcggtttgcagcatcaacaccttaccattaatggcgtgctgccgccgtttgcgggtgaaaatgatccactggcgcaaagtattctggctcgagaagaaaaagcattacaggcaatgccagagaacctggcgaaccttccccgctcgcagctgtatctgaagccatttaatctggtcggtctggaagccctgcgtcagttatttacggagaacaaagcctcgctgccgctccctgctaccacgctgaatactttggatttaccgaaacttgcctctctggtagatgaactcagccagacaggcaaagggctggtcatgacgatgggtaaaggcggcgtgggtaaaacgaccgtagcggcatcggtagcggtatcgctggctaagcgtggtcacaaggtccacctgaccacatccgatccggcggcacatctgtcttacactctggatggctcgctgccaaatcttcaggtcagccgtatcgatccgaaggtggagacagagcgctatcgccgctttgtgctggaaaatcagggcaaaggattagacgctgagggactagcagtgctggaggaagatctccgctcgccatgtactgaagagatcgccgtcttccaggcattctcgcggatcatcaaagaggcagacgatcattttgtcattatggacaccgcgccaacgggtcacacacttctgctactggatgcaacaggagcctatcaccgggaaatggtgcgccagatggggcaaacacatgaccatgtgatgacgccaatgatgcaattgcaggacccggaaaagacgaaggtgattatcgtgacgcttgccgaaacgacaccggtactggaagcagcaaacctgcagcaggatttgcgtcgcgctggcatcgagccatgggcatgggttgtgaataacagcctggcggcagctgaaccgtcttcacctttcctgaagaccagggcgaaccgcgagttgcctctcatctctgatgtgggtgagcagtatgcaaagcgtattgcgttaacagcgctacagagccaagagccggttggtattaaccttctggaagaaatggcgaagtaa

SEQ ID NO: 94039 - DNA, 426 bp, Enterobacter aerogenes
atgagcaacatcaccatttatcacaatccagcctgcggcacgtcgcgtaacacgcttgagatgatccgcaatagtggtactgaaccgaccgttattctttaccttgagactccaccttcacgcgatgagctggtcaaactcattgcagatatgggcatttccgtccgggctttgctgcgtaagaacgtcgaacagtatgagaaactgggtcttgcagatgataaatttactgacgaccagctaatcgactttatgttgcaacatccgatcctgattaaccgtccgattgtagtgacgccactgggaactaaactttgccgtccttctgaagtcgttctggatatcttgccagaatctcagaaaggggctttcgccaaagaagatggtgaaaaagtcgttaatgaagcaggtaaaagacttaaataa

SEQ ID NO: 94040 - DNA, 1290 bp, Enterobacter aerogenes
atgttactggcaggcgctatttttgtcctgaccatcgttttggttatctggcaaccgaagggattagggatcggctggagtgcgacgctgggcgcggtactggcgttgatctctggcgtagtccattttggtgatatccctgttgtgtggaatatcgtctggaatgcgacggcaacctttattgccgtgattattatcagccttctgctcgatgaatcgggctttttcgaatgggcagcgctgcacgtttcacgttggggtaacggtcgcgggcgtttgctgtttacctatatcgttttgcttggcgcagcggtggcggcactgtttgccaacgatggtgcggcattgattctgactccaattgtcatcgccatgctgcttgcattaggtttcagtaaaggtactacgctggcatttgtcatggccgccgggtttattgccgatacggccagtctgccgcttatcgtgtccaacctggttaacatcgtttctgcagacttctttgggctgggtttcaccgagtatgcgtcggtaatggtgccggtggatatcgccgccattatcgccacgctggtgatgctgcatctgttcttccgcaaagatattccaccgacttacgacctggctctcctgaaagcaccggcaaaggcgattaaagatctggcaaccttcagaaccggctggatagttttaattcttctgctggttgggttctttgtcctcgagccgctcggtattcccgttagcgcgattgcggctgttggagctgtgatcctgtttgcagtagctaaacgaggccatgccattaacaccggcaaagtgctgcgcggtgcgccatggcagatcgtcatcttctcattggggatgtacctggtggtttacggtctgcgcaacgccgggctaaccgaatatctttcaggtgttctgaacgtgctggctgataaaggactctgggccgcgacgctgggtactggcttcctgacggctttcctgtcttccatcatgaacaacatgcctaccgtgctggttggcgctctttctattgatggcagtaccgcaactggcgtcatcaaagaggcgatgatttatgccaacgtgattggctgcgatctggggccgaaaatcacacctattggtagcctggcaacgctgctctggctacatgtactttcacagaagaatatgacgatcacgtggggatactattttcgcaccgggattatcatgactctgcctgtgctgtttgtaacgctggccgcgctggcgctacgtctctctttcactttgtaa

SEQ ID NO: 94041 - DNA, 1752 bp, Enterobacter aerogenes
atgaaattcttacagaatatcccgtcttacctgtttttcaccggtaagggaggtgttggcaaaacttcgatttcctgcgcaacggctatacgtctggctgaactgggaaagagtgttctgcttgtcagtaccgacccggcttctaacgtcggtcaggtattcaatcagactatcggtaacactatccagcccgtagctgctgttcctggtctttcggctctggagattgacccgcaggaagccgcccagcaataccgcgccagaatcgttgaccctattaaaggtcttttgcctgatgacgttgttaacagcatcagtgaacagctttcaggagcttgtacgacagagattgctgcgttcgacgagtttactggcttactgactgacgcttctctgctgacccgcttcgatcacatcatttttgatacagcgccgacgggccacacgattcgccttctccagcttcccggtgcctggagtagcttcattgaaagtaatccagatggtgcttcctgtcttggcccaatggccgggctggaaaagcagcgtgagcagtatgctcatgcggtagaggcgttatccgatcctgaaagtacccgcctggttctggttgcacgactgcaaaaatctacgctgcaggaagtcgcccgcacccatgaagaactcgccgcaattggcctgaaaaaccagtacctggttattaatggtgtgctgcctaaagccgaagctgaacatgacgctctggccgctgcaatatggcaacgagagcaagaggcgctggcaaatcttcctgccgggctatctgatttgccgacagacaacttataccttcagccgctgaacatggttggtgtgtccgcattgaaaggcctgctcaacgaacacgctgagatagcatcgtttcctgaacaaagcataccgaacaagccagagaatatgtcgttgtctgtcctggttgatgatatcgcccgcagtgaacacggtttgattatgctgatgggcaaaggtggtgtgggtaaaaccacgatggctgctgccatcgctgtcaggctggcggatatgggatttgatgtccatctcaccacctcagatcctgctgcacacctgagtacaacgctgaatggcagcctcaaaaatctgcaggtcagccgaatcaaccctcacgatgaaactgaacgctatcgtcagcatgttcttgagacgaaaggcagggatctggatgaggtagggaaacggctgctagaggaggatttatgttctccttgcacagaagagattgcggtgttccaggcgttttcacgcgtaatccgtgaagcaggcaaacggtttgtggtcatggatacggcacctaccggccatacgttattactgcttgatgctaccggggcttatcaccgtgagattgccaggaagatgggggataaaggtcattttaccactccgatgatgcagcttcaggacccggaacgtaccaaagtcctgctggtcactctgcctgaaactacacctgtactggaagcggcaaacctgcagtccgatcttgagcgtgcggggattcatccctggggctggattatcaataacagcctttcgattgcacagacgcattcaccactactttgccagcgcgcccgacaagagtttcctcaaatcgaggctgtgaagaaccaacatgcaagccgcattgcgttagtaccggttatggctgctgaacccactggcatcgagaaactcagagagctggccgtttaa

SEQ ID NO: 94042 - DNA, 363 bp, Enterobacter aerogenes
atgaaaacgttaacggtgtttgatccggcgatgtgctgcagtaccggcgtttgtggttcagatgtcgatcaggttttggtcgatttttctgctgatgtgcaatggctgaaagggcgtggggtccagatcgaacgttacaacctggcgcagcagcctatgagcttcgttcagaatgagaaagcgaaagcattccttgaagcttctggagccgaagggcttccactgctgttactcgatggtgaaacggtaatggccgggcgatacccaaaacgcactgaactggctcgctggtttggtgtaccgctggaaaaggtgggtttagcttccaccagttgctgtggtggtaaaacttcctgttgttga

SEQ ID NO: 94043 - DNA, 351 bp, Enterobacter aerogenes
atgaaaatcatagcattacaactcttcaaaaacctctccgatgaaacccgtttgggcatcgtgttgctgcttagagagatgggagagctgtgcgtgtgcgacctttgcactgcgctagaacagtcacagcccaagatctcccgccatctggcaatgctccgggaaagcggtctattgctggatcgcaagcaggggaaatgggttcattaccgcttatctccgcatattccttcctgggctgctcaggtgattgagcaggcctggttaagccaacaggacgacgtacaggccatcgcccgtaagctggcaccagccaactgctctggcagcggtaaggctgtttgtatctaa

SEQ ID NO: 94044 - DNA, 1701 bp, Enterobacter aerogenes
ttggaaatatcatctctgaaactcaaaggttttagaaactttaaagatgcacacatcaattttaactcaaatactctggtcatcggtgccaatgatgttggcaaaagtaatatgttgcattcgctaagaatgctattagataaaagtatatcagattcagaaattgaaccaaatgaacttgactttcatttagaaaatggaaaatcatgtgaagaatttgaaattatcattcattttaaagatatcaatgaagatgcagtactttcaattttgaaagggaatgtcagtgactcaggtgaatcgttcattaagtatattgcacaaaaatccgatctcagctataaactttttattggtgagtctttagagtctttacaagaaatcaactctcgctattatcttaaattcgttaatttaaaatatattcaatcacaacgagatttagagaggtttattcgtaaagaaaaaagacaactattaaaaatcgcacagcaatcattgaactctgaagaaagagaagaagatgacgatttgttaggagagataagtatagatttacagtctattaatgataaaatatctcaacttatatatgtagaaagagctacaaaagatgtcaatgatgagctaaaaaaacttgcgcatcattactcagagtattctgtgcaactagatactggggcaatcggaataaatgactttattgacaacctacaacttggagctaatacaaatggttctaatgttatgcttggaggagacgggcgaaacaatcaaatattattagcattatggaaagcgaaaagtattaaggaacatgatatcgagaacgaggttatcttctatgttatcgaagaacctgaagcacacctacatcctcaccaacaaagaaaactagctgattatttgatatcagaacttccaggtcaaacgatcatttcatcccactcaccacaaatagctgtaaactttgaaccaggctcagtaataaggttgcttgaccgtgctggacacacagtagccgcaagcgaagggtgttctaaagatatttcagatggctgggaaggaatgagctatcgaatgagtatattgccagcagaatcgtttttttcaaatggagttttcttaatcgaaggaccatcagaagttttattctaccattctttagccgaaaatttaaacattgatcttgattatttaaatatttcactggtttcagtggacggaatatcatttaaaatttacgtagcgatactagatgctttagagatcccatgggtaatgcgaacggataacgatatatctaaaattaaagatcaagacaagtggcaatattcaggtataaaccgatgtttagatatagccggttttgaaaagtttgaacatagcgacatacaaatagtatccaaagatactctgaccagcggtgattggaaaacagtttctgaaaaaataaataaacgcggggtatatttatccaaagttgatttagaaactgatctggtaggagaattaagcgcaccaattttaaacgctttaggtaagaaaaatgaccaaggtgtgatagagtacttacaaaagaaaaaagcattaagaatgcgtgaacttcttaaagatataaaaacagaccttcacaaacttaatgccggtgaattagttaaaccgctaaaccatcttgtaaaaataattagaggtgaatga

SEQ ID NO: 94045 - DNA, 498 bp, Enterobacter aerogenes
atgaatatatggctatatcttgctttgatataccgcttcgcagcagatgattcattaattatttttaatgctaaggccgagaatgaccccatccaaagtattccctcatcgtatagttttttatatccagagtcctcattgatattaataactgatggtgtgccagcaaaattgctttctatgaaatggttatatggagattccaatttctttaagactttgcattctgttggtgttcctccccatacccttgaaagaaatggaataattatttcctttaagcaaaaactatcaatagtaccaaagaaactatgttttacattgtgtccttcagccttgcatctacgttccagttcggaacttgctttctttgtgaatgtaattgcaatgacccctttatgctctggaaggcagtcggtaatatttctgattttttcttttataaccgtagtcttaccgcttcccggacatgctgttattaccatgcttccagtgtag

SEQ ID NO: 94046 - DNA, 750 bp, Enterobacter aerogenes
atgactgcaaaaattgagcacacttcctacacagctaaaaacggttatacgtggcgtaagcgctacgtaggtagcaccatgagcattgcccttttgaccaaagatcacaacacagcagtaagacgttctaccttgctcaccatgaagttcatcgaatacgccgcgcatgaatggggctttgctgcgatggctgagacgctcaagaaatatcgtgacaccatgactacagcagacaagatgaaccagctacgagccaccttagcggctacaggatacgatctgaataatccggctatgccgatcccggcagtggcgcaagtatcagcggtggctttgcacgttgctgaacaggcacaagcggctaacactaaacacggctttgaagaagcaaaacaggcatggatagacgctaacctatcagactggcggcctaagaccttaaacggctttaagaatagctctaacaagctgatggcctatcttgctactaatggcgtgatgtacgtagaggatgtgacgaaagatcacgtaagaggctttaagcaataccttgatgattcagactttgcaccgggaagtaagaagagctactacaataaaaatcagcagtggtttaattacatggtgaacgataaagaatggattgaaaagaatccgtttaatgggcttgcattcaaaagcgctgaagtgatcaacatcaaaacgccaatgaatcacaatgactttgagcatgtgtttaacctgctttga

SEQ ID NO: 94047 - DNA, 294 bp, Enterobacter aerogenes
atgagcatgttggttgttgtgacagaaaacgtacctcctcgtctgcgggggcggcttgccatctggttgctggaggttcgtgctggagtctacgttggcgatacttcaaagcggatccgggaaatgatttggcaacaggtgatacagctcagtgatggcggaaatgtcgtgatggcttgggcgacgaatagtgaatcaggttttgagtttcaaacctggggagagaaccgccgtatgccggtagatttggatggcttgcgactggtttcatttcttcccattgaaaatcagtga

SEQ ID NO: 94048 - DNA, 918 bp, Enterobacter aerogenes
atgagttggcttccgctgaatcccattccgttgaaagatcgtgtttcaatgatatttctccagtacggacagatagatgttatcgacggggcgtttgtgcttatcgataaaacaggtgtgcgtacccatattcctgtcgggtcagtggcctgcattatgcttgaaccagggactcgggtttcccatgctgctgtgcggctagctgctacggtgggaacgttgctggtgtgggtgggggaagctggcgttcgcgtttatgcttcaggccagccgggcggagcgcggtcggacaaattgctttatcaggcgaaacttgcactagatgaggatttacgtctgaaggtggtgcgtaaaatgtttgaattgcggtttggcgaaccagcgccgagccgtcgttctgttgaacaattgcgtggtattgaaggtagtcgtgtgcgggcaacctacgcactgctggcaaagcaatatggtgtgaagtggcatgggcgccgctacgatccaaaggattgggagaaaggtgatgttattaatcaatgtatcagctcggcgactgcttgcctgtacggcgtgacggaggcggcggtattggctgccgggtatgcacctgcgattggttttgttcataccgggaagccgctttcttttgtctatgacatcgctgatattatcaaatttgatactgtagtaccgaaagcgtttgaaattgcgcgaggtaacccttccgaacccgatcgtgaggtacgacttgcctgccgggatatcttccgcaccgggaaaacgctggcgaaattgattccgcttattgaagatgttcttgctgcaggcgaaattctgcctcctctgccccctgaagatgcacaacctgttgcgatcccacttcccgtctctttgggagatatcggccatcggagcaactga

SEQ ID NO: 94049 - DNA, 705 bp, Enterobacter aerogenes
atgtatttatctcgtatccagcttcggttcaataatctacggccggagatgttgaaaaagtgggattcagcccgtccttatgctagccatcagtggctatggcagctctttccggagcaggaaacgcgccagtttctttttcgcgaagagccgcacggcggtttttttatgctttcagcgatacctccattgactcagcattcactgtttctcattgagaccaagccatttaatccgcaactgataaatggccttgagcttgattttcagttacgcgctaatccggtgattacccgtaatggcaaacgtagtgatgtgatgatgaatgcgaagtatcaggcaaaagagaatgatgtggcgcaagaacggtggtgggagcttcaacagcaggcggcgcagacctggctggaaaagcaagggcagcagcatggtttccgtttgcttgaaccggagcctgatgatttcgctcaatggactggtgcagaatacagtgaaatgcaggcgcattgtggatgtgtgcaagcgtaccagcagcatcgttttgtacgtaacgaccaggaaaagccgattgctttcagtagcgttgattttagcggaacgctctgtatcaccgatgcatcattgtttgaacaggcgctattttctggtctaggtaaaagtaaagctcttggctgtgggatgctgatggtgaagaggaaacgctaa

SEQ ID NO: 94050 - DNA, 726 bp, Enterobacter aerogenes
atgaaggaatatctggttttccagctttatgcgccgctggcatcgtggggagaagaggcttctggtgagatccgccactctgcgacagttcctacacgatccgctttgttggggctacttgccgctgcactggggattcgtcgtgacgaagaagaacggctgaataactttaatcagcattatcatctggcggtacatgcactggcctcacaagatcgctggctgcgggattatcatacggttagcgcgccgcgagaaaataaaaagtatcgctactacacgcgtcgggatgaacttaccctcgcgccggatgaagtgagtacgcttatctcgcagcgggaatatcgttgcgacggctactggcatgttgcattaagcacaacgcccgattcgccgtatacgcttactaccctgcgcgatgcgttattgacgccacatttcccgctttatctcgggcgaaaatcctgtcctctggcgttaccgttggcgccccgcttaatggctggcaccttaaaagaggtatttacccaagccgtggaagacatctccgccgtagaattaagtgagtttactttggatgagggcgtatgctactgggatgaccctgacgaggcgagtctggttcggcagcaaaaacagcatagtaataatcaacctgttagccgtcagcgctggcagtttggcggctatacactgtttagcggcttgctgcaagggagggcataa

SEQ ID NO: 94051 - DNA, 1056 bp, Enterobacter aerogenes
atgaccacttttattcaactgcatttattaaccgcctatgcgcccgctaacctgaaccgtgatgaatccggcagaccgaaaacggcgtatatggggggggtagaacgccttcgcgtatcatcgcaaagcctgaagcgtgcctggcgcgtatcggaaacgtttgaaggtgcgatggatgggtttatgggtaagcgtacccgccgaattggcgtggactatgtttaccgtccgatgattgccgctggggttattggtaaaacagcgaaaagcgcagcggagaaaattgctgcacaattcggcaaactgaaaaatgacaaaaacgcctccgatgaaaagaatctcgaaattgagcagatcgttcatgtcagtaatcatgaaattagtttgatcaagcatctggttgacacgctgattgccgataaacgcgaaccgaatgatgaagaagtaaaattattgcgaaaagaacagcgtagcgtggatatggcgctgtttggccgcatgctggcgtcatcgccggaattcaacgtcgaggctgcttgccaggtgtcccacgcgctgggtgtcagcgctgtgaccgttgagtcagatttcttcaccgccgttgacgacctgaataataaagaagacgctggttctggtcatatgggtgaacagggttttgcctccgcgcttttctatacttatgtctgtatcagccgcgatctgctggtggaaaatcttagtggcaatgacgatctggccaaacgcgctatcgccgcgcttaccgaaacggcattaacggtctctccgaccgggaagcaaaacagcttcgcttctcgcgcctacgccatctatgcgctggcggaaatcggccaaaaacaaccgcgttctctggcggcggcgtttttccagccagtgcgcgataccgatcaaattcctgcggcaattatacgtttgaaaaagcagcgtgagagcttcgatagcgtatatgggaattgtgttgacgattatcgggaactgaacgttcaggaaggtactggctccatggcggaattactggcctttgtcagtcagtaa

SEQ ID NO: 94052 - DNA, 603 bp, Enterobacter aerogenes
atgctgaatagcaatacagcggcgttatgcagaattctcaatcctgatgcacagaaagcgctgcttgactggtttgcaacgttgtcggaacgttatgagcgtaaggacgataaacggatcaacggtcgtgcctggcgggcggagttgaaaagaatggagccgccttatggcgtgatgatgtgtgaggggtatgacgctctccgtcaggcattgcttaaacatatgcgactacaacctcttgatgagatggcgctagcgctgtttgtcagcgtcgctgtacatattaaaaatcataaggaaaaaatcagttttgccgcacaactgggggaaaagcttaacggttctacgtcatgcgtttctgctctgcgttttgaacgtttacaaaaagcgtccgacccggaaacgttttgctcgttgttgattcaggcggtgaaaattcgcggtacggatggtgttaacgtcctgtcactggccgacggcattatcttatggatggaagagtggcaacggcgcgaaaatcatcagccggaatcccgtaatccctttgaacgaaatcgtacccgttgggcgaacgaatacctttccacatcgcgtggcaaataa

SEQ ID NO: 94053 - DNA, 1542 bp, Enterobacter aerogenes
atggatttaattacggaaaaatggcttcccgtcatattctcaagcggtgaaaaaacgaggatctcattactcgatcttctggataatcgtattcaggaccttgcatatccccgggccgattttcagggggcggcatggcaaatgctaattggtattttacagtgtactgtcgcaccggaagataaagaggattggggggatatctggcaggatggtatcgattctgaaaactggatatcggcgttacagactctatctttcgctctacagttcggcgagcaaaagccttccttcctgcaaagttacgatcccctcgatagcgattatggttctatatccgggctactggttgacgcgcctggcggtaataccctaaagctcaataaagatcattttgtaaaacgcggtaaggtagagcaaatctgcccctactgtgcggcaatagcgctgtttgcgattcaaactaactctcccgctggtggggcgggctaccgggtagggatgcgcggcggcggtccgctgactacgctggtggtgccgcaggaagaagataaattcccactctggaaaaaactctggctcaatgtgttgccgcaggaaggtatgccggcaactgaacagtatccgctcatttttccttggattgcgccgaccattacgagtgaaccaggaaaatctgggggtattgttacccctgaaaatgctcatccgttgcaagcgtattggggaatgcctcggcgtattgaactggatttcactcatactgtggcgggtatctgcgatttgtgtggggagcatcatgaagcgctgttgctgcaaatgcgcagcaaaaactatggcgttcagtatgacagctggcggcatcctttctctccatatcggcaggtgctaaaagatccttccgcgccctggctggcgttaaaagggcaacctggtgggctcagctataaagactggttggggcttatgctcaatcgcgaggataagttcaacaaaatgcagcccgcgaaggtagttcgcactgctggtcagcggaacaaaatgagtttgtggtgctttgcatgggatatggataacgccaaagcccgctgttggtatcagcaccgtatcccgttaattagcgttccctatgaagagcaatttctcgatgtgcttaacaaagtgctggtgctggcttcagaggcgctatcgcagctgaggaatgcgctaaaaagcgccaaatttgatagcccaaaagaagccaaaatggatttcagtatggtggacatcgccttctggcaggaaaccgagcctgctttccggacgctacaggaggctctggttgttgatccgctgcgtcggaatccgctgactgggagtgctgtgcgccagtgggagcgagaattaatgctctatttatttcacgtttttgatcgtgatgccctgaccgatcccgatagccctaatgatgttctgctgcgccaactgacggccagacaggactttgccagcagctatcttaaacataaagcgcgcaaggatgtgttggcgctggtcgaataa

SEQ ID NO: 94054 - DNA, 2694 bp, Enterobacter aerogenes
atgacgcagatagaatatctggactacctccggtattgggggaaaaccaataaatcaaacaaagatataacccccccttatcatttactggcataccattgcctcgatgttgccgcatgcggctatcacataattaaaaacaatatatttggttctaaagatatattacaaaaatgtggcattacgggagtagatgccgaacactggataatctggctccttgccagccacgatatcggaaagttcgccaggggatttcaaaaatacgccgaattccctgactctcccttggtttctcctattagcggaatttccgcatttgagcgacatgattccttaggattctatctgtggggcaaattgtttgaagcatggagtgaaggccataatgaaattatcgcaggcattgaacctgaaaatcgcgccagatttgaaagcgccttaaatgtctggatgcttattagcaccgggcaccatggtattcctcccgatacgttaaaaaatagtagcgccctggcattcgctgaagaagatattattgccgcaacgcattatctggaaacattaagccagttattcccctttaccctcccgcaggaatggaaggctaaagcaggtagaaagtgtttaaagcaaaatagttggttttttgccggacttaccacccttgctgactggatgggctcagatgagacacagtttccattcctcagcagcgcccttcctctggaagagtattggccccatgcctgtgaaaaagcccagaaggctatcttaaaaattccaccattatcaaagcatagccattatcaggatcaccaagcgctgtttccattcattcacaaactgaccccacttcaaaagcgagcaagcacgctggatatttcagcgtcaggcccacagttggtgattctggaagacgttaccggagcaggcaaaacggaagcagcgttgatcctgactcaccgcctgatgtcagctaataaaggccacggtctctacgttggactgccgacaatggcaaccgcaaacgccatgtataagcgtctggctgcggcctaccgcgcactatttgccgatgattccagaccatcactcatcctggcgcacggtgggcgagaaatgtcggacgccttccgacactcaatctggcaaccagcagagagtacggtggaagattacgctcgtgacgatggcaatgcggccagcgagtgccatgcctggtttgcagattcgcgcaaaaaagcgctgctggcggaagttggcgtgggtactctggatcagctcttaatggcggtaatgccttttcgccaccagtctctccgtctgttggggatgcacggcaaaattctgctactggatgaagttcacgcctacgatggctatatggtgaaattactggaagggttactgcgatttcatgcagcccagggcggtagcgccattattctgagcgccactcttcccatcaacttaagagaaaaattactcaacgccttcaatgatggagccggttttgcagcaacggaagctaacgaggatgcgggctatccgtggctaagccatctctcttccaccggcttgttggaacaaccgctaaccacgcgccccgaagtccagcgtacagtaaccattaactggatacagcagcgccaggaagcactagatattattcatcgagttgtcgccgccgggcagtgcgtttgttggatccgtaatacggttgatgatgcacgggaaatttatcagcagttattacatgaaggaattattccaaagcagaatttattactcttccacagccgcttcgcctttgccgaacggattgccattgaagataagacgctcaattggttcggtagcaacgcccccgcatcagaacgacggggtaaagttttgatcgctacacaggtcgttgagcagagcctcgatcttgactttgactggatgatcagcgacttagcgcctattgatttattaatccagcgcgctggtcgcctgcaacgtcatatccgcgatgcacatggacaacgcaaatcttcactccccgatggtcggcaaccgccagtattgcatatactggccccggaatggcaagcgcacgcagagtacggttggctggagctgaaaggaactggctttgtttattccgaccatgcatgcttgtggcgcactcaggcactgctgcgtcagtatggtgagatcagtatgccggaaaatgccaggacattggttgatggcgtctacgaacagaaaatagctgcgccagaagggctacaaacactttctgatattgcttttggcaaagtgcttagccaacgttcgattgcagcacagaatctgcttcgtcacgatctcggttacgaccgcgaagccagcgattttttatgggataaagacagagagttttctacccgcttgggtgaagagagcgtggatgtttacctggcctggctgggtgaagcaggggaattacatccagtcgtcgcagaaggcgattttcgctgggaaatgagccgattatcggtacgcatttcctggtggaggaagcagtcaggtgagttttcactgcccgatgatgaagtacttgaacagtttcgtaaaaaacatcatcgcccggcagctcaggtgatcctggtatcgccggaaggtgaagccagttattacaacaagcagacaggattgggccgataa

SEQ ID NO: 94055 - DNA, 789 bp, Enterobacter aerogenes
atgcagccaattgatccatccactgccttctctatggacttcttctcgctcaaggggaaaaccgctatcgttaccggtggtaatagcggcctggggcaggcttttgccgttgctctggcgaccgccggcgcgaatctgtttgttcccgctctgcgcgaagaacacacgcaaacccgcaaacttatcgaacagcagggcgttgagctggaattcatgctggcggatatcaccgatggcggtatgccgcagcggattatcgccgcctgctgcgaacgtttcggtaccgttgatattctggtgaacaatgccggtatttgtcagttgaataaggtgctgcgctttgggcgaacagactgggatccgatgatcgagactaacctgaccgcagcgttcgagctcagccacgaagccgcgaaaattatggttccgcggcgaagcggtaagattattaatatctgttcggtgttttcttatctcggcggcagctggtcgccggcctatgccgccaccaagcatgcgctggctggcttaaccaaagcctactgcgatgagctgggcccgcataatattcaggttaacggcatcgcgcctggctattacgaaactgccatgaccgctatcacccgcagtatcccaaaagagaaccgacgcgtacttgcgcatatacccgcaggccgttggggagaagcgcaggatttaatgggcgccgttgtgttcctcgccagccgggcttcggattacgttaacggtcatattctggcggtggatggcggctatctggtgcgctga

SEQ ID NO: 94056 - DNA, 549 bp, Enterobacter aerogenes
atgcacttttgtattaaaatattcactgcaggcattttcacgttagccagcttcagcagcggggcttcagcggctccggcttcagacgtaacaccacagatggcctatgaagatatatcccgctccttaactgagctggagcccgttaccttcccggcaaaagctgaaaaacataaacttttagtttttgttgacaatcagtgtgtttattgcagctatgttgtgaaaaatatcaaaaagtacacggatgcaggactcactatgtcgtttgtgactgtggtgccgtcatccatcaaagactcagtcatagaagatatggggagagtatggtgtgcacccgatcgccagaaaagttttcaaaatgccatggccggttttttgccagacaatgacagttcagagaaatgtaaaaatctggtgattaaacagtctgagcttgcagaccgactcggggttaccgccacgcctgcaatggttgtgctggagccgtctgtccatactttccttggtagcgtttctccggaaaaaattctcgccgaactccggtaa

SEQ ID NO: 94057 - DNA, 594 bp, Enterobacter aerogenes
gtgaatctgacagagaaatcggcacatctggcgtggtgcgccctcgtggcgctggcattagccaggcaaaacggtggcgtggtgtcaccagtacaggaaaatatctttctcacccgctggctggcgaccgctctgaggcaacgtcgtttttcgcgcgatgtcgctcccgacatcgagtggctgcttaaacagtgccgtcagctgggcgtcaatgcgcagctggccagtaagctgaattacctgtggcattcctgcaccggcgagctgtctgagcagaatgagctgttccggctgaaccatgcgctggagacagcgaaggctatgagctggaattatcgtgtgttaagcgatcgggaatggtccgaccggaatgccgtagccctgaatgccagcgtgaacggcatttatctttcgcgctccagtctcgatgctgcttttgacgacgatggtcgacagataaatcctttgatagcgcgtctgacagggaatgtgccggggctggtgaagttgtttatccgcagtgactggcaggtgctgcctgatgatgatgcttccctgacttatcagcatttgttgatagccagggaggcttag

SEQ ID NO: 94058 - DNA, 573 bp, Enterobacter aerogenes
atggcaatggtcaatgaaaatatcgtcattcgtctggcgcaagatgcagacatcccagaggtgaaacaactgctggagcgctatcacgcaaaaaatcttgcaggcgagcaacgggcgaatggatttgtcaccaccgatatgacggagcagcagttaaatgaactgcgttcagccgaaagtggtgtggtgattgcggttgatagtacatgcgacaaggtcattggcctgttgcttggtggatcgtgggaatttctcagcccctggcccatgtttaaatacatggcaagtattctcaatgaatatcactaccagggaaaaaatctggatgcggttagctcataccagtatggccccatctgtgtcgcagaagaatatcgtggccagggcgtaggcgagttgctgcttgagtatcagcgcaaggtgttcgcaccgcgttatcccgtcatcgttaccttcgtcaatgtactgaacccgcgctcgtatgcgtttcatacccgcaaccagttcgaagacgtcggtttctttaaattcaatggcaataagtaccacatgatggcattaccgacctcctga

SEQ ID NO: 94059 - DNA, 789 bp, Enterobacter aerogenes
atgttcattgagggaagcgttattgctcattaccttgttctcggggtgatcctgctggttattgcatcatttatcgcgggctatattgatgcgattgcaggcggtgctggactcgtgttaattccagcctttatcctgacaggcctaccaccccagcttgcgctgggacaggaaaaattggtgagtactataggcaccatcgccgccattaagaactttgttaaaaataagtctgttatatggcgcgttatccctgcgggattaatttctgccctggcgggagcctatgtgggcgcgaaggtgatattattgttgcccgtggagacattatcgatcgtcatcgttgtgctattaccggttggtttactcgcagcaacgatcaagggaaaaattaaagagtccgcagacgactccgccaggactaacttcctggcaatctttgtagtgtgttttatcgttggtttttatgatggtttttttggccccgggaccggtagccttttcatcattgcattaacggttattaataagtttggactgctgcaggcatccgcgaccagcaaaatatttaattttgcatccaatataggggcgtttgttgcctttgcgattgccggtaagatggcttatttaatcggcattccgatgattatggccagcctggcaggtaatcacatcggcagtctgcatgccattaaaaccaatggtgaaatcattcgcaaagttctgtttgtcaccgtgggtgcgatgatggtgacgctttcagtaaaatattttacaggagtataa

SEQ ID NO: 94060 - DNA, 921 bp, Enterobacter aerogenes
atgtttatgaagaatggaattatactatcaatcgcagaccgaatcaaagacacgcttcccataccaacagacgaattcaggaaaaggcttgaagaggactgttatgtaatatggaaattgccacaatttgatgcacaagaaatcacacaaacccccgttattccgtcttatgctgattatgtagaatcaaaaaatgcagagttacatggagcttatctctctgcacattttcaggccggtttatggcctgtggtatatcaaggagaaaatgacggacatctaataaggcatgtctgcccgatgctccaagcagaagagaaaataagttctcagggggctaagtatgacttttacccgcatgtcgataatcccgatctgtacattaccggtgagacgccgtctaacagacttggcggctctcctgacactctgagtttgttgtgtctcaggaaagaggaaggcgttcacaccagtctgttaaaactggatcagattctggataaactttctgataaggatattgctattcttgccagcccctcatttaaaattaagcgaccagccagttttacagagggagccagtattgagggagtgccgattattgttaaagataaaggcgtctggtattcgcgatttgactggcataacactcagggtatgaccctggaggccgaaaccgtgctggaaaaaatgcgatttatcactctggaacacgacctgtggtttaatgttccgctggagcccggagatgctgtgacttttttaaaccaaaggacaatgcataccagaaatgctttcgaacctcgttttgatggcacggacaggtggttattgcgggtttttgctatgaaacacagacccaccgatatgcagcttgtcgattcttcactttgtctccaccacctgcgcacactataa

SEQ ID NO: 94061 - DNA, 324 bp, Enterobacter aerogenes
atggacacggccgcccaggcggagcgtctcggtgatgccaacccactggtggtgatgaactggttctccggccacgatgtcccggattttgagcaggccgaccgtctggccacttacctgggctgttccgttcgctggctgaaattcggcgagggacgcccgtccgcgttcggttcgcagcggcgcctcaacagccacggtagcgcgtatgacgatgcgcacgccctgctgactccggacgccgccagcaatccggtctataaggtcagcctcatccgcgatgtctccccggaggggagcattcaacgtgccggtctgggatga

SEQ ID NO: 94062 - DNA, 618 bp, Enterobacter aerogenes
atgaaatcattcatctgcagtacggcagatcggcctttacccggacgcccccgggtgtttgatgaagccaattttcttgatggagctataacgctttttcgccgtcacggttttagcggtgtcagtatcagtgacataacagctgaaacaggcctcaccactggcagtatttataaggcttataaggacaaaaaaggcatatatgttaaagctctgcaacgttatgtattacttcgtgaagagagcctgaaagtccgtctcgagaaagcttcagatggaagagaaaaaatcgcagttctgctgaaggattatgctgaattcagtcagggaagagacggaaaactgggttgtatggtcgtttcaggtatcacaaacattgaccaccttggtacggtcgctgatattttaaaaacacagctattaaagcgtcggagtgctcttgaggaccttatcgaacagggaaaacaggatggttcgattgccactaccactaatgtaaccgctgcagccgaaataattctggcattactacaggggatgcgtgtaaccggaaagatttcagtcctgaccggcaatattgatgattttatagctcaggcactaaagatactggagtaa

SEQ ID NO: 94063 - DNA, 147 bp, Enterobacter aerogenes
atgatggaactgcaacatcaacgactgatggcgctcgccgggcagttgcaactggaaagccttataagcgccgcgcctgcgctgtcacaacagcgcagtagaccaggaatggagttatatggacttcctggagcatctgcttcatga

SEQ ID NO: 94064 - DNA, 1260 bp, Enterobacter aerogenes
atgatttctggcgcaccatctcaggattcgctgttaccggacaaccgccacgcggctgattaccaacaattacgcgagcggctcatacaggaactgaatttaacgccgcagcagttacatgaagagagcaacctgatccaggccggcctggattccataagattgatgagatggttacactggtttcgtaaaaatggctaccgccttacccttcgcgagctgtatgccgcccctacgctggcggcatggaaccagttaatgctcagccggtcgcctgagaacgcggaagaagaaacgccgcccgacgaatcatcctggccgaacatgaccgaaagtacccccttcccattgacgccagtacagcacgcctacctgacgggtcgcatgccggggcagacgcttggcggcgtgggttgccacctgtatcaggagtttgaaggccattgtctgacggcgtcgcagctggagcaggccatcacgaccttgctgcaacgccacccaatgctgcatatcgcctttcgccccgacgggcagcaggtctggctaccgcaaccttactggaacggcgtcaccgttcatgatttacgccataacgacgctgaaagccgccaggcctatctggacgcactgcgccagcgcctgagccaccgtcttttacgcgtggaaatcggcgaaacgtttgattttcagctgacgctcttgccggacaatcgccaccgcctccatgtcaatattgacctgctgattatggatgcctccagctttacgcttttcttcgatgagcttaacgccctgctggccggagaatcgctgccggctatcgacacccgctatgatttccgctcgtatttgctgcaccagcagaagatcaatcaaccactgagagacgacgcgcgcgcttactggctggcgaaagcatcgacgcttccccccgcgcccgtcttgccgctggcctgcgaacccgccacgctacgtgaagtccgtaatactcgacgccgcatgattgtcccggcaacacgctggcacgcctttagcaaccgggccggcgagtatggcgtgacgccgacaatggcgctggcgacctgtttttctgccgtgctggctcgctggggcggcctgacgcgtctgctgcttaacatcaccttattcgaccgccagccgctgcacccggctggttggcgcgatgcttgccgacttcaccaatattcttctgctggataccgcctgcgatggcgataccgtcagcaacctggcgcgtaa

SEQ ID NO: 94065 - DNA, 657 bp, Enterobacter aerogenes
atgtcccttaccgacgcaaaaatccgcaccctcaagccttctgataaaccctttaaagtctccgattctcacggtctgtatctgctggtcaagccgggtggctcccgccactggtatctcaaataccgtattagcggtaaagaatcccgcatttcgctgggtgcctatccagccatctccctgtctgatgcgcgacagcaacgtgaaggtatccgtaaaatgctggcgctgaatatcaacccggtacagcagcgggctgctgaacgtggctcacgaacaccggagaaagtttttaaaaacgtggcgctggcgtggcataaaagtaacaggaaatggtcgcagaacaccgccgaccgtctgcttgccagcctgaacaatcacatctttccggtcatcgggaacctacctgtatcagaacttaaaccccgtaatttcattgacctgctgaaagggatcgaggaaaaaggtctgctggaggttgcgtcccgcacacggcagcacctgagtaacataatgcgccatgcggtccatcaggagttaatcgatacgaaccctgcagcaaaccttggcggcgtgaccacacctcctgtcagacggcactatcctgccctgccctgccctgccctgccctgccctgccgctggagcggctgcctga

SEQ ID NO: 94066 - DNA, 276 bp, Enterobacter aerogenes
gtgaacaatgcgccgatcgccttcgtcctgcaggccattctcacgtctacgcgcaagcggatcctggcggtaaaagtggcaaaaacgctgccacagggccgggaagcgaggcgcgaacagttcaggcgcactgaaaaaatattccgagaggacagcaaagcactctgcgggatcggtggcggcataggcgtcaatactggcggcgctttcgccgaccagatctatctggttatggttgatttggtcattggttggctccttctgctgcccggttaa

SEQ ID NO: 94067 - DNA, 171 bp, Enterobacter aerogenes
gtggtcaaaggtcgggttaagaaggttcacggctggcctggcaactgggagtgggttagccgggacagcaagccgtttcaggctaacaaacaggcggaatgcgattacatgtttagcgcgctccgtcgcatggacttacgcggccacctcaagaagtatacgacggcgtga

SEQ ID NO: 94068 - DNA, 690 bp, Enterobacter aerogenes
atgaagaacaaagtggaaataaactcctttagctttgttttagagccatcatacaaaaaagatggctcccttcattcatgggagattttaacaaaaaatatatttaaaaagaatactaatgattaccaagctaatgaaatgccgttttctttcgatgcgttaaatgagaaggaaataattgatgcgtttaacaagcaactattgacaattgaaaagcttgaaggttttcacttaaagtttccattgctatccttaaacgtagatagcctcataagcgattatatattgaccgacaaatatgtaagtgagcacataaaaagaaaaaataatattgctttagaaattaatgaaaacttccatgaatttaagtccttgaattgtatgtctgatttgaaaaaactttctaggctggggcctttgtggttggatgatttcggaggagggttaacgagtttaaaagtcattgagttatttaaatttgaatgtgtaaaaatagataaggattatttctgggaaattcaaaacaagaaaaacctcatggaaataataaataaaataaaggtgtattgtaattttttaatagtggaaggtgttgaaactatagagcaaaaaaatatagttttttctgttaatgatagtgcttgccaaggacgattatggaaaaaaaactaccacaacattgagtgttaa

SEQ ID NO: 94069 - DNA, 246 bp, Enterobacter aerogenes
atgagcctgctgtcaccctttgacgtggtgatatggatgacggatggctggccgctgtatgaatcccgcctgaagggaaagctgcacgtaatcagcaagcgatatacacagcgaattgagcggcataacctgaatctgaggcagcatctggcaaggctgggacggaagtcgctgtcgttctcaaaatcggtggagctgcatgataaagtcatcgggcattatctgaacataaaacactatcaataa

SEQ ID NO: 94070 - DNA, 1986 bp, Enterobacter aerogenes
atgaattttgacggagtgggtttcttaaggtgggtgtacgatcatgcctatccggggcttacttatctgtttcttttgatactggccgtgctaatacagttcacattcagcggtcatgtaactaagaaatcagacctaagtgtaatggatcacattattagttatctgcgcgtaaagttactcgtattttatgttttgattgttctaatgttcaatggctttgtacttcttgtttcgctgaacgttttcggtaaagacgatggtttagagtacttaggattgatatacggaaatgtgttaaaccaagtattaaacgtcagttccgtcatatcattaatcactgtattcttagttccatatttaattcatctagtttataggcgatttataacacctagaatttctgcttggaaacgtaaatatagggtatcgcaaactggagatagccttagtgatattcgcgttgaaaaggataaatacgcaagtaagacctttgacaatcggaaatactataaagatgattttgtatttatgggactcaatccagatgatgaaccaatatatgtatccgatgaagagtttaaatctaaaaatttaaaaatactcggtgcaactcaaacaggaaaaggtgtaattcaacaagttcttattgaccaagcaatctggaaaggttggggtgtttggttttttgaccagaaaccagatgattttatctattcagtaatggtgcaatcttgcaaggattggaataaaccactgccagttattttagatttgactggtgaaagcattggttcatatgcaccattcgaacatggattattaagagaacgcttacagagatttaataaggtttttggtttatccaatacaggtactacagcagatcattataagcaaattaaccgccagataatgacatttttgactaactattgggacggtactttacaacatctagataaacttcttaatggaaaagacaacgcggttcctgatgcaaaaaaagaatggatttttgaaaacacattaaatataagaactaaattagatgagtggaaactgcttccccatttattccctaaaaaaggtgaaggtttcaatattcaaaaggaattagagaatgcttctattgtttatataaaaggtcggcaggacgatgatttaatacgcgaagtttgtacggctttgttaattgaatggaaagattgcatcattagaaaaaaacacacgaaacatatttatgctgctcttgatgaagctaagttttgtatatctgcaactgttgcaagcgcattagcaactatcctttctaaagatgcaaacatgtctcttgcatatcaagagcgtgatgatattaaaaacgttccagaccaaacagtagataaagaagcccttaaaaatcaggttgagactaacactctaataaccctctcgtataaatgttcttttgataccgctgaatgggtcgcaaataatactggtactatcctaaaaagcacaacacgcatggagcaggttgatactgatggattcggtgccgaaaaatggactggtaatagaatgataggatcagaagaagaaaaccttatcaacacaaactctatacttagcctgaataaacgtgttggtgtattcatgaataatgaaggtttagcgcaatatctttttacaagctggataaatgtaaaagaaaaagtatcgttaccttcacgtaatgaggctatcactagacaagaaaagatcataaatcaagaggttacagaaaatcagataaatgaagaaattctttctggtaaaaaacagaacgatattgataatattgatattgaaactgtagagaaggtgcactttaaccctgaggaagatccagaatttgtgaggatgctttctgaaaaagttaagggcgtaaaacctgaaaaaaccgttaaaaatcccgtttcaggtagtgaccttatttctagtattggcaaaaaagaggactaa

SEQ ID NO: 94071 - DNA, 828 bp, Enterobacter aerogenes
atgtcagaaattagagtattaaaactgtctcaactgacgcccaataagaagcaggatcgccgcgattgggaaagccctgtagcgcgtgaacatattgaaaaattgaaaaaatctattggtatgagaatgccggatggctcgctatacggtattcgtgaacgtattgttgttaagccgggagctaatgaaaatgaatttgtcatacttaaaggtgaatcacgctggcgcgctggcagtgagctagagaaagaaataggagaagaaatagagacagagtgcgaaataaaatcatatgatgataaggttattgagcaccttgatcatgcaactgaaaactctctacgccgggatttaaatatcttcgaacgtgccttatctattaaaacagataaagataatggactgaccactgaccagataattgcagctcatggtttatctaataaaacagtagtcagtaaatatatgagcgtttttcgactcgccaagcctaagcagaaattagtccaagagtcatttattggcgatcttaaccttatcggaaaattagataaggtagccgaagatgatatgaaggagctacggcagcggcttgaaggtggtgaaacggctaaaaaagtgattaacgagctgcttaacagaagcaagcctaaacaagagaaagagcctcaatatcgcttggctttatcccgctcgcagtattcagccattttgtcactgttggatctcaatcctgaggatattgacaacccggaagaagatattgctgagttactacgaaaccgcttagaagaattgtccgacaccgaaggaactgacggacaatga

SEQ ID NO: 94072 - DNA, 591 bp, Enterobacter aerogenes
atggaaaagatagttaaaatcccgattacatttcacgatatagttaatgtgttaatgtgggatgatgattttaataaagataatgtaactagccgtgttccttgcggcaagaaaatttcttattggttagcccgagcctttacattatccaatataaaaaaatatgctgataaaagtcagtacgcattggcagtgtattacaaggaatctttacccaatacagagactacgttaaaagagttacaggatttctatttaggccaaataaaatcactaaaaaaatccctaaagaataatccaataagcgcttctcttgatttatcagctttcattaacccaacgaaaataacggttggcgttatgccctgcccccctgttctgatgttcgttcgcgtcaatattctgtgcgatgaagctcatggtgaactccgaaaattatatcagtgcggaaatataactaagagtgaatatttcaggcaaagacgggagttgttcagacctatcaaccgctttcgttcagagttcgccagtagcgttagcgaagcgggtaaactggctcgctccctgacagagaaaaaaaccggggaataa

SEQ ID NO: 94073 - DNA, 429 bp, Enterobacter aerogenes
atgaatacttccaatagcgctatccctgtaattgaatctgttgtggcctcacacagagagcgtatgcgttttcttccttcatatctgaaaacgccgcgtaatgtcatgctgtttgaggggctgctttacaccatgatggataaactatcagatgagtattgcggagggcattgggaaatgcaccacgtaaccaatggtgctttctttatgtccccaacggatcaggaaacatatcattgctcatggtcaggtaattactatgaaggtgatatgagtgcggaggccgctggaattacggcaacattgtttgccttatggcatctggttgctaagactcaggatcaaggtctttatcagttgtatgtacatcttaaggattttgcatatgagcataaagagagcggccatatattagctgctattgactaa

SEQ ID NO: 94074 - DNA, 369 bp, Enterobacter aerogenes
atgttcgataatctcgaaaaacctatctatgactttcaaacccgtcttaattgtgaatgtgtagaagcagaaattgatagttctgttattactttgcaatacaccgggcgcgattcataccagaacctcgatgcttatctaagcgaacgcagatccgttctgcaaaaactaaacctggatgattttaccgatccgaaagtttacaagcgtgcttggctttttgatcgcgttgttatccatgcttgcctgtatcctgatacacgcactgctgatgtaacattcttcatgctcaaacgtgaagctcttgttcatttagacgtggaacacgttgtattaaagtacagaaaacacttagctgataaagcataa

SEQ ID NO: 94075 - DNA, 465 bp, Enterobacter aerogenes
atgaaatttaagtttctatttttattaatagcattaccgttaagcgtactcgcagatattgaagggaaagtcgttaggattctcgatggtgataccttagacgtccttcaagaaggtaataaaataagtagaatacggcttgagggtatagatgcacctgaaaaatcacaaccttatggtcaacgctcacgacaaatgttaaccatgctgactgctaataaatgggtaaatgtaaaatcacatggcagtgatcgttatggtcgtattcttggggaggtatactctcccgatagtattaatgaaaagatggttactaccggcatggcatgggcgtaccgttatcacggaaaaccgactaatgaaaaatatgtaacattagagaataaagctcgctctgaaaaaaaagggatttggtctgatcctaaagctgttgaaccttggaaatggcgaagagctaataaataa

SEQ ID NO: 94076 - DNA, 249 bp, Enterobacter aerogenes
atgaatactgccgcttccacccgtaacagcaccaaaagaagcactaacgtatacctgacagcctcactggttgataaagcccggagtatggacatgaacctgtcggcaacactggatacccttctcgctcaagcaattgaagcaaaaaatgttgagcgtgaagaagaaaaaaaagatatgcaagccatgaaccaatttatggcaaaggctggaatgctaacagatgacgatttctttgggagtctgtaa

SEQ ID NO: 94077 - DNA, 324 bp, Enterobacter aerogenes
atgccaaagcaatttgatgtataccgcaatccatcggccaaaacgaataaactttggccgttctaccttattctccagaatgattactttgacgacttaacgacaaggattgtcgttcctctggtatcgaaaaatgatattgacctaaataagaaaagaataaatccacttgttaaaattaataaatctgatttctatgtattcttacctgcaataacatttttagaggcgaagaaaataaataataaagattttatatgcaatatagcctcatccagaaatgaaatcatttctgctcttgatgccattgttacgaacacctga

SEQ ID NO: 94078 - DNA, 192 bp, Enterobacter aerogenes
atggctgaaccctttctgaaaaaccgccgccgcttcacgtcctcgctcgacaatcatctcgtaccgctgttcgacgagctggccgccaagactcgcatccctaaaagccgactactggacgaggccataagcgatttactgctgaagcacggcgttccgcccacaaacaaggacgagaagaacgataactaa

SEQ ID NO: 94079 - DNA, 390 bp, Enterobacter aerogenes
atgttcgatcagattaccgatggagtgcattttgtaacggcactgatcttatcagtaattatttggggattatgtcttgccgttgcgtggtattaccatttcagtgaggcgcggcgttactcatggcataataactcgttggctgattttatggatctgataccaaattggttgatgaacacagttcttgttgcatggtttattgtggggacgtttcccatgctgaactatgttgccgataaagcgcagttcggtggtgttgtaggccgcgctcgcgagctaaacatgttcgatgatcgaccgtggtatggtgttggcggttatcagttcctgattgttgtggtgatcctgatagtgggatacctgattaactggtatcgaaacaagtga

SEQ ID NO: 94080 - DNA, 195 bp, Enterobacter aerogenes
atgctgcttccgttccttacaggtctttttatgttgtctggcggttttttagcgttatccataatcccaaaaccaaaccgtgctctgcgtaaactagccgtgtttgtgatgacaataggattcagcctcgcgctggcaatcactgtggcctatttcgcagttaacacgctgacatcagcaattcatcctgtttag

SEQ ID NO: 94081 - DNA, 768 bp, Enterobacter aerogenes
ttgaccacattaccccgcgaaatcttgcagaattcacgtagcgtcgcttcggtacataacgttccccctgccgtgccggtgggaatggattacacgctggcttatgccctgcgccagctcgcagccgccacgacaggatacccgcgctatctgcttgccccggaagtggccgtgttactcgatgccgttgcagacctgcgccagcgcatgttgtttgaccttatctggaacaccggcgcacggatcaatgaagcgctggccgtcaccccggaagatattgttctcgatgccgcgaggccgttcgtggtgctgcacaccctcaaacagcgccagcagccgcgccccggacggccacgcaaaaatcagccggtaaaacgggctgtaccactgctggatgaagcctttacggtaaggctgcgtgaccatctggcgacatttacacgccaccggactaaaccggtatgggggataacagacgacaccgcccggaactggatgaatatcgcactggatgaatgccagcagcacggaatacgcttctccattccggggatcacccccaaaacactgagacatagctttgctatgcatctggcgatgcatggtgcgcttcccgctacattacaggcatatatgggacaccgggattttaagagcacacaacactacctgagggtgtttgccctcgatgtggggataggccggaaccggggaatacagtttacattcccgccagatcccgcaatgctttcaatgttgacaccctaa

SEQ ID NO: 94082 - DNA, 444 bp, Enterobacter aerogenes
atgaaacatacctcaaaccccccaaccactcagggcgaagtctttactcgtaatctcatggcagaactgttagaggataccgagcatcgcagtaaagttgtcatgctccaatttcttattgaaacgttctatgaaatgcgaattactggtactaccattccagaaagtcaggaatgggggttacagcatgtaacagacaaaggcttctacctgtaccctttgataaagaaagtctatctggtcagattcgataacttctctatctcgctggataatcagcaactggggctaggcgtaacacttgacgttttgtcgctcgttgcgggtgaatcaagtgagccagcaatctatcaggcatacaaggagctgagggaatacatcctctctcatgccgatacgctagagggcgcgtatacctacgctaaactctctcactctctctaa

SEQ ID NO: 94083 - DNA, 684 bp, Enterobacter aerogenes
atgaccaaaggaatcactaaacaggggtgcgtaacaatggctatatatgcaatttcgatctcaaaaggtggggttggaaaaactacatcaggtgtacatatcattgatgaaattaatccagatgtagtgttcgatctggatttacataacagcctgagcgtaatcaacagactgcgcccggacgataaaaaatggccgatagtgaccgtttcagataaagcggaattattggcacatcttaagaaagtagatgaggaagggaaaacggctgttatcgactgcggcgggtttgatgctgatattaaccgcgttgcgatagccgttgctgacgtgataatcgttccggccaatgacgatgttactgagcagatcggtttggctaccttcgataccgttctggctgaaatctcaaagcagacgggcagagatatacaggctcacgttttgatgtgtaaaacgcaacctaaccagaaacacttcccggacatggacgacaccatgaaaaaagttcagcacatgacgttactgaacgggagactgtcataccgcaaaggccgctatgggtttacagactcactacgaaaaggaatgggagtgacacaaattaagcatggccgtagctcacaagcagggcgagaagttatcgaactggtaaaagagttacgggctttagctgaaagctga

SEQ ID NO: 94084 - DNA, 252 bp, Enterobacter aerogenes
atgaaaaataaacaatctatcttcgatgccgctctcaatattggaaatgaagcgcctctacaggttaatactgaaaagaataatgcagcaccggcacaacgtacagtgcgtacaaaaacactgaaagcgatcccaacaacatattttgacgcccatcagaagctgcgagatacgaacaaaacaaatctggatttctccaattacattatggaagcattacgcgaaaagttggaaagggaaggggggatctag

SEQ ID NO: 94085 - DNA, 162 bp, Enterobacter aerogenes
atgagtcagcatagactaaccggattaactcccggtgggaaagttgacgttctgctaggttgggacagtccaatgtcatggttttttttggtgatcgagccagaaagcgacgaacctctgtattcggggtctgacgctcagtggaacgaaaactcacgttaa

SEQ ID NO: 94086 - DNA, 909 bp, Enterobacter aerogenes
atgcccgttgactttctgaccactgagcagactgaaagctatggcagattcaccggtgaaccggatgagcttcagctggcacgatattttcaccttgatgaagcagacaaggaatttatcggaaaaagcagaggtgatcacaaccgtctgggcattgccctgcaaattggatgtgtccgttttctgggcaccttcctcaccgatatgaatcatattccttccggcgtccggcattttaccgccagacagctcgggattcgtgatatcaccgttcttacagaatacggtcagagggaaaatacccgccgtgagcatgcagcgctgatacgtcagcactatcagtatcgtgaatttgcctggccctggacatttcgccttacccgtcttttatatacccggagctggataagcaacgaacgtcctggcctgcttttcgatctggcgacagggtggcttatgcaacatcgtattattctccccggagccactacgctgacccggttgatttcagaggtaagggaaaaggcgacgttgcgcctgtggaacaaactggcactgataccgtcagccgaacagcgttcacagctggagatgctgctggggccaactgattgcagccgcctgtctttactggaatcactgaaaaagggccctgtgaccatcagtggtccggcgtttaatgaagcaattgaacgctggaaaactctgaacgattttggcctgcatgctgaaaacctgagtacactcccggctgtgcgcctgaaaaatctcgcacgttatgctggtatgacttcggtgttcaatattgccaggatgtcaccgcagaaaaggatggcggttctggttgcctttgtccttgcatgggaaacgctggcgctggatgatgcattggacgttctggggttctaa

SEQ ID NO: 94087 - DNA, 1716 bp, Enterobacter aerogenes
atgaaaacgggccagactacggcttcgagttctaccccagtcggctttcccgatgcggattcgctggctgccttgcgcggctggtacgcgggactcagctctcgcgcggccgttgaacactacctggcggcacgcaaggccgccggtcaatcagcgcgagggatgctggggcatatccgccgccagctcatcgttttcgccaacagccgccaccggccggatctggccgacgtgttccagcacgcccccgaagagcgacaggggcgcgcgggtgccgtcgaacgcgcgatccggctcttgcccacgctgccggcgccgaagccccagatcagcgacagcatcgaccagtggctgtctccgaggaccgtcagggcactgcaggcgtacggtatccacaccctctcggcgctgaccgtgcgcattccccgccggcgtggctggtggaaagccatcgagggactcggcatgacaggcgcccggcaggtcgaggctttctttgccgcacatccgcagctcaccgagcgcgcccgggccctgatcccgattattcagcccagcggcatcgtgccgtgggagcagttgcgtctgccgaacgaagtcgacggctcgcagggcaatttccgggccccgcgcaacgcttgcacgctgaatgcgaccaacgactacgaggccgtgcaggcctggctggcgctgcacgagactgtcgccacacagcgcgcctatcgcaaggaggctgcgcggctaatcctgtgggccatcgtcgaacgcggacgggcgctatcatccctgaccacggacgatgcaatcgcgtaccgggcctttgtccggcacccgaccccgcgcgagcgttgggtggggccacctcgaccacgcgattcggtggaatggcgccccttctcgggcggcttgtccgcacgctcggcagcgtatgcgctgacggtgctctcggcgctgttccggtggctcatcgagcagcgctatgtgctggccaaccctttcgccggcgtcaaggtacgcggtcacgccttgcggcccgcactggatacggcgcgaggctttaccgagggagaatggctactgctgcgcgccattgcagacggcctggaatggtcctacggctggtccgagccggcagcacaacgcctgcgcttcatgctcgacttcggctatgccacgggcctgcgcgctagcgaactggtcggcgccgtcctgggtaatgtccgcctcgacgagcacggtgaccactggctgcatttggttggcaaaggtggcaaaccaggtaaggtggccttgccgccgctcgcgtatacggcgctggaccaatacttggcacagcgtcaactgccagtcagccgggaacggtggaatccgaaaacgcccctggtgggcagtcttggggaagacggtaatgccggcatcaccggccctcacctttggtgcgtgttgcgaagattctttacgcaagccgctgaggccattgaggccgatcatccggtcgccgccgaaaagctgcgccgtgccacgcctcattggatgcgtcacagtcatgccagccatgcgttggcccggggagctcagctcaccgcggtgcgcgacaacctacgccatgcgtcgatcgccacgacgtcgatgtatttgcatggcgatgagctcgagcgcgccaggcagatgcggcaggcttttggcgctcgtcacgtcaagcgaggagtcgactga

SEQ ID NO: 94088 - DNA, 3030 bp, Enterobacter aerogenes
atgagcaagaagaacaagctactcagcgtcctatccgacgccgaacaggaggccttgtatggcctgccggagttcgatgatgcgcagcagctggaatatctggctgtgacagaaaccgagttggcgcttgccaacagccggcccagtcttcatgccaaggtctattgcctcttgcagatcggctacttcaaggccaagcatgccttcttcagtttcgactgggacgaagtcgaggacgattgcgctttcgtgctgagccgctatttccacggcgaggtgttcgaacccaaggcgatcaccaagcatgaacgctacacccagcgcgagcagatcgccaaactattcggctactggccgtggtcggccgccttcctgccgcagctcgagcagcaggccgcacggaccgtgcggcgtgacgtaacgccggggttcgtcgccgccgagctgatcgtctggctcaatgagcacaagattatccggcccggctatacgaccttgcaagagttggtcagcgaaacgctatccgccgagcgccggcgcctgggcaatctgctggagcaagcgttggacgaatctgccaaggccgcgctgagccagcttctggtccgtgatgacaccctgtcgcaactggcggcgctcaagcaggacgccaagaatttcggctggcgccagatggtccgcgagcgcgaaaagcgcgccacgctggagccgctgcacgcaatcgccaagacactgctgcctaaactcgacgtctcgcagcagaacctgctgtactacgcgagcctggcaaacttctacaccgtccacgacctgcgcaatctgaaggccgatcagacccaactctacctgctgtgctatgcctgggtacgctaccggcagctctccgacaacctggtcgatgcgatggcgtaccacatgaagcagttggaggacgaaagcagcgctggtgccaaacaatcctttgccgacgagcaggtgcgccgtcagcaggaaacgccgcgggtaggccgcctgctgtcactctacgttgatgatagcgtggccgatcccacgcccttcggcgaggtgcggcagcgcgcctacaagatcatgcctcgcgatacgctgcaaaccacggcgcagcgtatgagcgtgaagccggcgagcaagctggccttgcagtggcaggcggtggacgggctggccgaccgcatgcgccgccatcttcgtccactgtacgttgcgctcgacctctccggctccaatccagacagtccatggcttgccgcgctggcctgggccaaaggtgtttttgccaagcagcagcggctgtcgcaacggccactcgacgagtggcccgcggcgacacttccgaaacgcttgcggccgtacctgctgaccttcgacgccgacggtaaaccaaccggcctgcacgctgaccgctacgagttctggctgtaccgccagatcaggaagcgtctccaatcgggtgaactctacctcgacgacagcctgcaacaccggcacttctcagatgaactggttgagatggacaggaagatcgatgtgctcgcaaaaatggagatccccttcctgcagcaacccgtccatgcccaactcgatgcgctgactgccgaactgcgcacgcagtggctggcgttcaaccgcgagctgaaacagggcaagctgacgcacctcgaatacaacaaggacacgcagaaactgacctggcgcaagcccaagagcgagaatgagaaagcgcgcgaaaaggcattctacgagaagcttccgttctgcgacgtggccgacgtgtttcgcttcgtcaacgacgagtgcaagtttctgtcggcgttcacgcccatgcagccgcgctacgcgaagaaggtcgccgacgctgacagcctgatggcggtcatcatcgcgcaagcgatgaaccacggcaaccacgtcatggcgcgcaccagcgacatcccgtaccacgtgctggatagcggctaccagcagtacctgcgccaggcaacgctgcacgcggccaacgactgcatcagcaacgccatcgccacgctaccgatcttcccatactactcgttcgacctcgaaacgctgtacggtgccgtcgacgggcagaaattcagcgtcgaacggccgaccgtgaaggcgcgctattcgcgcaagtacttcgggcgcggcaagggcgtggtcgcctacacgctgctgtgcaaccacatcccgctcaacggctacctgatcggcgcgcacgactacgaggcccaccacgtgttcgacatctggtatcgcaacacgtcggacatcatgccgaccgcgatcaccggcgacatgcacagcgtcaacaaggccaacttcgccatcctgcattggtttggccggcggttcgagccgcgcttcaccgacctcaacgcgcaattgaaagaactctactgcgctgacgatccagcacagtatcaggcgtgcctgattcggccagtcgggaaaatcgactgcgatctcatccatcgcgagaagccgaacatcgaccggatcgtcgccacactcgggctgaaggaaatgacgcagggcacgctgatccgcaagctgtgcacctacaccacgacgaacccgacgcggcgcgcgatcttcgagttcgacaagctcatccgcagcatctacacgcttcgctacctgcgcgatccgcaactggaacgcaacgtgcaccgctcgcaaaatcgcctcgagtcctaccatcagctacgctcggccattgcccaggtcggcggtaagaaggaactgaccggtcgcaccgacattgaaatcgagatcagcaaccagtgcgcacggctgatcgccaacacgatcattttctacaactcggcaatcttgtcgcggctggtgaccaagtacgaggcggccggcaacagcaaggcgctggcactcatcacaaaaatttcgcctgcggcatggcggcacatcctgctcaacgggcactacacctttcaaagcagcggcaagacgatcgatctcgatgcgatcgtcgcaggcctggaactggagtga

SEQ ID NO: 94089 - DNA, 1026 bp, Enterobacter aerogenes; identical to SEQ ID NO: 22856

SEQ ID NO: 94090 - DNA, 780 bp, Enterobacter aerogenes; identical to SEQ ID NO: 22857

SEQ ID NO: 94091 - DNA, 882 bp, Enterobacter aerogenes
atgtcactgtatcgccgtctagttctgctgtcttgtctctcatggccgctggctggcttttctgccaccgcgctgaccaacctcgtcgcggaaccattcgctaaactcgaacaggactttggcggctccatcggtgtgtacgcgatggataccggctcaggcgcaactgtaagttaccgcgctgaggagcgcttcccactgtgcagctcattcaagggctttcttgctgccgctgtgctggctcgcagccagcagcaggccggcttgctggacacacccatccgttacggcaaaaatgcgctggttccgtggtcacccatctcggaaaaatatctgacaacaggcatgacggtggcggagctgtccgcggccgccgtgcaatacagtgataacgccgccgccaatttgttgctgaaggagttgggcggcccggccgggctgacggccttcatgcgctctatcggcgataccacgttccgtctggaccgctgggagctggagctgaactccgccatcccaggcgatgcgcgcgatacctcatcgccgcgcgccgtgacggaaagcttacaaaaactgacactgggctctgcactggctgcgccgcagcggcagcagtttgttgattggctaaagggaaacacgaccggcaaccaccgcatccgcgcggcggtgccggcagactgggcagtcggagacaaaaccggaacctgcggagtgtatggcacggcaaatgactatgccgtcgtctggcccactgggcgcgcacctattgtgttggccgtctacacccgggcgcctaacaaggatgacaagtacagcgaggccgtcatcgccgctgcggctagactcgcgctcgagggattgggcgtcaacgggcagtaa

SEQ ID NO: 94092 - DNA, 1320 bp, Enterobacter aerogenes; identical to SEQ ID NO: 22860

SEQ ID NO: 94093 - DNA, 2148 bp, Enterobacter aerogenes
atggcggaattttctggggttcccgcttacccccccgttctggacgccatgctggccgttatcatccgtgacgccagaaagattgggcagaaaaaacggctccgctcgctgaaggatctggataaatctgcattggcgctcgccagcgcatgttcgtacctgctgaaagaagaaacaccggacgaatcgattcgtgctgaggtgttcagctacatcccaaggcaaaagctggctgaaatcatcacgcttgtccgtgaaattgcccggccctcagacgataattttcatgaagaaatggtggagcagtacgggcgcgttcgtcgtttcctgccccatctgctgaataccgttaaattttcatccgcacctgccggggttaccactctgaatgcctgtgactacctcagccgggagttcagctcacggcggcagttttttgacgacgcaccaacggaaattatcagtcggtcatggaaacggctggtgattaacaaggaaaaacatatcacccgcaggggatacacgctctgctttctcagtaaactgcaggatagtctgaggcggagggatgtctacgttaccggcagtaaccggtggggagatcctcgtgcaagattactacagggtgctgactggcaggcaaaccggattaaggtttatcgttctttggggcacccgacagacccgcaggaagcaataaaatctctgggtcatcagcttgatagtcgttacagacaggttgctgcacgtctttgcgaaaatgaggctgtcgaactcgatgtttctggcccgaagccccggttgacaatttctcccctcgccagtcttgatgagccggacagtctgaaacgactgagcaaaatgatcagtgatctactccctccggtggatttaacggagttgctgctcgaaattaacgcccataccggatttgctgatgagtttttccatgccagtgaagccagtgccagagttgatgatctgcccgtcagcatcagcgccgtgctgatggctgaagcctgcaatatcggtctggaaccactgatcagatcaaatgttcctgcactgacccgacaccggctgaactggacaaaagcgaactatctgcgggctgaaactatcaccagcgctaatgccagactggttgattttcaggcaacgctgccactggcacagatatggggtggaggagaagtggcatctgcagatggaatgcgctttgttacgccagtcagaacaatcaatgccggaccgaaccgcaaatactttggtaataacagagggatcacctggtacaactttgtgtccgatcagtattccggctttcatggcatcgttataccggggacgctgagggactctatctttgtgctggaaggtcttctggaacaggagaccgggctgaatccaaccgaaattatgaccgatacagcaggtgccagcgaacttgtctttggccttttctggctgctgggataccagttttctccacgcctggctgatgccggtgcttcggttttctggcgaatggaccatgatgccgactatggcgtgctgaatgatattgccagagggcaatcagatccccgaaaaatagtccttcagtgggacgaaatgatccggaccgctggctccctgaagctgggcaaagtacaggtttcagtgctggtccgttcattgctgaaaagtgaacgtccttccggactgactcaggcaatcattgaagtggggcgcatcaacaaaacgctgtatctgcttaattatattgatgatgaagattaccgccggcgcattctgacccagcttaatcggggagaaagtcgccatgccgttgccagagccatctgtcacggtcaaaaaggtgagataagaaaacgatataccgacggtcaggaagatcaactgggcacactggggctggtcactaacgccgtcgtgttatggaacactatttatatgcaggcagccctggatcatctccgggcgcagggtgaaacactgaatgatgaagatatcgcacgcctctccccgctttgccacggacatatcaatatgctcggccattattccttcacgctggcagaactggtgaccaaaggacatctgagaccattaaaagaggcgtcagaggcagaaaacgttgcttaa

SEQ ID NO: 94094 - DNA, 288 bp, Enterobacter aerogenes
atgagactgcaagatgttgctgttattgctacccgcttccctgatgcagacttttgggtagtgcgtagaggctctttaaaatccgtgggggaaccaacctatacattcaatccagagcatataggaataaaggtattcagaacagatattgttctgcctagatatctttactactgcctgatgcacattcactcatcgggcaaatgggaacccttagccacgggtacactggagctggtaaacatccgtgtttctgatattaagcatatcgcgctaaaaccgctctaa

SEQ ID NO: 94095 - DNA, 450 bp, Enterobacter aerogenes
atgacgataacaatcgagttaccagataccaatgaacaacgcctgattttgcttcgtgatggtgtcgaacgtgggtgcaacgcactgcggaataacctaaatgctccgcgctatggatctgtgcccgatttcaacgcggccatatacggtgataaacatttactgagggagaacgagggatggcaagcaccggcaccggaacttatccgtgcgtggttcgggcaattccagacagtgttcactgagtacgacagtgaagataagctggccgcattattgggtttacacggcaaacaagccggacgccgtatacgcgctttcaaaagcggcgaaatgcctattccatacgggatctggcgacattttttggtgctaactggccgtgcgagccaagaaattattccggtattaggtatcttcgacatgacacctaaaaacggccaccaatga

SEQ ID NO: 94096 - DNA, 612 bp, Enterobacter aerogenes
atgtgttatcaccttcatattgcctcaggcacgattccggcttgttttacaaccttagcgaatgaagcgggactggcgacggtttcaaaagccggtaatctctcaatcactcgtgctacccgagcggcacacacgctggccgcgtggggattgatccagtacaagctcatttgggataaagtcaccaagcagtatttccctgctgaaatagaagtcacggaactgtttttcgattttataggtgtaggcgcggatgcgtttaaaagagcacaaaatcaacagttagcatggataaatcgcggactgttaaagaagggggaagccgcgatcagccttacagaagcacgtagacgccagaaacagcagtatctcgaaactacctggaagcgccgtaaagcctctcaggaaatgaagaaaattcagagagcggccaaggttgctgtggcgaaaaaagatgaagagctgcggcatatggttgccaagcagattcaaagtgaaatccggcagggattgcatgaaggtatcgatttagcttcggtgaaacaccttctgaataagcgcatcatgtattaccgtaccgtcgccagttctgacgaccctaacaccgcctga

SEQ ID NO: 94097 - DNA, 237 bp, Enterobacter aerogenes
atgagtaagagcgcagatagcccgagcacgatgtttattgaagtggcgctgccgttctatgcgttgatgtgtcttatgatggtaggcaggaaggaaatagaaaccctcccaacgcgatacgtcgcgcttggacaccacattgatcaggcgcttattgaacgctggcaattcgtgtttatggtgtgccggtatctgaaacgcaggattagcgttgagtacatagcaatcacgaactaa

SEQ ID NO: 94098 - DNA, 240 bp, Enterobacter aerogenes
atggggacattaacggtcaggccacagccggaacatgaagatgcactggaggccgtaggcgtgttgttgcaggaaaaacgcgcttcacagacgttactcaaatcactgatggcctacgagcaacactgtaatgagatcgcccgattgaaagcagccttgcacaaggccgagaaagagcgtgatgagtacaaaggtaaaatagagcgctttaaagctgcccagatcgcgttatttgaatag

SEQ ID NO: 94099 - DNA, 462 bp, Enterobacter aerogenes
atggcttcaagaggtgttaataaagtaattctggttggcaatttaggccaagatcctgaagtgcgttatatgccgaacggtggcgctgttgccaatatcacgttagccacgtcagaaagttggcgtgacaaacaaaccggtgagatgaaagagcagactgaatggcatcgcgtagtattattcgggaagctggccgaagtcgccggtgaatatctccgtaaaggttcacaggtgtacattgaaggccagctcagaacacgtaaatggactgatcaagctggcgtggagaaatacaccacagaagttgttgtgaacgtcggtggcactatgcagatgttaggcgggcggccacaaaacactgctcaacctgataataagagccaaccacaaccacagagtaccggagctgcgccagcagcaggaaatgaaccaccaccgtttgaagatgatataccgttctga

SEQ ID NO: 94100 - DNA, 687 bp, Enterobacter aerogenes
atgaaaaaacgtacccttttgatgatgctatttgctgtatgcggtcagactctggccgccagtgacgcggagttattatacgcttcgctttatggcgactcggcagaaccggcacaatcagttgtgccggtaagctacaacagtgagagatatggcgatgaaccccgcgcatcagctcagtggacacaagcgatgcaatcatcatggggtaaaacacgttctcttgatcaactggcgactattcagaaagaagtcgtaaaagaaattaaagcggttgtatctcatcctgtagttaatggtgttcgccgtgacattccggcagatatagccgagataattacacggtacgctgaaaaatataatatcagtgaggaattaataaaggcattgatacagcaagaatcatcattcaatcctaacgctgtaagcaaggccggtgctaaagggctgatgcaattaatgcctgtccatacggtatcaaagggtattgacccttttgatccagagcagaatataaaaactggaatgggttttctttcacatttattaaataaatatggcgatttacgcttggctcttgctgcgtacaatgccggggaaaaagcagtagataaatatggtgatgtaccaccatataaagaaactcaagactatgttaaacgcatcatggggatgcttgggggttaa

SEQ ID NO: 94101 - DNA, 192 bp, Enterobacter aerogenes
atgaaaaaaattattcttattttaactgcaattgcgctgttatcaggatgttccacgacgatgaagggaggaagcgggcagctattcgaattatcagaacggcacgtaatttatcgtgatctgacggttccagaagggcttggcaacgagccgcaacgtcagaccgtcacggctccaggtattgcgccatga

SEQ ID NO: 94102 - DNA, 537 bp, Enterobacter aerogenes
atgaaaactatgtcaattaaaaccgctgccgtactttgcttactggcgcttccactggtcacacaagccgcgcgtaatccattttctggcagcagcacaacgacgagcggctcatcagcggtaaaaccttacactgtcacggaagtgtctacgacctcaagccgcccaatgtatggctatgacgttaatgtgaacgggacatttactaatggtggctcgataccagctaacaccaaagacccgcgctaccagtttgtcgatccactgactgtatatatgcgtacagtctggccggaggatgtaaaaacggtacgtcaggctattgattatttgcttgagcctacggggtatcgcctcgttacaagctatccagctccgagagaggcggcattgctggttgataagcctattccgccgattgcgtatgttcaccgcacaatgccggttttagatgcgctgcaacttctggttggcctcgataactacgttgtagttgatcatgctcaccacctcgtttcattccagaaaaacaggtaa

SEQ ID NO: 94103 - DNA, 1374 bp, Enterobacter aerogenes
atggaagaacgtcaaacccgcattgatgaaaagccagcgacctataaaaagaaaggtcagctttatcttattgttgctgtcgggactattaccttatttctttttattaatatgatttacaacattgtaaatcataataagaaggaagacgtaaagaaagcagaaccaacagcgcaacaaaaatctgctgctgataacgatcctgatcgttttcagaagctgcttaacaatcgtgagaagtctctggcacagggagataaatcctcagaacccaagaaaagcccgtttgatgtatcgctccctaaaacttcatcggcaagtgccagcggtgctactggagaaggtagtaccggtacaggcgatcgcaagaaagatttaattggcgatgtagaagcccgctttaaggcgcaggaagttgaacgtgcgcttaaagcaaggcagacacgatatgccgactccggtgaagctatctctcgtcctgctagttctatgggtacaagcagcacatcctctctttctggcgggaaaaataataatgcccagcgcattgctgaattagaccagcaacgcagcgccttacaaagccgtatatccatgatagaggctcagggggttgatactggcgctcaggggcttgccgcagcgaaagctgatctggctgcacaacagaagattgcagggggggcagttggcggcggtgattttggcggtagcagcacagcgtccaaagttcccagcggggtagttggttatccggcagacaatgaatatcaggccagtgtcgaaggtaaagaaaaattaccggttggcgctgaaattaacgctattaccacgtacaccgctatttctgattataccggtggaacaatgaaagcaatgattacgcatgatgtttatgacgccactaactcctatattttggctcctaagggtagccagttaaccattaaagcaatccgcgcatccggggttaatgaagttatccagaaccgccttgcttttaccgttcaatggttagttctgccagatggaaaccgcattgattttcgtaaggccagcgttcttgatcgcatgggaaccccggcagttgagggtgatgaggtggatcgccatcttgtcgctcaaataatgggtgttgctgcgtatgcattggttggcactaaaaccagctatgaaggctccggtgatggtaacgagagtttcgccggtaattttggcgaaggggcgcgtaatcaggcatccggtatcgctcaaaaatatctgcaaattgtacctactgtaacgcttcatgccggtgcgccaattcgcatcattacagaagatgaaatgtttattaaaccgtggaaagttctctatgaaaactatgtcaattaa

SEQ ID NO: 94104 - DNA, 834 bp, Enterobacter aerogenes
atgaaactgaaaaaaacattttcccttttagctgttaccgctgtttttgcctattcgagcgcagaagccgcacaatgccgtattgttagctggaaagaaaatatggtgttgaaagtcaattcagccttgtacctcggtacacgcgtccagttaccagaaggtacgcagattgttacctctgaacccaagaactctaaccttctttgggatgttgacggggcagcaaatcaggttctgatccgtcccacatcggcagaaaatggcggtgaaaagacaatggcaaccgtctttctcacgaacggccaagcactggacatagaagcaactcgcgtacctgcctctcagaatatggcatgtgtagtcataaaaggtggtagcggtggcatattgagccgtactgaccgtagcgctatcagctcttattctgcggcgggtatggctgatgctggcgcaatgagaagtcagcttaatgaaatgcgcctgaatgcagaatccagcaaacgtactgctgtaatggatgctttacgtaaataccgttatcacatttttactcgctataactggagcactggttcaggctttgccgggaaaaatatcatttctgatgtttatgatgacgggcgctttacgtatatcagactgtctaaccctaatcgtggattaatggctgtacaggcagaggttggagggaaaaaagctattgtcccgactaaatacgatgatgcttatgctatttattctatgtcaggtatctatcctaaatttactcttacattagatggtgttgagctggaaattaaaagagctgataacgccaccaatggggaatcctaa

SEQ ID NO: 94105 - DNA, 726 bp, Enterobacter aerogenes
atgccattagataaaaaagatgttgataaaagtaatcgggtagccagcaaaactaaatttgctgttctgcgttcggatagaagtattttattagcggcggtttttgggctggctttaattaatatttactcggtggttaaagctaataatgctgttgaggcatctaaacgcactcatgaagtagtttgggtgaaaatgtatcctgatggtacaacggcgattgatgaatttaagcccgaagatgagcaaccggtttatgtcagaacggtaaactctggcctgtcaaaatatgtagagtcccgttttcaggttcatgcggaaactattaagcgtgattatgcagaggccggagtatttttaggtgagacgttattcaatcagttcactgaaaaaacagggtttaacgctgcggataaagctacaaaaattgcggctaatccttctgctcaggctcggattgatgtgtctaatgtcagacttgaccattacgatcagattgagggggatttctctggtcagaagaaacctgtaataagaacgacgattacatgggatgaaactacttataacagtgaagggaaagttaacggcgaacctaagcctcacatgattcgtattacatggactttattgtctcgggatcaggtcagcgagaaatctgttggttggttaaaaataaatccgctcggcatcgttattttgtctcaagaagaacttgataggtaa

SEQ ID NO: 94106 - DNA, 975 bp, Enterobacter aerogenes
ttgtctaaaaacaagatattgataattttgattggcatttttgctgtatttcctgcgttcgcgcttgataatgcggttacgcagaaaatagatgcaaacattaacgaatatgtaaatgccgtcctttcaagttctggtagtgatatttatgttttcgttatggctgtagcaacatttcttatgtttgtatgcgccgtaggtgaaataattaaattcatatatggacaagctgattgggtggcaatattcacccttataattgtatggtttgtcacaatggcattgattacttcatatggcatggttacggataccgttaaatatgcatttaacgagttggcagacaccttccagtatctgactattggttccaaagacagaatgttcctatctaacttcattgatagggtgattaatcaagctgttcaggctcctgatgttggttttactgacactatttatatgtgggctattactatcatttgggcggtaatttcactgttcctgcaagtggctttctatctttctgatgtttatgtgacattgggtatagcgttagctcaaatgattggcgttctttttattccttttctcattgctccttggactcgtggtatttttgacggttgggtaaggttcatgattggttggggggtttgtggaatagttctccggttaacatgtttactaacaatgttagtgatgaaagcgacaattaacgcagcgggggattttcagaaccctggaacggcgctgattaatagtaattatgatgtttcagctccattggttgttacagatgaaaatttagggttgcttatagcaataatagtctttggatttatatcttgcgtgatgatattcagctctttcacttttgcaaaaatgttaagttctggcgttggagacacaggtaaagctgttaacaatacagccaagaaactcgctgctcaggctattaaagcgcttatatag

SEQ ID NO: 94107 - DNA, 459 bp, Enterobacter aerogenes
atgaaaaatgtaaattttttggtttcattttttgcattaggcattatttcttttggggctaatgctgctgataaatatgttgatccaattcaaaagaaaattgatgagcagcataagccactgattgaaaaattcaaaaaaagctgtcaatcaaaaaacacgatagggtgtcagatagaggcagctaatcgcgctgatgaagctattcctaatcgtggaaccccccgttattgtaagcaagcctatgctggttactctaatacacagagtaaacaaaagctaagtgagttagttaagctatatgactctcttgaagggcagtctacagccacaagatggccggggaaaataacacaagcaaatattgattttgaggcatcttgcttgctcgaaaaacttggcgaacgtagggacggtattgtaggcgcaaaattatatcttgggttatcccctagataa

SEQ ID NO: 94108 - DNA, 813 bp, Enterobacter aerogenes
atgaaacgtacattattagctgtaatcatggctggtatcctttcctctcctgtttatgcaggtgtgcctgttgatgactttacacaaattgcaggtcagctacgtgagctttcacagggtatccgtgattatgaggaatacattaaacaaaccgctttaagtaatacgcagttgcttgaagcgtataagcgttatgatcagatgctggccgattatcagcaggttttgcgtgaagcagaacggcttaaaacgactttgcagggggttgatttacagaacttcctcaataacctgaaaaatattgacctttatgaccctcgttatgcgtctggtgatgatccaaacgttggtagtaagccttgggatgatgcggtagagcgtaataagctcctgaacggttggggtatgtcagatcaagaatggtcagaaatgaatgcggctattccttatactggcgatgatcgcgaacgtgcaaaagcaatattccaatatcgaaaacgtaaagccgaagcgtctgttagacaggatttagcgtcgaaaaactttgacgctaatattgttagccaaacagaacaagctcaacaaacaaaagaagcacttgatgctctaggggacaatgactcacttgccactcagcaattaattgcgcgacagaatcaattaatgattgagcagaatcttaaccagcaagcccaaactaatactgatttcagtatgtctaatcaaattgcaaatgattattttaataaaatggcaagggcacgtgctttaaaagaaaaagctatggctgattcatataaggggaacaattaa

SEQ ID NO: 94109 - DNA, 2580 bp, Enterobacter aerogenes
atgccttctagtcaatataacgaacaattgaatctggccggtcacgatgaaggggcggtgtatacgtacactggcaccgttgttggtggtttggcgttaaccggcgtagacccttcatctatcacagagccggtacgcaagtctcttagcgtgattttacgtaacattattcagttacttccggccaacgtgtcattatcggaatattatctgcactatgaaggcgctaaggttaagctggcagaacgtgagaacccacgtagccagctcctttcaaaacgccgtcaggcattcttaaataaagtacgtaatctcaatgattccaagttgttttggactatagagattatgccggatgaaaatctgaacagcattttctcgactacctttgcgaagaatctttttaacagcatttttgatcccgatgcacgtaaacgtgtcggacttgtgttcaaaaacaaagatgcctacatgatagaggttgaggagtatcagaagcagtgccgtaagttgcacgatacgttaaaagatctcgatggccgtttatcgttcttctctcctgataatgtggaaatgggcgttgaaggtatctggcggctacaaaaatttctggcgaacttcaatcctcgttatctgactaataagccttgtcccgttcctacagaaaattgggatcagtacacgcttgacgccgaagatgttaagaacgtcatggtagatggtgtgccgatgctgaaaatcgagtctgtagaaccggtatacgtccgtatagcaagtatcgttcagcaagggcagaaagcagttcccgagggtgtttgggctagcgatgtaagcggaaaacgtcccactttattacgtgggaactatgtattcttcaaccgtttcagtacggtttcagctttaaaacgctcattgattctcactgctaaagagaacgaaatttaccgtaatcaaattagttttgctgaattaatgaataaccgtgtagatagtgaacgccttgaaaataaggttaaacaaaatccgcaccttaaaaagatgcaagaagaactaatggatgcgtcaaactcgccagatcgtattggtgagtatgtttcgtctatagcggtttttaatactgacccctataagctaatcgaggcggcaaaagaagttgatcgtgttatttctgactccatgactttaatttgggaaggggttgggcttgaagatgcgtatttcaatatgcaggtctgtagccctaaaaaatcctacagaaccatgctttataattcctctcaagtcggtgcggcagcgctgttttatcgttcgcatcagggtattaaaacatgggataaaggttttgaaaaagaggaggcttggtatgtctttgaatcagatgatggtacgcctttcttctttactcccaatgtcggtgaaaaatgtcttattaatggtgttggcccgactcgttcaggaaaatcgttcttaaaaaatgtcatagcatcacattttactaagttaggtggaatgtattctgctctggatattgatcaaggcacattgccgctggcgaacttttttaaagaagatggagccgcatttacgttatccgatgatatgcaatcgggatttagtacattcgctacacctgaaagtgaaaatgataccgattttattgttcacgttattgagcaaataaaaatgatggttaagttcaatgaacgtgaagaagataaatatcttactccagatgaatctaatgagcttgccgatgcaattaaaagtttgctgcgtcaacaattcggtaatcaggaagggcgcttgtcagttaataccctttctacattgatggctaaatgtggaaacagtattcgtaataaaatggctgcgttctttgataatggttattatgcacggctttttgataatgaagttgatgctatcggcgttctagataagccagtagccgcctataaccttgcagcagtaaaagataagccgcaaacagcacagcttgtgcagcatgaaatatttttccgtattgttcgcctctttgagtctgcaaaatatcgtaacttaccaaaaatgctcgatattgatgaggctcagtacacactctctgttcccggtgcggctaattgggcgataaccaaggctcgtacttggtttaagcacggtggcggtatgagtttttggacacagaacccacagcattactcaaacttggatgagtgggaaactctgcgttctgctgcttctgtctttatctttatgagtgatccaaaagcaaacacggaacactatgttaaagcgttcggtatttctcctgacgaagtagatataataaggaaactgaaacgagcgcagcaggcttatatcgttatcccggaagctcaaatagcaaaagttattaatttgattgtagagtcggaacaatacgctatatgtacgtctactgcgcatgaggcagctctggcgcaaactatttatgctgaaacggatgatatagatgaagcaataggccggattgttgaggggcttaaactgccaaaaacaccggttgagacagaacgtgatatggagactatgtacctatga

SEQ ID NO: 94110 - DNA, 360 bp, Enterobacter aerogenes
atgaaacagaaagttatgggtaaattttcacaggtaaaacacaaggggatgaagtgggcgtcccttgttggtgcctcgttgttttctacggcggcactcgctgtaaacaatgatgtttctctgcctagtgctgatagtagctatatgcagaaaattatcaattggatgcaggaagttatggacgttatcggcggtgcaggtacgttgtttgttgcctttttatccgcttgcgtagcaattctgatgtggatcgctattccgaaacaaagtggcggggcgctcgcttgggttctgcgtgtttgtatcggtgctattgccgtgtttaaccttgccttgctgttcgcttggttgcagaagtaa

SEQ ID NO: 94111 - DNA, 354 bp, Enterobacter aerogenes
atgcaagataaacagactactgctaacgagcagggaaatccgaacctcacgaacgcgaaggttttcaatgccaggaacatgaaagctggcattccacagcagatgtacatccttctgctgttcctgaacatctttgcgttggtacttgcgattaagtttttcagcattctgtcggtgctggcattcattgttttcgttttgctgacggtgatccctatgtacatcatccacagcgaagatcctgatgctcatatcgtttggcgtcgtgtgatcttcagctcagggaacctcaataacagcaaaacaacgcagcgaaaagttgtctttatcaaactctctagccataaaggataa

SEQ ID NO: 94112 - DNA, 1023 bp, Enterobacter aerogenes
atgcagtatccgtttggtcacatccctgatgaagataaaactggtatcaagcgttggaatcttatccacgatgaaatgatgccaatccttggcttgtataagcagtccgacattaccgatatttttgttgaccggtacgacaaaattaatgttatgcgtcgtggagtccttgagaaaactgactgcgcatttaattcagaagaagcgttagtgtcgttgattgaacaactgcgtaaaacactaaatcaggattttggcttaaacgccccgatccttgatgcgcgtctacccgatggtagccgtttgaactgcactcatgtatcagtgacgccgcaaggctcatcaatgtcgctgcgtaaagttccagtgattgctttatcgaaaagtaacttcattgattcggggatgctgacagaggagatgttagcctacctcgttgagatgattgagcagaaagatatattcctgatctccggtaacatgggttctggtaaaacatcgctgctgcgttttctatcagagtacattgataaacgtgaacgactcattacagccgaagatactcaagaattacatatcaatgagcgctttccgtttggtcttgcaatggaagctgcaaagcgtaaagacagccctatagatctcccggctcttatacacgctacgttgcgtcaacaaccagatcgcgtttgggtaggtgaatttcgtgttgccgaagccgtagacgcctttatgcagattatctacacgggcgttcgtggatgtgcagggactatacacggtagtagctgcctgaatgcaatcattcgtatgcagtatcttttagcgtcctcaggtaaggttgattaccatcttacgggtgagctgattcgcggagctatcaacgtcattatacagactcaccgtgatccaaaatggggaagacgtgtaacggaaattggccgtttggttgatggcgaagttaagttgatttttaagttcaataccaaaactggcgagcatgagcgggttgacggtaattag

SEQ ID NO: 94113 - DNA, 714 bp, Enterobacter aerogenes
ttgaacacatttgatattaacgctcagaagcgtgagaaaattgtcatatggcttgccaagtttggtttctctacacgcgatctgttatcaaaaatgttgagtgttaacgttgacgggcaaggagcattttttaaaaagttagttgagagtggaattacgaaagaggagtacgtacccggaacacgtaagcgagttatcactctgacacctgacggcgttcaacaagcaagaatttatcaacccgatcttgaagtaaaatctctgcgtaagtttccattacatacactcattcatagttatagtatccaatcctttttaactactcagaaaggtgttaaggatttttttagtgaaaccgagttagccaaaagaaaatttattcgcagacctgatctgctaatcgtcaatgatgctggcgttaagatagcgattgaagttgagttaacacagaaggacgttaaccgggtttacttcaacttttatggtcacgttcaggattggcagcaggaaagaatagaccatgtgatttatttgttttcttctccaacggttttagccagatatgaagaactctatcaaaagaatccttggcctaaatttattacaactgatggaaacgttcgacacatgagcagatcgggatctgttgatccctcacacgctcacactcatgggctgatgtattttcataagtttgaaccttacgccttgtag

SEQ ID NO: 94114 - DNA, 843 bp, Enterobacter aerogenes
atgaacgggattagttggaaaggctcaaataagcaagttgaaaaacaattggtggcacaatttgaaagtctagggatagattattcaaatcccggtttttatgatgatcctaatttcttgaggcaggaaaaaaaggatccacgctttctcgaaaaatatgctttgtatgtagagtctaaacattatgaggatgagtacttagaaagggcgaagaaatctataataatttgtgctgaatccttacataaggctattaagaaagatggaagacttggagcttgtgttgacgtgtctagtatgctgagtcgaatgctggaagaattgggtatttggagttatgtaaccaattcagcggttaagattgatttccctcagtcatcaaaaattgagaccatctggttttggtcaccctccgatggaagtgggatggcagcagcacatgccattgttgttgcaccaccttttgcaatcgtagatttaaccatcaaaatgcaaccgtaccaaccaggagtcaataggtatcttccagaaatagcattggttacagattatactaacggtcaatgggaacctgaagacgttattgagcatgacaccctaaatatgtacggtttaagcggtgatgctgctcgtaaagctattcagagccaactaaggccaatgtatgaagtgatgaatacattcccgtgccggatagcaacatttggagaaacccatattaagtatacgaccattgctatcggaggttcattagaacctctgagcgggatcttaggctataaacctaatggccaaactgcactagagatttttcaaaatgatattattcctcgattaagttga

SEQ ID NO: 94115 - DNA, 231 bp, Enterobacter aerogenes
atggacttctcccgccccggaaaaccaacggataacccgtttattgaatcatttaacggcagtctgcgggatgaatgcctgaacattcactggtttctctcgctggaagatgcgcaggacaaactcgacaactggcgcagggaatataatcatgagagaacgcattcatcattaaatgacatgactccggctgaattcatccgaagtctccggaaagacgaagatctctga

SEQ ID NO: 94116 - DNA, 606 bp, Enterobacter aerogenes
atgactatcctaaaagtacattattcaccaactgacggaatccctttgaacaccctttatttgaaggaaacttcaaccactgagcgttcaggttcaatgctgggtggcggcatatcgggagactctgttattctgggaggcggaggttatgccggttcagaaattcagaaaacgactcgctctactgtctttgcaccacctgatgaagttactgctgagcctgacaactcaaaaatgttaacccggatctcgttcgtaattggtgggatgattgtacttgtatttattactttaataacaaatggcattgttgatagctttgccgtaaatttatctcaaactactgcctcgttactggaaaatgcccccttctttattatcgcactatctgtattttgttctttatttgtaataggattgacagaacatgattacactcctgtattagaagagcacaaacgaaatgaagagcgtttgtctgtataccacagactacggtatgttgaagctgataatgttgtttttgaccctaaatcgatgaacggatgttacgcagagagaaagttcattactatacttgttgaaagctgtatctctaagaaataa

SEQ ID NO: 94117 - DNA, 732 bp, Enterobacter aerogenes
atgacattatcctcgcttgtcccgattaaccctttccagcgatgtgcaatggcttctattgcttctgtagagaatcgcagatctttgggacggaaaacaggagagctggcctacgtcaaagccttttttaaagagcttacaggtaaatctcaaattacctcgaatgacttgagaaaagtcgatgcgagttacgatccatttgttcgtggagaagcaacaaaatttgagtaccttcgtgctatcgatattctgattgaatctcgtggagagcgctttattctacccctttcaaggtctctggcagtctccatgtttccagggttacagaaccgggatttacagcgacgcgaacaccgtgaccggattcatgatcaaagggtggagcgcctgacaatcaaagagtctaacttgttgaattataaactggaacttaacgtctcaaaatccagactttacctgtctttctgtcttcctggtcaacataaactctggttagaggagtggcgaaacgatatccatggacaaggacttacaacgactgatatttacctgctgattaacgactggtggtcatcattctggatcacttcatacagaaaggactatatctggtgttacacactggctgatttgctggacgagattgattatgttcttagcactattacaattatggagtttaacgtctgtttttcggcactaccattatcccttatatataaagctggatag

SEQ ID NO: 94118 - DNA, 759 bp, Enterobacter aerogenes
atggctgactattattcagaatgcgcttgtcttattgaagcaaatcctactcaaactgctatattacttgaagcaatgaatgaattgtttgaacctgacgataattttattcaaaaactcatttcatgtgataacacaaacgacctttcagaaatggagattattgtacgtcactgtgtgctaaaccacccaggcagaactgttgctaatattcctgaagacctggactggcattttgacggggataaatgccctgaaggttttcttattaacagtgatctcggagatttcaattctgaacatgctgcgctgtttgctcaggcggcacttattgcatttgacagaaacgaattgatagagttcaaaatcgcttttacatgcagtaactcaaaaaggcctgacgggtttggaggcgctgcctgtgtcgtgagcaaggattttgtccgatggacaggtctacacaattttctggaggctgaacgaaccgctttcgccgagaagatgaattacttcttttgtgaatttacagaggtcgtcggtgagcttgaatatccagtatcgtttatattgcgttgcctggacagcgttaatgcagcgcatagatatgatgagattcagcttaactatcgcgaagggggggaaagaaatagcgaaggagggatacaatttaactctggatcggccataaaaaaagccagtatgaaaccgatcactccggatgagttccgggtgatgaaatcgtatctgaacgtcatgtga

SEQ ID NO: 94119 - DNA, 393 bp, Enterobacter aerogenes
atgacaaagcaaatattacccaatgaactggctgaaatcgtcaccggtcttcttattaaacctgaactgctaggtgagcttgactcccgtgaggcgcaccaggccttcatgctggatattggacgggttattgctgatcactgcggtggactggtcaacggtattacggatggtgacctagcaaaaccctatctttcagacattgagtgtacccccattctccacatcgaacctgatgaccgcctgccttcgactgaacgtaacgtatggtcaaattatcatgttgaagcgtgggcagacgagggacacgaaactatcctcgacacggcgatccgagagtctgacagagctgccctgcaaactctccttattgtagctgcgcaaaaaggatga

SEQ ID NO: 94120 - DNA, 846 bp, Enterobacter aerogenes
atgttacgaggaacagaaagaaaagcagcattagaaagcctttcccgagccagaacgcgttatgaatcgcaggcaacggatacccagactgcaatcactgatctttttttactgcgtcagaaatgcagcaaagacctgattgcccgttgcgagcacttcgtcaaccgtctggcgaacacgccaaaagagttcgataaatcctggagcgagctaaaagcggaaattgaagaattcgacgatgtggtcgaaaagctggaagaggagtatcgcgcctctcacgtgggtaaaggcaccgccgctgcgggtgttgccgttggtgcaggtgtggcggcgtttgccccgactgccgcactggcgattgcaactaccttcggcacggcctctaccggaacagcaatcgccacactgagcggtgctgcggcaaccaatgccgccctggcttggctgggtggcggtgcgctcgcggcaggcggtggcgggatgtctgcgggaagtgcactactggcgcttgcaggcccggtcggatgggggatcggcgcgatgggtatagcaggcggaaccttactggcacgtcgtaaaaacggcaaaatcatcgatcaggctcagactgaagagcgtgaagtacttttggaaacctcaaaactgcgcatagtgggacgtagcgcggaggagctgaaggtgctgacctctgagcattatcagggtacagagggtattgtggatgtactggaaaaaaccgcgccgcgcgattacagccagttcaatgcgcatcagaaagcgcagctgggtgcattggttaaccatatcaatgccttgtcaaaactgatcaacaagaaaatccagtga

SEQ ID NO: 94121 - DNA, 1443 bp, Enterobacter aerogenes
atgaaaagtcatactccgttgtgcgatcagctcataggtagtgcggtaaatgcccttaatcaggcacgtattgacgatatggttgtaaaactctctcatcaggatattgcgtttgttctggctcgtgaacagatgcagaaggtacgtgattttatcgcttcgccgggcaatattcttggcagcatgaacaccaaacatggcgaaatagccgagcaggttgaggtgggcttacggaactctgagcaggccattaaagaggggctacaagatgccaccacctttcgagctacgtttgagggagtgggccgcaacgcacggatggattatctgattgatggcatagaggttcagtcgaaattcattaacggcactaacaaaaatctgatgcatatcctgaagcacatggatgagtactccaatttcggcaaggatgggtcgttctaccatattccgaaagatacctggcaggagatacaggacgttcttgacggcaaacccgttgaaggactcaaatcgaccacgattgaggcgattaaagcaaaagtcgctgaaattgagagtgaaacacagcggccttttgctgaagtggtgcgtccgggcatctctgattataaagatgtgcaactagggaaaatcaacgagacgctcgataagcgcgatcaggagctcgccagacaaaacgacgcgaagcgcactgaaatcatcgatgaccatcagcattcactggctgaagggatgcgcgcaacggcgatgggggccgctgtgggtggggcctttgcgctcggaaccgggatatatcgcaaataccgcgacggtaaaaatatcttcctcggcgactttgatgcccaggactggcaggacgttgggctggatacgctgaaaggtgtagctgtcggtggcgtatccgccggggcgatttacaccctgaccaactgcgcgtcgatgggcgctccctttgccagcgcactggtcactgcgaccaaaggtgtggcgagccttgccctctcttatcagcgcggggagattgacctggatgagttcaccgatctagggcttattgtctgcgcagagtcggccattgttggtgccatgaccgtggcaggacaggccttgctccctgtgccggtactgggggcgctcatgggctcgatttccgggaagtttatggtcaccgtggctaaaagcctagacggtaaagcacgtcatgcattacaggcacgcatggatgagttttcccgccggttaaatactctcgagcaagaggtgcttaatcgtatcatatccgaatttgccgccctcggtgaactgacggctgctgcctttaatgtcgaaaataaccttcagttgctggaagcaagtatcacacttgcacaagtgcatggcgttgaaaaagacaaaatcattaaaaatgcggatgatctggatgcgtttatgacggcctga

SEQ ID NO: 94122 - DNA, 648 bp, Enterobacter aerogenes
atgaacgtcattcagccccgcatgctctctgtatttgactttgacggtacgttaacgcggcatgatagctttatcccttttctgcggtttgcctttggcaatcgggcgttttcgcgacgtatcgtcagcatggctctacccacgttacgctgtatgggtaagcagatgacgcgtgatgagctaaaagaaacgctcattacaacttttcttactggtgttgaggaaaagtgggtgtcttctaaagcagaggaattctgtcagctctactggcatcgcctcatgcgcccggcaggtttgattgctgtggcgaatgaagtcacttccggcgcgatcgtcaccttatgttctgcgtcgccggaaattgtactcagaccctttgccgaaaaacttaggatcaaactgattggtacacaattagagacaaaagacggcattctgaccggcagaatcagtggtcataattgcaggtgctcacagaaaattatccggcttgaaaaagaatatggacctctgactgactatcatcttcgggcatggggtgatacgcggggtgattatgaactcctttccgcagcgactgagcctcactggcgtcacttccatcaaggtttccgtcgtaaacttccgtcgaagctaatcatcagataa

SEQ ID NO: 94123 - DNA, 1242 bp, Enterobacter aerogenes
atgcaattacaatcagggcagaacattccgcttcacacagctacactgactctccggcttgattatccccccagcccaggattccacagtacccctgagacttgcctgtttatgctgaatgctgagggaaaagtgacaggcgatgccgattttatcttttacaacaatctcagtgctgccggtggcagtgtgaaactcaaccccggtcaccagcacgcagtcgttcattttgcgcttgaccagatcccggatacgattcagaagattgcaatctctatggtgatagatggcagtgatacgataagcggcctcgcgcaactgaaactttctgctgaaagtcaggccaccttttttgtcgatctcaatggccgcacagaaaaggctgtaattatgggggaagtttaccgacaccagggcaactggaagctcagggcgcttgggcagggatttaatggcgggcttgagccactggcagtcagctatggtgtggacgtggaacctgcagcagaagttgtaccgcaaccagcccggatcagccttgaaaagaaactcgaaggtaaagcgcctgcgcttatcagcctggctaagaaagccagtatttcgctggcaaaacacaaactggataccgttgaagcacgagtcgcttttgttctcgatgcctcaggctctatgaccggccagtttaaaaaagggcatgtacaggccgttcttgaccgtatagctgtcctgtctgtccagttcgacgatgacggcacgatggatgtatggggctttgctgagcgtcacaagaaatatcctgacgtcacactggacaatcttgacggatacattgctgccattcagaacacaggtaaacgatctgcctgggaaatccttcccggccttggcgggacgaacaatgagccgccagtcatgaatgaggttatcgattatttcaaggacagcaccttacctgtttttgttgtgtgcattacagatggcgggatcagcaaaacacgagaaattaaagaggccatccgccgctcagccaactatcctgtcttctggaagttcgttggactgggcggatcaaattatgggattctggagaggctggacacctttagcgaccgtcgggtagacaacagcaacttttttgcgatcgataattttgcccacataaaggacgaagagttgtatgaaaaacttctcgaagagttcaaagactggcttggactggcaaaaaaggaaggcattatctga

SEQ ID NO: 94124 - DNA, 576 bp, Enterobacter aerogenes
atggctgtttctctcgttaaaggcggtaatgtttctctgactaaagaagccccgagcatgaatgttgctctggttggcctgggctgggatgcacgcgttactgatggtcaggcatttgatctggatgcatcagtattccttgttggcgaaaacggtaaagtgctgtccgattcgcatttcgtattttataacaacaccaccagcccggatggcgcagtacagcatcagggtgacaaccgtaccggtgaaggcgacggtgacgatgagcaggtcaaaattgatctgacaaaagtggccgcagacgttaagaaactcgtattcgcagtcaccattcatgaagcagacagccgtaagcaaaatttcggcatggtcagtaacagctttatgcgtgtggtgaacaacgataatggcgccgagattgcacgctttgacctgtcagaagatgcctctactgaaaccgcaatgattttcggtgaactgtatcgccatggcgcggaatggaagtttaaggctgtaggacagggctttgctggtggcctggctgcgctggcaacccagcacggcatcaacatctga

SEQ ID NO: 94125 - DNA, 579 bp, Enterobacter aerogenes
atgagcgtttcactatctaaaggcggcaacgtttccctgagcaaaaccgcgccaagcatgaaaaacgtcctggttggccttggctgggatgcacgttctacggacggtcaggactttgacctcgatgcttccgcatttctgctggcagccaatggcaaggttcgtggcgatgcagatttcattttctataacaacctgaaatctgctgatggttccgttactcataccggtgataaccgtaccggtgaaggtgatggcgacgatgaatccctcaaaatcaaactggacgcggtacctggggatgtcgacaaaattattttcgttgtcactatccatgatgctcaggctcgtcgccagagcttcggtcaggtttccggcgcatttatccgtctggtgaatgatgacaatcagactgaagttgctcgctacgatctgacagaagacgcttctactgaaactgccatgctgtttggggagctgtatcgtcacaacggagaatggaaattccgtgcggttggccagggttatgctggtggactggcttccgtgtgcgctcagtacggcatcaacgcgtcctga

SEQ ID NO: 94126 - DNA, 1041 bp, Enterobacter aerogenes
atggtttccactcacatcggttttccggctgaaacagtgacggtctttgttgctctgtcggtcggcgccatctttattgacctgttcatgcaccgacatgacaagccaatttccctcaaaagcgcagccttatggtccgttttctgggttgttgtcgcgatggcatttgccggtttcctttttgtgcatcacggagccgaggttgccagcctgtttgtcacgggttatgcccttgagaaggtgctgtcagttgataacctgtttgtcatgatggcgattttctcatggttctcagttccggaccgttaccgtcaccgggttctgtactgggggatcattggcgctatcgtcttccgggggattttcgttgcgatcggtaccggtctgcttagccttggcccttatgtcgagctgatctttgccgttgttgttgcctggactgcggtcatgatgctcaaaggcggtggggatgatgacgaaattgaggattattctcagcaccttgcttatcgcctggttaaacgcttcttcccgatttggccgaaactgtccggacatgcattcttgctgacacaaaaagaagtggacgccgaactggctaagccagaaaacaaagacgtatctgtagggcgactgaaaaaggcagcgctttacgccaccccattgatgttatgtgtggctgtagtggaactctctgacgtaatgtttgccttcgactctgtcccggcaattattgcagtcagtcgtgagccactgattgtgtatagcgccatgatgttcgcaatactgggcctgcgtactctgtatttcgtactggaagccctgaaacagtatctgtcccagctggagaaagctgttatcgtcctgctgttcttcattgcgtttaagctgggtctgaacgctaccgatcacatctggcaccatggttacagcctgtctgcgaccaccagcctgtatgtcgtactgggtgtactggctcttggtattctggccagtgtcatctttccggaaaagccggaagctgaaaataaagaaagctga

SEQ ID NO: 94127 - DNA, 456 bp, Enterobacter aerogenes
atgagttttttcgacaaagtaaaaggggctttgacctcgggtcgtgaggaattgacccgccaggtaggccgttacaaaaacaagaaatttatgcagggtaccgtcgcggtatgcgcccgtatcgctgttgccagtgacggcgtcagctccgaagaaaaacagaagatgattggatttctgcgatcctcagaagagctgaaagtcttcgatacagcagaagttatcgaattttttaacaagctggtgaccagtttcgactttgatctggaaatcggaaaaggcgaaacgatgaaatatatcctcgccctgaaagaccagccagaggcagctcaactggctcttcgtgtcggtattgctgtcgctaaaagtgatggcaacttcgatgatgatgagaagagtgctgtccgtgaaattgcccgttcgctgggtttcgacccggctgaatttggcctctga

SEQ ID NO: 94128 - DNA, 1152 bp, Enterobacter aerogenes
atgaatctgacaccggggggcaatgcccctttaatagctcaggatctccgcgtgagggtcatttctggtggtcctgttgacgcttcggcgtttcgattattcgctgacgggaaagttcggggtgacagcgatatggtcttttacgggcaaccccgtaatgaagatggttccattagcttcagtgctgaagggaccaatagcgttttcaccgttgatctgtcccgcctcaagcccgacgtgcagaaagtcgccttcaccgttacctgtgacggcagtcataccgtttcctccctgaatcatctgtccatacaaattgaaagtggcaatacctcgctgatcagtggtcaggtagaactgagtggccgtcaggaagccgctctgatcctcggtgaagtctatcgcaggaatggtgactggaaatttcgttttatcgcccagggcttcaatggcggcctgaaacctctcgctgagtactatggcgtcaacgtcgcggatgagccagctccagtcactccgccaccagcgcctccggctccgcctaaagttagcctgagtaaagtttctctgacaaaagagaagcctgccatcagccttgccaaaaaagacaattttggtgaaatccgcatcaatctgaactggcatcgtggctcgggttcaggcgggttactgggcggtatgtttggttcgaacaaagctatagacctggatctcggtgcattcgttgagctcgcagatggctataagtcagttgttcaggcactcggtaatgcttttggtaactatcactctgagccatatgttcaactgcagggtgatgatcgtaccggcgaggctctggatggggaatggctacacatcaatggccgcgaatggaaagaaattcgccaggtactgatatatgcctttatctatcagggcgtgcccagctgggacaaaaccgatggcgtggtgacattacatgttcctgagcaaccaccgattgaatcgcgtctgactgaaggtgataacaaacgcacgctgtgtgcgattgcccgtctggtcaacgagaacggttccattcgtgtggaacgtattaaccagtacttcagaggccaggaggaaatggaccgcgcttttggctgggggtttcgctggtccagaggttccaaataa

SEQ ID NO: 94129 - DNA, 585 bp, Enterobacter aerogenes
atggtttctttaagtaaaaaccagacagtatcactcagcaaacaatccactgctctcagccagcttcagttcggactgggttgggatcctgttaagaaaaagggattatttggcagcatttttggtggcaatgattccatagacctggatgcaggttgcgttcttctggatgccgcaggtaataaaattgacaccatctggtttcgtaaactgaaatccagctgtgggtctgtcgtccactccggcgataacctgacgggtgagggggatggagatgatgaaatcattcgcgtcgatctcacaaaattgccggcaaatgttgaatacctcgcctttaccgtgaacagctttcgtgggcagtccttcaacgatgtcgataacgccttctgtcgcgtcgtggatcagaccaataaagaactggcccgttatcagctgacggaacaaggtgctcatacgggtatcatcatcgcttccctgcggcgcaacaacggaaactgggattttaccgcccacggtaaagcaagcggtggccgcacaatcgacgatatgcaattcgatatcgtaagtacggtggtaaaagcatga

SEQ ID NO: 94130 - DNA, 1059 bp, Enterobacter aerogenes
atgaaaaagaaaatttggtttatggaagggctatcttcccagcgagacattatccttggagtgaaatcatttgcggaaaaggaaaatcatgatattgaaatcttttcttctcatcgcaacgagaggaaagagatcttgtctgtttccgatttttcaatgatcgaacctaacaacgaagaagaacgtctttcttttattcattccattactgacgctcatggtattaatgcgatacatactggtcgcaactgtaaatggtttgaaagccaccgggaaaacattcaacgttctggtgtccacctgactaccgggtcaacggggactcactggtttgaattagccgatgaaaaagttactttttccgagtttatggaaaaaaatgggcttccggttgtcccgtcggttcgggtaaaaaatgtagacgagcttcgtactctgctgagtcatccccctttcccttctgattgcctctgcattaaacctgttacaggcatttatggcatgggattctggcgttttgatgacaatgtttccccggtagcttttctcaacaatcctgatagccgtgttatccacccatcacagtatctggctgctcatgcccggatggactgctttactccacaagtactgatgccctatttacccggaccagaatactctgtggatatggtggtaagtcaaggcacggtcctggccgctatcgggcggcgtaaagaaggtgtgcttcagtatctggaaaatgaaggggaagcgattgaacttgccatcaactgcgcccgcctaatgaacgcagacggcatggtcaatgtacagacacgccataatgccgaaggcaaaccactattgctggaaattaacatgcggccatcaggtggtatcggttatacgcagcacagtggcgtgaatctgccgggtctgtatgccttccatacacttgggctgatggatgatgatcaggtcaggcagtcagcgaaaactgatttttcacctgcagtcgtccgctctgttaccgatgtcattctctatccggcatcattgaccaacaggattgattaa

SEQ ID NO: 94131 - DNA, 1155 bp, Enterobacter aerogenes
atggagacagatatgtcagcaattgatggtaatttcgtttatcaaaagacattatcctgtgggcgaattgaggtaagcagcgaggaaaccgattatcctcttactgatctctttgatatcgccgaacggcggaatccaaaacgcgcatttctgtttgtcagtaaagtgctgggtcgacatattcctgtctctcctctggtcatgcgcaatgtttatacacagctggcggagaagtttcccgggactctggacgggccggtggtatttatcgggatggctgagacggctgtcggcctcggggcgggagtgtttgatgaggtgcgcaagcatcaccctgactgtgtttatctgacatcaacccgccatccggtcgatgccgaactgttgtgcgagtttaaagaagagcacagccatgccacagaccacctgatctactatccagtttctgcggccatgcggcaaaccgtagcggaggcacaaacattagtgctcgtggatgatgaagccacgacagggaaaacgttcctcaatcttctcgcctcattacgtgcatcgggtgcactccggaaggtacgacgggttattgctgtcacgctgactgactggagcggagaagcactcagtcagaacagccccctgcccctacatacagtatcgctcatctccggcaactggcgctggacacccgaaccggatgccccgcttcctgtcatgccccaggtaaatgtgacctccagagggaacgtcccgatcacaggcaaacaatcctgggggcgactcgggatgcagataccggcgagtgacctgggtctccaggttcaggtttcgcacggtgaaaacattctggtactgggcaccggtgaatttgtctgggagccgttcctgctggctgagcgacttgaagcggcaggtgctcaggtcgtgttcagttcgacgacccgctcaccgatttccactggttatgctatccagtccgccattgctttcagcgataactacggactgggtattccaaattatgtctataacgttgctcatcagcagtttgaccggatcctgatttgttgcgaaacgccagcttccagcgtggacccccggctgcttgaggcgctttccgctgttgctcccaccgtagaggtgattacctatgaataa

SEQ ID NO: 94132 - DNA, 774 bp, Enterobacter aerogenes
atgaataagcccgtcgtcttcagcgacctcgatgacaccctgttccagacccgccgaaaaatggttgatgaacttgcccttgaaccgttccggaccggcgcactggatcgcagcctcacgcctcgcagttttatgaccgaagagcaggccatgctggtggactggttgctggaacatgcggacctcattccggtgacggccagaggtacggaagaaatcagtcgggtacagatccccttccgttcctgggccgtgaccactcatggcgcggtgatccttcgtccagatggtacgccagacagcgactggaaagcccatatgctggagtgcctgtcctcctacgccgaccgcttaacatcaatgcaacatatcatcaccgagctcatggatgcgcgaggcattaatgcctgggcacgcctcaactacgaatatgagggtacgccggtgtatctggtcatgaagcaccgcgacagcacgaagcttgatgaactgaacgctgtcggggatgagattgagcgcgttttttcgaccgaagggttttacatccaccgtaacagcaacaacattgcctggttaccctgcccggtagaaaaagggctggccgtttcatggttgctggagaaactgcgtcaggagcgcggggttttcccggtgatggggctgggtgacagcctgagcgaccatcggttcatgaaactctgcagctggtttggtcttccacgccagagtcagtttgccgaggccatatcacagcgtatttttggagagcaataa

SEQ ID NO: 94133 - DNA, 1080 bp, Enterobacter aerogenes
atgtcgcattttgccccgttttctggttcctataaaccggacgatgttcactttttgctgaaacccattgtcatggagatgacaccggttgacctgaaggaagaactgattcagtcaggaaaaatgcattattccgacatgttaagccaggaaccagagccgacccgctggcacctggatcttttcacccgtgcgcttgactcgggagctgcacgtctggcacgggaggtatcttatcttgctcgtgaactggcccgtcgtgctggcgatgaacccattgtcctggtcagcctggtcagagctggtgttccactgggggtcatgctgcatcaggctctgcgtgcgatgggaaaacagtctttccactacgggatcagcattatccgcgacaggggtattgatgctgcggcgcttgattttatcgaatcacgccatggtactggtggcatagtgtttgtcgacggctggacgggaaaaggagctattaccggcgaattatcccgcacactgaaggaccgtcccggttatccggagcagcctcgactggttgtgctggctgacccctgcggatgtgcctggcttgctgccagtgacgatgactggcttatcccgttcggtatcatgggcgcgcctgtctcgggtctgatttcgcgctctgtctgggccgaagaaggcctgcatggctgtgtggtttgcgatcaccttcagtcttttgaatgtagccagatgctggtggatacggtagcacatttccgtgaacagcttgacggtaaaccccttcccgcttctggctgggacgcagggaaaaatgccgcacgctggcagctgagcagaaaagttatccagagccttgctgcgcgttatgaggtggacagcattaaccgcattaagccgggtatcgctgaagcgacgcgggcggttctgcgtcgtgtacctgatcatgtttttgttcgccagatggatgacccggatgtttctcttctggttgggctggcaaaagagaaaggtatccaggtgacggaagccggggatacgctcggtcagtatcgtgcggttaccattatcaaaaaggtacgctga

SEQ ID NO: 94134 - DNA, 957 bp, Enterobacter aerogenes
atgaaaaaacaacccaacccatgggaactcggtgccacgctgtatatgcctgccacacgcaaggatatcgctgaggtcgttctggaagggaaaataccggggctacgctctctggttgtctgcctggaagatgcggtcagcgagcatgacatccctcttgcgattcagaatctttcactgtttttgaagcaattgagacacgcaagagccgtcaacgatgatgagaagtacccactggtatttatccgcccacgtcacactgatatggggggatggttaacgactaatttggacctgagtgcagttgatggttttgtactgcccaaattcaccctttccacgctcccggtttggtgggacatcatggcaggaacatcattgatgatgatgccaacgcttgaaaccgaagaagtctatgatgttattaaaatgcaggcgctggcaaatgaactttcgagtcatgactgccgtgaccgcataatcgctttgcggatcggcggaaacgatctcatgaacgtcgtgtctctgcgacggccacgggatctgaccctttatgacactcctatgggttatgtcataaaaatgcttgtgtcagtattcgctcctcgtgattttgcgcttaccgcaccagtatgcgaacacatcgacgatcacggcgttctgggacgagaactctctatggatatcgcccatgggctggtgggtaaaacggccattcatcctgatcagattagtgtcatagaggaggcgcttaaagtgtctcctggtgagcattcagatgcgttacgaattctgaattccacccaggcagtcttcaaatctcagggagcgatgtgtgaaccggccacccatcgccggtgggctcaggggatcctgggacggggacaggtatacggtctgactacggggcaaaatccggaaggaatcaggcttattccagtttctaagcagcactaa

SEQ ID NO: 94135 - DNA, 1224 bp, Enterobacter aerogenes
atgggattcagatttcgtaaatcgatcagcattatcccgggggtcagggttaacctgagtaacgggacccccagtctgagtattggcccccgtggagcttcgctgtcagtgggaaagaatggtacgtttgccaacctgggccttcccggaacgggactgagttaccgcacccggattgacagaacagcacggcaaagagtgaataccaggcatcaggcagatcccggtctgaggtctgaactggagctggtggtggaaaaactgatgtccaccgtaacagcgataaccaatatccatgaactctccccttctccaaagggagggaatacctgggccacgctcgagacacagtacctggcgctccgtcagggcagtttcactcttcctgcgccggtacgaccaaacaaacctgaatatatacctcttcctccagaacctgatgagcatgccggtcgcggtttccttgggggatggcttgaatctgatgcagcccgacaggagcgacagaacgaaaatcttcggcggtggcagacgtccgtcgctgatattgaacgtgaaaatgcgttgctgaaacagcgttatgagaaacagcgtatagcgtgggctgagcagtacgcagaatggcagcatcagtaccaggagcatgaaaaaaatcgcacggactctgtagctttagcgaaagagcaattccgctctgacgcccgcttctttgaacattgtcttgaggaagttttctcgcaaacagaatggccgcgagaaacgctggtgacgtttgaggtacggcctgaagaatcaacagtctggcttgatgttgatttacctgagattgaggatatgcctgataaagtgtatagcgtgaatgcccggggaactgatatcaatgaaaaagccatgacacagaaagcggtccgggaaagttacgctaaacacgttcacggatgcctgctgagattagcagcaatcgtttttcagacgcttccgtttgaacaggccgtcatttcaggcttcactcagcgggtgagtaaacgcactggatatcttgaagatgagtacattatttcctggcgggtacgccgctctgaaatcgagctaatcaacttcgggaatctgcgtggcgttgaccctattgaagcattgggtgatcgaggtctgatcaggaaaatgagttcaacttacatttttcagcctatagaaccactgacccagatggcaggtaccgactga

SEQ ID NO: 94136 - DNA, 459 bp, Enterobacter aerogenes
atgcaattaaacaccagacaggaaagagtttacaccctggctaacatacttggctcagggaagcctgtatcggcgcaatccatcaccgcgacgctggcctgttctgagccgacactaagccgggcgcttaaagagctgagggaaacttacgctgctgaaattaaatacagtaaggctggccactcctatcagatggtacactccggattactggataagaaaacactaaagagaatgagtgaggcgctggaccttaattctgatttaaaaacacatgaccagggggcacgggtggtactggataaggatataaaaacttccgtttccctgtcgataagacgccgtgttcttcgcaaaattgacaaactggctgcgctaagcggtacatcaagaagcgaggcagtagaaaaattagtagagttaaaaattgatgaaattatcaatgaaatgaagaaatag

SEQ ID NO: 94137 - DNA, 639 bp, Enterobacter aerogenes
atgagaagacttcccgtctatctgcttctcgacacatcaggttcaatgcacggagagcctatagaggcagttaaaaatggtgtccagacactactgaccaccctgaagcaggatccttatgcactggaaactgcatatgtctcagtcattactttcgactctactgcacgtcaggccgtacctcttacagatctcctcagtttcaatctcccctctttttcggcaagcggaactaccgctctgggcgaagccttatccctgactgcaaaccgaattgatgcagaagttcagaaaacgacagcggagacaaaaggcgactggcgtccactcgttttcctgatgacggatggtggccctactgatgactggcgtaaaggacttaatgaattcaaagcagccaaaaaaggggtagttgtagcctgtgctgccgggcatgatgcagatacggatgtgcttaaggagatcaccgagattgttctccagctggacactgccgacagctcttccatcaaagcttttttcaaatgggtgtctgccagtgtttccgtaggtagccagaaagtcgatgccggtaaaaaagaagttatcggtcttgatgatttgcctccaccgccgccagaagtaaacgtggttttataa

SEQ ID NO: 94138 - DNA, 642 bp, Enterobacter aerogenes
atgactgtcagcttacggaaagggcaaggcgtcagcctgcgtaaaaatgagttcgatctttcctcagtcacgataggtcttggctgggacatcaatgaagagaaaaaagggttcctgggcggaatttttggcaaaaaagaggaggagtatgacctcgatgttattgcctttctctgcaacgcagccggtaaagtgactgatcttggcaatgttgaaaatggtaagccgacactggttaacggcgatatcgtcttcttcaacagtcttcgccataaatcagggcagatctggttgaccggcgataaccggacaggtgccggtgacggagacgatgagcaaattatcgtaaaactaaacagcatcgatccgaagtacgaaaaaattgtctttattgttcagatctacaacggcgaaaaattacagcagcactttggaaaagtgcaaaatgcatttatccgggcggtagacggaaaaaatgtggaaatggcacgctttgacctctccggcggtgtagcctttaatggtcagcgatcgatggtctttgctgagcttgtccgggaatccagtggctggaaactgaatgcgataggcgagccttccacctccgattcgttcgtaagccatctgaggaactatatctaa

SEQ ID NO: 94139 - DNA, 639 bp, Enterobacter aerogenes
atgcgaagactacccgtatatctgctcatcgatacttccggctcaatgagaggggaatcgatacattcagtgaatgtgggtgtgcaggctatgctgagtgccctgagacaggacccttatgcgcttgaaagcgtccatatctcaataattacatacgataatgaagcccgggagtatgttcccctcactgccctggctgactttcagttttctgatatagaagtaccaagtgcgggcggcacctttaccggcgcggcgcttgaatgtctgatccagtgtgtcgaccgggatattcgccgctctgatggtgaacagaaaggcgactggagaccgctggtgtttctgatgacagatggtactccgtcagatgcctgggcttatggggaagctgttaaagaggttcagcggcgttcgtttggttccattatagcctgtgctgttggccctaaagcgggacacgaacatctgaaactactgactgacaaagttgtggctcttgaaacactggattcgaccgcattttcaggctttttcaaatgggtcagtgccagcgtggcttcaggaagctccagtgccggagtcactactgattcggacacacttccaccgccaccgccagaaatccagcttgttctgtaa

SEQ ID NO: 94140 - DNA, 1041 bp, Enterobacter aerogenes
gtgagacgacttcccgttttttttgttctggactgttctgagtccatgattggtgaaaacctgaaaaggatgaatgatggcttgcagaagattgtgagcgatctgcgtaaggaccctcatgctctggagactgtctgggtgtcagtaattgcctttgccggtattgccagaacgattgtcccgttacatgacattgtgtctttttatccccctcgccttcctgtcggtggaggaactaacctcgcgactgccttacgggaactgacaacacaaatagattctcaggtccgaaaaacgacgctggaagaaaaaggtgactggaagccagttgtctacttacttactgacggccgaccgacagatgacatttcagctgaggttaagcgctggaacgaattttacgcaaaaaaagtgaatatgattgctgtggggatcggaccatcagttgatctcagtgtactcaggcaactgactgaaaacgtcttatcgtttaccgaaaatcaggaaggcgatttttcgcggtttatccagtggatcacagcttcagtcacagctcacagtcgtagtgttggcgaggattctcagccgcccctgaaacaaactgactatatcgttaaacttgccaaagatgacacagcccgtgcatacgatgaaaactgtgtggtattaaccgggcgttgcagtaaaacccgtcgaccttatctgattaagtatgagcgtccgccagccagggtatcgggcctcgctttcgatctaaaccttaacagctttaacattgctggttgttatcctgtggatgaagattacttctcatggacggatatgtccgtagccggggcgcagataaacaccagtgaactccatggcgtaccagggtgcccacactgcggaaacagtagtgcttttgcgatgtgtacctgcggaaaacttctctgtattgatgggcctgatgatgtgaactgcccatggtgtgggaaaggtttgtcctttcagagcgagggtggaaattcagattttaacgttagcagaggacgcggctaa

SEQ ID NO: 94141 - DNA, 1734 bp, Enterobacter aerogenes
atgagcgagttcattacacctgaacataaaattattgctctcattctggaggcatcaggggaaccgactgatgctgataaagtatgctgtcttggtaacatacctgatgttgcccttgctgtgcggcagctgagagaaacggtcattcaacactgtgcaagcgaagccataccggcggagaacactcaaacagtttcagaatgtcttacccagcccttttctgacaaaatcctcccacctcaaaactcgggtgaaagcgaagctgatcgacctgagattgaacccgtccatgccgctactgcacttcagggaaatgataagcaggaagcgcatagtgaaatggtggatgatacagcgtcagaaggcgttcagggactcactgaagaagttcctgatgcaaccggggtcttacagaccgaggcttccgtcacggcgcaaccagaagacatggataaaaccagtccggttgtttctgacaacctttcagctgacaccgcagtcagtgctttacggcccggggaagtacctcagagagtggagaataaaacatcccctgcccccggaaaagtgccggaggtgtttatcatgctgccaaatgcacgggcaggtgaaccctacgatgttcgactggaaatagcgaccgatacaggtgttgaggcagagatcacggaggttaacttctctcaggacatagggctgatatttgatatcaatgagcgacgcctccaggggacgccagggcatagcggagactttgaactgactgtgaaatggtcatgcagctcacatcgtgataatgaaaaaaagttactttttgtcgtgaaccctgatccgaaaagtctctggaaagtgattgacccgccttctgatgcaccattctacaagaagagtatcgaccaccagagtgtctgtcggtcaggtattcatattgccggagcaagccgtcgtggacgctcccatgaacatgtaggctcttttcgtgacgacgattattacctcaacttcagtgatgtatccggatggagtgtattactggtagctgatggcgcggggagcgctaaatattcccgggaaggctcccgtatcgtttctgaaaccgttggtaactatctcttcaaccagttcaagactgaaaaagggcttgagatcaaaaacagggtccttcgctggaacagtgaagatcagcgagcagtatgggagtttatgaaccaccacttcagacaggcagcggtactggccgtaaacaatatcagcagtgccgcaattttggctgaagataaagtaaagtcattctcaacaactttactcgcgaccgtcacttttcgcgacggtgccgatctgtttgccgcgtctttctggttaggtgacggtgcgatagctgcatatggacctgctggcaaagtcagagtgctggggacaccggatagcggagagtatgcaggtcagacgcggtttctggatgccgatgccgtcagtgatgccggattcagtaaacgtatcagtatcggtaagtggaacgacatatcgcatctggttctgatgactgatggtgtttccgatccctggtttgagacggataacgggcttcagaatccacaaaaatgggacaggctgatggccgagctctctcccctactcacagaccctgaacatgcctcggcacaactggtggagtggcttaactttttctctccgggaaatcacgatgatcgcacaatcattgtgctctggtga

SEQ ID NO: 94142 - DNA, 1500 bp, Enterobacter aerogenes
atggcaaatataattacatgcaaaactaaggatgggaaaaccattcagtatgtcgatgaagtcatcggctctggctcaatgaaagacgtttatttttctccggataaatcatatgtcgtagccttctaccataaaccgcagaatgaacaggcccgggaacgtatcaacatgatcaccgggaggtaccggcagaatatttttgagcagacgggtggagattactggaaaggtctcttctgctggcccactgatgtggttgagcacgctgataaggtgggtattgttgtacctgcttaccagcagcatttcttcttccgatatggttccaaaaacaatgatttcctcgggatcaaaggacgagaaaaggaagggaaatggtttgccagcgcgaacaatcagaataaatttctggatccgcgtgaacgtggcaatacgcttaactatctgaaggtctgcatccttctaacgcgtgcagtcagacgaatgcatgctgcgggcctgtgtcatagtgacctgagttataaaaatgtgctgatagatccggaactaggccacgcatgcattattgatgttgatgggctggtggttccgggaaaatatcctccagacgtggttggtacacctgattttattgccccggaagtggtgaagacaagccatctccccaaagacgatccccgccgcgtattgccgagtatcgctaccgaccggcatgcactttcggtactcatttacatgtatcttcttttccggcacccgttacggggaggaaaaattcacgatatcgatgatgaggtcagggatgaggcgctttccatgggagagcgggcactttttatcgaacacccgactgacagaagcaatgcagttaaagttaatcaggtctcatcgttttcgctcccgtgggcagatcctcagaaaatcccgtacaccattatggggccctacctgaaacctctcttcgaccgggcttttattgacgggttgcatgatccgtcgaagcgcccgacagccgatgaatgggagagcgccctggtaaaaaccgtcgatctcatccagccatgccagaacaagaattgtgaccagaaatggtacgttttcaatggcaagaccaaacccgtttgtccctattgcggtacaccgtacaaaggcaaactccccatcctgaatctgtattcgtcgagaaaggctggaactttcaggccagatgatcaccggcttatggtgtggagcggtcagtcattatatgcatggcacgtcaaccgactgattgctcctaacgaacgaaccaccgatgagcagaagaaaagggttggttatttcgtcttccataatgaccagtggtggttggttaacgaggggcttagcgggctcatatcacttcccgatcggaaaacggtcggcattggtgaaaagttgctgctggaggacaacacccagttcatcctttcttcagaggatggcggacggctggtagtggtacaactcgtggtgaattaa

SEQ ID NO: 94143 - DNA, 627 bp, Enterobacter aerogenes
gtggttgtctggcaaaagatacctctgcagaatgagacaatcacctttaaacatgaccttaattttagccatcacaggctactgaacccggatccggtgagcgctctggctcacataagaaagaagcatatagaagaccaggctatgcgtactcataaactgaacaagtcacgtaaactatatcgcagtgacaatacaactacgcggcattattcaattaatccggggggggagtatcgctgggggcgaaatcgtaaaaaagccgaagacgagctgctggcaaagcgcgagacaatgcatggcaggcaaaagagaggccgtgactataccccattgttttactttctcgtcaaacagattggccaaccgtgggataaggtattcagcgaagtatgtggtcgtcttgatacaacagagcctgttttctggttggtcgcgcggcatgagcatcagaaaagagatttggtacgtatcggtgacagcagcttttatccgggcctgtttgttgatggtaatggaatcttacaacaggtaaacccttcgattacgggaaaggacgttaaggtaacctgccgttgctgtacccacacctatatgggggagccagtcccagggaagtatgagtaa

SEQ ID NO: 94144 - DNA, 147 bp, Enterobacter aerogenes
atggactttcaaatgataaaccaggtatccaaatgcccgcttctctttcatgccttaaatgacgaagtcgtggcgttttacacaaagtttggattcgagacctctgcagtcaatgcactgacattattgttcccggtcaaagtatga

SEQ ID NO: 94145 - DNA, 405 bp, Enterobacter aerogenes
atgacaattttagtgacgctacaggctcagctcattgtgggagaagagcaggtgataaaaagcctggcaccggaggggatgctggcggccgtatttgaagacgacggccggaccgggtatttctatgcgctcgatgagtcccttgaaggaaacccgattcttgatgcagtgcatatctacaatgtcgaggatatatcagacgcccacattccttcagacgttaaaatcggctggtctgaagacagtcagaagtgcgtgctccttatcaacggatatccgcatgcagtgttcgatttcgtggggaaaaatgggtactgcagaagtggatacccacccccgattaacaaggtttggtctgtgtccggacatgaatggagcgattcggtggatgactttttccggtga

SEQ ID NO: 94146 - DNA, 1536 bp, Enterobacter aerogenes
gtggcgctgaccagcttttttgctaacacggcgcgtccgcgccccatactgacggtcgcgacaatttttcttggcgcggtgctcaccacatttcaggggcgtttattctcagcggccctgcctgacctgcgcgggcagttcggcctggatatgctggaagctgcctggctgagcacggcattgaatggtgcgcaacttgtcaccatgccgatcgttccctggcttgccacagtacttgggccaacccgtgtgctggtcgtgcccagtttcacgcttggccttgtcgcctttatgatccccacgtttgcccaccactatcctgtgttggtcacgctgcacgccattgccgggttgtgcctgggtgtttatctgccgttaaccatttcgctggctctgcgaagcgtgcatccccgtttctggctggcggtcatggcggcatacagtctgcgcgtgtctactggcatggatgccggttatggcacatccggtttcctggtcgaagaaatcggttggcattggttgtactggccaatggcccttgtcggtccgataattgcttttctggcatggaaggcgttgccgttgtcatcgctcgatcgtacccaattacggcagggcgactgggcggggatcatcatgttctgctcggcgctggtactggttttcattggcatcgactcggccgaacggctgggctggagtgattccggactcgctatgtccacgctggcaggtggagccgtcttgttctgcgcatccgtgttacgcgccctgagccagaaaaacagcttttcaagtctcattgccttcggcaaccgcaatatttgcatctgtctggtgatcgcctgcctgttcggcatgcttatgacccccacgtctctgctgatcccgacattcctgacacaaatgggaaacctgaagcccattcaggcaggcacagcgacgtgggttgctttcggtacctaccttgccgcgacaccactggctatttacctggcaagacggatggaacctagactccttataatctgcggcctgatcgtcattgccttgactgcctggcaaggcacctacgtcagccatgactggcgggtggaccaattcgtcacgatccttgtcatgcagtcgttgggcgaaagtatcatgctaatcggccttattgccgcgttcgtcaccaatctcaatccgcagcacggcgtggcgctggggacttacgtacccatcgctcgcgtgctggcacccgtcgctgcgggtgcggttatgtcaacgtggcagagaatagctggcgacgttagctacgctagcctgagcacctattttccggttggcgagccctgggtggtggaacgtgctgagtcaggggtggcagggattgctcaattgctggcgcgcgaagcgctcgttgccgcacaaatcagcggttatcacctcgttttctggtgcagcttgctggcgcttggcctggccgtcttcattcgtccatccccgcctaatcagattgcgcctccgctgttgaaagttgccagtgatacttaa

SEQ ID NO: 94147 - DNA, 1143 bp, Enterobacter aerogenes
atgagcacacctgaaaaagaaccggaacgacgtcctcttgcgctacgtattgcgccctggctgggatgcgttgccgtcatcaccttcgtattactggcaacgacacaatggtctgaatgggcgagcagccgcagagtccagacgacccagaatgcgtatatgaaatcggattacgcggtattaagtgccagggtatccggttatatcaaaaacctgccagtaggcgactatgaaaaagtacacgcaggcgacctgatcgcgcagatagatgacagcgaatatgaatttgcggtagcggcggcagaggcaaacctggcaaaggcgcaggcgaacctggataacctggacggtgaaattgcacagcaacgtgcacgcatcaaagcgtcgcaagccaacgtcaaaacggcagaggtaaggattatccagtacaagactaatccggcacggcaggcggaactcgtcagggcaggcgcattgtcacgtcagcgtttcgaaacggctcaggcagacttcgagcaagccgtcagtcagcgtgacgcgactgcggctgaactggaactggcacaccgttctatgaaagtcctgaagggccagcgtgccgtgcgacaggctgatatcgatgccgcccgcgctcagttggaaaccgcattcaaaaatctggcctatacgcgtattgtcgccccctttgacggcatgctgaacaaacgccatgtgcaagtgggcagcctgatcggcaatggggctcagattgtagcgatcgtcccggactcgcagccctacgtggttgccaactataaagaaacccagcttgcccatgtcaaagtgggacaacctgtgagactgacggtggatggcttgccaggcaaagcattccggggacgcgtttctgaaatagcacccatgagcggtgcagagtctgctctgctgcccgcggataatgcatcgggcaacttcaccaaagtggtacagcggatccccgtgcgtatcgagctggagccgggccagaatgaactgagccgcttgcgggccggcatgtcggtagaaacacgcatcgacaccagaggggagattattgcgccctatgcggcgggcatgccgaaaacagcgcaactagctgctggcccagatcgtacaggaggctga

SEQ ID NO: 94148 - DNA, 1446 bp, Enterobacter aerogenes
atgaaacaccatcttttgatcggtttactggcggcgagcctgacaggctgtgccggtatggggggggtggatcgcaacatccccagggcaaagatgctgacaacggcggcagtggctgccgtcagcgatgcgccctggcgatggccctccactcactggtgggagcgttatcgtgacccggaactgaacagcctcatggaacgcgcgctgtcgttgagtccggatgtgcgtttggctcgggcccgtctggaacaggccgccgccatcgctgaacaggccggtgcgcagcgatggccaacaatgagcgcagatgccgatgcggtacgcaagcgctacgcgcaggcgtatgacgcggcacccccactcgcaggaaatttcggcacgacgtttacgctgagcgctgacgtgcactacacatttgatttctgggggaggcagcgtgctgcgctgcgtgcggcactgggagaaacggcggcacgagaagctgaggtcggggccgcccggctgatgttgaccagccgtatcgccagcgcctggtttgaattgtcccatttgtttgccatgcgagatttggcacagcagtcactggaattgcggcatcagaccttgcagttagtcgaacgaagagttcgcgctggcatggataccgaagtggagcgtcagcaggcacagggcgatctgccggtgaccgagcgcgacatcctgcaactggatgagcagatcgccttacaacggcatgccttgtccactctggcagggctcccgctggacgtgctggagaatactcaaccggatttaatgacggcggcggtggacggcgagcttcctgactcgatacccgcagagttgcttgggcatcgtccagatgttgttgctgcccgctggagagtggaagctgctacacaacatgccgaagtcgccagggcggatttctacccaaacatcagtttacgggcgttcgcggggttcgctcgtacagggttgacagtcggcttgtcagactggctgaccgcaggcagtcgcacctatggtgtggctcctgccatcagcttacccattttcgatgccgggcgattgcgggcgcaatacaaaggtcgggcagcagagctggatgccgccattgagacttacaactcggcgctgctgaacgccgtacgcgatgtggcagatcggctggtgtctttcgatgccctgctaccgcaacttaacgcgcaaaaacaggcactggcggccaggcagagtgctttcagcctggcacgaagacaatacgaatccggactgaccgactacctgacagttctgaacgcccaaaacgcgctgctgtatgagcgtcgtgagcagttaaccctgaaaaaacgagcaattgttctggatgcggaactcaatcgcgctttgggcggtggctttagtgcaaccgatgagacaagcaatatcctgtggaaataa

SEQ ID NO: 94149 - DNA, 642 bp, Enterobacter aerogenes
atgaaagccccacgaatacaacgagagcagatcatccagaccgctcttaatctgctgaatgagaatggccttgaaggattgacactgcgcaagctcgcacaggctctgcgcatccaggcaccctctttgtactggcatttcggaagtaagcaggcgctgatcgacggcatggccgatgcaatggtgcaggacgtcgcccttcactttaccgacgcgcaaacatgggtagatcgcatccgacaagtcgccggggaactgcgtcaggcgctacttcaacaccgcgacggcgcgcgggtatttgctggcacgtacgtcgtcacagacaatgtgctgagaaccagcgaagcgctaatttccgcttttgttcaggcaggcgcagacgatcagcttgcagcgacgtgcagcttcagcgtgacctattatgtgctgggtttcgtgatggaagaacaggcgctgggaccaggtagttcgcttgatcttccatccagaaaagaggcatttatcgaactggcgcaaaaaaaatatccctacaactggcgtgcgcgtgaggcgatattttcggaagagttcgaggggcggttcgctgtcggtctggatctgttcatcgacgggatacaacggcgcattcatgcaggtgcctga

SEQ ID NO: 94150 - DNA, 411 bp, Enterobacter aerogenes
atgcacattttgcacaatcaattcccacaagtatgggtatctgccgtgctttcatccacctgggaggccgaactggatgctttgctgaaccggggcgaacgttttgtcttattaatctgcaacttgcctgataaagagcactccagtagcacagagaaaaaagtgttcgctctatggtttaagcgcaatcggaaacggcttgccgaagtttgcgcgggtagcattgtgatcgtccccaacgaaatggttgcgactggtttggcgcctctgctagctccgttgtgcaaggcgttcgtttttctggttcgggtcgtgacagaagaacgtcttgaaggcgaaatagcagatctattgagtgaactggaatatgctgggatcccgtttaataaaggaaaagctcttactgcctga

SEQ ID NO: 94151 - DNA, 309 bp, Enterobacter aerogenes
atgttagagttttttaaagaaatttatgcttcagtaaaatccaactctagtgaaatagttaaaaattactatattggagcatttatattctcgtggttcactattaactggaagtttgttttaacgatactttttagtgaaagtaagattgaagagagaatagataaagcaggtttttatctaaccactgacaagtgtctgactctcccctttattgtatctgtttccatttgtttattgctgcccattattaatatgattattgcttacgctcaaagaaaccctaataagtatttgcgcggcgggtga

SEQ ID NO: 94152 - DNA, 528 bp, Enterobacter aerogenes
gtgatgcaagagctggcgatagagatgatcaacgacgaatttgactatgacataggcgaattcgattgtggagaagaaaccttaaatacatttttgaaagaccatctcaagcggcagcatgatgggcaaattttaaaaggttatgtattagtaaccaaagaacagaagcctaagctgttaggctattacacattatccgggagctgtttcgagagaaaaatgctcccgtcaaaaacacagcaaagaaaaatcccttatcagaatgcgccaagcattactttgggacgcttggctattgacaaatcaattcaaggtcagggatggggtgaattgctagtaactcacgcaatgaatgtcgtctgggatgcatctaaggccgtaggaatatatggtctcttcgtggaagctctgaacgataaagctaagcgcttctataccagattagatttcatacagctcgttggtgagaatagtaatctgctattttacccgacaaaatctattgaaaaaatctttaccgaagagtaa

SEQ ID NO: 94153 - DNA, 270 bp, Enterobacter aerogenes
atgtccgcactgagaaagcagcgcatagatctaagattaactgatgacgacaaaagcttaatcgaagaagccgcggcaatgtcaaaccagactattacacagtttgtagttgccagtgcctcagaacgtgcagcggaagtgattgaacaacatcgcagaatggttctaaacgaggagtcttggaaccttgtcatggatgcgatcgcaaaccctgctgcgccgaatgagcggctgaagcgagcagcgaagcgtctacaaaaaatgaggtag

SEQ ID NO: 94154 - DNA, 1176 bp, Enterobacter aerogenes
gtgaatgcgaaaaaaaaggcggatgattcgagtgggcgttttaacactagccctgaagtgaaaactctggtctggatccgtgctgcgggtcattgtgagctctgcggaaccgatctgacacatgattttcgtattggtacgccgatgaaatggggagaagtagcccatattcttcctgccagcccgaaaggccccaggggaaacgccacacacagcgaagaagaggccctggcactgacgaatgacagcgagaatcttatgctactgtgtccgggatgccatgatcgggttgatcgtgacggcgataattatcccgaagacgatcttagcggacttcactctgcctgcctgaccagaattcgcctagcggcttccacgcccggggaggaacgcgccataccggttatcgttcaaagccagcatcatcagactctggttgcaattccggcgcaggcccttcttaccgccatgtctgcagaagggctgacggcacagtgccatccggttacggttgtgttccctgagcccagttcacggggaagggatgcgagttactggcaggcgattaaggatttaatcactgaaaaactcgaggccgggcttgcccgccgcggggggcaatttggcgataagccggctctggccatagttgggcttgcggatattccggcgttgtttttcctcggccagaccattggcgaccgctataaacgctttcagtattcatttaacagggaacatatattgcgctggccggatacagatgccctgccgccggcgtttacctcttctgaacttccgcaaggtgaggggccagttgctctggtgctgtctctttccgcagcggtaccaggaggcgatgttaccgccgcactgccgggtgcccggattgtagaattcactgtccctgaacccagctatgccatggtgacaaaccgcagggtcatccatgcgttcagagatgagctgcagaagctgctcagtcagttagaagccaccacgacccaggccattcatgtttttgccgcgttacctgctgcgctggccattgaatttggggctttgctgacgacccagcatcagcatccctacatcatctttgaccgtgacaaaaataacgcaaaccagtttcgccccatgcttagcatcggatgtacagaggagcaacgtccatga

SEQ ID NO: 94155 - DNA, 1248 bp, Enterobacter aerogenes
atgagtaacgaacagactaaacaccgcagctgggagtattttcttctccgtgcagcccgaaaaatttcgttatcagcagctcagtacagcgttattgatgctcgctactctcagctggaaaaaattctttctgctgccgatgatcccctgcttgcggatgcccatatttttccccagggttctatgcgtcttcagacaacgattaacccggtgcctggtgcgccagcagatctcgggacaattgatgcagatgcgattgtctggttaccccatgccagagggatcgatgcccggactgtattagaggtcattgaacgtcgtttccaggagggcagtagggttcaggaggatattcaacaacttcgtcgcggtgtcaggattgtttacgccgatgaaaatccgggtttccacattgatgtcacacctgcacgtccctgccatcataatgagcaaagcgacggactgggcatgctcgaagtacccgacagggagcacggctggaaggcaagcagtcccattccttatgcagactggctgcatgatgcgtcaaagcatgacatcatgcttgaacatgttgttgagtttaataaaagtcgtgcagcaatggactctgcgacccaggccccgctgcctgaatataaagaatatcaaaaagatgatccgttacgtgcgagcattaaactgatgaaaaggcacagggatgaatgggcgatcaggacgaaaaatgaagaataccggcctatttcggcagttatcaccacgcttgcgactcacgcttatctggatgttgtcgcgcagtcagaatataccgccttcaccccgcttcaggctatcctggcaatcgtgaacaggatgcctgaccatattcaccgttacagtaatgagtattacgtctgcaatcctgaagataacggcgagaattttgcggaaaaatggaatcgcccagatgaaggttataaatacgttgatgcctttaataaatggcatgtgagtgcccgttcggcgctgacgctggggctcgacagccacgcgtcgacagaaacctttgcgaaggcggtccaggagcagttcggtattggtccgacattcgttcgcgaagttaacgagagcattccggcaaactggacgatgcccgggcggcaagacggtgtgacacgaaactctgtcgcaatggggtctctgttcgggagttcagtcagcagtaaccagtctcaggcaaatgtggcacctgtcgggcgactcggctga

SEQ ID NO: 94156 - DNA, 1752 bp, Enterobacter aerogenes
atgatacaacgcggcatttccgcccttaaagactgtctgggcgcggataatgcttcggctcttctcaggcccgcagaattgcgggtcggtgaggcggccgccttttattttcctttacccgctgattacaccggccttgagcgaagactacggattggttttcccaacggtttcccgtctgaatcccctagccttcaggttgaaccttcaccgtggttagtctggccccatgccatggcgtccgggttgtgtctccatggattcagggaaaagcccgttacgggctcgcctgagaaaattgttcaggacagcttgtcccgttttgcgagcattgtgtctttttctctggaaaacgcagatcctgcacggcgtgagatggagtttcagaatgaaatttccacttactggctctggcagcttaaacgatcggcacgtagcctgattcttctgggggaacctgaatcgggttcagttttgtatgttgtaagcgatccgaggtataccggacatactggtctcaacccggtatgggtttcgtctgacaagaacgctatccgccggcatttcagacatgccactggccgttcggttgtgataagaagcccccatgaagcaggtttctttgtcaaactgacgtctttgcctggcattaaggtgcctgaacctcacgcgtttctcgaatggcttgctccccatatttctgaagaatccctggccgcgatgtctgaatggtcagaaaaaagtagtgctttgctttctcgatgggttgtcatggcattaccgggtggggacggggcggcaagatttactgttaacctgtgcaccagaaagaaggaaacagaccgtacaaatttttacggcctgagatcctcacgccgtcagtccgggttaaagaaagaaggacctccggccagtattctgtcatcgcgtgtgaacgttattgatcgtggggcatttttttcacgggatcgaagtaacacagcaaaaacacttgagaactcgcatgttgtctttgtcggtgtagggtcgctgggatctgctgtgagtattcaactcgccagggccggtctgggcaggctgacccttatcgatcctgacagactggagtcacccaatctggggcggcatatgctgggtgctgaggatttaggcaaatttaagtctcaggccatgcgccatcgtctgcttcaggatctgcctgtgcttgatgtcaccgcgctggatacatacatcgaatgggttatgggtcaaaaacccgatattttcgaggatgttgatctggttattatcacgacagctgactgggaatcagagtctgccctctgggaaaagaaagcctccggagcgaaatgggggctgatacaggcctggagtgagccgcatacacttgtcgggcatgcactgatcgcacctgaaggccgctttgatgcaagatatctttttagcgatagaggtgacttcaagcaccggtttaccgactggccggatgggggcgttgtgcctcttcctgcctgtggtgaaagttttataccgggaggctcggcgggaatgaatggtgttgcaacaatggtcactcaggccgcaatacgttacctgacgactgtaggggatgtcactcaatggcattccagtgtgtatcgccctgatgaggccggagtgttaggaggacgctatacgggacctgtacttcctgaaggagttgtccagagtatttttgaacgtaactggccgaaacccgggcaaaacgcatga

SEQ ID NO: 94157 - DNA, 498 bp, Enterobacter aerogenes
atgaatgaaatagcatggcgctgggcctggccggatatgaatgcggagctgcaggttgggcggcaggtctccgagatgttcggtcactaccggcagtcacagggagaaaatgagcgaggcgggcagctgtttgtcgatcccgcccatcccggcggcattgtactgtgtcatgcttcagcgccacatcctgcggaccgcgctggcagaacgtggctcgaactgagcagcgatcgctgccgcattgaaatcgagaacgcaaacaggaagggattgcgcttggttggatactggcatacgcatccgcaggcagttcctcacatctcagggactgacattgccagttttgcgagattcgcgaggcaaaatgcacatgatcttccccatcccgtggcggtgattgtcggcacgtcaccatcgaccgcaggcattaaagcctggatatttcgggagggcaggtatcaagaggcagtgtatgcagcatccttgtcgcggccttaa

SEQ ID NO: 94158 - DNA, 438 bp, Enterobacter aerogenes
atgaatgctagcgagattttcgtttcagtcgatattgaaacatccggcccggtcccgggattatttagtctgctttccattggggcctgtctggtgcatgcgcccgacgtgcgtttttatgccgagttgaagcctgactgtactggctttgatcctgaggcgctggcagtgacgggatttaaccttcaggcactggctaccaccggcatagcccccgcggacgccatgcttcagttatccacctggctcacatcccaccttcaaccgagccagaagccggtctttacgggactgaatgccccctttgactggtcattcatcaattactacttccataaatatacggggaacaacccatttggcttcagtgcattagaattaaagcttactttatgggggcaacaggctgtacgtggtctgagaccaaatcatcaatga

SEQ ID NO: 94159 - DNA, 996 bp, Enterobacter aerogenes
atgtttccagtcggcattgacgtaagtaaaaacaccctggatctttgcatgctttatgacggtatcaaaggacgcataaaaacccgtaacatccagaataacagacattcagttgaaaatattcttcactggctcaggcttcaacattgcagtccggaagatgttcatgtggtaatggaagctaccggtgtttatcacgaacagctggccactgaattacatgatgccggtttccgggtttctctggccaaccctcaccgtagtcgggagtttgcgcgtggcatgggaatcatgacaaaaacggataaggtggatgcatatatgctggcctgttacgcattccttaagaagccacaccgctgggagccgccggcacccgaaatcagatatctcggtgcactcctgcgacggcgggatgttctgctgggtgatgccctgcgtgaggagaacagactggaaaaatacctgtcgacagacacacctgcagatattatcagttcctgcaggcgtatggcgcagcttctgcgcgaggagataagtaatatcgagcggcagataaaagcacatatcaaagccagccctgcactgaggcgtgattatacactgctgacctcaattaaatcggttggtccccagctggggatgcatatgctgatcgtgcttcgcagccataactttgtatcggctgagcaggctgccgcctttctgggcgtggtgccgatcgagaaacgctcaggcacatcggtccggcgccggccgcggatgtcgaaaatcggcccccctcagttgagagcgaagctttacatgtccgccctgtgcggaaaaatctacaataagcgaatgcgtaatatttacgatgagatgtgcctgcggggtaaacctgaaatggtggccattggcgcgctgatgcggaaactggtgcactggtgttatggcgtcctgaagaccggaaccgtttttaatgacgaagacctgaaaccggtactgtcaacctga

SEQ ID NO: 94160 - DNA, 321 bp, Enterobacter aerogenes
atgcacacctgttttagttccacgcactttttgagagttccggttttcagccatcagcaggtgatcctccggcgtcaggttattcagggattcatggggacgctctggatggaagatcctcgtgacgaagccgaatttgcccccggccacgtgttttttttcgagcgtaatgttgtccatgcattaccaacccttcttgaagaacccgtaatatttctgtcattggccagccctcgtcgtgatcctgaagatattacctttgttgacccgaaagatggcactgccagaacctttatggccagaaataatgagtcagcataa

SEQ ID NO: 94161 - DNA, 1128 bp, Enterobacter aerogenes
gtgcaaactattgatattggaattttgctttccacagaaggtacctacagccacctggcgaacagcacactgcttggtgcgcgccatgccttagaggaaatcaatgccgatcctgcttatccttttcagctgcgggcccgacatatcaaccctgcgggtgaactcgcagcctacagtgaagcggtgagcacctttatcgctcacggcatccgccatatcttcggaaccattacctctgccagtcggaaggagattatcccggacctggagcagcataacctgctgctgtggtatggctgtccttacgaggggttcgagagctgcgagcaggtcgtatatctgggcggttgtccgaaccagactctgctgccactcctgcggctggcgctggatatgttcggaaatcgctcctggctgatcggctctaactacgtctggggctgggaaagcaatcgtatcgcccgtgaggtagtggaaggttccggcggtacggtggtgggcgaaaaatatctgcacctgagaaacagcaacgtgaccgagttgattgaggcgattctcagcacagaggtagattttgtgctcaataacctggtaggcgaaacctcttatgcgtttctgcgcgcactggacgaggcctgtcttcgcgatcggcggacgttagcggtgctcagctgtaattttaccgaagccgaagtcgccgaagtcgcgccactaagggcggtacgtttgctttcctgcggaccgttttttgagagcgtcgatctcgatttttgcgcgcggcagcacctgcaacatggcgcacagcgcatctcccactactatatcggcggctggcgggcagtaaggctgtttgccaatagcctgcgcgaggccggaaacagcgagccgggtgcggtgctggcggcactgcatcgtcagcacgacgttgattctccgggcgctcgctcagtaatggctcgaaacaaccacgcctgtttgccctgctacatcgctgagttgcaacaaacttgctttcagatactgcatcgcgaaccgctgccggttatgcccgatccctatctctccgcgaccgagctacgtgaaagccgaacggttgcagccagacctgctctgaggattgttaaatga

SEQ ID NO: 94162 - DNA, 594 bp, Enterobacter aerogenes
atgaaaacgctgctgtccccggatttagatgctcagccgctcctgctggtagactgtgaagcaaggagtcgcgaagcgctggaaaaaaacctgacgcggatgggtatccgctggcatcacctgaccggagatgaggctttacctcctctcaccccctgtgcagtactggtggaactggaggcattcgccagcccgctaaccctgagccagatcaatctggcgggaataccggtgatcgcgctgacctcacatgagggactttaccaggtacagcgcgcgctggagttaggggcaacagcgctccttaccaagcctattacacagcgagccatctataccaccctgatgatggcagtggggctgcgtcagcagttgcatgacattcaacagcaacagatgctactgcgccagcgtctggcagcaatgccgcagattacccaagctctggcggcccagatgcaagcggaaagtattgatgaacaacaggcatgggttcgcctgcgctcggaatcaatgtgtacgaaccagtcggtggcacaggtggcgcagaagtggctgctacgaatgtcgtccggcaagcggggagcacaatga

SEQ ID NO: 94163 - DNA, 849 bp, Enterobacter aerogenes
atgaatagagtcggatattttctgcgccggccagccctgctgctctcgctgctgtttattctcctggtggtgatgagcgcgctgtttgccccctggctcacccccttcgatcccgatgaacagtttgtcgagggactgagcctggaaggcgcaccgctttctcccaacagcacttactggctgggaaccgatctgctgggacgcgatctcttctcgcgtttaatttacggagctcgtacttcgttactcatcggtgttgtcgccaacggcactgcagtactgatcggcgtcctggtagggcttagcgcaggttatctgcaggggcgtatcggagggctgctgatgcgctttaccgatctgatgatggcgtttcccgcactgctgctggcgattgccctggcagcgattttccagccaagtgtctggatcgtgtccctggtgatcgccatggtgaactgggtgcagatcgcgagggttatctacgccgaaactagcgcgcttagcgcccgcgactttatcgccgtggaacgcaccctgggggccggaacgttgcgtattctcggcgtgcatttaattccacatctggcgccaacggtgctggtctgggccacactaggcatctccaccacagtcctgctggaagctactctatcgttcctcggggtgggggtacagccgccaacgccgagttggggcaacatcatctttgaaagccagagctattttacttcggctccctggctggtgttctttcccggcgcggcgattgtgctgctgtcgctctctttcaatttcgctggtgacgccctgcgcgacgccctcgatcccggcttaaaaggacgaaactaa

SEQ ID NO: 94164 - DNA, 921 bp, Enterobacter aerogenes
atgctatttctgggaaaacgtctgttgcatgccgggctgatcctgcttggcgttacgttgatctgctatttgctgctgtttatgttgcccgccgatccagcgcgccaaatcgccgggcgcagtgccacgccggaagtagtcgaaaacatccgccatcagttggggttggatctgccgttttatcagcaatattggcgttatctgcaggggctgctgcacggcgatctgggacgctcttttattcagcgcagcgaagtgactgaactggtttccgcccgtatcgggccgtcactgcatctgatggcggcgggtattctctgcgagttggtactggggatcgccctcggcaccctggcggcgttaaaacgcggcgggctggcggaccggcttctgatggcgctctcctttatcggtgtttcggtgccgcagttcatcgccgcgatgctttttctctatcttttcgccgtggtactcaactggttcccgatgggaggctatggcggcttcagccatctggcgctaccggcgctaaccctcggcctgctcggcagcggctggtattcacgcatgttgcgctcgtcgatgattgaggtgctgcatcaggattttatccgtaccgcgcgggccaaagggctgggccgaacccgcgtactgctgcgtcacgtgctgccgaatgccgtgctgccgctaattccgatgataggcattgatatcggcatttttatgggcggactggtggtagtcgaatcggtctttggctggccgggtatcggtcagctggcctggcaggcgattcaacaggtggatatcccggtgattgtcggggtaaccaccgtgtcagcggttgccattgttggcggcaaccttattgcggatctggtgctgccgtgggtcgatccgcgcattgatgtcaaaaagtag

SEQ ID NO: 94165 - DNA, 1608 bp, Enterobacter aerogenes
atgatgaaaaatgcgttattgacaatggcggtggccgcggcctgtttctcttatggcgcgcaggctgacgagaagaccggcggcgatatcgtggtgacctaccagaacgacgtggcgaccctcgatccggccattggctatgactggcaaaactggtcgatgatcaaaagcctgttcgacggcctgatggactatcgtcccggcaccaccgagttggtgaacgacctggcggagagctacgccatttccgaggacggcaaggtctacacctttgtgctacgcaaaggggtgaaattccacaacggccgcgaggtcacggcggcggacgtgaaatattctctggaacgcacagtcaatccgaaaacccaaagtccgggcgccgggttcttcagtcccatcgcgggctatgacgaggaggccagcggtaaaagcacgaccctgagcggtatcgaggtcgtcgacgatcatacggtaaaaatcactctgaaagagcccaacgccaccttcctgcatgtgctggcgctgaactttgcctcggtggttccccgtgaggaggtggagaaatggggcgccgacttcggcaagcatccggtcggcagcggcgcgtttgagctccaggagtggaagctgggccaggagctgatcttccgcaaaaacccgaactactttaaagccggcgtgccgcggctggatcacataaagttcgaaatgggacaggatccctcggtcgctcttctgcggctggaaaaaggcgaagtggatattgccggcgacggcgtaccgcccgcacagtttctgtcgtttaaaaacaacccggcctataagggcctgatggtcaccggcgaccagttgcagaccggctacgtgacgatgaaaaccacgctgccgcctttcgataatctcaaagtccgccaggcggtgaacatggcggtcaacaaagatcgcatcgtgcgcatcattaatggacgcgcggcgccggccaaccagccactgccacccgccatgcccggttatgacaaggcatatcagggtttcagctacgacccggcaaaagcgaagcaactgctcagcgaagcgggtttccccaacggttttgctaccgaactgtacgtgatgaataccgatccgcagccgcgtatcgcccagtctatccagcaggatctggccaaagtgggcatccacgccagcatcaaatccctggcgcaggcgaatgtgattgcggcgggcggctccgccagccaagcgccgatggtctggtccggcggcatggcgtggatcgccgatttcccggatccctccaacttctatggcccgatcctcggctgcgccggggcggtagagggcggctggaactgggcgcgctactgcaacaaagcgctggacgcgcaggcggccgcggcggacagcatggtgaaatccgaccagcaggacgcgcgcattgaagcctggcgcaaaatcttcatcactgcaatggatgacgcgccctgggtgccggtattcaacgagaagcgctacaccgtacattccgcacgcatggggggcgaggacgcgctgtatgtcgatccagtgcatgtaccagtcaactacgactatatcggactgaaataa

SEQ ID NO: 94166 - DNA, 948 bp, Enterobacter aerogenes
atgtgccaaaattgtctggtgaagaccattcatcatgctcaacatcatttcggctgggataacagcctgagcccggtcctgcacgtagcttccggcagccaactggagtttcactgcctggatgcggctaacggctggttcaacgccggttctaccgcagcggatatcccaacgctgccgtttgataagctcaacccggtcagtggcccggtctatgtggaaggcgctcagccgggcgatgcgctaaaggtgacgctggaatcctttcgtcccagcggctttggctggactgcgaatatcccgggcttcggcctgctggccgatcagttttctgatccggcgctgacgctgtggcaatatgaccgccagggcttaaccccctgcgcctttggccgatatggccgcgtaccgctgaaacccttcgccggtaccctcggcgtcgctcccgccgccgcgggccatcattcggtggtgccgccgcgccgcgtgggcggcaatctggatattcgcgatctggccgctggctgcacattatggctaccggtggaagtagaaggcgcgttgttttctattggtgacacccacgccgcgcagggcgatggtgaagtctgcggcacggcgattgaaagcgcgatggacgtggtggtgaagctggaagtggttaaagatatgccgctgaaaacgccgcgtttcgccacccctggcccagtgacccaacatctggatcggcacggctacagcgccttcaccggcattggccctgacctgatgaccgccgcccgcgacgcggtaagctataccatcgatgcgctgtgccgcgaacaagggatgtcggcggaagaggcctatatgctctgctccgtgtgcggcgatctgcgcatcagcgaaatcgtcgatcggcctaactgggtggtgtcgttctattttcccaacagcgtgtttaattag

SEQ ID NO: 94167 - DNA, 1734 bp, Enterobacter aerogenes
atgtcagcagtcctatttccggcgccgctgctctcggtcgagcgcctgtcgatccagtttggtacacagcgggtggtggatgacgtcagctttgcgctctggccgggaaaaactctgtgcattgccggcgagtcgggcagcggtaaatcgctgacttcgctggcgatcatgggtttgcttccggaggaggcacagattccaggcggcgcgattatttttgataaccaggatttgctcagcctgccggagcggcaaatgcagctgctgcgcggcaagtcggttgccatgatttttcaggaaccgatgacctcgctcaatccgctgatgacggtgggccagcagctggaagagacgctgcaacgccacgaagtgctgggccgccatgaacggcgcagccgggtcagcacgatgctggacgcggtcaaaatcagtcatgtggagaagcgcctgcaacagtatccgcacgagctttccggcggtatgcgccagagggtgatgatcgccatggcaatgctgtgccagccacaggtgctgattgccgatgagccgaccacggccctcgacgtcactattcaggcgcagatcctcgagttgatgcgcgaactgcagcaggcgttttccaccagcctgctgttgatcacccacgatatgggagtggtggcagaaatggccgatgatgtgctggtcatgagtcacggcaaaatcatggagcaggctccggcaaaaacgctgtttacctcgccgcaggcggcttatacccgccagctgttgcaggcggtaccggtgctgggccaggcgcccgcgctggcgccggtcgaggcgacgcgaccgttgctcagcgtccgcgacctcagcgtgcgctttccggtgcgcggcgacggcctgcgcgtgcgtcgcgaagtccatgccgtcgatggcgtcagcttcgatcttttccccggcgagacgttgggcatcgtcggtgaaagcggctgcggtaaatcgacgacggcaaaggctctgatgaatatggtgccatttagcggcagcgcgcagcttaacggacaggagctgcacggcctgaaggacgaggcgttaagagcggtacgccgcgatttgcagatggtgtttcaggatccctgggcggcgctcaatccgcgcaaaactattttcgacctggttggggagccgctgctgattcatgagcagatgcccgcagtacagcgcacggagcgggtggcgcagctattgcagcaggtcggcctgccagcggaagcgatgcggcgttatccgcaccagttttccggcggccagcgccagcgcatttgcattgcccgcgcgctggcgctgaacccgaaagtgatcatcgccgatgaatcggtttccgcgctggatgtttcagtacaggcgcaggtgctgacgctgctggaagatttgcgtcagcgctatcggctcagctatctgtttatttcccatgatatggcggtggtggagcgcatctgccaccgggtagcggtgatgtttggcggccagctcgtggagatcggcccacgagatcgagtgttgcaccatccgcagcatccttatactcagcacttgctcagcgccgttcctatacctgacgttcagcaaagacggcaaccccgagccaccagcgcaatgccgataagaccagaaccgatcaaacccatcggctatcagagagtaccgcagcgctttaccgattttggcgacgggcacctcgtcgcctgctga

SEQ ID NO: 94168 - DNA, 255 bp, Enterobacter aerogenes
gtgtcttctgcgctttccccctccaaccccactaggacaacttcccgctggggcttgtacgtcaggattgtgctgattggcgcgaatctgcgcgcccccattacgagcctcgggccggttcttcccgatattcaacgcgccttacacctcggaggtcttggggcggaagcagctggcaccgacggcaaacatctccaattcaatgcgcagctggcgacaaaccatttccatcaatcagggctggccgccttgtga

SEQ ID NO: 94169 - DNA, 1032 bp, Enterobacter aerogenes
atgccgatcatagcaccaataccccgtggcgaacgacgcctgatgcagaaagctattcataaaacgcgcgataaaaatcatgcccgcagactcacggccatgctgatgcttcatcggggtgaacgggtcagcgatgttgccagaactctctgttgtgcccattcatccgttggtcgctggattaactggtttacgcactcaggtattgaaggcctgaaatccttacccgcagggcgctcccgacgctggccttttgaacatatctgcaccctgttacgtgagctgataaagcattctcccggcgattttggttatcaacgttcacgctggagcaccgaattactggcattaaaaatcaatgagataaccggttgccagttacatgcaggaaccgttcgccgctggttgccatctgcggggcttgtatggcgcagggccgcgccaactctgcgtatccgtgacccacataaagatgaaaagatggcggtaatccacaaagcactggatgaatgcagcgcagagcatccggtattttatgaagatgaagtggatatccaccttaatcctaaaatcggtgcggactggcagttgcgcggacagcagaaacgggtagtgacgccggggcagaacgaaaaatactatctggccggcgcactgcacagtggcacgggtaaagtcagctacgtgggcggcaacagcaaaagttcagcgctgtttatcgctctgctgaaacacctgaaagccacttaccggcgggcgaaaacaatcacgctgatcgttgataactacattatccataaaagccgcgaaacacagcgctggttgaaagcaaatcccaagttcagggtaatttaccagccggtttactcgccgtgggtgaatcatgtggaacggctatggcaggcacttcatgacacgataacccgtaatcatcagtgccgctcaatgtggcagttactgaaaaaggtccgccattttatggaaaccgccagcccattccccggaggaaaacatggtcaggcaaaagtgtag

SEQ ID NO: 94170 - DNA, 1080 bp, Enterobacter aerogenes
atgaaaacagcaaccgcagtcataagccgttgtgccttacgccacaacctgcagcaggtgcgacgtctggcgccacacagtcgattaatcgccgtaataaaagctaacgcatacggccacggtgccctggcaaccgccctcgccctgaaggatgctgacggttacggtgtcgcccgcctgtcggaagcgcttgtgctgcgccaggaaggcatcaccaaacccattctgttgctggaaggattcttatccaaagacgagcttcctttgctggccgagaatcactttgaaaccgtcgtgcataatattgaacagcttttcgcacttgaacagaccgttctgccccaccccattacggtgtggatgaagctggataccggcatgcatcgattgggcatccgtccagacctggctgaggaattctatcagaggctgtgcaactgccgcaacgtagtgcaaccagtcaacatcatgagtcacctctgccgtgcggacgaacctgaggaagaaaccacacacagtcagctggaatgcttcgacgcattcgtccagtgtaagcccggcgtacaatccatcactgcctctagtggtattcttctgtggccacaggcccatcgcggccaggttcgtcccggtatcatcctgtacggcgtgtcaccgatagtaactcaggatgctgcggacttcggctttgaaccctgcatgacactgacatcctgccttatcgcagtacgcgagcataaggcaggcgaacctgtgggctatggcggtgactggaccagcacgcgcgatacctgcctcggtgtggtagcaatgggctacggcgacggctacccccgcagcgcgccttacggcacacctgtgcttgtcaatggccgggaagtaccgttggctggccgggtttccatggacatggtcacggttgatctcggtcccaaggctctggatcaggtgggagataaagtcattttttggggcaaggaactgccggtggaacgcatcgcccgtcataccggtatcggcgctggcgagttgattactcgcctgacacaacgcacagcactcgaatatgttgatgactga

SEQ ID NO: 94171 - DNA, 786 bp, Enterobacter aerogenes
atgaatatgacaatgacggttgtggcaggtgcaattgccctgacgatgatgttgaacacagctcatgctgcagaacagaaaacagtaaaactcggtctgagtccggcctatgcgccatttgaaagcaaaacccctgacggcaagctggttggattcgatattgatatcggcaacgaagtctgtaagcgaattcaggctaattgcgtttgggtggagatgtcttttgacggacttattcccgcgttagtaagtaaaaaaattgacatcatcaactcatcaatgaacatcacagaaaaacgacagaaaagtatctcctttaccaatcccatttatattatgccgatccaactggtcgccaggaaaaactccggattactaccgacagtggaaagtctcaaaggtaaaagtgtaggcgtgcaacagggcacgacacaagaagattatgctaaagcgcactgggccaacgctggagtaaatgtcgttacctatcaggaccaggaccaggtattcatggacttatccgctggtcgtctggatggcgcagttcaggaatcacagacagcacagcaggcatttctaagtaaagatgaaggtaaagaattcagctttgccggcgattcactgaaagaccctgtcacattgggacaaggtactggtatggggttacgtcagaaagatacagagttgcagcagcaggtaaataatgctctgaatgaaatgaaaaaagatggaactctactgaaactttcaactcagtattttaatagaaacattattgctgaatag

SEQ ID NO: 94172 - DNA, 774 bp, Enterobacter aerogenes
atgtcagaaactaaattaaacgtcgtcgagttgcacaaaagctacggagagcacgaagtgctgaagggagtctccctgcaagccagggctggtgatgtgatcagcattatcggctcttccggctccggtaagagtaccttcctgcgctgtatcaattttcttgaaaaacccagcgaaggctccatcagcgtgaataacgagatgatccacctggtacgggacaaagacgggcaacttaaggtagcagataaaaatcagctacgccgtctgagaaccagcctgaccatggtatttcagcacttcaacctgtggagtcatctgaccgtgctggaaaatgtgatggaagcccctgttcgcgtgttagggctcagtaaggaatccgcacgggaacgggcgatgaaatatctgtccaaggtgggcattgacgaacgggcgcaaagtaaatatccggccaatctttccgggggacaacagcagcgagtgtccattgcccgggctctggcgatggagccggaagtgttgttgttcgacgaacccacttcggcactggacccggaactggtgggggaagtgctgaaaatcatgaggcagctggcagaagaaggaaaaaccatggtggttgtcacccacgaaatggagtttgcacgtcacgtatccagtcaggtgatctttctgcatcagggaaaaatcgaagaacaagggcctccgtccggggtatttggcaacccgcaaagcccgcgccttcgtcagtttttatccggtgcgctgaaataa

SEQ ID NO: 94173 - DNA, 717 bp, Enterobacter aerogenes
atgatggatatcctccacgaatacgggcgcgccctgctgtggactgacggctatcgctttaccggcgtggcgatgaccctgtggctgctggttatctcggtagttctgggcggggcactggcgctgctcctggctgttggacgggtatccagcaataaatttatcgcgctgcccatctggctgttcacttacgtgttccgcggcacgccgctctatgttcagttactggtgctctacaccggcgtgtataccctggaagtggtgaaaggcagcgaactgctgaatgcatttttccgcagcggcctcaattgcacccttctggcgctcatgctgaacacctgtgcctacaccacggaaattttcgcgggcgccatcagggcagtgaatcacggcgagattgaggcggcgcgggcctatggcttctcgccagcaaaaatgtactgctgcctgaccctgcccgccgcgttgcgtatcgctctgccggcgtacagcaacgaagtgatcctgatgctgcactccacctcgctggcttttaccgctaccgtgccggacctgctgaaaatcgcccgtgacatcaatgccgccacctatcaaccgtttaccgccttcggtatcgctgcggcactgtacctgatgatttcatttgtgctgataagcctgttccgcaaagcggaaaaacgctggttgtcacacctgacccattcgcctgcaaagtga

SEQ ID NO: 94174 - DNA, 687 bp, Enterobacter aerogenes
atgctgcatggttttggtgtactaattttccggggggcgctaaccagcctggagctcgccctgagttctgctgtactggcggtggcgatcggtatgctgggcgctgccggaaagctgtcgaaaaacgtttcagtggtaaaactgacgtcggcctacactaccctgataaggggcgtgccggatctggtccttatgctgctgatcttttatggacttcagattgcttttaacaaattcaccgaggtcttcgggctgagccagatggacatcgatccaatggtggccggcattttgacactggcctttatctacggggcttacttcattgaaaccttccgcggcgcttttatggccgtaccctgggggcagcttgaggcagcggatgcctttggcttcgccaggaggcagcgttttcagtacattctgtttccggcgatgatgcgctacgcactgcccggcatcggcaataactggcaggtcatgatcaaagccactgccctggtgtcactgctcggtctggaagacctggtgaaagccactcaactggccgggaaaagtacctggcagccgttttacttcgcactggtctgcgccgcggtatacctgttcttcaccacattatccaatgtcgtgttgtggtggctggaacgacgttacaccgtgggcgtgaagagggccgcattatga

SEQ ID NO: 94175 - DNA, 990 bp, Enterobacter aerogenes
atgatgaataattttttagatctgacgcttcgtggcatggtaccggacgttcgcagtgagggtggaaaaaacttatcctggcactggcggggggaaggaatactggagctggttccccataccggttaccagcgcgctatcgtgctgtcggcaggtatccacggcaatgaaaccgccccggtagaactgcttgcagcgatagtagatgacctgctggcgggtagattaccgcttgccgctcgtctgctggtactgtacggcaatccaccggccatccgcgccggacaacgctacctgactcacgatctcaaccgcctgttctccagccgtcatcatcaatatcctggtggggaagagtcggcacgcgcccaggagctggagcagaccgtgaccgacttcttcacccgggacagcgatagcgacaacatcgaacgctggcacttcgatcttcactccacccgacatgcttcacacctgccgcgcttcggcctgctgccttttcagacccgccacggcagcgcggccttgcttagggcactggatgctgccggtctggatgcgctggtccaacataccgaaccgggtgccaccttcagccatttcaccagtgaacagctacgggcagacagttgcacgcttgagctagggggcgcccggcgctttggcgagaacgatctcagctcgtttggtgcggtggatagcatgttgcgcgccctgatcggagacgcgccgttgccggttcgtgctggcaaccccatgcgttatttcagggtaaaccggtcgctgattaaacacagcgagctcttgtgttttcatctggacgctgacgttccgaacttcaccccactcccggccggcaccctgatcggcgagctgccaggagaatgctggcgggtggaacacggcaccgaatggatactgtttcccaatcccaacgtcaccgtcggattacgcgccggtttactgctggcagaggaaaccgggacataa

SEQ ID NO: 94176 - DNA, 1500 bp, Enterobacter aerogenes
atgttgcatccttcactctatatcgcaggtcagtggcggcatggccgcagtgctgaatttatcaagaccgatccgctggataaccagccgctgtggcggggccgggcggcggattcggcagacatcgccgacgcctgtgatgcggcgcgcacggcgttccccgtgtgggcgcggctgacgctggggcagcgcacggctgtggttgagcgtttcgccacgttgctggaacaacacaaggcgcaactggcggaagtcatcagccgcgaaaccagcaagccgcgctgggaaacgctgactgaagtgcagtcgatgatcggcaaggttgacatctcgctacgcgcccttgagcagcgcaccggcgacagccataccccgatgaccgacggcgcggccacgctgcggcatcgtccgcacggagtactggcggtgtttggcccctacaatttccccggacacctgcctaacggccacatcgtccccgcactactggcgggtaactgcgtggtgttcaaaccaagcgagctgacgccgttcaccgctgaagagacagttaagctgtggcaacaagccggactgccgaagggcgtgctgaatctggtgcagggaggacgggacactggcgtggcgctggccgccagcccggcgatcgacggcctgttgttcaccggcagcgccggtaccggctaccagctgcaccgccaactggccggtcagccggaaaaaattctggcgctggagatgggcggcaacaacgcactgattatcgatgaggttaccgacgtgaacgcggcggtcaacctgactatccagtccgcctttatctccgccgggcagcgttgcacctgtgcccgtcgtctgctggtcaagcacggcgcggcgggcgacgcattcctgcaacggctggtcaccgtggcgggtcgcctgcgcgctggtcgctgggacgcggagccgcagccgtttatgggcggggtaatttccgcgcaagcggcggaacgcatgatggcggtacagcaggcactgctggaactgggcgcgacgccgctgctggcgatgacccggccggaggataacaacgcgctgctgatgccgggcatcctcgatatcaccggcgtcgatggcgtgccggacgaagagtatttcggtccgctgacctgcgtgacgcgctatgacgagttcgatgatgcgctgcgtctcgccaaccacactcgcttcgggctggctgtagggctggtgtcgccagaccgggcgctgttcgaccgcttgctgatggaagcgcgcgccggaatcgtcaactggaacaagccgttgaccggcgcatcgagcgccgcgccgttcggcggagtgggggcctcgggcaaccatcgcgccagcgccttctacgccgccgactactgcgcctggccgatggcctcgctggaaagcgcagcgctgacgctgcccgccaccttgccgccagggctcaaccttaatgatgcgcagagcgggaacagagaagcatga

SEQ ID NO: 94177 - DNA, 1038 bp, Enterobacter aerogenes
atgatggttattcgtcccgttgagtcccgcgatctgcctgcactgatggcactggccggcaaagccggtgtcggactcacttccctgccgcaaaatgaagatattctggccgggcgcatcactcgttctcaggaaacctggcagggcctgcgcccccgtggtgaacagggttacctgtttgtgctggaagacacagatagcggccgtgtcgtgggcatcagtgccctcgaagttgccgtggggttacacgaaccctggtacaacttccgggttgcgccacttgtgcacgccagcacctcactgaacgtgtacagttcgcatcaaatattatttctcagtaatgaccatacaggttgtacagaattatgcacgctgtatctcgacccggagtggcggcatagccataacggcaaattactctccaaagtacggtttctgtttcttgccgcgttccgcgactgcttcgcccagcgcgtagtggcggaaatgcgcggctacagtgacagcaacggacgttcaccgttctgggaggggctcggcaaccgattttttgccatggacttcgcccacgccgactacctgaccggtatcggccagaaagcatttatcgccgagctgatgccccggtatccgttgtatatcgattttctccccgaagaagccagagccgtgattggggaggttcacccggatactgttccggcccgccgactgctggagaccgaagggctgcgccaccgcggttacgtggacatctttgacggcggcgccacgcttgaggcggaactggacgaactgcgggtagtaaaagaaagccgcaaagtcacggtgtcgaccaacgaagcgccagtatcgacacctgactccacgctgctggtcgccaatgatcgctacctcaactatcgcgcgacgttagcacccggccatttttctcccgaaggcgttctgtacctgacgccgtccacagcggatgcgctggaaatcaagacaggcgatcgcgttcgggtggtttccctcaatccgctggagaacctgtaa

SEQ ID NO: 94178 - DNA, 1239 bp, Enterobacter aerogenes
atgtcccagcatgcgaatgcggtacaccgcgaagattttgacagatatatggttccggtatattcccctgccccgttcattcccgtacgcgggcaaggctcccgtgtatgggaccagaacggaaaagagtatatcgatttcgctggcggtatcgcggtgaatgcactcgggcatgctcatcctcagttgctggcgactctgcaaacccaggcggccagcgtctgtcatctgggcaatggctacaccaacgagccagtgttgcggctggcgaaacagctgattgacgccacctttgccgacaaggcgttcttctgcaactccggtgcggaagccaacgaagctgcgctgaaactggcgcggaaagtggcctgcgatagcggtgtgccgaacaaaacccgcattctggcgttctgcaacgccttccacggccgtacgctgtttaccgtcagcgtgggcggtcagccgaaatacgcgaaagacttctcgccgctgccgggcggcatcgagcatgtaccgttcaacgatcttgccgcagctgcagcagcgatcgacgaccagacctgtgccgtgatcgtcgagccgattcagggcgaaggcggcgtgctgcctgcggacacggctttcctgcaagggctgcgtaagttgtgtgaccgccacggtgcgctgctgatttttgatgaggtacagaccggcgtcggccgcaccggcgcgctgtacgcgtatatggaatacggcgtcacaccagatattttgaccagcgccaaagcactgggcggcggatttccgatcggtgccatgctcaccaccgatcggtttgcccccgctttcagcgcaggcacacatggtactacctggggtggtaaccccttagccagcgccgttgccggtacggtactggcgttgattaatactcctgaggtgctggacggcgtggccctacgccaccactggtttatcgaaggattacaagagattaacgccagattcccgctgttcagcgagatccgcggccgtggattactgatcggctgcgtgatggatcaggccttcgccggtcaggctaaacggctcaccagctatgccgcagaagagggattgatggcgctaatcgccgggtccgaagtggtgcgttttgccccctcgctgatcatccccgaggccgatgtgcgtgaggggctggcccggtttgcccacgccgcggaacgcctcgccgccgcaaccgggagtgatgcacgatga

SEQ ID NO: 94179 - DNA, 918 bp, Enterobacter aerogenes
atgcaaacaaccagtcgtattttcatggttcgtcccgcttcctttaccgttaatcaggaaaccgccgtcacaaattatttccagcagaccgcgcaaatccctgatgcagcacaatcccttgcgcttgccgaattcacccgctatgtcgacaccctgcaacaagcgggtatcgacgtacatgttttcgacgatcccacgggaacggatacccctgattcgttgttccccaataactggctgacgctgggtcatcagggcgaggccatcctctacccaatggaagcgccaaatcgtcgcaaagaacgaaatcctgaactgatcgccacactgtcagaacaattcacgattaaccaggtcattgatctttccgcgtttgagcaacaaggggaatttcttgaaggcacggggtcgatggtgtgcgatcacgagaataaaatcgcctggatttgtcgctcttcgcgaagttcgccgcatgtcatgacgtcggtagaagaaattaccggttaccgcgcaatgtggtttaatgctgacgaccgcagacaacaaccgatttatcacaccaatgtaatgatgagcatcggcaaaaaatatgcggtggtttgctttgaagcgatcagaaaccgtcaggaagccgccgtactctataaagggctacgtcaggcaggtaaagaaattatcgatattaccctgacacagacagaaaacttctgcggaaacattatcgaattgcatgccgaaaataatggccatcccgttctggcgatgtcaaagagagcgtggcaggcgtttacttactctcagcggcatattctttcagattacgctactattgtcgctccgtctctggatattattgaacaactcggcggtggcggggcgagatgtatggttggtgaaatattcagcccacggcgttag

SEQ ID NO: 94180 - DNA, 1017 bp, Enterobacter aerogenes
atgatgacaactttcattaatatttcacatatgcagcaactggtcagaaaaaccggcgtgcagcaattcattactgaacttacggggtttattgaggatgattatcggtcctggccttattttcagaaatgcccacgtgtcgcaaatcattcagcgctgggcgttattgaactgatgccaactgccagtaaaagcctctatggatttaaatacgttaacgggcatccgtcgaacgcggataaaaataatttgacggttatggcatttggggcactcgcagaaatagacacaggttaccctttgctgttaagtgaacttacgctagctactgcgttacgtactgctgccacatcagtactggccgcaaaatatcttgcgccacatcatgttagaaccatggcagtgattgggaacggtgcacaaagcgaattccagattctggcattccacacgttgctcggcattaatcacttccgtctttacgatatcgatcccagagcttctgaaaaactaaaaaataatcttacagagtatcaggcgattcatctacacatatccgattcggtggcagaagcagttcaaggcgtggatattatcaccacgatcactgcggacaaaaagaatgccaccattatcacgcccggtatgatatccgacaatgtatatataaatgctgtcggtggtgactgccccggtaaaacggaaattcatcccgatgtcattaaccgtgccagagtagtggttgaatatgagcctcaaagcagaattgaaggtgaaattcaaaatatgccagccagtttcgctgttaccgaactctggaaaattattaacggtaatgttaataatagtgatttccagcacgggctgactgttttcgattcagtgggatttgccatcgaagatttttccaccctgcgctatatcaggcatctgtctgaaaaatatcgtattggtgaaaaaatcgagttagtgccacagcctgccgatcctcgtgatttgttcagttgtatcaaataa

SEQ ID NO: 94181 - DNA, 423 bp, Enterobacter aerogenes
atgggtgacattgatcgtaagatcctcacattgttaagagataacgctcgaatccctgttagcgaaattgccgcgcttatcggtgtatcgcgtgcgactgtgcagaagcatcttaaccagatggaatcgaatggcacaatctgcggctatactgtgctcacgcggcagataccagagacgaatctcatcagggcatggatgagtattgcaattgaaggcaacaaagcgccaaaaattatccagcaattgcagggagagccggcgatagcgactctgcataaaaccaatggtcgctgggatatcctggtagaaattcatacccgcagtcttgaagagtttgacaagattttaggggggattcggcgcatccctggggtggcaaatacagaaacaagtattcttctttctactcgtaaaatgtga

SEQ ID NO: 94182 - DNA, 1809 bp, Enterobacter aerogenes
ttgcgggatctgcatttccgcgctgcgcctgcaggagaacatacgctggccgcgattcattatgtgaccgaactgaacggctcgaaaaagcgcatcctcgatgatgctcctgaacatatcatcaccggcccctggaaacgcctcgtgtacgatgcggaaggccggatacaacgcgccggttactcactgtgtctgctcgaacgccttcaggatgcactgcgccgccgggacatctggctcgaaaacagcgatcgctggggagatccccgtgagaagctgttgcagggtgaagagtggcaagctcagcgtatccccgtctgtcgtgcgctgggacatcccaccgatgggcataaaggcgtgcagcaactggccgttcagctggatgagacctggaaagccgtcgcatcccgatttgaagggaatgcggaagtccatgtttgcaatgacggtaaatatccttccctgaccattagtagcctggagaaactggaggagccacagtcattgctttgtctcaacagtcgggtcagacagttgcttcctccggttgatttgacggaattactgcttgaaatagacgccagaacaggatttacacgggaatttatgcatgtcagtgagtccggagcacgggcgcaggatctgcacgtcagcctgtgtgcggccctgatggctgaagcctgcaatatcggactggaaccgctgataaagcacaatataccggcactgacccgccaccgtctcagttgggtgaaacagaattacctccgggcagaaacactggtcagcgccaatgcctgtctggttgattttcagtctacgctggagcttgccgggcgctggggcggtggcgaagtggcgtcagccgacggcatgcgctttgtcacgccggtgaaaaccgtcaattctgggcctaacagaaaatattttggttccgggcgtggcatcacctggtacaacttcgtctctgatcagtactctggattccacggcatcgttgtccccggcacattacgtgattccatttttgtgctggaaggccttctggagcagcagactgggctgaatccggttgagatcatgacagacacagctggtaccagcgatattatttttggcctgttctggctgctgggatatcagttttcaccccggcttgccgatgctggcgaagcgatattctggcgagtggataaatctgcaaactacggtgcactggatgcgctggcgcgaggatgtgcagatctgtcgaaggcagagaaccagtgggatgagatgatgcgaaccgccggttcgctgaagctgggtaccattcatgcttcagaactcattcgctctttgctcaaaagctcgcgcccatcaggattggcgcaggcgattatggaagtggggcgcgtcaacaaaacgctgtaccttctcaattatattgatgatgaagattatcgtcggcggatcctgacacagctcaaccggggagaaggccgccatgctgtggcgcgagcgatttgctacgggcaacgcggtgagatcagaaagcgctatcgtgaagggcaggaagatcaactgggcgcactgggcctggtcactaacgcagtggtactgtggaacacgctttatatgcaggaagcactgagttggatgcgcagtcatggagaagaaaccggggatgaagatatcgcccggttatccccactgatgcacgggcatatcaatatgctggggcattatacgttcacgctaccggaggatattctgaagggagaaatgaggacattaaatttctatttaaacaatgaattatctccttaa

SEQ ID NO: 94183 - DNA, 729 bp, Enterobacter aerogenes
atgaccataccacttttagaaataaactcccttagcttttcatacaaaggccatcctcctgtattcaataatctgtcgcttgaaatagagcagggaggactgataggtctgcttggtgaaaatggggccgggaaaactaccctctttaacataataaaaggggggagcgacaattatgaaggttctgtcaaacgttacttcactggtggtgaaatggtaagtctgcctcaagtgataaatctttccgggacgcttagaaatgaggaggtttttgatctaatttgctgttttaataaattgaccaaaaagcaggcgtgggcagaacttaacagtaagtggaatgatgatttttttatccggtatgaaaaaataagacataaaagaacctatacggtaagttatggtgaaaaacgatggcttataatatccctgatgttaactctctgtaaggatgcccgtttctttttgctggatgaaccaacggttggtattgacattcaatacagaatgatgttgtgggatcttattaacgaaattgccgctaatgggaaaactatttttttctcaacacatatatttgatgaacttaccagagggtgtattccattctacatgttgtctaggaatggtattaagcactatactgatatggataatttcatgcatgtaaacaacgaaaatacgccagaaaaggcttttatcaaagaaattatgggagctgagggttga

SEQ ID NO: 94184 - DNA, 561 bp, Enterobacter aerogenes
atggagattaatggtaaaaaaataacaaaaagacaactgaatgaagtgaaaatatcgaatgctagctactataattgtatttttgagcgtattcaactagacaatataaaccttcgcgattgtgagtttgaaaattgcctgtttataaactgctcattaaaaaccttgagcctcgatttttttaaacttattgattgtgagtttaaaaattgtttactgcagggtgtgaacgtctctgatattatgttcccctgtacgttttctcttgataattgcgaaatgagatttattgacttagtcggtttgcgattgcagaaatcaagttttttatttacaaagttcagagattgtttatttgaagaaactgatcttcgtaaatctgatttcaccgggtcggaattttataataccgaattcaggcattgtgatttatctcgctgtgacttttcattgactgatggccttgatataaatcatgaaataaataaggtttcttctatgaaaatccctcaggatgccggttttaaaatccttaaaaggatgggggttattatttcatga

SEQ ID NO: 94185 - DNA, 285 bp, Enterobacter aerogenes
atgacaattttagtgacgctacaagcccagctcattgtgggagaagcacaggtgataaaaagcctggcacctgagggaatgctggcggccgtatttgaagacgacggccggaccgggtatttctatgcgctcgatgagtccgtagaaggaaacccgattgcgccggttgtcgagaggttgaacggtattgaagcgcacttggatcaggagcgggcagtacaccaccagaaaacgctggagctggaacgatcgcagccgcaaaaaggttttgagcttggaatgtag

SEQ ID NO: 94186 - DNA, 2169 bp, Enterobacter aerogenes
atgacttcagccacaactaataaaccggcaacgccggactccgatgaaattgacttggggcgccttctaggtgaattaatcgatcatcgtaaattaatcatttctgtaaccgccgtattcacactattggcgattctctatgcattgctagctactccaatctaccagtcggacgcattaatccaagtagaacagaagcagggtaatgcaattttgagcaatattagtcaaatgttgccagatagccaaccgcaatcggcgccagaaattgctcttttacaatcacgaatgattcttggcaagaccgttgacgatctgaacctacaagcccaagtgacacaaaagtattttccactggttggccgtggtattgcaagaataatgggtgagaaaccaaagacggtcactgttagccgtctttacttaccaagtaatactgatgatgacgaagtgccaaatatcatgatcacggtgaaagataaacaacactatcaggtagatggaaaagacttcaccgctaatggtactgtaggaacactgctaaatgaacatggtatatcccttcaggttaatgcaattgatgcagaaccaggagatcagtttatcattcgacaatttacaaaactaaaggctattgctgatcttcagagaatattcaatgtctccgatcagggtaaagacacagggatgttgacgctaacgttaactggagataatcctgatttaatttctcaaattcttgatagcataagtcagaattacttagcacaaaacattgctcgacaagcggcacaagatgcgaagagtcttgattttctgaatcagcagttgccagtagtgcgcaacgatttggatattgctgaagacaaattgaatgcttaccgtagacaaaaagattcagtagatttgaatatggaagcaaaatctgtgctggatcagatagtaaatgttgataatcaacttaacgagctaactttccgtgaagccgaaatctctcagttgtatacgaaagagcaccccacttataaagccttgatggagaaaaggaatatcttgcagcaggaaaagggcaagttaaataagagagtaagtggtatgccatcgactcagcaagaagtactccgcttaagtcgtgatgttgagtctggtcgcgcagtatacatgcaattacttaatcgacagcaggaattaagtattgctaaatcaagtgcaatcggcaacgttcgaattattgataatgcagtaactgaaccaaaaccggttaagccacaaaaattgatgataattgcagttgggctggtattgggattatttatcgcggttggcttggtattgctgcgtgtttttctacgccgtgggattgagtcgcctgaacaattggaagaaatcggcattaacgtttatgcgagtgttcctatttccgaatggcattcgaagaataatcgtaaatccgctcagttacgtaaaaatcagtctgacacattgcttgcagtagaaaaccctgcagacttggccgtagaggcaattcgtagcttacgaaccagcttacacttcgccatgatggaagcaaaaaataacattctaatgatttcaggtgctagtccaaatgccggaaaaacctttattagtagtaacttggctgcgacaattgctttaactggtaagagagtactattcatagatgcagacttgcggaaaggatacgttcataagatttttggccgtaaattagataaagggctttcagatatcctgtctggacaagcaccagtcgaagctgtcattgaaaaagttgctgctggagaatttgattatattggccgtggtcaaatcccgccaaacccagcagagttattgatgcatcctcgttttgaagggttattgaaatgggcggagcaacaatatgatctagtcatcatcgatacacctccaattcttgcggttacagatgctgcgataattgggagatatgtagggacttgtttacttgttgctaggtttgaggcgaataccactaaagaaattgaagttagtatgcggcgttttgaacagagcggtgttcaaataaaaggttgtattctcaatggcgtcatgaaaaaagctagtagttattatgggtatggatatagtcactacggctattcctattccgataagaaaaatgactaa

SEQ ID NO: 94187 - DNA, 1440 bp, Enterobacter aerogenes
atgatgaaaattgctcgtatcgcacttgctttgggtctggttgcatcagttagctcacaggtatatgcaactggattggtgcaaaatgataatgaactccgtaacgatctggcatggctttccgatcgtggggtcattcatctcagtctttccacctggccgctcagtcaggaagaaatcactcgagcgttgaaaaaagcaaaaccttcatattcctctgaacaagtcgtactggcgcgcatcaatcagcggctttctaatctgaaggcggattttcgcgttagcggctatacgtcgactgaccaaccaggcacgccacagggctttggccaaagccagccggcagataactcgctctctcttgcttttaataacagcggtgagtggtgggatgtgcatctgcagggcaatgttgaaggtggcgaacgtattagcaacggttcacgttttaatgccaatggcgcatatggtgccgtcaagttctggaaccagtggttatcattcggtcaagtgccgcaatggtgggggcctggttatgaaggcagcctgatccgcggcgatgcagccagaccgatgaccggttttttaatgcagcgcgcagagcaagctgctccggagacatggtggctgcgctggattggtccgtggcagtatcaaatttccgccagccagatgaaccaatacacggccgtaccgcatgccaagatccttggtggacgtcttactttcacacctttccagtcacttgagcttggcgcttcacgtattatgcagtggggcggggaagggcggccagaatcgtttagcagtttctgggatggttttacgggtaaagacaatacttcatcaaatgatccaaatgaaccaggcaaccagcttgcaggttttgatttcaaattcaaacttgagcccactctgggatggccgatcagtttctacggccaaatgattggcgaagatgaatcaggattcttaccttccgcgaatatgtatcttggcggtatcgaaggtcatcatggttggggtaaagatgcggttaactggtatgtggaagtacatgacacacgtactaatatgagtcgtacaaactacagttaccagcatcatatatataaagatggctattaccagcaaggctatccgttaggcgatgccatgggaggtgatggacagctgtttgcgggtaaggttgaattggttactgaagataatcagcgctggagtacccgcctggtttacgcgaaagttaacccggaaaaccagagtattaataaagcttttccgaactcagatacattaaaaggaatacagttgggctggagtggtgatgtttataaatctgttcgcttgaacactaatctttggtataccaatgccgatagtagcgatagcgacgatgtcggtgccagcgcagggatagaaattccatttaatttataa

SEQ ID NO: 94188 - DNA, 882 bp, Enterobacter aerogenes
atgaaaccactgctggatgttctcgttattcttgatgccttagaaaaagaggggagctttgccgcggcttcggcaaagctctataaaaccccctcggcgctgagctataccatccataaattagaaagcgatctgaatatccaactgctggatcgcagcggtcatcgggcgcgctttacttgcaccgggcagatgctgctggagaaaggacgtgagctactccataccgctcgcgaacttgagctgcaggccatcaggctacatcagggctgggaaaataccctgaccatcagtgtcgatatgacttttcctttctctcttttaacttcactgatggaacagttttatcaacaacgcaacgtgacccgtttgcagttcactagcgctggtggttgggatgctctggcggcaggcgaggtcgacatggtgctgggcgcgcttaacgagccgccaacgctggtgggttatggttttagtctgcttggcgatgtggatctgtgttttgtggtcgcgattaatcatccgctggcgcaggctaaggaaccgttgaatttgcgggtgttgcagcgatatcgggcgattatttgcaatgccgggttgctgcaaagcgaaaagcaggagagtgtgacggtttatgatatgaatagcctgctggagctggtatgcgccggcctgggctgggcttacctgccgcgctatctggcagaggcctggctggagaagggaaaagtggtcgagaaacgtattagcacacccgcgcggctgcatcgggcatggattggctggaatgaagacgtttttggccttgccgcgcaatggtggttacaagcgatattagcaaatagtgctattcgtcagatctacaatactaaaatagtatga

SEQ ID NO: 94189 - DNA, 1467 bp, Enterobacter aerogenes
atgaatagtattaagatctatacctgtcatcataagccgagcgcatttcttagtgcttctattataaaaccgctgcacgtaggcaaagccaactcttataatgacattggctctattggtgatgatacaggagataatatttcttttaagaatccgttctactgcgaattaactgcacattattgggtttggaaaaatgaatctcttgccgattatgtcggttttatgcattatcgccgtcatctgaatttctctcaaaatcagaatttttcggaggataattggggggtagttaattcacctgttatcgatgtagagtatgaaaaccaatttgggctaacggatgctgagatacagaagtgtattttaggttttgatctgatattacctaaaaaatggtcagttacttctgcgggcagtaaaaataatctcgaacattataaaaatggagaatttttacatttacaggattatctgactgcacttgaaatagttgaagagctatatccagattataaaacagctattcaagaatttaacaatgcaacagatggttattatacgaacatgtttgtgatgggtaaagacatgttcatagactattcagaatggttgtttgagattttggctattcttgaaagtcgcatctctatgagcaattacaactcgcaggaaaaacgagttattggacatattgcagaacgtctttttaacatttatattattaggcaacaacaaaatcgtgctcttaaggtaaaagaactgcagcgaacttttgttacaaatgagacattcaacggaaagttaaatccagttttttcaaatgctgcgccaatagtaattagttttgatgacaattatgccatcagtggaggtgccctaataaactcaattgtccggcactcggataataatactaattatgatattgttgtactcgaaaacaaggttagcaatcttaataagaggcgcttaaaccatcttgtttcggcgcataagaatgtttcactcaggttttttgatgtgaatgcatttactgaaatgaatggtgtgcatacgcgtgcacattttagtgcatcaacctatgctcgcttgttcataccgcagcttttccgtgaatatgacaaagtgatatttatcgattccgatactgtggtgaaggccgatctggctaatttacttagtgtcgatctcggtaaccatcttgttgctgcagttaaagatatcgtcatggaaggctttgtcaagtttggtgccatgtcggaatctgatgatggcgtgatgcctgctggcgagtacctggaaaaaacgctcaaaatgagtaatccagacgagtattttcaggcgggaataatcctctttaacatcgcccaaatggtaaaagaggataccttctattgttgttttcctctgaatacctgtctgaatctgtccgaattcggtccaaaaaaaagcccccggaagtga

SEQ ID NO: 94190 - DNA, 741 bp, Enterobacter aerogenes
atggaaccagtaattaattttagtcatgttacaaaagaatacccattgtaccatcacattggatctggtataaaagatcttgtatttcatccaagaagagccttgcagttattaaaaggacgaaaatatctggcaatagaggatatttcttttactgttggaaaaggggaagctgttgcactgattggacgtaacggcgctgggaaaagtacatcgctcggcttggtcgcaggggtaattaaaccaactaagggtacggtcacaacccatggacgcgtagcgtccatgctcgagctaggcggaggatttcacccggaattaactggccgtgaaaacattgttctcaatgctacacttctcggattacgtcgaaaagaagtacaacagcgaatggagcaaattatagaattttctgaattaggcgaattcatagatgagccgattcgtgtatattccagtggtatgctagcaaagcttggtttttctgttattagccaagttgaccctgacattttaattatcgatgaagtacttgcagttggagatatttcctttcaagcaaaatgcattaagactattaaagagtttaaaaatcgtggtgtgacaatattatttgttagtcataatatgagtgatgtagaaaaaatatgcgatagggttgtttggatcgaaaatcaccgtctcaaggaaatcggttcagctgaaagaatcatcgaactttataaacaagcaatggcctaa

SEQ ID NO: 94191 - DNA, 768 bp, Enterobacter aerogenes
atgaagtacaatctaggatatttgtttgatttattatacgtgataacgaataaggatttgaaggtccggtataaaagtagcgtatttggatatttatggtcaatagccaatccattgctatttgcaatgatttattattttatttttaagctaatcatgagagttcaaatccctaactacacactctttttgattaccggacttttcccatggcaatggtttgctagttcggcgaccaactctctattttcatttattgcgaacgcgcagataattaagaaaacggtatttcctcggtctgttattccattaagtaatgtaatgatggaagggttacattttctttgtaccatcccagttattatcgcatttctttttatctatggcatgactccttctttgtcttgggtatgggggattccattaattgcgataggacaagtaatattcacttttggtgtatctataatattctcgactttaaatttattctttcgtgatttggaacgttttgttagtctgggtattatgttgatgttctattgtacaccaattttatatgcctcagatatgattccagaaacctatagttgggtaatcacctacaatccactggcaagtatgattctaagttggcgggatttattcatgaatggtgtgataaattacgaatatatcttaatactttacatcactggaattatcctggcgattcttggtttgggcattttcaataaattgaaatatcgatttgcagagatattgtga

SEQ ID NO: 94192 - DNA, 177 bp, Enterobacter aerogenes
atgcttgcactcatgtatatcagagttaaccatcatcatctgtatatgatcagctttttactatatacagctacttttgtgaaagtttcatgtgcgcctcaaatgataataaacatcatttacatactacgagttatccttaaggccatcatttctgaaaaaagtaaaattaagtga

SEQ ID NO: 94193 - DNA, 1008 bp, Enterobacter aerogenes
atgaaatttttgatcactggagcagcaggtttcatcggtttccatgttagtaagcgtcttcttgaggctggccataccgttatcggtatcgacaacatgaatgactattatgatgttaaccttaagcaagcgcgcctgaatattttagactcaccgtttttcagttttgtcaagctggatatagcggatcgagaaggtatggagaaacttttttctactgaaaagtttgatcgcgttgttcacctcgccgcgcaagcaggtgtccgttactcgctggataacccacatgcctatgctgacgctaacctgatggggttcctgaatatcctcgaaggttgtcgtcatactaaagttgagcatctggtctacgcatcatccagttctgtttatggcttaaaccgtaagatgccgttctcaactgacgactcggtggatcatccggtatcgctttacgcggcgactaaaaaagccaacgagttgatggcacatacttatgcgcacctgtatgatattccgacaaccgggctacgtttctttaccgtctatggtccctgggggcgcccggacatggcattgttcaaatttacgaaagccatgctcgaaggtcaaagtatcgacgtctacaactacggaaaaatgaagcgagacttcacctatattgatgacatcgtcgaagctattgttcgtattcaggatgtcattccgcagccagatccaaactggacggttgaagctggctcaccggcaaccagttctgctccgtatcgggtatataatgttggcaatagctcccccgttgaattaatggactacattaccgcccttgaagaggctatgggcatggaagcgaagaaaaatatgatgccaatgcaaccgggcgatgtactggagacaagcgctgaaacgcagccgctgtatgatctggttggtttcagaccgcaaactacggtcaaacaaggcgtgaagaactttgtggattggtataaagaatactataccggttgttag

SEQ ID NO: 94194 - DNA, 279 bp, Enterobacter aerogenes
atgagcggtaagcgttatcccgaagagtttaaaattgaagcagtcaaacaggttgttgatcgcggttattctgttgccagcgttgcaacacgtctcgatatcaccacccacagcctttacgcctggataaagaagtacggtccggattcttccactaataaagaacagtcagatgctcaggccgagatccgccgtctccagaaagagctgaagcgggttaccgacgaacgggacatattaaaaaaagccgcggcgtacttcgcaaagctgtccgactga

SEQ ID NO: 94195 - DNA, 552 bp, Enterobacter aerogenes
atgcagaacaccaaaacttttatcctgaaagccgccattagttcgttgctggtgctttccactatgagcctggcggatacgcagaaagttgagaacacaccttttgtttcgggacaatccctgaaaaaaggtttcttctggtataacgataaagaaccggtaaaagatgaagaagaacaaccacaacagccattaacggggtcgccgtctcaggacaaaaaagaagagcttaagctcgattcacgctggctaaaagaaaatctgctgaatcttcgttatgcggcaatggataacccgaccaacgaaaacctgtcccgctattatactgcgcaacgtttaatgctggatattgccacccgtttctctgaccggacccgcgactatttccttaataacccgatgatgtcagaaaaacgacgacagccaaccgaaactgtcgcgttaaatgcacaccgtgcaggacttgaggaaaatcagcaaaaagcacttacctccatctttcagaaaggtggattgtttttctttttccagagtgaatcgccacgggtttaa

SEQ ID NO: 94196 - DNA, 543 bp, Enterobacter aerogenes
atggaaaatcagcttttacacacggcaagcaccatctgccatatcgcgtttgcatcgacgggaataacgacaccgtcagatgagcagggtttttttcatctttccgacagcatccataatcgcctgcgtgcgatttctcctgaccttcatgtccgttgtgcctcttatttattcctgcctgtcattcatacagagttaaaaactggcgaccttaaaaaccattttccttcttatatcctgcaacttgttcaggaacttgcaccgttaaaaagaactacctgtccctccggaaaaatcaggtttgataaagagctggacgccatgttttcagccagtccagatgctgtcagcattcgtctggccgaatatctttcgggcccatcccgttttctccggatgataaaaaaccctgaccgtaaggcgagagttgagaaaatactcgctgccagaaaatgtaatctttcgcatcagctggcactcctgatgcaggcagaagaaaccgtgtccagatttaaatcgccgggtaatacctggcgtccctga

SEQ ID NO: 94197 - DNA, 429 bp, Enterobacter aerogenes
ttgtatggtcgtaaagttgccgacagcctggagtaccccaaagggataaatacaagaaaaggggtaggtaaatggctcggtgaaaaatccgccatgttgctgtcaaatgtcgttgtaaacaatgctattcatatttttggatatgaccctcaaaatcctacagaatcaaccagagaaatggattttaatgcacttgttgatttgttaattaacacgggctatacgccggaatactacccgctcaaggtcaacaggattgtcgaagttctcaacgggatgtcggaagctgactataaagactattgcctggtatgtaaaaagcccttcatacatgcgccggacaggtatgattcctgcccgacatgtagcgcaaaaaaatgcaaagttgctattatgcgttattctcagtccgtaattccctttgaataa

SEQ ID NO: 94198 - DNA, 600 bp, Enterobacter aerogenes
atggacgtacaacccaacgtacagactgacacggtcattaaggcgtttctccgctcggagttgcagttgatacgtagtcagaaaaaactactcagtgtgttgcctcgtgatctcgcgtcggactaccgctatataccggacaacctgctggagcgttttttccatcccgccacggatgcgcgtctaaatagaattgccctgtcagaagccaggccaggtagcctgctagttccccgtgtcaacgggaaacctgttttatggggtgagttaataaaattaatcctggatgactctcagttactgaagtttgaaacgtacggcagaccttttgacagtaccgagatgaaaccaaatgagccatgcgaattattgagcgggaagcagtatgtttataaacccgtcgaccttgagttattcaggaaaaacatcgtctctatacagatgaatttcctggtcaatctatggaatctggccagatttaaaccggcttatgtcagggcttatttggccctgtctaatgacgcttttcagatgctcctcgatacagagatgtccgcctttgtggagatgacaaatgtggttcttttccccggtttataa

SEQ ID NO: 94199 - DNA, 465 bp, Enterobacter aerogenes
atgaacccgataattacggcacatcaggaaatcgttatcgaaaactcggttcgctatatcgagttactgaaatcagaagcgacaaaaattctggatgaatactgggagacctggaaggcacgaaatcaactgatatcccagaccacgtatgcaaacggggggaaattcatgcccggtcgattcgcaccggtgtttaaaaaggtcggctcatcgcaaaagctgacaattgtatggaaagatttttcgcccaggttcaaaaacaaaattgaacatcatggcgtggttgttaaacctaaactcggaggttacagcgttagttgttttaaaaaagccctggactgggaactggagatgatcctggaaacagaaaacaaaattaaaccaatccgtgaactactcgcggaataccatcaacgaaaactggccgacatcaaaaggctggaaaaactgaagaggttaatataa

SEQ ID NO: 94200 - DNA, 789 bp, Enterobacter aerogenes
atggctgagaacgcatccccaaaaactgaaccgcgcaatcaacgtaacgctggcaataaccgcccgttagggatggtcatttcaaaattaaagccactttcaagtgagttctatacgcattttcatgaaaaaaacagaacctgcctgcgccagtttaacgccatttccaatgcaatttataatattttccaactggtagaaggtgaccaggcgacaagcactaaagttcagaaatggctctccggtgtttacgatgaactgtcgggtaatgtaaataccttcaaggagcagattgacaaaaatgtcgccagactgcctctggatgattcatcattcgaagggtttgactatggtgaatttgaaattcgctggaaccacccaatgacctataaattactggatattatccagaccatcaacgtcctgactcgtcaggcacatcagttgtggttatacggtcagatatcacaacaggttcatgaccgaattatcctgcaactcctgagctcactgcgggttgcgatggacaacatcactaaaatactgaacactgaaaaccgcgtgaatggaaaatacgacgcattgccattcatccagagcattaagcggtttaaatcggtggaactttatattgccagtctcgaaactaaagcccctcttcagtccggtcacagtaacagttctgctgatgctggcagtgagccgacattaaaacaagaagaagcagctggctccggtaaaccatctgacaaaacacagccttctgccactcctgtttcggtacaataa

SEQ ID NO: 94201 - DNA, 2943 bp, Enterobacter aerogenes
atgaatattatatccaggctttttttaaaaattagggtcgccctcttcggagggcctgaccacgatattatttatgatacagatgatgagtacgatatcccgcacacgcctaacaaggatgttcaaagctatcttgattatccaagcaagcctgcgggtataacactcttttcagagcgtgagattctatctgtacatgctaaccggttacaggaaattaatatgtatatcggtttgccaaattcagacctgagtgaggaggcctataccttcactaatctggtcattaagccattgatggaatatacacgctggatacatcttttacctgcgtctgaaaaccatcaccatgccggtacaggcggcctgttaacgcacagtttagaaactgctttcctcgctttaaaatttgcgtacagcactgaattactccctattggtctgcaggatgaagaacagatccgaaaacgtcgttatctttatgcagcctttatttgtgggcttttacatgacgcagggaagatatttgatgtcgacgttatttcgtccacccctggcgttaaaagcacctggcgtccgctctcgtccagcctgatggactgggcaaagtccaaccgtattttttcctatgaagttatctggcggaaaaggcaggctaacgagcattccgtgcgggcacctgtattcctggaacgctgcttaaacgatacgtgtcttaattatttgagcgacgtggtcaaagaacggttgtacgataaaatgctgtcggcattgggtaattatacaaccagtgatgattttatttctcgttgcatgagaacggccgactggcattccaccggcaccgataccagctaccggtatgataaacaatccggtattcgggcctctgatactgctgcacgtgccatcgcgattctgaaagacaacatcagtactcttaatatcaatggtttcgactcatcgtcagtacgacatgacagaaactcaccgcctccggtacatattatgattatcggtggctctgtttacatcaacgaacatgcggcccttgatttcatcctgaatcagtttaaacatcttgggattaacttcccggatggcgatcttggccgcaaagcattaaccgaccttcttttaagtgggggctatatagagccatacggtgaacaacgggttgctcactttttccatcgcggtgactttacggaaactgacatacaacgaatgtttgatgagggtatcaaaggcctgagctggttctctctcttaaaaatcaaatgggttggctttctgtttaaatacgatattctgcccgaaagtacgccgggtattttcagtattaatgagactaatgactatgtttttgtcgaccgcaaagggaatgacacactttacgtacgccctcttgctaatggaacaaaatcaatccgtcttggagtaactcaatccactgataacgctgcagtctcaacggctgatacacatactgcagcggaaagtaacagtacagtttcagatacagataatactgctgattctgaaaatgatcaggctacttccggtgagaatcagcaggttcaggaaaacactaataaaacatcccttagaacagatgcatctgaacctgagacacaagaacctgattctaaaaaacctgttaaaacccgccgtaaaaaaggtgaagtgagtcctgatgagtacatttccagactccagcatcagttcaaaaataatgccattaatgctaatgaactggctttaatcgatggggtcctgtatgtatcagaaacacatattcgctccatagcaccgcttgaagagccgcgcttaattgagaccggtctttttgttctttctttacggtcaggaagcctcgatgaagaattcagcattccgtgcaatgacgggaaacggtatgttcagttaactgacgaagtatctcttgttcagttacgtcatcaacctgatattagagaggttgagatgctgcctttgctttctccagatttatttggtggggttaagactgatgatgaaggggggtctttcacttttccgccgccactggctgaggtgaaacctgagccactccctccggaacgttatgaagagcaaacgcctaaactgactcgaactgaacatgaaccgactgacataccatcagcggaattttccgatgatcaggaagatgatgttgaacaattctgggcggattacgcttcatattcgtacggtgatggctgtataaacccgataaatcaaaccattgagagcactgatgttgatgtagcacaggtcaaaaagtcactttcagagcatacaccggatgatagtacctctgttcacggaaaacccctggcagaggaggatgatttcgaccaaacggaagaggaagcgcaagatgaagattctggtgaggggatcggtgacattaacagcgattttgaagcgctgtttgcccgtcagagtcaaattatcactgatccggctgtcgtcattgcacacagccttgagcagttaaaatccagtactccaccagatcagcagcaagttgaaaatattaatagcgatacgctttcatccgatatcgacacgattattactctcttaaatcgtgtcaggaacaataacaattctgctcacgtaagagtattgctacgggtggttttggtaactgatataaatctttgcatccgtcttcgaattttagatgatgtcggatcctggggttttaatcaggaagaaatccgtcaactcaaactatcactttctcatttccctgttgcctcgttaaaggtcacgataggccaaccaattcgacactacatgatccgccttagtgatcttcaacaaggtgctctacgcaataacattttctacgaagaatttatttcgtattttaaccatcaggaagtaagccatgaaacgcagaagccgtaa

SEQ ID NO: 94202 - DNA, 435 bp, Enterobacter aerogenes
atgaaacgcagaagccgtaacaaaacccacatatccggagtgtgtcgggccataaagcgggatgatgagggtattgttaatgttgtgttactgacgggctccagtaagtttatggcagacccagcaccggagtggttgtgccgtaattgtgatgacctcgggaacaagttcaccgcatacgatgctgagcccgtgtatagtgttgaggaggttagctggttcgaaaatgacctgcgtaaagcaatgccgccgcagacgctgttgaccgacctgggtcacgtctattcactgaaactgaaacatcgacaaccaatatctgtaccgcacagggtgacctattttacgctactgactaccacactattcttccgtgtgctgaaaaagttattttcgcgtaagcgctcacaggtcatccacaagcagtaccgtgaatag

SEQ ID NO: 94203 - DNA, 357 bp, Enterobacter aerogenes
atgacatttctcaaatctctggactcgccgccgttcatcgcaacatatcgttgggcggggtcattcgatggacggtatatgccacaggcatattcgcttttgctggaactgaatcaacacacttatctgccggtggttaatgccgagtttgatatctgtgtcatcagctgcggcaaagagtggtggtgcttcaggctggtggatgtgaaatctgatgaacgtcaggaaggaatggtagcccggacggcataccggttaaaccagtcaatggggatcgctgagcagatggttaacatgatccgcgcctggcagtccgttccgtaccttaatcctcctgcatctgactactttagctaa

SEQ ID NO: 94204 - DNA, 234 bp, Enterobacter aerogenes
atgaaaatagtatcatttgtaaaattagatagattcaatgaaaaattaaacgacggtaaagccgttatcctcgctggttcctgtaaagacgtgaaacctctgaacatagcgagaaacatcatcgtaaggtcaacgccgctcaatgagcaaatggcaggccggtctgatgaagaaaaaaataagattgcacttgctgtatacagcaacagtaatttcagattcgtattgaattga

SEQ ID NO: 94205 - DNA, 348 bp, Enterobacter aerogenes
atgtatagccgtttcatgaacgatccacttgatgaggaatacctgctttcccctggtattgtgggttcctatgctgatggtgaaatcccggcagaagagattgaggtaagggaggcggtaatacgattcaaagtcacaggcgatcagatgttgtccatgaatctgttccacaggctgtttcattaccagcgttacagggaggttagggcatcattcaacaaaagcaggttagcgctggtggacatggttaatcgttcccaattccacaaagcagcaatgcggcgtatctacagtgatttgccggagcaaagcattgcccgcagggttctgcttgattttattggatag

SEQ ID NO: 94206 - DNA, 438 bp, Enterobacter aerogenes
atgccatacgaaacctatgtaaatgaaaatacgatgaaggcttattgtgttgtgacgattactaatgatcgtgaatacgaggaagctattaggattcttaactctatttctttagaaaaggaaaggttgtgtaaaacagtacatgaggactttagtcagattttaaattatttcgccgcacaaattgaagtgcttatgattgcttatgaaaaagataatccctgtgtgagcaggaatattgagcggaaaaaagagcgatataaactaggtgttgtgtttgtttcatcgtttttgctagggatagcattcatggttcattactttgtaagtccgcaggaattaggcttcctggagctgatatcctcccttgcattgttagtgacaagtgcatctgcttttcaggattatcgggctctcctatccagatctaaacgataa

SEQ ID NO: 94207 - DNA, 1068 bp, Enterobacter aerogenes
atgcgcagcaaaatcagcaaaacctcgatctcactaatctgtttgatgctggtggcctcctctgcggaagccggatataaatccagttcctatcggtcctcctacaaatcgtccttccgcccctcgtccattaccaggtcgtacacctcttcaaccagagtccaggcgagccgcacggttaatgataccccagcaccagctggcaccaggccgctgaccaccagacagaaagcgatgattgcaggtcctggagccgcattaacggtcggggctgtttccgcgtcatcaggaaataaaccgtccgagagcacctccgggaaggtgaggaaccaggctgatgggtatgctgttgtcagtagtcgttctcagaccaagggagataacgaaggcgctgctgcaggcactacgccaaagaaatcagtgagcgggtcggagctggtggctaagaaagggactatatctgcatcaagtccatcctccgttaaatcgtcgtcaatcgcgccagctcagcgcatcccagggacctccggccgggattatagtaacctgcgtcaggcggctccggataacgtacgcactgtcattcgtgaacgtgagcgaagtgggacagactggacaactcttgcacttatgtactggatgatgagcagcaacaacagccatgcatcctcgcttacatccagcaacaaagagtggattcagcaacagattgatgagcaggaaagtaacggtgcaagccggggagctgcgatcaatgagctgaaagcggccggggtagatacttcatcgatgacggttgcagataacagccaacacgcgtcgactgtctccttctcctacgatatgccgacagaattaaaggcgggtcaggtctggacgttcgttgttaatgccacatggaatgataaaaaacaggctccgtcatgcgagttgcaaggcgcgaaatttatggcagacaaagacaagttatacggcatgtggaaagcacctgaaactgtcgggcagaaaacgcaaatgaagtgtaaagcgtttggtgtggaagaaattaaaaagctggtgtcttcctga

SEQ ID NO: 94208 - DNA, 213 bp, Enterobacter aerogenes
atgacggaatattatctgcgctcattcccggtcgtgtttttttatgtgctggtgggatttgcattagcatttgattccacgggtgtccctttggctaccctgctgcaacaaggaatgttaactaacattctgacctgttcggttatgggtaacctcctctggctgggggttaacctggcattaagaggcgattccgttttcaaaaacctgtga

SEQ ID NO: 94209 - DNA, 378 bp, Enterobacter aerogenes
atgtccagatttctgaaaggtgttggtcttggtatggcgggcattgtgttgctgctgtgcggacttatcgcgctgtattattttgagtcgaaagcagcgctcagagctgatatcaaggcctgtcccacggttacagctggtcaggcaaccgatgccgtcattcaggacatactcgtgaacagagagcgcgttttctctaagccgcagctggagcgtcgggacatagtgatagaagaaaggaacgtccagataggctatacaggaacccttgtccctttcaggatcaccggtgtcaacgatcgccgtttttttggcatgtcgggatgtgcttctctcgactccgttgaatatgccacagagtttttgacccagcagtag

SEQ ID NO: 94210 - DNA, 135 bp, Enterobacter aerogenes
atgcaaatcaggatgctggtattgactgatggtcagctggtggccgacgcgaacattatgaaccggaatcgcccggaacaggtgttgctgaccggttggctgtctatggccatcactttagcccatttctcctga

SEQ ID NO: 94211 - DNA, 975 bp, Enterobacter aerogenes
atgaaaactcaaaacactccagttgctcacagcgacattctttttacccatatcgtgaatacgctggtggaccttgctaaacatgaaggcactctaatgacgtttgaaggccttctgcggaacggtatcgaggtagatgaagagatgatggatagcatgctgggggtgagtcaggactcagctgctcagtgcgtggttcagctaggggattgtggtgccataacgagccctgcggtatatgaaatggttaaacacgttgagcaactggccatgcgtttagccccagactggtggaagcaaatcgtgccatggtcggttcagccgctgcgttattaccagaaagaggctatggcaaaacgcgaacgatttattgtccgtcacagggaacggcagtgccccttcctcgtatacgtaactggtcaggtagagtatccggaagatgacccgatgtatggcaagtacgttacagaaggtacgtacctggtaggtaaagcgaaaaccatacatgatgcccttgagtgcgcaaaagaagcttttacgcggggtgaatggattgtccaggatgaagaatggcgggatgagttcattgaccacctgacaggacgtgaccaggggccggtgagtttttccgaaaggactatagagatccgcgataggggtgacaggctggtgttaacaggcaatgcccgcacactggagtggcaccgccatgtaaccagccctgatgagatcgaaaagataaaagcacagcaaaaagacctctatcagaaagcaagctatgagagtggctgggacaactacgagactgcacgacagctgcggcggcaagctgaacagttatctctcggttttgttgaagaatgctggcgtaaccatccggaagtaattcaggcggtagagaagttcgagtatccggtgtttatagatgaggagatggctctttttaatgcaaatcaggatgctggtattgactga

SEQ ID NO: 94212 - DNA, 216 bp, Enterobacter aerogenes
atgtctagtcaacaccagtatggcctcttaccgcgcaatttgcaaggagaagaaagccatgaagctaccgcgaaacgccctggtctggtgcgtattaatcgtgtgtttaacgctcttgatattcacatgcctgacccggaaccgcttatgcgaagtccggctaaaggacgggaacagggaggtcgcggcaagcctggcttacgaatccaacggtaa

SEQ ID NO: 94213 - DNA, 486 bp, Enterobacter aerogenes
gtgggacgtataaccgcgcccgagccgttatccagcgctcatcagctggctgagttcgtcagtggagagacagtcctcgatgaatggctaaaacagagaggtttaaaaaatcaagctcttggcgctgcccgaacgttcgttgtttgcaagaagggtacgaagcaagtagctggtttttactctttggccaccggtagcgttaaccatacggaagcgacaggcagtcttcggcgtaacatgccagatcctataccggtgattatactcgctcgcctggcggtagatgtctcattgcgcggaaaagggcttggcgctgatttacttcatgatgcagtacttcgttgctatcgggttgccgagaatataggtgtacgtgcaatcatggttcatgcgctcacagaagaagccaaaaatttctacattcaccatggtttcaaaccatcacaaactcagccgcggacactgttcctcagactccctcagtaa

SEQ ID NO: 94214 - DNA, 267 bp, Enterobacter aerogenes
atgaaatcagatgttcaactcaacctaagagctaaagagtctcagagagcactcatcgatgccgctgcagagatccttcataaatcgcgaaccgactttatcctggagatggcctgcaaggctgcggagaatgtgatccttgatcgccgtgttttcaattttaacgacgaacagtatgcagagttcatcgatatgctcgatgcaccagtcgaggatgagcccgccattaataaactactggcaaggaaacctcagtgggacgtataa

SEQ ID NO: 94215 - DNA, 264 bp, Enterobacter aerogenes
atgaagaagcgtttttccgacgaacagatcatcagtattctccgcgaagccgaagctggggtacccgcccgtgaactctgccgcaagcatgccatttccgatgccacgttttacacctggcgtaagaagtatggcggtatggaggtgcctgaagttaagcgcctgaagtcgcttgaggaagagaacgccagactcaagaagctgcttgccgaagccatgctggataaagaggcgcttcaggtggctcttgggcgaaagtactga

SEQ ID NO: 94216 - DNA, 831 bp, Enterobacter aerogenes
atgctgatgtgtgatgcgaccggtctgtcgcaacgtcgtgcctgcaggcttacaggtttatccctgtcgacctgccgctatgaggctcaccgtccggctgctgatgcgcatttatcagggcgcatcactgagctggtactggagcgcaggcgttttggctaccgtcgtatttggcagttgctgcgccgtgaagggcttcatgttaatcataagcgcgtgtaccggctttatcacctcagtggcctgggcgtaaaacgcagaagacgtcgtaaagggctggcaacagaacgtctgccgctgctccgtccggcggcgcccaatctgacctggtcgatggatttcgtcatggacgcactttccaccggtcgcaggatcaagtgtcttacctgcgtcgatgatttcacaaaggaatgcctgacggtcactgttgcctttgggatttcaggcgttcaggtctcgcgtattctggacagcattgcactgtttcgaggctatccggcgacgataagaactgaccaggggccggagttcacttgccgtgcactggatcaatgggcctttgagcatggtgttgagttgcgcttaatccagccgggcaagccaacgcagaacggatttattgagagctttaacggacgatttcgcgatgaatgcctgaatgagcactggttcagcgatatcgttcacgcaaggaaaatcattaatgactggcggcaggattataacgagtgtcgtccacattcagcactgaattatcagacgccatcagagtttgcagcacggtggcgaaatggaaaatgtgaaggtaaacaaaccgaccttactaactga

SEQ ID NO: 94217 - DNA, 636 bp, Enterobacter aerogenes
gtgaaatgcagaatcaaagagatctatgatgagaacctgggccgctatggttatcggcggatagcactggcgctcagaagagagggaggagcgttgaaccacaaagtggttcaacgtctgatgaatgtgcttcgtctcaaagctgcaataagagtgaagcgctacagttcatggcggggtgaacatgggcgcgctgctgacaatatcctgcaacgaaacttcaaagccagccggcccaacgaaaaatgggtcaccgatgtcactgaattcgccgtcagtggccgcaaactctacctttcacccattattgatctcttcaataacgaagtgatctcctacagtatttcagaacatccaaccatgccgatgatcgatgacatgctcattaaggcatttgccaggcttgatgcgggtaccaatccggttcttcattcagatcagggctggcaataccgtcatcgatggtaccagtatcagttacgggagtttggcatcatccaaagtatgtcccgcaaaggcaactgcctcgataatgcctgtgcagaatgttttttcgggactttaaaatcagaatgtttttacaccagtaaatttaaggatattgatgaacttaagatagttattgaggattactga

SEQ ID NO: 94218 - DNA, 132 bp, Enterobacter aerogenes
atgatagtaaaacgtactcctgggtatctgagctatctgcaaaagctggtcgaacgaatagtgctgcctcagttcgtcgataattctgaccttatcccttaccgaactaaggctttcaacttttttaaataa

SEQ ID NO: 94219 - DNA, 510 bp, Enterobacter aerogenes
atgtccagacgtaagtacacctttcaacagcgcctcgaagtggttatgcactatttcgctaccgatgaaggctatcgcttaacttcagctcgctttaacgttcccagaacccaggtaagaatttgggttgcagcctatgatgcttatggagaagaaggtctgaagcccagggataagggcgtatcaatcgatcccgatatcagagtcgaagccgtgaaggctgtactgacgggacagatttcccagacgcaggctgctgcgaaatttaacgtcgcgggttcggcctcggttgggaagtggatgaaggtgttcagcgaacatggagaggaagggcttcgttctctccgtgtgggcaagaaaagggcacttcatatgattgatgatcctgttgcgcttgaggtagaactggagcgttcgaaagataaacgtattcaggagcttgaacaaaaagtccgccgtctggaattgcggatactttatttaaaaaagttgaaagccttagttcggtaa

SEQ ID NO: 94220 - DNA, 261 bp, Enterobacter aerogenes
atgacactcactgcatattaccagttaagaaatacaaagtcctcaggtcttggtttcgaattgctgaccagtgaaccgggagcctttattgtgctggaagaatgcagttatgagaaaccgtatgaaattgcccgttatgggcataacgggagtgcaggcgatcgttcgaatgcgttcagctgcacgatgaataaagccagtagcctgcataattacagtggagcaaagctggattacaacgtttacgaagaaactgcctga

SEQ ID NO: 94221 - DNA, 471 bp, Enterobacter aerogenes
gtgatcctctacaggctgacgaaaacaaagtatctttctacggcctggaccggatatggtgcgaaagaggctggtgggcgctggaatagcgtgggggtgtcaatggtatatgtctccgaaacggcatcactaacgatgctggagacgctggtacacctgcatgcggcacagataatggactctttcacgctactgagtatcgatgtgcctgatgaactaatccaaagcgcaaacatggatgaattaccggacaactgggctgatgaggatgcgcctcaggaactggctgattacggagatgcctggtcatttaccaggagctcggttgcactgcgtgttccctcagccttatcgccggtagagttcaattatctgttaaatcctgagcaccctgagttttacgggatcgtgcagaaggctcaacagataccgttccggtttgatagtcgtcttaaacctgacaggaagtga

SEQ ID NO: 94222 - DNA, 444 bp, Enterobacter aerogenes
atgaaaacatttagtttgtcctcaactccagccagaccacagcgcctctggcaggttgccgggttaaataatgctgatggcgtagcgctcctggggcaaatcaatgaaggcctggacgggaaggtggcaaaccggatcactgactgggccagaataacccagaatgacctgagaaaaatgtccggtatcccttcaaccacatttagccgcagtgtgaaggcacgttttaacccggaacaaagtgaacgtctggtacgtattatccgcgtcattgatcgggcggtagatttgtttgaaggcgacaaggaagccgcacagaagtggttgaatgaacctaaccgggcattgagctggaaagtgccagcagacctgatggcatccgagacgggagcgtatgaggtcattaagctgattacacgtctggagcatggggtgtactcgtga

SEQ ID NO: 94223 - DNA, 477 bp, Enterobacter aerogenes
atgcggcaggcaatttgccagtatgctgaacgtgctgcggaaaaattgagccaggaacgtcagtactgcggtcaggtatcagctttcataaaaacctcgactttttcaaaacatgaaccctattacagcaaagtctccagcgaacagctctgcattccatcacgtgatacgcgggacattatcgcggcggcgggccgggctctggataaaatctggaaagacggacataactatgcaaaggctggtgtcatgctcaacgatttccgtccctgcggagttacccagctatcgttatttgatgaagggaggtcgtatgcaaacagtgacgcgctcatgaacgtactggatacgataaacaactcaggcaaagtatggtttgccggtcggggcatcgcaccggcgtggtcaatgaagagagatatgctctctccagcctacacaacgaggtgggactcgataccgatcgctacactctga

SEQ ID NO: 94224 - DNA, 597 bp, Enterobacter aerogenes
atgtttctaggaatggacaggaatgcggacctaaagggtatttgtttcgccatgctgaaacaggctgaatcaaacatcccttatgctgatgtcatcgcaaccacaaataataaagacttccgcatgcatgccctgcgtcccaacattcgtgacaataccaaagaggtcgtatgttcctttggaaccgatgcattcgactacctggataacctgtcaaaatccagtatgagtttggtcagtattcgctttaatggtgaacagcgtcatttcagttttaacaccagctctttcagcaagttactgacgcccagtggagccaaaatcgcagaacaagccgctgatgattataagcgaggtatccgctctcctgtcttttacaacaaggctccatcttcagtcacagaaaataaggacaggtatgcactaagtgaccagaaacttaatgaaatctggaacaaactcccctcagaaacccgtagaaaattactgccatcgcagcgggagtggattaagcaaaaagatacctgccgtagggacacagaatgccttaccgacatgaccaacaaacgcatcaagatactcgaggtggcaagataa

SEQ ID NO: 94225 - DNA, 342 bp, Enterobacter aerogenes
atggcttcagcaactcttatcaggctaaacaaagacgaatggcaaaaacttccagcaggccatttttataacggaaagtatcagattggtccctttaccctcacctatgaatttatcgtcaaatacatgaccctaatccacaaaacggaaataccggaatcctggcttaccgataacggtaccagtcttgatgaacgcagagttttgtacatggaagctagcgatattctgacaaaagatatcgtaagagaaattcaaaaaacggtgaaatctcctcaggaccaattacaggtttatcgcagaaatgatcagatcataaccctcgaaatgatggaaaagtag

SEQ ID NO: 94226 - DNA, 177 bp, Enterobacter aerogenes
atgggcatttctgaagccacattttacaactggaagaaaaagtttggcggcatgggcgtgacagagctgcgccgcctgcgccagcttgaggaagagaatcagtgtctgaaacgtctggtggctgatttaagtctggacaaggagatgctgcaggaagttatcaaaaaaaagttctga

SEQ ID NO: 94227 - DNA, 525 bp, Enterobacter aerogenes
gtgcttacccagggcaccggtggagtctcactgtttgcggtgcagttcgccaaaatcatgggggcacgcgttattgcgttaacgtcaaatgatgtaaaagcacagctattgtcggcgcttggtgccgatcatgtcatcaattaccaacattatcctgaatggtcagtaaaagtccgggaactgacacaaggcaggggggttgaccgtattgtggaaattggcgggccgggaaccttaaatcagtctttactctccgcagcgccgggaggggaaattgctctgctgggctttgttgcacagggaagtgcatcagtcgattttacgacgttgttcaaaagtggcgcaactgtaagaccttttagtgttggcagccgcgaggattttatcgcgatgaatcgggcgctggtaaaaagtcagcttcagccgattatagacagggtattcgagtttgaacatgctgttgaagcatggcgatattttgaaagccagcaacatactggcaaagtggtcatcacgatgaattga

SEQ ID NO: 94228 - DNA, 234 bp, Enterobacter aerogenes
gtgataaaaagcctggcacctgagggaatgctggcggccgtatttgaagacgacggccggaccgggtatttctatgcgctcgatgagtccgtagaaggaaacctgattgcgccggttgtagagaggttgaacggtattgaagcgcacttggatcaggagcgggcagtacaccaccagaaaacgctggagctggaacgatcgcagccgcaaaaaggttttgagcttggaatgtag

SEQ ID NO: 94229 - DNA, 339 bp, Enterobacter aerogenes
atgatttcaaaagataattctgagcattacatatggggtgataagtgtgatggctggtacctggtaaaccggcaggacatgctgattattcatgaaaagatgccaccaaaaacatgtgaaaaacgacattaccattctacgtccaggcagttttttttcgttctcaatggcgttcttactatggagctggaagggaaagaacatcagataggtattcagcaaggcattgagattccccctggttcaaaacaccaggccagaaatgacaatgattctgcggtcgagtttatcgtcatctcccatccaacaaccaggggggatcgcatagacctgacctag

SEQ ID NO: 94230 - DNA, 498 bp, Enterobacter aerogenes
atgtcgccggcagagaaaaacttatttctcatgccatggctggcgacatcgctgaagcaacgtcttctttggtgtgaaatggcaccagacatcgagtggcttctgaaacagggccgacagctgggcgtcaatgctaaactgacccataagctgaactacctctggcgctcctgcacaggggagttgtctgagcagaatgacctgttccggttgacccatgctctggagacagcgaaggctatgagctggaattaccgtatgttaagcgaccgggaatggtccggccggaatgccagtgtgaacggcatttatccttcacgctccagtctcgatgctacttttgacgacaatggacgacagataaatcctttgatagcacgtctgacagggaatgtgccggggctggtgaagttgtttatccgcagtgactggcaggtgcagcctgatgatgctgcttccctgacttatcagcatttgttgatagccagggaggcttag

SEQ ID NO: 94231 - DNA, 306 bp, Enterobacter aerogenes
atgaacttttcatgcattgaagacgtcagaaaacgaatcgatgaaattgacagtcaactggtcaggataatcgcacaacgcagcgaatgtgttaaagctgcagcagctttcaaaactgaccacgcagctgtccgagcaccagaccgtgtcgagcaggtaatcaacagggtacgtaagcaggccaatgaagcaggacttcccgaaacgattattgaaaaaacctatcgggcgatgattggcgcattcattgattatgaactcgggcaacaccagcagctgcagaagacgaaatccggccctgaataa

SEQ ID NO: 94232 - DNA, 204 bp, Enterobacter aerogenes
atgagccatggcaaatgtgagccgacaaacacgaatgccgccgattacaagctgtacgcgcgattcgatgctggtgaaacgcttgaaagcgttttagcctctccaccgaccacgaagcacaataaagtaacttctgaaggaaacatcaggacagaacacagaatgtggatggcgtggagaaagaagcatcccagaccactctga

SEQ ID NO: 94233 - DNA, 315 bp, Enterobacter aerogenes
atgcgaacgacaagtatcaccctgtgtctggttttggcgagttttggtgtatccgctaaaatccttgcagatccagaccttactaaccaggcaaataaaacgtgtgctaaacgagatgtactggaactgaaagtccctttagaagccaataatccctcctcccccacatggggtttggacaagggcatggtgcaggccacaattgacgcactgaaagaaaatccagacatcgccccggctgactctgtagcctgccaacaggctgcaataaaacagtatcgggctgggcaaaaacactacagtaagctcaagtag

SEQ ID NO: 94234 - DNA, 483 bp, Enterobacter aerogenes
gtgagagctgaaacgaaagaagctatgcggatgtttttggggggacgttgctacacggctaaacaactcgagaaggactatctctctgaagtggcaggttacagcgacgaccgctgggaagcgccgcaaagagctgcccggctggcggcagcggtaaaacgctacaaaacctctgagatgctgcgttttatttttgccaccatcgcgtatgatcccgacccggatctgaccccgcttgccgtgaggcggctgtgtcaggccttgttcggcagaaccggtagccagtggcttatagtggaaattttcggggtgaagggacggcagcaccgcagcgatgacagcactccggaggtcgttgaaaaaatggcaaccagatatcgtcacgccgcagggctgcactgggcggcaactctggcggaaattgagcgggtaaagcgcaactatcagacccaggttaaggcatccaggaagggagaagggtaa

SEQ ID NO: 94235 - DNA, 885 bp, Enterobacter aerogenes
atggccaatgataacaatcagttagcgctaatcatcactgagcaagataaaagttctggtgaagttatacatttggttcctaactcaaaacagagtattcaacccaaatcgctactgcgattgggggtctttgttccgacagtcaaggatggcagcgaccctatggcacgaggtcatgtcatcgatgcaacgactgagttgtgtcgtctttcttctatcgctggagaggggtacgaaaagattagtatttttgggcccaggcttgatatggatacggatttcaaagtctggctagggatcgtggacacactcgccaacacatttcttgagcctgatgggactgttagggtcaattttattgattttgctttcagttgtgggcttgctacaaaacgagttgattcaaggttaaggaaacgttttagcgactcactgacacggatccagcacacccatttccagttcatcaaaaactcaacagtagaagggaaaaaagtaaagatcgacatgagcctggtgtctacttcttactatgatgagggaaccgatgaggtcattatcaggccaaatccggatttgaatactctgtatcgtgtcgacgggaagacccgactttacttaaaaatattgaagaccctgtctcgaaaagaatcagcccaggcactgtatctttatctagttgaattacctgaccatttttatcgcattggattcgaccgcttaagagaacggttgcagctgacttcacacaaaggtgctcagaatgcgacgataaaaaaagcgttagagcaactggatgaagctggttttttaaaatacacgatagaaaaaaatcgtggggattatgtactggtcattcttagtcgaaacaaaaaagttacctga

SEQ ID NO: 94236 - DNA, 501 bp, Enterobacter aerogenes
atgaccaccagcagcgaccacgcttacccgccagcgttgaggatggtcactggtatcgcccctgtttacccgccagcgttgacggtgaccaccgacagcggccacgcttacccgccagcgttgaggatgactaccggcagcggtcccgtttacccgccagcgttgaggatgagcaccggcagcggtcccgtttacccgccagcgttgaggatgagcaccggcagcggatctgtttacccgccagcgttgaggatgagcaccggcagcggccccgcttacccgccagcgttgaggatagccaccgtcagcggccccgtttacccgccagcgttgaggatgagcaccggcagcggccccgcttacccgccagcgttgaggatgagcaccggcagcggccccgcttacccgccagcgttgaggatagccaccgtcagcggccacgtttacccgccagcgttgaggataagcaccacagcggtcccgtttacccaccagcgttga

SEQ ID NO: 94237 - DNA, 1068 bp, Enterobacter aerogenes
atgcgacgtaatgcacaaaaatggatcccgtttgggtttgatacggattcaaataaaattgttgatatcgccagcgttgaaaatgggctttcgtgtaactgtatctgcctcatctgtgggacctccctgattgccaaacagggtcaaaataaaaaatggcattttagccacagcacagaagtaaaaggggtttgtagtgagctcacactacaacatataaaaaaatacataaaggtgaaaatacaggaaaaaaaataccttgctctccctcatcttctgcagggtaaggagaaagggatagttaacctcaaaaatctcgctggtggtgggattgtttgtggccttaatgctgacctcacagggatatgtaacgatacgacaatcgggatatttattaatgatacgtcggaggatatccagcccaatccagacctgttagcgcaaacagaccagctggcgctggtggagatcgatgccgttcggattgaaagtatcatcgctccatatcgtgagagtggagaaggcataaagatgatggatgcgatagaaaagttacttttcgtttctgaggaagcgaaaaaatggatctaccatcctatgatgaagaaggttaaacaccatactctacaccagtaccggcgtgagctgtctaccagtggaaatcagatccttgctttaattcctcatgaacttccgataagcatgaacgccctcccatcctccccggcacagcagtggcatcaccttcgagccacgattaaccttctttgtcgcctgagccgttctgatatccctcaaggcagtattgcctttgaagaactggtttattatatcccccggcttctggaagcatctgaatctatcaatgttgccgcctacgaacgatggtatgacttctatatacggaaaaaaggagagggtgtactgaatgaggctgaaattgaatttttgtcttttatagtgaaaatcattaactggaacttgtccatacataaccttcccaccttcgatagcaagcaggcctttcgggattggtttttgctaaatgatcctaacaagtcgctatag

SEQ ID NO: 94238 - DNA, 255 bp, Enterobacter aerogenes
ttgttgaaaagcccaaatgcgcacagtagcctgagagaaacctatctcctgaagttcagaaagtgcagtacgactgaaacccttgaccgagtgttcgagcgtatcctggataaattaaatgatgaaggtggggatataaataagataaccagcctgaacggagcttatgatcaccgcagggctgagatctacatgaaaaaaaactatgacaaaatacctgcttccgtgtggcatctcatccccgatgagatatga

SEQ ID NO: 94239 - DNA, 1137 bp, Enterobacter aerogenes
atgacagataaaaccaaactggttgctatctcacgaaccgatgacatgagtgctctggatgcactcaagctgttgcggtttcgccggtacaatacggccagaagtcagttaagggtcacgagtgtctggtctgcatggtgcgccaggcacggtctgacccccttccccgtcacagcggttgatgtcgagcgctatattaatgggctgaatggatccgttaaaatggcgaccatctctcattttattgcatgcctttcaagcgtaaacagcagcctgggttttccagacttccgcaacgttctgataaaagcactggttcaggtatggcgggcgcgggagaatgagaaaaaaatcgtcaccggtcaggcccttccatttcttatatccgatctcaatattcttcgccggtcgctgcataaaagcgacgacctgagagacatacgggaccttgcaatgatatgggttgggtttgaaaccctgctgcgtaacgtggaaattcgaaggattaaaactggcgacctgaaatggcaaaatgacacgtcctgttaccttctggacgtcatgcggaccaagacaagcctttcaagtaacctgacatttcagctctcaccacaatgcagtcagcatgtcagacggttgattgagacggtggaatacaccgataccgaaaccttcgggcaccgttttctttttcagcctgtaaacatccatacaaaccgatatttcccgtccaccagcagtaagctatcacggggaaaatccatagacaggatgctagtcaaagcaggattcagtgaggggttactgacgcagctacagaatgaatcaaaggtatcacgggaagatgttggtatgctgtcctctaattcactgaaccaggcatttgcacgcctctgggggattgccgggaaggtcggcgacagtaaccgacagtccgggcggtaccggacatggacaggacacagtgtgcgtgtggggggagccatagagctgtttaaggccgggtactccctggaaaagattaccgagatggggaactggtctgatccaaagatggtcttccgttatatccgtggatatcttgccagtgaaaaagccatggtaagctttatgcgtaatcatctggacgacatatag

SEQ ID NO: 94240 - DNA, 318 bp, Enterobacter aerogenes
atgaataataaaagaacgattaccactcgagagcagattaaaattaatggggaaattcgtgagagaacagctacccatattgttaccggtgctcatgggtacgaaaccctttgcataagtggttatattgtcgaacataacgagatgggtgaggttatccataacagcgaaaaattagcggaagatttgttacctgttacctgccccacatgcagggtcatttggtatcacacccatgaatttacactcgatgattttgacagtctttcaggaaaaggggattttgttgtgacagatttgaaagaactgaatatctga

SEQ ID NO: 94241 - DNA, 324 bp, Enterobacter aerogenes
atgacttacgctattttcttgttagtaactgctgtttgtgcattcggattaaattatctgacaaacaaaatctgttccggtacgggtatgattaaccagagtggaggctctaatgtacacgccttacggtgtatcacatcgttcctccttctccttgtctcactctggcttcctgtcaaacctgccgtgatcaatctggcagtagagtttgctgcactggtgaattttattgcatctgtcactctctataccgttgcaaatttccgggaaaaacggagattaaaaaaacaaagaaaagaagaaaaagctgctcaaaaaggataa

SEQ ID NO: 94242 - DNA, 759 bp, Enterobacter aerogenes
atgagccggattttaaccgggatttgtgaagctgatccggccaggaggttatacaaagtggccgtcagtaggggaaacacttttctgtctgcaaaagaacgtttccgtgtacaggtctgtttcaaaaatgccataacacatccagatgaagatcggctgctggccgagctgttgactgttcatcacttcctggctgacacctctattttatggcatatggagcaaaaaacttatgcatgcaccacgacatgggccaccacgtccacatggctgccagagatatatcagcgtcaggccagcacgcccaatgtggtaaagattatcaaatttatgcacgcccggtttccaggccttaaaacggttgcagaaacaaatgagcagggttacgaacaggcgcttaccagtgtggattttgaaattccttactggccggtgctgccgaaattcgaatcaaatatgggaacgatacaggtaacgattgccgggatgatccgttacacagaaacgatgagcaataaagattgtaaaacccctctcgacttaatgataaaaagttttaagtcagggttgatcccgatagagaatatgccgttgagtaagactgaaaggcttatgcctctgaatatcaacaccgctggtaagatatttacacacgcaacatggccgagatgtcgttacattttcgtaccggatgaggcgggagtaatgaaactggttaacgtggtcaaattaagattaaagcctctggaggaaaaatga

SEQ ID NO: 94243 - DNA, 960 bp, Enterobacter aerogenes
atgaatactgactttgcccattacaacgaagagcaactacgcaaactcggtgagctgcacagtttactccgtcacagcgatatcggctcatcttaccttgccacgctcccggagccccgtagtgttgaggagttgaatcctccacaggaaatcaatgtgactcattcggtacccgacgtcgacaccctggtggatatttaccggcagcagcgggttgataaagtccatgtcagggatgagcattattcaaccaaaatcacccgtaaatatcccgggttcgttgtggtcagaaacaatcatgatcaggtgatgtcgctggtgggtgaaatcaaccggcttcgcgacaaatttgctgatgctgtaaaagctatcactcattaccaggactcccggtcagaaattctgcaccaggtttacccgtggctggtgactttacaggtgtcccgtaatatccggatcgttactgagcaaattcgctccctggggttcacctggcaaatccctgtcattcataaatttacccggctggaaacggttatcgaccgcttacgcagggagataactgagctccagccggatatcagtctgacaaaacaggatgttgaacggctgaaacaggaacgaaccgaagaaatcatgatgctgtcgttgctcaatgatgaagtgagtcatgacgatgaaaatttgagaaaatttcggcttatccgggaaagtaactttcctgctgttaacgtcaatatccggtacaccagtcctgaagatccagatgatgttcatgggccgtacaaactcaactttcgcgcgcctttaccattaattttgttcagcgaacctggccggtttaatccgttaaaaaattacgtaaaaggtgaaaggcagaagcgcggcgattttaatgaaaaatatcgttctgtcctgccccgtatagggctggtggaagtcatcagggagtcaaaatga

SEQ ID NO: 94244 - DNA, 408 bp, Enterobacter aerogenes
atgagcaaagtgcattgtattagtggtattacctggaaaaactccgatagcgcggctttcaaagtatatgccagcattgctgctgtattcagccttggcctggtcacagctaccgtcaggaactatgaaattctacaactgactgttccgtatacctggtatgtcttcttcactgcattctggcttctgttcccgtccttcacggtctctttccgggagcgggaagggcgtctgtttacctcgatgggtttttacgggttaaaactggtcactctcgaccgccctgtctccgatgggtactggctggtcacgatggagaaaaaccgttaccgcctcgtcagagtatgcagggacgggcgacgccagcctgtatggctgacgtttaagtctttaccagagtttgtttaa

SEQ ID NO: 94245 - DNA, 465 bp, Enterobacter aerogenes
atgagaaccagtaaattgaatatgattttaaaagaagaaattgttttgggtatctacagctggcttcatatgactccggtcagcatgctggtaagaaacataaccagcgatcagggaggggattacgcgatcgtccgctttaccgtcgatagccggggggtccagatggggcctaaggcacagggccagcttctttgttcattcgggtttaatgtaaaggaatcctgtgaggccgacccaaaagacggtccaggcctcataaaggccgaaatgatgaacggtgttatgcagctggtaccggaatgcattgagctcacagacagccaaacccaggcaatcaggaaagaagtaactgtgtttaacagggtttgtgctatgcaactcctgggggggcatgggaatgcaaggtctctgtgggagaaagaaattcttccccggatgaaagtgcgcagacaactacattga

SEQ ID NO: 94246 - DNA, 243 bp, Enterobacter aerogenes
atgaaactaaatgagacgtctggcgtatgcgaagatgtgcatctaaatacatttgtcatcgacccggcaacagcccgacgttttgagtgcgttaaagagatggttcgtaagcaggggttcaataacatcacggagccggaaatcattgatgccatattgtctgaaataacagctgcagatgcagccggaatttttattgaatacaagttaaaagccaccaaacctttgctttctacagattag

SEQ ID NO: 94247 - DNA, 297 bp, Enterobacter aerogenes
gtggcttttattgcgcaccaaaatttggagctgagggaagtcgtggtatcaatgttcagctcaatgcttccagagcagtcgcgtgttatacatggaccatttggtttcggaatggataatgagattgaattcattaaacagcgaaacagcgcggatgaagggtatctcgttatttttcttaaccagcaagactcttactcctggttaaaactcatcgcgggtgaatcacctgaaaaagcgattgcgtacaactttgacttcatccctgatctggagagtgaacatgaaactaaatga

SEQ ID NO: 94248 - DNA, 285 bp, Enterobacter aerogenes
atgggcacaccacgatttacacctgaatttaaggaagaagccgtccgtcaaataacggaatgcggttattccgtcgccgaagtatctgaccgtctgggtgtttctgcacacagcctctacaagtggctacgggctatcaaacctgataacagcgagcagtatgcccggggtatactggaagctaaaagcgagaccctgaaactccgggcgcagctaaaacgaaccgaagaaaaatgggatatcctgaaaaaggccgcgcggtactttgcaagggagccaggctga

SEQ ID NO: 94249 - DNA, 339 bp, Enterobacter aerogenes
atgcaaaagacccgctataccgaagaacagatagcatttgcgctgaaacaggccgaaaccggcactcgggtggaggaagtctgccgaatgatgggtatttctgaggccactttttacatctatggactacctcctttttacaagtacttaatctggttttgggttgttgcttacatctatccggcatcaggaaaatctgtgccaaatggggaattcgcacacaatcgcctcaacaactggacggcctctgaggccagtataaaaatcaggttccgattgtgcaggtgcaacctgtcaccatttctcagtacgctgcaactttttctggcaggggattaa

SEQ ID NO: 94250 - DNA, 705 bp, Enterobacter aerogenes
atgcagttcgtgtcgccaaaaagccccgaacagcaggatatccaggctttacaccgggcaaggcagcgtattgtcaatcaccgcactgctacagtctgtcaaataagagggctgttacttgaccgggggatccccattggcagtgctgtctccagagctcgccgggctattcctcttatccttgaagatgcagaaaacggtctaagttcccgtatgcgcagaacaattgccgagctctatgatctctttaacgatctcgagcgtcggatccatttttttgataaggaaattgaaacagtattcaggcaatcagaagcctgtcagcgtatcgccagagttaaaggcattggccctaaaacggccactgccgttgttgctgctattggcaaaggaactgaatttaagaatggccgccacattgctgcatggctgggtctggttccacgccagcattcgagtggcgacagacaagtgctgatgaatatgacgaaaaaaggcgacaagcatctgcggacactttttattcatggtgcctgctctgtcgtcagggttgccacgaataacgatgatggccatatgaatcagtgggttaaccagttaaaggaacggcgcggatttaataaaacgaccgtggcggtcgctaacaaaaacgcgcgaataatctggtcgatgctgagaaatgagaccgagtatcaggtagtgtga

SEQ ID NO: 94251 - DNA, 417 bp, Enterobacter aerogenes
gtgcgttttctgcgggaggcttaccataccggtgtccgacaggcgctgactgtagtcgataattttagtcgggagtgtctcgcgatccatgccggaaagtcgctgaaaggtgcggatgtggtcggtgtgatggaagggttgcgggtactgggcaagcgcctatcggtacgtattcagacaaataaaggcagcgagtttatttcggaaagtctggataaatgggcgtatgagcacggtgtcacaatggacttctcccgccccggaaaaccatcggataacccgtttattaaatcatttaacggcaggctgcgggatgaatgcctgaacattcactggttccctcgctggaagatgcgcaggacaaactcgacaactggtgtagggaatataatcatgagagaacgcattcatcattaa

SEQ ID NO: 94252 - DNA, 132 bp, Enterobacter aerogenes
atggcagtatggaagattggatataaaaaaatcaaggatcatgaggatgagaaccgccgtctcaaacagatgtttgccgacctgagcctggagaaccgggcgctgaaagacgttatcgaaaaaaagctttaa

SEQ ID NO: 94253 - DNA, 300 bp, Enterobacter aerogenes
ttgccagtgcgtaatccctcgccactggccacgctggaagcactgaaccacagctggtctatcgactttatgtatgatgccctggtttgtggccgccgttttcgcacgttcaatgtcgttgatgactttaaccgtgaggcgttgtcgattgaaatcgctctgaatctgccagctctgcgcgtggtccgtgtactcgacaggaacgcgacaaattgcggctatcctgtcatgctacgcatggataatagtccggaatttatctcactggcactgcctaatgggcagagaaacatgcagtaa

SEQ ID NO: 94254 - DNA, 1167 bp, Enterobacter aerogenes
atgaaaattactatatctggtacaggttatgttggtttatcaaatggcatactaattgctcagaatcatgaagttgttgcattagatattattcaatccaaagtggatatgcttaatcaaaagatttcgccaattgttgataaagaaattcaagaatatctatcagataaaccacttaattttcgagcgactaccgataagcacgatgcatatcgtgatgcggactatgtcattattgcaacgccaaccgattacgatccgaagacgaattattttaatacatctacagttgaagctgttattcgtgatgtgactgagatcaatcccaatgcggtaatgattattaaatctactatcccagttgggtttactcgcgaaattaaggaacgaatgggaatagataacgttatattttcccctgagttcttgcgtgaaggtcgtgctttatatgataacttgtacccgtcacgtattgtaattggcgaatgttctgagcgagctgagcgattttctcgcctattgcaagaaggagctctcaaaaataatattccattactcttcactgattccacagaagcagaggcaattaagttatttgccaacacataccttgcactccgtgttgcttactttaacgaacttgatagctatgctgagtgccaagggttaaacagtaaacagattattgaaggggtttgtttggacccaagaattggagaccattataataatccatcgtttggctacggcggatattgtttgccaaaagataccaaacaacttctggcgaattatgagtcggtaccaaacaatattatttctgcgattgtagatgcaaatcgtacacgcaaggattttattgctgattcaatccttgctcgtaagccgaaggtagttggtgtttatcgtttgataatgaaaagtggttcagataacttccgcgcttcttcgattcagggaataatgaagcgaattaaggctaaggggataccagttataatctatgaaccagtaatgaaagaagatgaattctttaactcacgtgttgttcgagacttagaagagttcaaaaataaagctgatgtcataatttcgaatcgtatggctgaggaattaatgaacgtaaaaagcaaagtatataccagggatttatttggtaacgactga

SEQ ID NO: 94255 - DNA, 870 bp, Enterobacter aerogenes
atgaaaggtattgttctagccggtggttctggcacgcgtctttatccaattacgcaaggtgtttccaaacagctattaccaatttatgataaaccaatgatttattatcctgtttcggtactgatgctttctggaatacgtgatattcttattatttctacgccagaagacctacctgcttttcaacgtttacttggtgatggttcaaaatttggtgttaatttctcgtatgctgtgcaaccatcacctgatggtttggcccaagcatttattattggtgagaaatttattggaaatgatacttgtgcattaatattaggtgataacatattttttggtcagagttttagtaaaaaactagaagagctggctgtcaaaacttccggagcgacagtttttggctataaagtacttgatccagagcgatttggtgtggtggagtttgataaaaactttaaggcgatatctcttgaagagaaacctttgaaacctaagtctgattgggcagtcacaggattgtatttttacgataacaatgttgtagacatggcaaaagaagttcggccgtccgatcgtggagaattggagattactaccttaaatcagatgtatttgaaacgaggggaactacaagttgaattgttaggccgaggttttgcgtggttagatactggaacgcacgatagtatgatagaagcctcccaatttatccatacaattgaaaaacgtcaaggacttaaagtcgcgtgcttggaagagatagcttggcgtaataaatggctatcagctgagggtgttgctgcccaagctgagtgtctgaagaagactgaatatggggaatatttgaaacggttgctcatcgaacgttaa

SEQ ID NO: 94256 - DNA, 1065 bp, Enterobacter aerogenes
atgaaaattcttgttactggtggcgctggttttattgggtctgctgttgtacgtaatatcattgataatactcaggacgaggtgcgggtcttagacagtctgacttatgcagggaacctagaatccttatcttctgtcgtagataacgagcgctactctttttcttgcacagatattactgatgcaatagccgttgcaacgcaattcagcgaattccaaccagatatagtgatgcatcttgccgctgagagccatgtagaccgctctattgatggaccggcagcttttattcaaaccaacttggtcggtactttcattttattagaagctgcacgtaattactggtcttccctggatacttctaagaaaaatatattccggtttcatcatatatctacagacgaagtttatggtgaccttgatggtacagatgtcctctttacagaggaaacatcatatgcgccaagtagtccatattctgcctctaaagctggtagcgatcatttagtgcgtgcctggaacagaacttatggtttgcctgtcgtaataactaattgctccaacaattatggaccatatcactttcccgagaagctaattccgttgacgatcctgaatgctttggctggtaaacctctacctgtttatggtaatggcgagcaaattcgcgactggttgtatgttgaagatcacgcccgagcattatatacagtcgcgacaaaaggaaagagtggagaaacctataatattggtgggcataatgaacgtagaaacattgatgtcgttcttgctatttgttctattcttgacagtattctagagaagaagcctaataatataagtagtttcgcggagttgattacttttgttgcggaccgcccaggtcatgacttacgctatgctattgatgcctcaaaaattcagcgagagctgggatgggtacctcaagaaacatttgaaagcggcatcgaaaaaacggtgcattggtatttgaacaatcagacctggtggcaacgtgtgcttgatggttcttacgcaggtgagcgtcttggtctgaataaataa

SEQ ID NO: 94257 - DNA, 180 bp, Enterobacter aerogenes
atgccgcgcttagacttatatttttttacctttctgtgtgtttttggtgctatggtagaggctctctgggggcaaaattacagcatgtatttgaaatattactgggtagtagtattgatgctatttttctttaaaaagagaggcttgttggtgaatttgatgaaaaggaaggcgttataa

SEQ ID NO: 94258 - DNA, 489 bp, Enterobacter aerogenes
atgttgcgaaacagcttctggcgcagctttttaaaccgccgcataaacagccgccactgcggcgtttttttaactttcttcaaccccttgcccaacccgcttaacccggcgcgcatcagcagcgccatcaggttgatggttggcggcccgccgacaatcacattgttgggaatcgcgagattaaacgtcagcggcagcgtcagcgagagcggctttggcttgctcagccgcttcaggcggaacggcggcaccattccgaggatgttacagctcagtaccggcatgccgatgcgggaaaacggttcaccatcgacggcgacggttttgctgcccataaacagctcgtcttccatctgcgggccgccgggcgcgcgcagcggcggcacccacacgccgccgaccgggatatgtaccgcaataccgccggtccccgcgctggcgcgtttgatgctgttgacgtgtacggtagtgcccagcagcggcagataa

SEQ ID NO: 94259 - DNA, 750 bp, Enterobacter aerogenes
atgccgcagttgagtggttcccgcgccggcctggctcagcgcctgcaaaaaaccaaaccgatcatagcgatagcgactctgcccggaacccggcacgtccgccgcgctcagctgcccgtactcatcatactgatagcgcgaggtgacgccggtagggtccgtgcccgccagcaggttgccgcgttcgtcatagtccgaacgccagcaggcgcctttctcatcaatcagcgtcagcagatcgccgtcttcattgtaggccgcctgaatctggctaccgtccggcagatgttcggcgatcattcgcccctgttcatcatactcccaacgacgcgtgctgccgtccggctcaatgagttcgacggtgcggccaaaatcatcgtagtggaagacggtattgccgccggtcggatcgatctccgaaaccggcaggccgttatcatcaaagctgacagacgttacatggccgttggaatcggtgatttccacttcgttgagcaagtcgtgccaggcgaaatggtaatcccatacgccgccgtcaccccaggcgtgaaccacccgccactcgtcattgaactggtagtggaagccctggccgttacggtcgacatggctggtcatatggcgctgttgatagtagaagcgccgcggatgcgaaagcgcatcgatctccgcgctcaactgattatcgctatcgtattcatagcgggtcagcggcgtgatctcgtcatccagcgcgttgcgcaggcgtag

SEQ ID NO: 94260 - DNA, 660 bp, Enterobacter aerogenes
atgatagtgccagctctccttcctgcccgcttcctgcgtcagcagcgccagcggctgaaaacttcccggatagtacacgtactcgcgcatactgctgaacagcgtttcctgcgctttctgccgctgcagccggctgccggtatcaaaaatgctctgtgccgccagcggttcgcgggtgatagtgaccgtttcccccgccagcgcgtcgccctgccagtagaaccagcgcgtctcttccgccgtctgcttgaacacccggcgccccagcccgtcatagccgtaacgcaccagccgctcgcccttgcgcaccgccaccagctggcggttatcgtcccagctgaaatcctctttctcgccgttatgccggacatcgcgccgctgtcgcagctcgcccgcgcgatcgaatacataacgcaccccgcgctgctgcccctcgcggaaccagcccccggcgctctcattcaccgcccgggtctgcgtctgcaggtggctgcccgccgcatcctgcacaaactgccgcagcgtaccgtccggcgcggtatgggccgtcaagcgccccaccggatcgtaagcgtaacgatcgctgccccacaggctgtcatcgcgccgggtcaggttacccagcctatcccagctgaagccgctggcgaacagcggtaa

SEQ ID NO: 94261 - DNA, 1692 bp, Enterobacter aerogenes
atgaagttacttaggtttttattggagatagatggaaaagaaatacgctcgataccgtttttcgagaatttaaatataataacaagtaaaaaggagtctgatgatcctggtaatagtgttggtaaatctacgttgggaagggttctagactatttgtttgatggctcaattaagcctatctatattgatgaagagtttcaaacacctaaaaaagaaattgaacaacttttcactagaaatgaagtgcacgtatcattagaatatttaggtttagacaaccagcatagtattattaagcgtaggctctctactaatgtagacttgcaaagttatattttaaatgggagagaagtaacaagtaaagaatatattcatcatatcatgggtagtgtttttaatgttagctctgctaaaccaacgcttagaaaactcgctccaaaattctttagaacaacgcaacaccgtatgacaaaaacagttaactttgacaatggcaggaacgtttccaagtcagatgttagtactgtttttctatatttgttcaactttaatgacactgaaatacttaccaaaatacataaactaaagactgctatcaaaggttatgaaagaaacctaaaagcgtttaatagtgttatttcccaagataagattgttagttcgataacccatgtgagacgagaaatttctaagttggagaggtctcttttatcgtctgaaaaaggaatcgataagctagaaatagtctctaaaattaatagggtagatgatgagcagaatgtcttgtctgatgaaatattgtcgttagatttaaagataaaaaacatcttagaaactaatgaaatacttaagagtaatgaacaagttcatttgttagatgaattacaggcaatttatgaatacgcatcagttaagatagaatctacccttcaggattatcagcaagcacttgcgttccacgcccatctcctaagtactaagcgtgaatttgtttctcatgggttagataagcttcaagctgaacatgaaaaagcaacggttaagttcggtcagttaaaaaatcagaaacagagtcttttcgacgagcttaaatctaaaaagaaaatagaagagatttctgatgcaatgaaggaaataggtaaactagataaagaattagccaagctgacagccataattgacaaaaaagatgatattgattcaaagttggctatagaaaggcaaagcttaactgaattatcagggcagctggaagctgaacttactagcgtaacctctttcgaagataaattcatagataatttcaaagaatacactcgtggtttttatggtgttgagtacaaattcagtctcaatttagatcaagaaaagggcgaatgtaccccacatgtagatgatgtggagtcaaataacgaaggtgggttaaagaggcttgaggttgttactttcgatctagcatatatcaagaccgtttgtgataaaaaagctttgagacctaactttgtactacatgattctattgatgaaatcgatattcaacatgttcgcaaaatttttgatgagtcgattaaattgtcagggcaacatattgtatctatgctgtctgataaattaataaaagaagattaccagaaatacaatcgttatattattcttgaattatctcaagataataaattttttaagctttaa

SEQ ID NO: 94262 - DNA, 237 bp, Enterobacter aerogenes
atgctaccaactaaaggatctcatccagagatgaatgtgctctacatcggtggattcattctgaagcagctacaagagtgcaaaagagggcgtgtaaagatcactcaactaatgaaaactggggaaaaagagctttctgtttctgtagaccatataattttagcgctggactggctgtatataatttcagctattagctacgatcggaacgaggtttttattaatgaagttacttag

SEQ ID NO: 94263 - DNA, 552 bp, Enterobacter aerogenes
atgtatgaaacacgatttgacattcataacattgaaggtgacttctacaatgtggaagctccagaaaataatgttgattctattattaatgttataattggagatattgcatcagctaaagttaatatcgatcgcagtgatcgttctttccctgctaatgtttctaaaaaaatagaatacaatatgcttaatagcaagcgccgtatagtcttgcaatacaaatcatactcctctcatattgaaagagcctacactcttgcagaacaaaatataataaatggtaaacaatcagctatggagttactaaatggaatgtactgtaattcattagataagtatgagatcgattcttttgaaccagacataaaaaaagtacgacagcatgctgacgatataatcagtgatgtaattaaacaactgaggaaattcgtttatagttcagcaaatgtcactcaatacaaagagcaagtggaaattggcttaaatgttgtcgttgcgcatgcctttgtagagtgctatgtcttggagaatccaaataatgctaccaactaa

SEQ ID NO: 94264 - DNA, 288 bp, Enterobacter aerogenes
atgcaagaattttggaaactctttggcagcgaacctttcgtagctatcgcttggatctgtaccgttgccagttgcatatatgcctttgtacaaaaaagcaacgtgaccaagattgaacagaaattcagggacctacacattacccatagtgacctaaaaattcaaaataatactcttaaacagaaagttgagactctagaaatctctaacaatgaattaaatgttcagaatacaattctgcaacagaaaataacaaataccgaaaaaaatgatattcagtgtaattaa

SEQ ID NO: 94265 - DNA, 1197 bp, Enterobacter aerogenes
atgaagctaaatgcgcggcaggtagatgcagctaaacccagagagaaagcctataagctggcagatggtgctggtttgtatcttgaagtcgctccctctggttctcgatactggcgaatgaaatatcgcttcaatggaaaagagaagcgtatggcttttggggtctatccggcagtttcccttgcacaagcgagggcactgcgtgatgaagctaagaaaaagctggccgagggtatcgatccgtctttcgcaaagaaagaagaaaagctggttcgggatgtgcagctcaacaacacgttccagtctgtggcgcttgaatggcacggaacgaaggtgagccgttggtcagaaggttatgcctccgacattatcgaagctttcaataaagatattttcccctatatcggccaactgccggtgaatgaaatcaaaccgctggttctgcttaatgtgctgcgtcgaatggaaagccgtggcgcgacagagaaggctaagaaggttcgccagcgctgcagcgaagtctttcgttacgccatcgttaccggccgtgcggaatacaatcctgcggcggatctaaccagcgcgatgtcagggcatgaatcgaagcattatcccttccttaccgttgaggagttaccagacttctttaaagctctctctggctatacgggcagcccgttagttgttcttgccgcacgtttgctaatccttacgggagttcgtaccggcgagcttcggggggctttctggagtgagtttgatcttgagaaagcggtgtgggaaatacctgcagagcgtatgaagatgaaacggccccatcttgtccccctgtctacccaagcgctggaaatcgtacagcagctcaaggtgatgtctgggcaatatcctctggtgtttcctgggaggaatgatccccgcaaaacgatgagcgaagcgagtataaatcaggtgttcaagaggattggatacacggggaaggtaacggggcatggttttcgccacacgatgagtacgattttgcatgaggaaggattcaatacagcatggattgaaacccagcttgcgcatgtcgataagaacgcgattcgtgggacgtacaaccatgctttgtatctggaagggcggagggagatgatgcagtggtatgcggattgcatttatgacattagtaaatttaatctaatcatagcatcataa

SEQ ID NO: 94266 - DNA, 1218 bp, Enterobacter aerogenes
atgaaatacaagcctaatgcgtaccttgttaaagaaaactcttcggtgtactccgttaaagtcaccataccgccttatatgcgttctctttttgggaatcgaacagcattcatgcgtacaactggcacgtccgatattagggaagccaggatcattcgtgacaaaatcatgcacgaattcttcactctgcgtgagcaactcaagcctaagccgcaaggaaattgcgttgagcgcgtcctgaaggaactacgctcaatccaccagtatgtaaaccagaatgcgggaatagacttcgcaacggctcgtgtttgtccttcacttgtccagttacgtgatgaatttattgttcagcacaacgacaggcgtaagctgtctacgctcagcaagtacattaaagcggttgaagtctttacggctcatttccgatgcaaggattttcgcttgcacgacatcaacagaacaatggttacagactggctcgacagggcaaaacaggagaaagctagccagacgctggctaattatcttggttgcctgtcccagcttgtggcactggctcagaaccgctatcacgatgcgccgaaggagaatgtttttacaggccataagctggatgtacgccatgatcgggaaagctatgagccgtttaccagtgatgaactgtccaaggtgctggagctacttgatgaagagatgaaagccgttgcaatggtgggtatgtatagcgggatgcgcctcaatgaaatttgctctttgcaaatcagcaatatcaaaaccgttgagggggtatggtgtttcgaggtaacggagggtaagacacgcaatgcggctcgcctggttccaatccatagcagactgatcgctctcgtcaaacggcttattcaggacaaccacaacggctttctgttctaccatgccagcatcacagaacgtgcagacggcaagcgctcaacgtggcatacgcagcgatttacacgggctaagcgtaaagctttaggagagcaggggacagagcgtaaggtgtttcatagtctccggggaatgttcgtcagccaacttgatcgaaaaggtgtacttgaggaccgtgtggccttgattgtgggccatgagcggggcaagacggagagtttcaggacgtacagcaaaggcgcggggatgaaggaactatcggagtatatggagttgatacgctatccagaaatagaaaaggggcattaa

SEQ ID NO: 94267 - DNA, 1812 bp, Enterobacter aerogenes
atggcaactaaggtagaagcggcaacactggttaacaggattgtttataaatctgatttaaatagtctgaaaaaagttagaaacgacatgaagaaactccaacaggagttttctaaatcaaacaaccaggtagctaaggccaaacagcaggcagataaacaaattcatcaacagcaattaaaacaacagcgtgaaattgataaacaacagaaacaagctgcaaaacaacaagcagcagatgctaaatcaaaggccaatgaacagaaaaaattagcggcagcgcaagcacgcgctttaaaaattcaacagcagcaacagaccaaaactgcaaaagtaagcgagaatgcgcgtttggcagagcgcaaggcgttgtttgacatcggcagattgcaggggctgcatggtgctgaacgcttccaggccatcaaacatgcccaatcgcttgttaatcagtaccagcaaggggctatttccctacgggatatgaatcaacagctctcacagcatttgactacacaacgcgcgatagccagaaataattcaaaacaagctaaacaatcaggtaaggggaaaaaatctggctcatctggttgggttgcacgcaatgcatctgcaatcctcccagttgatcagttgttggggccaaccgcagccgcattcctgggacagcaggcgtatcaaattatggcgggggcactggctggagcgattgaacggaaccagggcaggaagatgatccaaagttttggcggaaatgatcttgaatatatgagtttacgccgtgcctctctcgctaccacaggttttgacatctcccgtgaaaaatatgctgatatcagcaaagattggttagataaacagggtgatttatcctttggtaacacggataaaaatggcaactttgccggaggtggggaactatcagaccttgttaacgtaatgcgtcaacgtctgggatataccaatcaaggggcagtcgccaaattaaactcatttaaaacgccagttgagtttgctgtatttatgcgtggtctcagagatgcaggtaaagtgactcaacaagaatttgttaactttggtgaacgaattaatgatatgagttatgtcttgaactctgtttcaagtggtggtgaaaaccttatcaagattcaaaatgaattggttgattctcatttagcactaactactgctcaacagaaatccattaataatctgactgagatgtcagcagtatttaaccaagctaaagaatctttaggcgatcaatttgcggcatcttttagtaaaggtcttgaagaccttggaattaatactcagaatctatcttctgaaatgggttcactggtgcctctggttaaggatttaggaacggggacggctcagactgttaaaggttttaaagattttctcgatgtattgtccattattaccgactggaaaaatagacttctcggaacggataaaccagaggaacagaatattttccagcaaggtgcaacatttgttggtgagtctttattgccgcctggtgttttagatatggcaagccggattaaaaatcttgtcagccctggctctgactcctcatatgctaatcaggttcaaggtggtgggtggtataatcaaattatgccagcaagcccagcgatgcaatatcaaccagtcatcccggatttaaaggctgattttaatcttactgtaaatccgtctcctgaatttggaatgatggtggaagctgtagctgataagcgcattgaatgggcattcgatgaccagaatttccagattaaccagagtattcttggtcagtaa

SEQ ID NO: 94268 - DNA, 1020 bp, Enterobacter aerogenes
atgccttttgatactcgcaacaatgcattcgaatatgcatctccttttgaatattccaacgaacctaacctgattattaccaacttgggattgttcgaagaagaaaatcacacaaaaaactcaatcctgctggataaaatctttgttgagtcaaatgaaacagcacctgaaaaaatgccttatgctcaaggtgactggaacagcgcccaacgctctgactataccagtattctctatgatatggtttatacaaacagtctgaatactgtttccagccgtgatatcgaactcctgcgtgctcctggcactgaccatgaggaaaatattgcaatggtactggctgagtattcacagcgtcagtattcacagatttctaacactgttgaacaatacctgattgatgccctctttggtctcaaagttgagtcacagtacgcaggacagggaaacattgatttcctcgcaggcaatgctaaaacctcctacgttctgaacgttgccaatacagcaaacgtttttgaacagttagacgaggttaaccgtattatcaatgttaagttaggttctggtctcgctaaaaagcgtaaaggtacagttattctcgctgctggcaatgctgctaaagctctgaaatatcatcaatctatcaaagattacatggtgtacaccctcagcctcaacgacagtgacaatttcgctactaaaatcattagtcagaacccagcgtttagttcctggaaactggattcagtaaacgttatcgatgtaacgggttatagcgaaatcacggattatatcggggaaaacggctttgctgttgtgcctatggtcgatggtggatttaaactccatactgggattggtgttcgccatagccgcttggggcgtgagcctggtctcgtgcatcaatatatgactgatgttgatcgtatgggatggcctgctatccataccgaaagcgccttcctgccacaggttaatattcctgattcaattgtatttggttcaatctccaactaa

SEQ ID NO: 94269 - DNA, 384 bp, Enterobacter aerogenes
atgtctttttttgaaaattatggtgaaaccttttcaggtcgccgtggatacgtgcgtgataccgttgttgcttacattagtgatggtgttaaacaggatgaactagttaagctgtcagcagctattcctgctgatttgccagtgggttctgtcgtggattcaaccgggacactcatcaccactgctgccgatgctgattacgtcgtagttgaatttgcaaaagcaggttccacagcaattgttgttgctaacccgtaccacaccatcctaaaaaaatcaggtctgattaccaacggtgttgatgtaaatagcgttattgaacaactccaggccctgcatcattcgtttgcagattacgccactgttgcattgcgcacaacctga

SEQ ID NO: 94270 - DNA, 204 bp, Enterobacter aerogenes
atggttacaatcacaaaaggcgtcaaaacgtttgacgggaaaatccccgttacacttttggttgatgacgtcgaaacggctaacgagttaattaagctcgctaaggctgcaaatgtccctgtaatagaacaggacgaagacttaaataaatctacaatcaatccagtattcaaacatctggataagattgcatccaaaaaataa

SEQ ID NO: 94271 - DNA, 138 bp, Enterobacter aerogenes
atggggattcccgaaggtaagcgtaatgccaataacgcttatttctctgtagtacacaatattctaaatatagcatccgttgattattgtcctgtctcttatacacatctgacgctgccgacgatatgcagtgtgtag

SEQ ID NO: 94272 - DNA, 378 bp, Enterobacter aerogenes
atgcgcattctgttaaacatgctgtgggatcgttatcagaagccgctgttcattgtcgaaaacggactgggtgccagagatattcttcaagacgactttacggttgacgacaactaccgtatcgcttatctgaataaccacctgtaccaggtccgggaagctatcgaagatggcgtggatgtgatgggatacacatcatggggccccatcgatctggtcagtaactccaccgcggaattaggtaagcgttacggctttatctacgtcaatcgcgatgatacgggacggggcgatcttaagcgctacagaaaagcgagcttctactggtatgccgatgttataaaaagtaacggtgaaacgctggtgccaaatatctga

SEQ ID NO: 94273 - DNA, 417 bp, Enterobacter aerogenes
atgaagaaaacctggatgctcgacacgaacatctgctcgttcatcatgcgcgagcagccggcagcggtgctgaagcgcctggagcaggcggtgctgcgcggtgatcgcatcgtggtctcggccgtgacgtacgccgagatgcgcttcggcgccaccggcccgaaggcctcgccgcgccatattcagctggtcgatgcgttctgcgcgcgcctcgatgccatcctgccctgggaccgcgccgcggtggacgccacgacggacatccgggtggcgctgcgcctcgccgggacgccgatcggcccgaacgacacggccattgccgggcacgccatcgcagccggcgccgtcctggtgacgaacaatgtgcgggagtttgagcgggtgccgggcctgatgctggaagactgggtgaattaa

SEQ ID NO: 94274 - DNA, 231 bp, Enterobacter aerogenes
atgagaaccgtatctatttttaaaaacggcaacaaccgcgccatccgcctgccccgcgatctggattttgagggggtgagcgagctcgagatcgtccgggaaggggacagcatcatcctgcgtcccgtccggccgacatggggctcgttcgcgcaactggacagggccgatccggactttatggcggagcgtgaggatgtggtcagcgatgaaggacgctttgcgccatga

SEQ ID NO: 94275 - DNA, 843 bp, Enterobacter aerogenes
atgactgacgattttcagaaagaacagctgatagcggcacgctatggcgagaaagacaggcctgaaaatattatctggaacaaacagatagaagggttactctgccaccgttcagtcagaagcttttcgccgcaacctctgcctgaatactggtttgaaactctggtggcagccgcacagtctgcctcaacatcctcaaatctacagcaatggagcgtagtagcggttaccgatcctgagcttaaggcacaggtaagaaagctgtccgctggggatagcggtctggctaatggctacattgaagaagcgcctgcgatacttttatgggtggctgacctgtcgcgtaatcatgatatgaccgtggcggatggtctgaatccgggtgtgcatgaatatctcgactcatttgttatggcgactgtggatgcctcgcttgcctcgcagaacgctactgtggcggccgaatcaatcggactgggaaccgtttatatcggggctacacgaaacaaggcaaaagaactggccgaacttattcaactgcccccgcacagctacgttgtatgcggactggttgtcggatggcccgatccgaaaagcaacgcaagtattcgcccacgcctgcctcagagcgtggtcgctcaccataaccgctacaacgcatctgactttgacgcacatgttaaaagctatgaagaagcgttccatgcgtttcgtgaaggactggggatgaaagacaaaacctggaaacaggccgtacaaagctcagcaacaagcatggactatatggacggacgccagaaccttcgcgctacgcttgaagatcgcggattcggttttaaataa

SEQ ID NO: 94276 - DNA, 585 bp, Enterobacter aerogenes
atggcaggcagaccaagagaatttgatgaccagctggtaatacaggcagccatggatgcattctggcgtaacggttttgaagcgacttcggcgcaggaactcgttgacagcacaggtctgggccgtggcagcctgtatgctgctttcggcagtaaagaaaatctttatcatgaagccctgcgacgctatcaccgctccagcattgagtttcacgaggaagttttccgccagcccggaagcgtgaaagatcgactccgaattctgcttgaaaaaggcattgagcttgatttcagcgacattgagcgtaatggctgtatggcgatattttctcctctcgaaagagcggctaaagataaaaccgttgaaggcctgagtcgcagctatatcaaagaacttgaagggatgtttgttgcgcttttttctgccggtattacgaccggagagtttgaaaggggccgtcaggctcagtcgatggcgaaagcattcatgtgtgcctactttggcttccgggtgtttggcaggatcgtgcatgaacctgaatatcaacagcatgcgattgaagcgcttatcggcagtattcagtaa

SEQ ID NO: 94277 - DNA, 396 bp, Enterobacter aerogenes
atgacattgattaaagatcaggttcgtgacaatgcttcagcgtcagagatgcctgctatcacctgcaatgtgatggctgcaggatgcccgtcaaggcaggtacttcaacacctgagcagccgctggggcgttttgataatggtcgccctgctatctgagacccatcgtttcagcagcttaagacggcgtattgaaggggtaagtgaaagaatgctggcccagactctacagtctcttgagagtgatgggatgattaaacggtactcatatgacaccatacccccgcatgtcgaatactcactgacgcctctgggacgcgttgtggcagtgaaactgcaggaacttgtttcaataattgaggccagccaggcagaaatcctgaataattcgcgttaa

SEQ ID NO: 94278 - DNA, 846 bp, Enterobacter aerogenes
atgacgattgcaatcactggtgcaacaggccatcttggccagttagttattgaaaaacttaaacaaaaagttgacgcttctgaaattgtcgctctggtaagaacccctgcgaaagcagctggcctgggtgtagctacacgtgaagctgattacactcgccaggatacgctggatgtagcattgaaaggagttgataccctgctgcttatctccggcaatgaaatcgggcaacgtgcggtgcagcacgaaaatgtaatccgtgctgctgtaaaaaatggtgtaaagcgcatcgtgtatacgagcttgctgcatgctgacaagtcaccactcaacctggcaccagaacacgtccagacagaacaggctctcaaaaactcggggctggactatacaatcctgcgtaacggctggtattcagaaaactacacgggttctattgcacctgcgctgggccttggcgctttttatggcagtgctggcgaaggtaaaatttcctccgcgcctcgtgaggattacgcagaagccgctgtagtggcgctgaccgggcaaggccacgaaggcaaaacctatgagctggccggagatgaattctatacgctgactgatttagctgcggaaattacggctcagagcggcaaagatattccttaccgtaatatcccggaagcagattacgcggcggcactaaaaaatgcaggcctgcctgatggatttgctgaggcgattgcgtcatgggatacgggtgcctctcagaacgcgttgtttgatgacagccatgttctgtcaaaactgattggcagaaaaactacgcctatcgcagtaagcgttcagaaagcgcttgcctga

SEQ ID NO: 94279 - DNA, 429 bp, Enterobacter aerogenes
atgaacctgaagcatgacaaagctgagaatgtcatcagtgattatatcgagtcaattatccgatgcgattacgaattagcgcgctctatatggaaggctggcgatgacgtcagtttcattcatccccgcggacatgaaaaaggctgggatgagattgagcaaaacttttatcgcatgacaatggatgaaatgttttccagccgtttactgaaaaccgtaggtgcgcctgacatccgttactatggtgaaaatacggccgtagtagagttttactgggactttgttgcaacctttcgtgatagcggcgatgagcttcatactactgggcgcgaaagccaggtgctgttaaaaggccctgacggaaactggaaaattgcacaggttcattattctggcccggcggtaacaggcgaaggtgaaggattctga

SEQ ID NO: 94280 - DNA, 1374 bp, Enterobacter aerogenes
atgtacaataaccttccggccctgagtgagagtatcctttgggatgacaaccttctggctacagactatacggaactggatgcagaagcactgggaagtgcgttaaggagctaccttcaggctgtcagtgttctgcgcggggagtggcatcccctgcatgactctccgctcagcctgtggattgcccgtcacgatcaactggctctttatcgccccggcctgctgtcggctgaacgcatcatcctgaccgatacactggaggaagcggtgctacgccttgataccattgagtcatcggaagcgatggatcggctgatacattacaatgcaaccgatcggctggcagatatcaggaccggcgtggcgcagttcgtgcgttttgtgaaggacaattttctgctgatccaggccggctttattgccttcacaccctgtgaatcagtccggcaggagcaggagcgtaagatgcagctcctgcaggataatcccgaccggcatttccttaacgccgtgatgcccgcagaggtggtccggctgtacgagaggagcgtgaaggtgcggggggtcagacgggtcagcaatgaagggcatatccgcttcgtgtcagaaaaaacactgccggacgaaatcatgctggagctgcgggactgtcagagcccttttaccaatgcctatatgtaccaggagctgcagccagtcgaagtggaagaagacggcagattcagggcaaggatcacccgcggtaaacacgaaagccgtaaagggtatgaccgatgggtgcgcggggccatgaaccggagtatctactttcattatcacgggctgctgactgatatcagtcagtcagcccgggccggcgcctcacttgtcacccgctgtccgctgcagggcaaaatcctgcagaaactcgacgcatccgggagactgtcacgcagaatgcttgaggttcaactcccgtttctgcagaacttgtcgcttcacgacattttccgcatccgcaccgattatgagccgagcgtaacagccttcagacgcacgctgcgtgactgtgcggttgaaatggagcgggcatctggaccggcggagatcagcctgctgcagcagcgtttccgggagcgaattgctgatgaagggctggatgatctgcagcagaaacttgccacatggaagcggcggagtatacaggacacagccctgctcgccgtgccggctgtgctgggttacatgggggcgccttcattgctcaatctggccgccggagcggccagtcttctgcaggccgcgctgagtgcccaccgtcatcatcaggaggttatccatcatccgtcctggtttctcctgcgcaccacagatattcagcggctaaaaaaatag

SEQ ID NO: 94281 - DNA, 642 bp, Enterobacter aerogenes
atggaagcgaaaactaaaaccttcataaaaacgtctgttgatgataacggcatgtggctactgaccgtcccggcggggagcgcgggcaacgaaacaatggttgtggccgtcagacgggtggaggaatgtcgttacgggtctgaggactcgccaggggcacatgtgtcgatcacctgtagcctgacgctgtacggtgacggacaaagtacaccgcagaccattgtcgcgaagttcgagcacggccgtgtggaactgttcagtgttgaatttatgctgaatgaatttttaccccgtggccggggagtgggcagctggatcatgcagcagatggtgctctggacccgctccctgccgccggaaacgctggtcagacaaatccacatttcgtccgtggatgcgaaaaacattcacaatctgatccgccggagcagactgtggcgcgggctgggtttccggttcccgccgggggaaaccagctcaatgccactgcgggcagacgaactgcagttgccacggggcaggtgttcaacgctccgggtggagtccctggtatccgcggtacgccggctggaagactgttatcgcgggctgcagaaaaaaatcgtgcagatcgaaggcaaaaaaggtcgcaaaaacagttaa

SEQ ID NO: 94282 - DNA, 228 bp, Enterobacter aerogenes
ttgcgaggcgagatccttttcgagctcaacgattttttcctgcgactgactacacagggttgccagccggataaccccggtagcccgttgcgccacctccaggtcagaatccccgctctgcggcagagacagtttttctgcccgcagtggcagggcatcacatttctcatccgggagctggccccctttcctgtgccacagatgataaaatggacgattcctaagtga

SEQ ID NO: 94283 - DNA, 573 bp, Enterobacter aerogenes
atgataaagcatatccgtattttgcccggcgggctggcggtgctggccgccgtttttctctgcctgctgacggcctgtcgcgatcacagtcgcgacgggatgagcggcgctgatataaatgtctataaccacggtccagacgccattgtttctatgcaggttgacggctacggcgggccaagggcgaatccctacggcggcggcggcggcttctgctgcgtgatggtgcccaacgactggcgaccgggcctgacggcaaaaatcacctggacttccgaccctaactcctggatgaaatcgagtgagatgccggacgattatgaaactcactatcagaaacatgggccgattactgtccctatcgaacgttgggagaaggggcaggcctgtggctttgatgtgcatattttcccctgcgataaagtgcggatagtgcgttcctgcatcccgcctgggcagccgggctacccggtaccccagtctcctcctgactgggagcaacgagcggataagatcattttcaaacatatcaaggaggagatcgtatgtccgacaccgcagagtccacgctga

SEQ ID NO: 94284 - DNA, 696 bp, Enterobacter aerogenes
atgcagccgcgttggctgccgcggccactggttgaccacgcaccccagatggttgttgcagaactcatccagcgcgcttttacggttgaacttctgggtcagccgcgagaagggccagacggtggccatctgtggccgaaaggtatccagctcgctgtcctcgatcctttcctttctcaccgcataacaaatgctgctgtaggttttaagcagcgcctggttgatacggtcctcaccgccgttggcaaacagctcgccgtccagcgagtattcgttctcgccaatctccggaaagcgcgcgccacagccgggaaagtagtagctgaagtaaccgtcactctccgctgcttccttctgatctttccagttggctgcatgatagagcctgccgatattggtcagcggcgggttacgcgagccatacacctcatcggcccccttttcattacagcaggtaccgtcaaagaacaggctgatatgcaggctggcgggacagcccggctccgtttttttgtccgattgatgttcagactccccgacatatccttccagatactgcctggcgtagttgccttcggcctgcgttctgctcgccggcaggcggccgcgctcgttgtattcggctttctgctgcacagagttatcggcagacttttctccgtttttatcatccggcccgggaaacttcggcggtaa

SEQ ID NO: 94285 - DNA, 306 bp, Enterobacter aerogenes
atgccggcaatactggtgctctttacgcagcttttcataggcccgctcagcgtgctgacagatagcctggtggagcgactcgtactccatgatcttcacaccaaaactgcgactgcagacaatttgctgtttcgtcggaggggcttcctcaagcgaaaggcagctttcccgttcagttcacgtaccgtttgctctaggaccacagaaaaatttttgcggatgaaggtcgagtttgtcctgcgcatcttccagcgacaggaaccagtgaatgttcaggcattcatcccgcagactgccgttaaatga

SEQ ID NO: 94286 - DNA, 225 bp, Enterobacter aerogenes
atgattccaccgggtctggcgtttcgcagctgcagctgttcgacgaacgcccgcctgcctcacagtgctgagctgatgatggttctggacgggatcaacaactcagggctgggtaaagtatggtttgccggtagaggaattgccccggaatggccgatgaaacgtgagatgctttcatcggcatataccacgcgctggaaggagctgccggttgcccgtttctga

SEQ ID NO: 94287 - DNA, 153 bp, Enterobacter aerogenes
atgacaaatatcattctgtgtgatgtaactgccagcgtcagcgaacttaaaaacgatccggtgggcagcgccggtgccggctgcggctacccggtcgctattattgacagcaaccggcctgtttttttattgtgtgcccgcggttctgtatga

SEQ ID NO: 94288 - DNA, 972 bp, Enterobacter aerogenes
atgaagcgtgcccctgtcattccaagacataccacacatactcaatcgactgaagatacctcatcaccggcgccggctgcgccgatggtggattcattaattgcgcgcgtgggtgctatggcccgcggtaatgccatctctcttccggtatgtggacgggaagtaaaatttacccttgaagtgctccggggagactctgttgagagcgcttcacgcgtatggtcaggcaatgagcgcgatcaggaactacttaccgaagatgctctggatgatctcattccttcatttttactgactggtcagcagactccagctttcggccgccgggtttccgatgtcattgaaattgcagacggcagccgtcgccgtaaagccgcaatcctgacggaaagtgattatcgcattctggttggtgaactggacgatgagcagatggcagcattgtcccgactgggtaacgattatcggccgacgagtgcttatgaacgtggtctgcgttatacaagccggctgcagaatgagtttgctggaaatatttctgcacttgccgatgcggaaaacatctctcgtaagatcattacccgctgtatcaatacggccaaactgcctaaatccgttgttgccctgtttgcacatcctggagaactgtctgcccggtcaggtgaagcccttcagaaggcttttgcagataaagaagaattactgaagcagcaggctgagactctccacgatcagaagaaagcgggactaatcttcgaagctgaagaggtcattagtcttttaacatccgtactgaaacaatcttccgcatcaagagttaatctgagctcacgtcatcagtttgctccaggggcaacagcattgtacaagggcgataaaatggtgcttaacttggataggtcccgcattcctgcggagtgtatagagaaaatagaagccattcttaaggagcttgagaaactaggagtttga

SEQ ID NO: 94289 - DNA, 1167 bp, Enterobacter aerogenes
atgggactgatggatatacttaaccagtgcattactgctggacatgagatgacgaaggctatcgccattgcgcagtttaatgacgacagtccggaagcaaggaagatcacccgccgctggagaattggtgaagcggcggatctggttggcgtttcttctcaggcaatcagggatgcagagaaagccggccggttacctcaccctgatatggaaacccgtggcagagttgaacaacgtgttggttataccatcgaacaaatcaatcatatgcgggatgtgttcggtacccgactgcggcgtgcagaagatgctttccctccggtgatcggggttgcggctcataaagggggggtttacaaaacctccgtttctgttcacctagctcaggacctagccctgaaaggactccgtgttcttctcgttgaaggcaatgacccacagggaactgcttctatgtatcatggatgggtgcccgatcttcatattcatgctgaggacactctcctgcccttttatcttggggaaaaggatgatgccagctacgctattaagcccacctgctggcctggccttgatatcatcccgtcctgtctggcactgcaccgcattgaaactgagctgatggggaaatttgacgaaggcaaattacctactgacccgcacctgatgctccgtctggccattgaaacggtcgctcatgattatgacgtgattgttatcgacagtgcacccaaccttggtatcggtacgataaatgttgtatgcgctgctgatgtattgattgtccctactccggcagagctgttcgactacacctccgcactgcagtttttcgatatgcttcgtgacctgcttaagaacgtggatcttaaaggcttcgagccagatgtccgtattctgcttaccaaatacagtaataataacggctcgcagtccccgtggatggaagaacaaattcgggatgcctggggaagcatggtccttaaaaatgttgtgcgcgaaacggatgaagttggtaaaggtcagatccgtatgagaaccgtttttgaacaggctattgatcaacgttcttcaacaggtgcctggcgtaatgccctctctatctgggagcctgtttgcgatgagatttttgatcgtctgattaaaccacgctgggagattagataa

SEQ ID NO: 94290 - DNA, 1011 bp, Enterobacter aerogenes
atgacgagcgaaaataacagcttacctctcaatcttcaggaagtggacaagacaaccggcgaagttgttaagctggatgtcaacagtaccagtactgtgcagccggtagcgctcatgaggctcggtctcttcgttccaaccctgaaatcaacctccaggagtaaggcaaaccgtaaaaacgtcacagatgccactgaggagctcgtacagctgtccatcgccaaaagcgaagggtacaccgacgttaagatcaccggttcgcgtcttgatatggacacggattttaaagtctggctcgggatcattcgctcgatgtctgagtatggggtaaaaagtgacaccctggaactgtcgttcgttgaattcgttaagatgtgtggatttgactcacggcgctcaaacaagaaaatgcgggatcgcatcagcaattccctgtttaaactcgcctcggttaccctgcagttccagagcgagaccaaaggatggaccacccatctggtgcagtcagcctattatgacatcaacgaggatatcgtggagatcaaggctgaacccaagctctttgagctttaccatatggacaggcgggtcctgcttcggctgaaagccattgacgccctgcagcggaaggaatctgcccaggcgctgtatacctacatcgagagccttccccagaatcccgcacctatctccatgaaacgtatgcgggaccggctgaatcttacctcaaatgtctatacgcagaaccacacggtccgaaaggctatggagcaacttcgggatatcggctatctggattacaccgagtttaaacgtggccgggcgacttactttagcgttcataatcgcaatcccaaactcatcagcgggacggtgaaggtaccgcgcaaggaggaagaagagaaggcgccggagcagaattatgacgaagtcatcaaggcactgaaggctgcaggcatcgatccgcagaaacttgctgaagcgctatcggcgatgaagccggaaaattga

SEQ ID NO: 94291 - DNA, 288 bp, Enterobacter aerogenes
atgcgcaactggctgaaacaggcggtgaagcgggctgaagctgatggcgtgtatttttcgatcgccgtgacgccgcataccttccggcacagctatatcatgcacatgctttatcaccggcagctcaggaaggtcaaccaggcgctggccgggcataaggatccgcgctcgatggaagtctatacccgggtatttgcgctggacatggctgccaccctggccgttccctttaccgctgacggtcgagatgccgcggagatccttcgctccctgccaccggccggctga

SEQ ID NO: 94292 - DNA, 369 bp, Enterobacter aerogenes
atggccacctcaacaggtgccacgccggcttacctccttgcgccggaagtgagcgccctcctctggtatatgccggaccagcgtcaccacatgttgttcgccaccatgtggaataccgggagccgtatcggtgaagcccggacgctcaccccggaatccttcgaccaggatggtctgcgcccttttgttagggtgctttcggagaaagtgcgggcgcgccgcgggcggccgccaaaagatgaagtgcgcctggtgccgctgacggatggcagttttgtgcgtcagatggaaagctggatggtcaccacccgccccgccggcgggagccgttatggccggtcacggatgagacaatgcgcaactggctga

SEQ ID NO: 94293 - DNA, 537 bp, Enterobacter aerogenes
gtggaaaatataaataacgatgtaccacagcatcaaccttaccgaaatgaaaaggtatttaattccggtaagacagcgcttgagctcaatttttctgagacaaatggcagtgtgaatcttatccttgcggggcctttagtatcgaagccgggaagttttgactggactggtcaaaaggccttttcaacaaagctgagtgatgatgaagtgatcaccttgtgtatggcgtttcttcgccttactcatgaggctgttctgaaagataaaaaaacaaagcaccataataagcaagtctacaaaaacgtaaaagttacttttgatggtaaatctacagcaatgatggaggggggagttgtagctatcaacaaagacgagagagacattaattttatacataaaattagtattgatcctgccgcttgccttcgcttaggtcttttcctcttgtccgtcatactggcccgaaatccaggggtcccatctgacgcggttctaacgtgcatgcgtcttaatgcaaatgctcaactacaaaagtaa

SEQ ID NO: 94294 - DNA, 879 bp, Enterobacter aerogenes
gtggctctccgtcatttttttatcgtcattctggttgttgcaatctgggcatttaatgttgtggctatcaagctgggcgtgacggagttgcctccgctctttatgacatttctacgttttatagtagtgtccgcagtagtagttccttttgccagagtcaccagggaacaattgaagaccttgatggtactggcatttacatttgggtttatgcacttttctttgttgtttgtgggcacgcgttataccgatgcgggaaccgcagcaatcgtggttcagcttggtacgcccttcgcaatgatcatggccgccgttgtgcttaaggaaaagttgagttttatacaggtaatgggcattgcaatttcattatcaggcgtgttcttcctggctggcagtccttcatccgcctcaatgctggctatggtattgctgctgaccagtgcaactggctgggcactcacaaacatcatagttaaatgctcagtgccgattcacccactgacgatggcgggatggctttcctttctggcgattcctctagttgcgctggcatcgttcatttttgaaacgggtcagtttgctgctattgagaatgcaagctggcgcggctggttcggtgttttttacagtgcgataggatcatccgttatagcttattcattgtggtactggctgttaaaaaaatatccggtgaacaaggtcatgccttactctttactcagcccggtatttgctattttctttggtgctttatttctcggtgacagcctcaacgtctggaaaatgtcaggagccacgcttatagtcggcggaacttttctggccctggttaatccagtaaatattttaaggcgttataaagcaagactggctaactaa

SEQ ID NO: 94295 - DNA, 1350 bp, Enterobacter aerogenes
atgtcacagtcattttctcccactgctggtatgcagaatgggtttgatattgcccgtgtgaatgagctcaatactcgtgaacgtgaaatcgtgtcacgccgcgaatcactgcttggcccatcctataagctgatgtatgaacatccggttgagtttgtgcgtggcgaaggcgtgttcctctatgatgccgaggacaatgcctatctcgactgctataacaacgtgccttcagtcggccactgtaatccggcagtggttgaggcggtctccagccagattgccacgctcaatactcacacgcgttacatgagcgaaaacattcttaactattctgagcaactgctgaatacctttgagcctgagctcggccacgtcatgtatacctgcacgggaagtgaagctgttgacctttccctgcgtatcgccaagttctataccggtggtaccggcattatcgtgactgattatgcttatcacggtatcaccacaacagtggcagctatctcaaccactatgggtaaatacgtcccggttgatcagcatgttcgtacggtccgtgctcctgacgcctatcgagccggtgaaggcgtggatgtggcgcagcgactggctgatgatattgaagcagcgattgcagatatggcacgccacggcatcaaatttgcggggttcattgcagacagcattttctccaccgatggactactgaccacacctgctggcttccttaaaaaagcgattgatgtcgtgcacaagcacggcggcgtttacattgccgatgaagtgcagcctggcttcgggcgtaccggctcgcatatgtggggttatcagcgccacggtattaaccctgatctggtggttatgggcaagccaatgggtaatggcctgccaatcgcagcggttgttgccagacctgaattgctggcagattttggccgtaaagttcgctatttcaatacctttgcagggaatccggtctgtattgctgcagcacaagccgtactgaacgaaatacagaacaaaaacctgatggagaattcacaccttctgggtgattaccttctgaatggtttccgtgtgattgctgaaaattatacccagattggggatgtacgtggcgcggggctttatcacgcgattgagttcgttaaagatcctgacactaaagagccagataccggattaacacgtaaagttgtcagtgaactgcgtgagcgccgtattcttatcagcacaacgggtaaaggagagaacagcctgaaaattcgtccgctgctgacattcaatcaggataatgcggatctgctgcttaaccagttcgaagacaccctcaaagcagttatcaggtaa

SEQ ID NO: 94296 - DNA, 1071 bp, Enterobacter aerogenes
atggtaaccggcatggcagacaacatttcaatggaagcggaagcgaccaatgcgctgacagcgcagcagagcgatattgactgtgactttgcagcagacgttcttcttgagcactacggcattcgcggtgaagtccgcaaattgcgtagtgaaagagatcaaaactttctggttgaaagcgcggatggcgctaagttcacgattaaatttgcccatccaggtgaagaacggatggtaagcaatttccagactgagctgatgcatcacatcaatcttcgtgcccctggcctgccgattcaacaggtcagagcaacgtcagacggtcgttttgaactcattcttgattgcctggggcaaatgcgtacggtcagagtcgttacttatcttgaaggtaagctaatggcacagtcacctgcgactaatgtacagaaatataatcttggcagaatggctgggctcgtcaccagtgctcttttggatttcagtcatcccgctcaggatcatgtgctgctctgggatgctcaacatgcatcatcgctgcgcgaatacatgaaagtgattgttgcacctgctcgccgtgccatgctggagttttgtctggataactttgaatcacgcgttaagccacttcttccctcgttacgtaagagcgttgttcacaacgatatgaacggcgacaacgtgctggttgatccacaaaatactgacgaaatagccgcaattcttgattttggtgacgccgtctgcacagcgattgccattgatgttgcggtgggagccacttatcagatgggaaccggcgagcacttgcttgatggcgctctcgcctaccttcgaggctacatagcacaggttccgcttcaggaagaggagatcaacattatgttcgatctgttcctcacccgcatgtttgtccgaattgtcattaccgaatggcgtgcacgtcagtttccggataaccgtgaatatattctgagaaacaccgcaaccagctgggcacagctggaacagttattgtctctgccgtttgaagaaactcgctccctcattgaatcagcctgtaaggaataa

SEQ ID NO: 94297 - DNA, 747 bp, Enterobacter aerogenes
atgagttttctgttttcagctgagatgcttgatcaccggttaccaaagactatgcaaatcttcactctgatgcgtgatgccattattgcgatgcgtcttccccccggtgaagtgattcaggaaaaagagattgccgctcaactcggcctctcgagaactcccgttcgtgaagcgcttctggctcttgcaagtcagaatctcatcattgtcaggccaaaccagggcactattgtcagccccatcgacataaaactagtgcttgacggtcagttcctgcgtgaatctcttgaaccccggattgcgaaacttgccgcacggttctaccgacctgagtataatattgaatttgatgaaattattaaccgacagcgcttcgcggctataaatgctaacacgagctatttctttgcactggatgatgagtttcacaagctgattgcaaagtgcgctaacatgccagaaatatggctgacgctgcacggtggtaccgggcatcttgatcgggttcgcaggctggctttcacagtggaacaacactatgaatcagtgatcaatgagcatgaagcgttgtaccatgctgttcgtcgcggagatgaaacttcagccgaagagctgatgactgttaatcttgaagtatatgacagccttatgatcctgctcgataagcaccggcattattttgaaaaagatgatgccattttatcccgtctggattcaaaaaaaggattgcgtcatttgctcgggtaa

SEQ ID NO: 94298 - DNA, 753 bp, Enterobacter aerogenes
atgactgataaagaaaatcacaaacttatcgtgcagtttcatggcgtcaataaatggtatggcgattacgccgcgctgcggaatattgagctctctgtcagcaaaggtgagatagtcgttgtatgcggcccgtccggaagcgggaaatcaacgctcattcgctgtgtgaatggacttgaaaaatatcaggaaggcaagctggtcgtaaacggtaccgatttaggcgtgacgcgatcaggtgatgacaaagtcagatgtgaaacgggtatggttttccagaacttcaatcttttcccgcatatgacagcccttgagaactgcatgctggctccccagtcggtattgaaagtgtcgaaaaacgaggctcatgagcgtgcagttaaatttctgaacaaagtcggcatgtctcataagatgagccactatcccagtcagctgtcaggcggccagcagcagcgcgtcgcgattgctcgtgcgttgtgcatgacaccccaggttctgttgcttgatgaaccaacttcagcactcgatcctgagatggtgaaagaagtactggatgttattttatcactggccgaaagtggaataaccatgatgtgcgtcacacacgaaatggatttcgccagaaaagcagctgacagagttgtatttatggataaaggacaaattatcgaaattaactcgccggatgaattctttactaacccgacatccgaacgagcaagacaatttattgggcagatatcacattaa

SEQ ID NO: 94299 - DNA, 684 bp, Enterobacter aerogenes
atgtttgagcttttacaggaatacggtccccgcatgctgaacggtcttggcattacctttcagatagtactgacatcagtttttgccggtgcgatcctgtcaatgttaatcctgatgctgcgtatgtctggctcatcgatactgaagtcagtttctcttgcttacatctactttttccgtggcacaccgctactggcccagacatttttggtttactacggcgcaggtcagttcaggcatgaattacaggggctcggtttatggtggttcttccgtgaagcttactggtgtaccgttttcacatttacgctaaatacagcggcatatcaggctgaaatctggcgcggtgcgatccagtcggttccaggtggtcagcatgaagccattcatgcattaggaatgacacggacctccggttttctgaaaatcattcttcctcaggcctccattgtcgcgttgcgccctttgggaaatgagctggtactgatgatgaagtcatcagcaatcgccagcaccatcacggttatggaagtgatgggaaccaccgcgcttgccttttcacgctctttcgatttccaggtttatttatgggcagcaattatttacctggccattgtagaaatcattcgccgcctggtattgaaaatcagtaaccgtctgacaagacacatggtcagggcctga

SEQ ID NO: 94300 - DNA, 711 bp, Enterobacter aerogenes
atgggtgaatacctgaattatctgtcattcgggaatggaggatgggcgaagcccatcctgtccggagcactgttaacaattgaacttgcggttgcaacgctgccgtttggtctggttatagggctgctgctggcaagcggaatgttaagccataaaaaatgggtgcaacgattttgcattgcctatggcacgattttccgtgcacttccggagctcctgaccatctttattattttctatggctcgcagctcgcgattaagatggcatgcgattttatcggttgggaaacaccacagattaatggttttattgctggcctgattgcgctgggcgtcgtgttcgcagctttttcgtgtgaaatcttttataccgcattaagagcaatcccacagggacaatatgaggcgtcttacgcgctgggattgtctgcgaggacgagttacttccgcgtaacgcttcctcagttatggagaaccgctctgccgggtcttggcaatgtctggctggtgctgctgaaagatacctcgctggtttccgtaattgcgctgtcagacctgatgcgacaaacctatatagcggtaaattcgacaaaagagccttttttcttttacgcgctcgcatgtgccgtttatctggtattttcctctgtatcaggactcattctgagtttccttgagcgcagagccaatcgcttttacgccagggggtaa

SEQ ID NO: 94301 - DNA, 774 bp, Enterobacter aerogenes
atgtcagttattaaagttgttcttgcagggatcatgttagtagcaggcctgtcttctcaggcagcaatggctaaggaatggaaagaaatccgcattgctacagagggtacgtataaaccgtttagctacattgccaatggcaaactgacaggctttgatgtcgatattgctaatgcactatgcgaaaagatgaaagccaaatgtaacatcgtgtcgcaggagtgggatggcatgattccggggctgatgtctggcaaatatgatgcaatcgtggcaagtatgtccattacccctgagcgtcagaagaagatagattttactgacaagtattacgccactccggcccgctttatcgcgactaaagacagtgacatacaagaaaccacaccagcttcactgaaaggcgtgactgttggtgtgcagggctcgacctctcaggcgacctatctcgaggacaacttcaaagataccgacgtcaaaatgtataaaaccgtcgacgatgccaacatggatcttgctaacggtcgaatcgatctcgtgttttccgatgctgcaatcctctctgactggatgaagtctcctgaaggggcatgctgcaaatttgtgggcggtgatgttcgcgatgaaaaatactttggcgtaggaaaaggcgtaggcgtgcgtaaatccgatgcggacctgcgcgatcagttcaatgcggcaattaaagccattattgctgacggaaccttcgaccgaatcaacaagaaatatttcgacttttcgattaagtaa

SEQ ID NO: 94302 - DNA, 342 bp, Enterobacter aerogenes
ttgagtacaaaacgcgacaaaatgctgaccatgtgggtcacgcaggatgagcatcagcagctgcttgaacgctgtgacggcaaacagctggcggcgtggatgcgggaaacctgtctcgatacccgaccggcgcggtcatcgcggctgccttccatcgatccggttttgctgcgtcagctcgccggcatgggcaataacctgaaccagatcgcccggaaaattaacggcggtcagtggtcaggtgctgatcgggttcaggtggtggctgctctgatggccatcgatgccggccttgaacgactgcggtatacggggcgggagaacagcgacgatgatcgttaa

SEQ ID NO: 94303 - DNA, 498 bp, Enterobacter aerogenes
atgagcagtcttttaacgctggcgcaggacttggagcagaaatcgaaagcgcagcggcaatctaccggcgagatgctgaaagccgcattcagcgagcacgaagcgtatgtaaatcaggaactgagcgaaagcgcgaagcgaatcaacaacgctatcctcgaccacgaccagaggctggcctccgccatcagccagaacaccagagggatgctgaaaaccatcgggcggacgtggctgataatcgccggcgtgtcgttcctgctgatctgtacgagcgggagcattctgtggtggcaggggcagaaaattctcgacaactaccaggccatcagcgagcagaaagacgcactgacgaagctgaacgcgcgaacgtggggcgtgacataccgggaggacagcaacggacgttttctggtgctgcctgcggggatgaaaggcgatacgaactggacggtgaacgacggggcgatgaacgcagtaaaactggtgcaggagtag

SEQ ID NO: 94304 - DNA, 216 bp, Enterobacter aerogenes
atgacggaactggaaatgcaattgttgagcgcattcgagcaactgcagcaggattacgcgcagcagctgagcgcgtgggaagccgcctcctcggagttgcagaggatgtttggcattacacaacgggagaacgcggcgctgagcgagcgcgtgtcggacttgagcaggcaggtgcagagtttaagcgagcagctgcgccgcttgtccgtgagatga

SEQ ID NO: 94305 - DNA, 432 bp, Enterobacter aerogenes
gtggcaaaaacattgctcaacctttcacaggcagcacaggcagccggcatcaccagaagaacgctgtataaccacgtaaaacaaggaaaagtgaccgtgtcacgcgacgggaaaaacaacccggtcgtggatgtatccgaactgatccgcgtatacggcaatgtgaatttacctgagaaacaaattcccaatgtttcacaccgtgaaaatacacagaaaaatttcccacatgagcagctaacagccatgcaaaaagagctggctgaaatgaaacaggccatcacgttgatgctggaagacaaaacgctgcgggaaaaagaaaatcagcagcatgaggacgagaaaaaccagctgcgggaagaaatcaaaaagctcagcgaaagcctggagcaggcgcaaaaaaaagggttctggtccaggctgttcggttaa

SEQ ID NO: 94306 - DNA, 312 bp, Enterobacter aerogenes
atgccacaggtaattatctccgcactggcgcagcgggatttacagcgcctgcaggactttctcaaaaccaaaaaccggctggcggccagaaaagccggtgaagtgatcatccgggctatccagcaactgaaaacgcagccggacatgggccgcccggtttctcttctccctcttgaataccaggaactggtgatcggatttggcgacagtggttatgtgatgctctatcgccacgatcgggaaacggaccggatagtgatcctgacagtccggcaccagaaagaagccggctatcacggcctgcaggaataa

SEQ ID NO: 94307 - DNA, 279 bp, Enterobacter aerogenes
atgtcagcagcaacatccatcaggcttgatgatgaactcaaagaccgcctgaaaacccttgccgatgaccgccatcgctccgctcatgctctgatgctggaagcgatcaccgaatacatcaaccgggaagaaaagcgcagccagtacctgagggatgggcaggccgcatggcagcactatcaggaaaccggtctgcacctgagcgccgaagaggtggaagcgtggatagatacttggggaactgagaatgagcaggatgctccaccatgccacaggtaa

SEQ ID NO: 94308 - DNA, 519 bp, Enterobacter aerogenes
atggcttactacataagaaaggtaacaccaacaaaatggaatggtgaaaagccagatgatgggaattatttaaagctaggtactgatggtgtaactaattgctgtcgaacgacagacaatgagctttccatatggaaaacagacagcaatgatccacaaagtgatgaaaacaaaacactattagctgccatagctactggatctgacagaccagcaacaatggattttattttcattagtgacaccgaactccaagaaaatgaattatccctgaaggaaacaccaggtaaaacaccaatagaatcaatgagaagcctccatagagacatcgaccatttagacattgataaactaggcaagcttggtatgcttattcatgagaaagtcaatagtgacgatgatattcatagagttagtcagtcaacaattaaacaatatgtaagatctaacttccctgatggatcagctgatggtgaaatactaaaaagtatagatggatggtctagaatttataattga

SEQ ID NO: 94309 - DNA, 603 bp, Enterobacter aerogenes
atgtcatacataattaaagagaatgttgacacggcaacatcacaaaaaaacaacaatttaccatctttcattgatggttcagcagcaatcactacaaaagacggctatgataaatttaatatcatggctacctcaataagaaaaaataaaacatcgactaactttactattttatcagacgataaaatagcaaactatatatataatacatttctttatgatgacatagattttgaatcaataccaaagacaaaatatgtcatagaaaatatttctcgcgatatcggggtaaccaaagttgactattcattattgaacatcttgagtacaaaaatatacaactcaaaaccatctgttatagtcaaatacttagccttgctatcttcaatagacctagacgttatccctttaacatccgttctttcggttacaagcttgagctcaagtaaacatgacattgtaaaggaaagcgttcttgcaactgtagagtcgtgggagtgggttggtgccattgaatacctagaaaacatggaggaatttaagcgcccttaccttataaaatacaagcaagatgtcatatcttatttgaaggggattgcttga

SEQ ID NO: 94310 - DNA, 684 bp, Enterobacter aerogenes
atgaacattataggttatgcgtacaactttaatttatttgctaaaaacaacgttataaaaccagatagcgaatccatctttaaactaatgcctttcattcaagatggattcatgcctactactggtgaagaaataaatgaagatggtacgaaaggaaaggtaatcagagtagaaaaagaaacaggaaaaaggaatatatcagtcaccttctccagtaaatttatcagtacgcaaatcactgcagatgaggtaataagcaaggaagaggcatcttcaattcttaactctgtattcgacagactctcatccttattcaaagaaaacatagggaacagggtgtcttgcatcatgaatgtaatcatagataatgacaaagaaactgaacaggcgatatacagtaaatactttaacgatgacaatgtattttttgaatggaatcttcgccgagcaaaaaactcatcaattcgtgacgagaagactttcaatatactaacgataaacaaaggtaaagcagcaaaattcaatgcgggtaattttgtacaaatagacgccataataataacatctgataataatacatctccagaaaacgaaagcatacgattcagctttgaaaaccctagcatattcatagagttgctcgaagagtgcttgagggacacagaatcagcaatggagttataa

SEQ ID NO: 94311 - DNA, 1026 bp, Enterobacter aerogenes
atgttactgaaagtcggcgaactggcacgccgttccggtattaccgttcgcacactacactactacgacaatattggtttgctgatcccttctgcgcgctccgactccggctaccggttgtataaccgggccgatatcgcccgtctgcatcatatccaggcgctacgccgcatgggaatgacgctggccgaggtcggggcgattctggaacgttcggatctggcgctgccaacggtgcttgagcggcagattgccatgctgaaccagcaactggcgcaaatcaccgcgctgcgcgctcgcctgcagacgatgcagctgcaattgacggcgggcgatgatccggaactgaacgactggctgacaacgttggagttaatgactatgtatgataaatatttcactgctgatgaactggcgcagctgccgttttatcaggccgatacgcaacgccagcaagaatgggcggcaatggtacagcaggtgcatgaactgatggcaaacggcacgccggcggaggatccgcaggcgcagcgcatcgcgcgccgctggatgctaactctggagcgcgacactgccggcaatccggcgtttctcacgcgtctgaacgccatgcacgccgatgagccgtcaatgcgtgaacagatcggtatcacgccggccatgaccgactatatcacccgtgcatttgctgaaaccaagctgacaatttatcagaaatatctgtctgaagaagagtatgcctatgtccgcaagcactatttcgaccgcatgcaggagtggccggcgctgatcgctcgcctccaatcagccctcaacgacggcatcgcaccggacagcgcacatgcccgccaagtggccgccgactggctggcgctgttccgttcttacgccggtgaaaatccagccacgcagatgaaaatccgccaggcaatggagcaggaacccacgctgagcgaaggcacctggcttacaccaccactactggcttatttgcgtgaagctgtcgtaaatttgaatcaaaaataa

SEQ ID NO: 94312 - DNA, 804 bp, Enterobacter aerogenes
atgaccaaatttaagaccggctttttgctcgaaagaattccctatattcgcatgggtgatcaaactgatcccgtgatcgtgatcaacggtgggcaaggttttgtacgcaaacacagctttgaccggatgctccgggacgcaaagcgtgtcgcacgtatgttgccgccaacacagggcttcatcctaattggctacgatcagcagcccgaagcaaaggcgacgattgaaacgattgtgacagactatgagcgcgccatcagagacatgaaggtctcggcgttttcgctcatagggatatcctatggcggattgctggcgacaaagcttgcggcagcgcgtgaagggtgggttaagaagctgattctggtggcgagcgctcacaagttcagcgagaacggcgaaaacaggataaatcgacaaatccagttagcccaacaggagcagtactacgagctgatcaatgactttgcggcaatattccgcaatcccctgctaaatttgttactgaagataaagctctgggtggactgcaacaaacttacagaaaaaatgaactccggtgacgttattgtgcgatatcttcaattgatgatgcaggctgagccagtcgatctgacctcgatcacagcaaggacattgattatcggaggggaactggatcagttttttggcgacggcatgatggaagctgcccgaaatggtataccagacgccaagctacatgttcttgaaggacaaactcacatggctccggttgaatgtagccgacagttacggagattcctgacggaatttctcgattga

SEQ ID NO: 94313 - DNA, 504 bp, Enterobacter aerogenes
atgtcgcgccagtgcacgcattatgggcgttggcctcaacacgatttgacgtcacttaaaaaactcaggccgcagtcggtaacctcgcgcatacagccgggcagtgacgtcatcgtctgcgcggaaatggacgaacagtggggctatgtcggggctaaatcgcgccagcgctggctgttttacgcgtatgacaggctccggaagacggttgtggcgcacgtattcggtgaacgcactatggcgacgctggggcgtcttatgagcctgctatcaccctttgacgtggtgatatggatgacggatggctggccgctgtatgaataccgcctgaagggaaagctgcacgtaatcagcaagcgatatacgcagcgaattgagcggcttaacctgaatctgaggcagcacctggcaaggctgggacggaagtcgctgtcgttctcaaaatcggtggagctgcatgacaaagtcatcgggcattatctgaacataaaacactatcaataa

SEQ ID NO: 94314 - DNA, 243 bp, Enterobacter aerogenes
gtggcttctgtttctatctgctgtccctcctgttcagctactgaagtcgtggtgcgtaacggcaaaagcactgccggacatcagcgctatctctgctctcattgccgtaaaacatggcaactgcagttcacttacaccgcctctcaacccggtacgcaccagaaaatcattgatatggccatgaatggcgtcggatgtcgcgccagtgcacgcattatgggcgttggcctcaacacgatttga

SEQ ID NO: 94315 - DNA, 1875 bp, Enterobacter aerogenes
atgaaatatcagtcacttgctgaatttataattaaccgggtcggcggcccggaaaatattaaaagtttaacccattgcgcaacaaggcttcgctttcagttaagaaaatatgatgttgttctgaaggatgatttgagcaaccatccagagattattatggtggtagaaagcgggggccaactccaggtggttgtgggtaataatgtttctgaagtttataaggctatcgaagctacaggcattacggatgagactgatctagctgcagggagcagcgacgaggcagtcataaaagaaaatatctttaacaggctgattaatgtggtttcggggatttttaccccttttctggggatcctggccgcttccgggattatgaaggggctgctagcccttgctatcgtttgcggaattacgactgagtcgagcggaacctacaaaatactggcggcagctggtgatgccctgttttatttcttccctctcgtgctgggttacactgcaggcaagcgttttggcgggtcgccattcctgtcgatggcgattggcggcgcactgatgcatccggcaatgatagcggcgttcgacgctcagttacagcacggcgcgtcagttgatgccttcctcggaattcccgtcacttatattaattatgccggctcggttattccggtcatatttgctgcctggctcagtagtgtggtggagaaattctgtaataaaattctcccttcagcggtcaaaaacctcttcacccctctgatagcgcttctcatcgtcgttcctgctgcgttcctgcttattggaccgctcgctaccggcctcagccaccttatggcaaatgcgtttctggccgcttatgagtttgcgcctgctttagcgggtacgatcatggggggactgtggcaggtctgcgtcatgtttggtctgcactggggtcttgtccccatcatgatcaacaacatcagcgtgttaggccatgatattatgcagccattactggtaccggccgtggtaggccagttgggcgcagcgctgggtgtgttcctgagaacccaggatccaaaattgaaaactctttcgggttcggcagtcagcgcggccatttttggtattacggaacctgcagtatatggtgttaacctcccaaaccgacggccattcatcttcggctgcacggccggagccataggcgggacaatagtcggagcattccacggtagtatctattctttcggtctgaccagcttcttcactctcgctcagatgatcccacctaccggtatggatatgaccgtgtggggggccataatcggcacggccttatcgctcgtgctttctaccttactgacctatttcttcggtttaccggcatcaaaagaatcgccaagtgctaacccaggtatcgcaccagaaacagcagagatcgttattctctctccgctacaggggaaggttattgatattgccgaaatccgcgatccgacctttgccagtggcctgctgggtaacggagtggggattattccaacctccggtaaagttattgcgccctttgacggagttgtgtcgtcaatatttaattcccgacatgctatcaacctggtcagtaatgatggtgtggaactgctgatccacgtcgggatcaataccgtaaatctcaaaggtgaaggttttacggcacatgtaaaaacgggtgattcggtaaaagccggtgatctgttgattgaatttgatctcgattttattcaaagcgcaggatgtctgctggacacgccggtattaatcaataacagcgatgaattcagggcagtacatctggcagataaacagactgtttcatatgacacggtattgatgacaacgattaagtga

SEQ ID NO: 94316 - DNA, 636 bp, Enterobacter aerogenes
atgaaccatctttcacatgacaacattagcctcttacagccgtcagaaggctccgtttggaacattgatacgctatcccggaagatagccgttagggcattgccgtacagtgatattttcatcgatccgggaaggggcacaagccaggtaacgtctgcaagccggtgtaatgcagcaacacttttacgtccggctcctggcggagactttcaatttcgttcaacggtaaaagtcgaattcggtaacaccttcgatgccggcgtgttgcttctttacgttaacgaacgatcatgggcgaagttgtgctttgaatattcacccgaacgtgaacccatggttgtctctgtggtgaacaacggatatacctctgatgatgccaatgcttttaccgtcagtggacaggaagtgcatttacggatctcccgcaaagataatgtatttgccttccatgcttcgctggatggtcaaaaatggatatttgtgcgcgcttttccccttgatgtgctgaacgacgcggaacagattttacacatagggttcgaggcacaagcgcctaacgcctccggatgcgaagtagaattctctgatttcgccctcgtttcaggaaatgttcctgatttccgtagcggaaaatag

SEQ ID NO: 94317 - DNA, 1206 bp, Enterobacter aerogenes
atgaaaagtagtgaagaaatgatatcagggaaaggaaatgagctggcttattcagcagacaatattaagttcacagaactcacggacgcaaaacttgccaccagactggcattctttatcgctggttttgggctcgcctgttgggctcccctggtacccttcgcccaaagccgtatgcaggcggagcccgctcttttgggtgccgtattgttatgtctgggtctgggggcattaatagggatgcctgctgccggtggcatttctgctaaagccggcagccggatggtcatcatcatgggtgctgtgggtattgtggttgctttaccccttcttgccctgctttccacccccctgggaattggtgctgcacttttcttatttggcctttcgattggtgcgactgatgtagcagccaacattcacggttctgaagttcaggatcgggcgggtatgcctttaatgtcaggatttcatggtttttacagcgttggagggcttgccggcgctgtggttatgactttgctgattgccacgggattacacgtttttgtggcatcgatgatcgcaatatttacgatactgatatgcctctcagttatcagaaacaagttcctcagaacagttacggttaacgacgcgccattatttgtacttcctaaaggtaaagtgattgtggtaggccttctggcaatggtgatgttcctggcagaaggtgcgatgcttgactggggtgcattgctcctgattcaggaaaaaagtttaccggcaaacatagcaggatcggggtatgttgtctttgcggtggcgatgacattaagccgcttcgtcggtgacaggctcgtctcacttgcaggagagcgctggatactgactcttggtgtaatatttacggcaattggacttttggttatttcactgtcctcatccgttgccattgtctttagtgcgattgcgatagcgggctttgctgccggtaacgtggtgcctattttgttcacgcgtgcaggcaaacaggattcaatggccccttctttggctatctccgctgcaagcatgctgggatatctgggggtgcttatggggcccgcagcggtcggatttattgcacattatacaggactggccaatgcgttttgtttcctgtccgccctggtcatgctattttccctgaccatcatccctattttctctgaaaaaaaaatgtag

SEQ ID NO: 94318 - DNA, 771 bp, Enterobacter aerogenes
atgtctaatatacgccaaaacactatgaatccagatttcgctatctcgcctctggtaggtcagccagaacaatggggggctgatgttcttgaaaagcatactcatgcgcgccaccagttaattttttcctcccggggcgtcattcacatcaaaacacatgtcggcgagtgggttcttccacccagcagggcactctggattgatgccggtactgaacattatgttgaaaccaagaagccagcctcgctctttgttctgtatatttctcccgcttttttttccatggataagcctgaacactgctgcgtggttgaagtgagcaacctggtcagggagctcatcatggcgtgtgcaaaaatggggtggacctatgatgaaaatagtcacagtcaccgactggcagaggtgttggtaggcagtctttcaggtttacagctcgcatcactggaactgatcaagccgaaagatcccagagccatccacttaataaaattactggagcacgacccgggatcacgacggtcgctgcacgacctggccagagaagcaggagctagcggaagaacgatagaacgactttttgctcaggagacaaatcttcccttcggagcctggagacagagacatcgaatgctgtttgcactggaacgtctggcttatggccagagtgtcatgaatgtcgcgctggagtcaggctatgagtctgcttcaagctttattgctgctttcaaggcaatgtttggtaccacgccatctaaatatttctcataa

SEQ ID NO: 94319 - DNA, 582 bp, Enterobacter aerogenes
atgaataactctttgattttattggctttttttaataaattagtgtccatagacaaacgggagacgactatgtccgcaagagcaagaaaagcaggtaagagaaatcagtcagaacgacgtcaggatttgattgaaaaattgtgggaagacgacgaaatcgatacttggcatcgacttgaaaatgatgggtactcaacagttccacgttatttgcctttgataggcgatctcatggatggtctgtcaaaaggatcaccattatcaacaacctacttggctttatggttcagggtttctgatgagggtttgattgaaataagagataaagcagcactggcttttgaatcagggttcgctagtgaaagaggcgtaactacatgggcagggagaatgaaaaagctaaaagaactggggttcatatcctgtcgtgaaggcagcaccggtgaatttcattacgtgttaattgttcacccattagttgcagtcaaaaagctgcttgatgaagggattatcactaaaggaaagacttataacattttgtcggagcgtgtaattgaggtgggagcctcttgggaggggtaa

SEQ ID NO: 94320 - DNA, 495 bp, Enterobacter aerogenes
atggcgggcacagtatggcgtgacataagaacgggagagactgtttttcctatggggcacctgcaccctcagaggtgctgtgttgatgtaaacggtacttctgtagatatagaaattagttttggttttcatgtttttactgatgaaaaacaaaccggaatgctgatgaaatttaaggaggaacagaggtttttttgtagggaacgctatgagggcagcaaaactatcgttcacagaatacttacagcgatagaaaacggtgaatacattacagcatttatttcaaaggggcaggggcagcggtattaccatcttagccatcatgatgacttcattttgatggaaataagaaagcctcaagatagaaataattctttgcgtattcatgttgttacagcttacacgcttgatgaatgggggactgtaaataaaggacgtaacctgcggtttagatatgtgctggaacagcgactgcagggaaagaagattgtgtaa

SEQ ID NO: 94321 - DNA, 327 bp, Enterobacter aerogenes
atgaagttgcttgatagtaatgaagtgtgtgagctcttaggcatcagtaagtccactttgtatcgttggtgcggggtgtctgaggatttttctggcttgggtctaagtagcggtcttcctcaggctaacgctttgaatagccggctggctaaggctactcagaaatctttaggctgggaaaatatgctcgttgggagggcattacagcaaaaagctctcggtgtcgaagagacgccaagcgacttccctcgtcctttcaagatcggtcgttcgtttaaatggaaagacgccgaaattatggcttggcttgaaacgcgacgcgtttga

SEQ ID NO: 94322 - DNA, 513 bp, Enterobacter aerogenes
gtggcactagcgcgtaagcagaatatgcgataccggagatattccgcttcctcgctcactgactcgctgcgctcggtcgttcggctgcggcgagcggaaattgcttacgaacggggcggagatttcctggtagatgccaggaagagacttaacagggaaacgataaggccgcggcgaagccgtttttccataggctccgcccccctgacaagcatcacgaaatctgacgctcaaatcagtggtggcgaaacccgacaggacttaaagataccaggcgtttccccctggcggctccctcttgcgctctcctgttcccgtcctgcggcatccgtgttgtggtggaagctttacctaaatcaccacgtcccgttccgtttagacagttcgctccaagctgggctgtgtgcaagacccccccgttcagcccgactaccacgttgtcccggtaactatcatcttgagtccaacccggaacagacacgaaaaatcgccagtggcggtagccattggtaa

SEQ ID NO: 94323 - DNA, 324 bp, Enterobacter aerogenes
atgctcaccatgtgggtgacggaggacgagcaccggcggctgctcgagcgctgtgacggcaggcagctggcggcgtggatgcgacagacctgccttgacgaaaagcctgcgcgcaccggaaagcttccctcactctcgccagcgctgctgcgccagcttgccggcatgggcaataacctgaaccagatagcccgccgtgttaacgccggcggcggcaccggccatgacagggtacagattgtggcggcgctgatggccatcgatgccgggcttgagcggctgcggcacgccgttcttgagaaaggaacggacgatgatcgttaa

SEQ ID NO: 94324 - DNA, 492 bp, Enterobacter aerogenes
atgagcagtcttttaacgctggcgaaggacttagagcagcaatcgaaagcgcagcagcagagtaccggcgagatgctgaaagccgcattcagcgagcacgagcagtctgtcagagtggaactgagcgcaagcgcgaggagaatcagcgacgccatcctcgcccacgagcagagtatgagcgaggcgatggagaaaaaccggcggagcgtactgcggactgccgggcggacatggctcaccatcctgatggtgtcagcgctgctgatcggcacgagcgggagcattctgtggtggcaggggcagcagataaccgacaattacacgcatcttcgtcagcaggaagataccctggcgaaaatgaccgcccggacgtggggagtgcgctatcaggagagcagcgacggccggaggtttcttatcctgccgccggggatgcaaaccgaagccatcccttacgacgggacgacatggatccgcctgaaacaggagtag

SEQ ID NO: 94325 - DNA, 216 bp, Enterobacter aerogenes
atgacagagctggaaaagcagttgctgagcgcattagagcagctacagcaggactactcgcaaaggctggacgaatgggagagcgccttcgcggaatggcggagcatgtgtggtcttatgcaacgggagaacgcgatgctgaacgagcgcgtgtcggacttgagtacgcaggtgctgagtttaagcgagcagctgcgccgcttgtccgggaactga

SEQ ID NO: 94326 - DNA, 666 bp, Enterobacter aerogenes
atgctcatcactgttagcagtagcgcccagtcgataaccacgttccagtgcctcagcatacacccagtggaactgtccccatgcagagccgacttcaatcagtctctcaagttcaggatggtgccagtcgaggttgcagcgccgcccgccgacgtgcgggataagcaggtgcttgtgcggctcgcgcgcgtaagcggcatacagctcatccagcggccacgcccccggtttgatggtaccggcggtaaactcgttccactcgaaagagcgcaccagtctcccctgattatcaaacgggaactggggttcatcatcttcaagaaataccacgttgtgatcgccaccggcacaggtattgccgcaccactcggtaccggaatagcagacaaagctctctggctggttcaattcattaatcagctttaccgcttgtttccagcgcgcttcggtgacgttaaagtcgtttgcggtatatcccagaatatcgagaccggcgacatcacgtccgtaactcaggttatacagcgtgtcattggtgccaacggtgtcatcagaatgcacatgaagatcagcatacagcgggcgcaggcctgtggcggtctcttcggtcgtgacccattcttttccttccagcagggggagtgcatccagtgtcgcgctgactaa

SEQ ID NO: 94327 - DNA, 240 bp, Enterobacter aerogenes
atgtcctttctggtcgaagcgcactttgagatgctgcactgtggcagggctctgtcccggcaacagggggccggcctgatactcggcactgacatagtttgctccagcggggtcactggtctgaaagagcgcccagtccgagtaaaatttaaaggcaagcttaagccacgcgccatccgcgaggccgctggccccaacggtgtacaccagttggagctcttcccaggcacctgccgttag

SEQ ID NO: 94328 - DNA, 747 bp, Enterobacter aerogenes
gtgaagttaacgccaaactggggctgggcctcgttgcccgctctgctggtggtctggataattgtagccagtcactatccttcttacgtcctcccgcaaccctgggatgtctggcgtgaagccgtgcgctggttcagtgacggctcgatatgggctcagctgggcgcgagcctgctggaggagttcgccgggttcgttgtcgccgtagtgctggcgctgatcctgggcgtcagcgccgggctgtccgatcgattcagggattttctcactccactgaacagcctgtttatggccatcccgcccattgcatgggcaccgctcatgctgcttatttttggcctgggcatcgtctctatcgtggtggtgattgtcatcgccgcgctcttcccgatgtgtctgaccattcaggaagggatccggggcattcgcggcggggaagtgcgcgcggcgcgcacgctgggtgcccgtccggctcagttgttgctccatgtttatctgcccagctcattgccgtttatcactgccgctttgcgtattggattcagccaggcgtggcgtgcactggtggcggcagaaatgcttggggcctcccggggcattggctggatggtggcgatgggcggtcagacgggtaacagcagccaggtactgctggggatctgcctgatcgggctaattgcctggctgatggaaaatcttgtgtttcgccgcatcgagcagcgctaccggcgctggcgtgcccaataa

SEQ ID NO: 94329 - DNA, 993 bp, Enterobacter aerogenes
atgggtaaatcatttcttgctgtgctgatatcaggggttttatttaacgcggctgacgcagcggagtcgcagccgctgcgcattggctgggtttatgcgctggcaaacgcaccggcgctgattgcagaaaaagaaggtttttataagcaggaagggctgaatgtcgagctgaagtcctttggcgacgggccggttatcagtcaggcactggccgcgcacgagctggatgcggcgtatatcggtgcgaccccggtgtttcagtggttctctcgcgggctgaaggggcaaatcattgccaaagtgaaccgcgggcaggctgcgctgatcgttcctgccaaaagtggcatttcaacgctggctgacctcaaaggcaaacgtatcgccggggtgaaaaaaggcagcgggatggatgtcctgcttcgaggagtcgtgctgcagccagccgggttaatcgcggataaagacgtgcaggtgctgactatgccggctggcaacatgcctgctgcattgcagcagggcgtggtagatgccgcctttacctgggaaccttttatcagcgaagcgctgttgcgcggtgatgcaaaagtgctgcttgacgtgaataagattcagccgggttatccgtggtatgtgctgatggcgctcccggagacgttaaaggatcgccctgacgacgcggtgaaactcctccgcgcgcatcagaaggcggtggacttcatcaaccagcacccggcagaagccgatcgcattatggcagacgcgtttaagctgcagtccatcaaaaccacagatggcaaaacgctgtcgccggaggcactggtagaggaggcgcgtaaacgcatccagtggtcagtgtcactgacgcagaaggacggggcgttctttgaacagctgatgaaggattcccggtcgctcggctatatgcaaaaagcccctgcgctaaatgaatttgttgatacgcagtggctgaaaaaggcagggatcccgcagtga

SEQ ID NO: 94330 - DNA, 804 bp, Enterobacter aerogenes
atgtccagcatgacaacttctgcctcatccgcactggcggtagacaatatcacttttcgttaccccggcagcgcaccggtgttccgcaatttcagtttccatgcgcggcagggcgaatttgttgtgctgctcgggccttccggctgcggcaagagcaccctgcttaacctgctggcgggattcaccgagccggaagagggggccgttaaaattgacgggcagcggactacgcccgagaacaaccagctgggttacgtgtttcagcagccgcaactctttggctggctgagtgcgctggagaacgtccggttcggcttgcgcatgcagaaatgtggagatgtcgcttcccagcgcgatcgagcgctgtcttatctgcagcgggtggggttggcacatgctgcccatcagtttccgcatcagatgtccgggggaatgcaacagcgcgtgtctctggcgcgtgcgttggcactggagcctgacgtattactgatggatgagccgttcgctgcccttgatgccatcacccgcggtgatatgaacgaagagacgcttcgcctctggtctgccatcggccagaccaccgtatttatcacgcacgacattgaagaagccgtcttcctggccgatcgcgtcatcgtcctgaatcgtgctccgggcggtgtgcacagcgaactcaccgtttctctgccacgtccgcgcagcaacctggagacacggcagcttccagcttttgccgcatatcgcaatgaattactgaagcgcattacaaacgtgatgcagcagtcccacagtcactcactctaa

SEQ ID NO: 94331 - DNA, 717 bp, Enterobacter aerogenes
atgacactggtgcgtgaaaacatgacatcgctgtatcggcagattgccgatacactgcagcaggaaattgcagctggccactatcagccaagcggaaagctgccctctgaatctgcgctggaagcgcgcttctccgtcagcagggtcacggtccggcttgcgcttaagacgctcactgagcagggtattgttgagcgtaaacaggggaaaggcacctacgtgtcaggcaaaaaagtagcgcacggcatcaacgttatgcgcagctttcatgagtcccttaagcagcaggggctgaacgcgagtatgcgtctgctggctaaagaacagatccccacacccgagccgttactcaccctgtttgagatggcacggtctctgacctttatctcacggttgcatctggtggataacgagccgattgccgtgggttacagccattttctggctttccctcatgctctgagctggaaagagacggagcaggaacctacctgggctttgctggaaaaagcaacccagagagcgataagtcgctctgatatcgccatccggctggactttgccgacaaggcacttgtcgaagtgctgggtatcgctaaaaactcgccgctcttcctgctggagaggacatcctggtttgaaaacggcccgtgtgcggaaagctcgcgtttcttcatacgtcctgaacgttacgagtttacattgagcaacggttaa

SEQ ID NO: 94332 - DNA, 384 bp, Enterobacter aerogenes
atgcgcattctgttaaacatgctgtgggatcgttatcagaagccgctgttcattgccggaaacggactgggtgccagagacaagcttaacgaggatatgaccgtcaatgatgattaccgtattaattacatcaataatcacctgtatcaggtttatgaagcaatcgaggatggcgtcgaagttatgggctatacagcatgggcccccatcgatctggtcagtaacgccaccgcagagttagataagcgttacggctttatctacgttgaccatgatgacagcggtgatggcgattatgcaagatatccaaaggatagtttttactggtttcgggatgtcattactacgaacggggaaaccctgatccctttccggtgtcgttga

SEQ ID NO: 94333 - DNA, 897 bp, Enterobacter aerogenes
atgaaaacaactttagcagaaatgcagatatttattgctgttatagaaacagggacattatcacgagctgcgtatgagctggatcttaccgtatcagctgttagcagagcgcttcgacgactggaggagaaattagataccgtactggtcagacgctcaacgcggagactggaatccactgaagaaggaaggacattcctggaatatgccaaacaaatcattgcttcagtagaggatgcagaagaacatgtcaccatgaaacgtcgtcatccatccgggaagattcggatcattgcgtccacgtctcttgtactgcacgtcattacaccggttctgcatcgatatcagaaatgctatcctgagatagaaattgaaataatttcaaatgacaatgtttatgatttgcttgaacacagaagtgatgttgctgtttgcatcggaaaactcaaagattccggcttacatgcgaagatacttgggctgtgccagatgatgtttgttgcctctccgcgatacattgcagagcatggtatgcctcatcgagttgatgcattaaaaagccacaggctgataggttacaaacaaaactccttaatgaatgactggcctctggatacgggcgaagaacactattataaaattcagccatccattgtcgcttcaaacagtgagattataagacagctggccattcactcgtcgggtattgcttgcctgccagaaccgtatgtaaaaaatgatattacaaagggtgatcttgtcaatcttgatataaaagagaaactgcgtgtccgcgaaccactcaatgcggtttattataaaaacattgttcttccatcaagaacctcatcatttgtagagttcctcgcggaaagtttagtgttgccctcggaataa

SEQ ID NO: 94334 - DNA, 1182 bp, Enterobacter aerogenes
atgccaatagcactcttcgctttgacaatcagcgcttatgctatcgggacagctgaatttgtccttgttggaatcattcccatcatttcagctgatttatcagtttcagtaccgtcagcgggtctgcttgtcagtctctatgcgctgggcgtggcagtgggggcacctcttttaacagcagcaacaggaaagatgccccgcaaaacgcttcttctgtgcctgatggccgtttttactctaagcaatctgtatgcctggcaggcacccgggttcgtctcgttgattgtggcgaggatcattaccggcatggcacacggcgtgttctattccattggttcaacaatcgctgccagccttgttccaagagagaaagccacgagtgcaatagctatcatgttcaccgggctgaccgtcgctctggtcaccggtgttcccctggggactttcatcgctcagcaccttggctggagagccacatttttttcagtgtctgtcctcggaatgatcgcctttgcaggcagctttttactgataccccgcggcataaaaaaatctgaacccgcgcccgtgagatttctgattaaggtcctgacaacccctcagctgatactggcatattccctgaccgcgatagggtacgggggatcgtttataacgtttacctaccttgcctctactcttgaggaaatatccggattttcacccgctgcggtaagcggtgtcatgctggtatacggttttgcagctgcactgggcaatctgtatggcggacggatctctgacaaacatggccctattaatgctcttaaaattatatttttattactgtccctggtgttgttcgctttatatctgacagcatctaattcatggctgatgctggtcactacatttgtctggggtgctgccgcatttgcaaacgtccctgtactgcaatatctggctgtcaggcaggctgaaaaattcgttcctgaagctgtggatgtggcatcagggctgaatatatcggccttcaatatcggtatcgctggcggaacctggataggtggcctggtcgtaatccatttcggtctcctgcataccacatggcttgccggtgtggtcgttttcttcgctttcctgctcagtattttcgcgggagcactagaaaaaagggaaataagcactgaagctgcgtactga

SEQ ID NO: 94335 - DNA, 609 bp, Enterobacter aerogenes
atgaaaactgtaattctgattggtgctcaggggaaaatgggcaaagcggcgctgaccggtttgggcgatcacaaagtgattaccgccagtcgctcaggaaaaggtacggactatcaggtagatattacaagtcatgaatccctgagagcacttttcaaaaacgtcggcgcctttgacgctgttgttaacgccgttggccactgcgagtatgctaattttgtcgatatgacagctgagcagtgggagctcactgtccagagcaaaatgctgggtcagatcaatgtcgttaaaataggccttgagtacatcaacgaccgcggctcattcactttaatttccggcattcataatgtgaaacctatccccggctctatagctgacgcgacaaccagcggtgctatcgacacatttgtacagtgtgtggctaacgaactgccccgcgggatccgtatcaatgtagtgaacccaaccgtactggaagaagcctgggatgtttacggccctatgctgccagggttccagccagttccgggcaaactggtcggaaaagcgttccagcgttctgttgacggatttatcaacggtaaagttctctttgtcgatgcctaa

SEQ ID NO: 94336 - DNA, 903 bp, Enterobacter aerogenes
gtggattacattgatatcaaacacatgcgtgtattgttactgctggttaaagaacttaatgtctcaagggtagcttcaaagctggatatctctcagcaggcggtcagtgcatatcttaaaagactgagaacttatttcggaaccgagctgtttgtacgcaggagtgcaggacttgagccgaccgactatgccctttctcttgtgcctaaaatagaaaaaattctggatgaggttagccagcttcgttcaccccaggtatttaatccgaacattcaggacttcagcatatgcataatggcaaacgaatatgctcaacttactatcatcccatccttactgaagacactacatatgcaggcaccgcgggccagcgttgaaatcaaagacttcaattccaggcaccacgttgaaagtcttaattccggcgatgtcgatctggtactgggtttttcgaatcatattgatcccggactgatacgcaaaaacatccggcgtgaagagtactgctgtgtggtcagacacggctcagctattccgggaaaacttgaaatgaaaatgtccttttcagacattcctgccgttaaatttgctccgagtgccggtaatattgaaaatctggttgatgatttttttaacaaagccggaatgaaaaataatgtcatcgctacgttaccgtgttatacgacgctcggcgcttttttcactgcgaatgacgccattgctttcattccatcagcgataggagcgcagggaaattactgtaaactggagatgccagaaaaaatggtcccgtttgatgtcactgtcgcctggcatcggaaaagtaatgataatccgctccgagtatggttgaccaaaatactggaaatgacgactatttccggggacacgaattgtgtttaa

SEQ ID NO: 94337 - DNA, 267 bp, Enterobacter aerogenes
atggcgacgctggggcgtcttatgagcctgctgtcaccctttgacgtggtgatatggatgacggatggctggccgctgtatgaatcccgcctgaagggaaagctgcacgtaatcagcaagcgatatacacagcgaattgagcggcataacctgaatctgaggcagcatctggcaaggctgggacggaagtcgctgtcgttctcaaaatcggtggagctgcatgataaagtcatcgggcattatctgaacataaaacactatcaataa

SEQ ID NO: 94338 - DNA, 258 bp, Enterobacter aerogenes
atgatgaatgatagaataagggtggtttacacttttaaaggtgcagaaaagtccttttacataaacgatgattggtcatttttagatgtgtttagagaaatcatcaatgaatcaggtatcgttttaaaaacagcaattcaaacatacgaacaggctctggacattttgctaagcactgacattgatgatctgtttacggttgaaacagatgacaaacggactatgtcatacagaataagtcgatttagtgtcaggtaa

SEQ ID NO: 94339 - DNA, 165 bp, Enterobacter aerogenes
atgaacattcgttttagccccgatactcacaaactcttaatagctcgtgccaatcgagaggataagcccgcagccgcactggtgaacgaactaatcacagcaatcctaaagcaagaggaactaaatgaacaaaacggaacaatccccaaaactaaaaatcgttaa

SEQ ID NO: 94340 - DNA, 1470 bp, Enterobacter aerogenes
atgaacaaaacggaacaatccccaaaactaaaaatcgttaatgccatctgtggcagtggaaaaagctacaagctcaaacagcatataaaaaccaatcctgacaggcgaattctgatagctgtcccgactcacgatttagcctcccagacacaatctgacctccagaaactcggcattcctgcgtatcacaatcaggtagacaggggcgagagcgcaacacgatcattaataaacgcgctggatgatgattttgggcgaaacgttgtcattgtcacccatgaatgtctattacatttttgtctatatgcatattgtgatgaaaagacgcaaaagaaattaagccagtttgaactctatattgatgagatcccttctgcatggtatggcgcagagatagattacaaagatgaggaatataaaaaatcaaactttccatttttagagtggatagaggaacagaacggtttatattttattcgtgatgaggacagagaaaagtttcttgcatactacgacgctgaacacgccaacagcaaactgttgaaacaggctctattctccatgctgacaggtcagggaatgctcctggaagaggacaaatattttttctcgtttactgctaacccaatcctatatagcgccctgtgggctaaatcattcaccgtattgggcgctaacgttgggattagtgagtttgcctacgccgctaaaactattctgaatgcagaaatctcgctggctgatgatgaattgcagccggacctgatgcgccgcgttcatactgacacaaaacgaattgaaatgatccctgtgttcaaccagaaatgcactaaaaaacttctgagtgaacactacagcgacattctgaacgggacacgcagagcactaagggacgacttcatctatacgagcaacaacgatgaacagcacagcaacggattctattactcctcacgggctgacgacgttttagagattggtgagcgtgtctccatggcctcatacggattaaaccactatcagcacatgcataaagcggcgtttctggggtgtgcaaacctggacaggacgactattggacactggcgaaaatattgcgatttgaatggctgggattgggcagaactcgaagagaaacggcaagctgcattgaactatgagaaggtttaccaattcgtttcccgctgttctgttcgtgtcagagggaacagcaatcaacaggtctatatcgttcctgatcttggttgtgctgagtatttaaaacaacactatttccgtgatgcagtgatcaaaccggaaatgataaaaacagagaagaaaaaacgagatacaagcaagggtgataatacgctggaaatcgttaaaaactatctcgaacagggactaaaaccaaaacagattgcacaactgacaggattagaaccacgttatattagcaatataaaactaaaactcaaaaaagcagcataa

SEQ ID NO: 94341 - DNA, 363 bp, Enterobacter aerogenes
ttggcattagcgagaaatacagtatttgaagaatcggttgaattaggatttaacaacagaaacaaaaaagttagagtttctaaaaaactaaaaccattagcaattattaaactctacgaagaatccccgccactaacaccagaagaacaatcaataattaactctatgggtggtgttaaatggaaatctcgccaaaagtacatcggttttaaattcaatcgtgaaccgctcaaatttgaatatctatttgataatataaatgagtacgagggttggctggagtttaaccgattggaaaatgaacagtaccagggatacgatgttgatattatggatgcagcatataacggcatctctgattaa

SEQ ID NO: 94342 - DNA, 570 bp, Enterobacter aerogenes
atgactattgatagctcattacaaaatttcattgagacatttcagaagagcaaaagaagtatgggtgtaatgtcctactctgaagaaaatttaggctgctcgaaccatgatattcctttacatggggatatgttgtatttttatgaacatactatccttgaagataaacccacctttggtggcgattttttcattcagataattgaaatgtatgacttaggcaatatacagtcaggctggcttataccaaatggaacaaatgattgggataagaactatgtaatctttgcagaacgtaatggcgacgttctgttttgtgatgtattagacgataattcagccgtatatggaagtgtgcaaaaaaaagtatataaattaactaacacactaggggactttttggatacatattccgctctgattgaattagaagatagcgaatttgaatgtgataccacggatgatgattttaattataaaaatgaatatttgcttagggtgaaggaagttctaagtaataatcttccaactgaattggtagataattatatgtgttttttctttggctag

SEQ ID NO: 94343 - DNA, 612 bp, Enterobacter aerogenes
atgattatattgaaaaatttagaagataagtttaataagattagttccgatagtgaaaactatattatgtcatatagtgatagtgttagactcaacgaaactaaagtagtagttagtaaaggtgcattatataatattcgaccctacgaaatcgaacgagctggatttaagataggtaagaaacttaataaattacctgcaaatgtaaaaaatacacacatctatcactttgatagtctggaacgtatatcgttaatagaaatatttggacagacatcaaatataattaacaaagagttttgtatctatgaaggtgataacttagaaaggatttattttaccagtgccggtatgctgcgaaacatctctttgtcagtatacaatgatggattgattgaaaaagatttcaattgggggatgtatgggtgcagtgtatctgattatgtttatgaagactcaattcttaagaaaatatatgttcagcaaaaagaacatgcagaatcatcttttacagaatttgaagttgtattttcgtataaaaatgcgatcatcgataccattaaaaatgtatttcctaatggttatgaagaacaacgttatcctgcacgctga

SEQ ID NO: 94344 - DNA, 462 bp, Enterobacter aerogenes
gtgaatgagagcgtcgggggctggttccgcgaggggctgcagcgcggggtgcgttatgtattcgatcgcgcgggcgagctgcgacagcggcgcgatgtccggcataacggagagaaagaggattttagctggggcgataaccgccagctggtggcggtgcgcaagggcgagcgcctggtgttcaagcagacggcggaagagacgcgctggttctactggcagggcgacgcgctggcgggggaaacggtaactatcacccgcgaaccgctggcggcacagagcatttttgataccggcagccggctgcagcggcagaaagcgcaggccgcgctgttcggcagtatgcgcgagtacgtgtactatccgggaagttttcagccgctggctctgctgacgcaggaagcgggcaggaaggagagctggcactatcattgtgacccgaacggcgcgccggtcgcctga

SEQ ID NO: 94345 - DNA, 363 bp, Enterobacter aerogenes
gtgacagtcagcacgggtgggctgaatggggcaacggtacgcgtgcatctggaaatcagcagctacatcaaagtaggcgatccacttacgcctcaacctcattcatgggcacccgttttagatgctgagattgatggcaaaacccttctgttatcgggcaaagagacttttgctctggcgggcactgagctgctggtcgagatcgagttggtgacggaacagccgctgccacgtgacctccggggtgatgtacttctttcagaaatcaatctgcccgaaaagtctgaacatgctctgttcatcagtgcgagacagaaagaccagtcgcgtatctggacctcggctcttttccttacgcgttag

SEQ ID NO: 94346 - DNA, 786 bp, Enterobacter aerogenes
atgtttcggatagaatcgtcagcagtggaaagtccacaagttgtggttgaatattataagtctaatgcggaatttacgtctggggaaggcatcctgtatacagagtttatgggggaaattgccacaagacagataagtgttttggatagcttatattacccatcagcctcgttgagtgatgaaaatgataaaataggtttccttctttatgatggaaaaaaaagtgaattagaactatctgattcacagattatatcaaaagacgaatttgaggctgtgtggttaatagctatgaatgatcacaaagaaaaagaaatcattcaatatgtaactggagatgctgctgtcccattaagttctgccactatcattgctcatatagttaataacaaagggaaatgggggaaaggatttgttttatcattatcaaaaaaatacccagcagccaagaaggtttatttggataaatattctaacacatcagatttaactttgggtgatatacagttcatatctgtagatgaaaaggatagaatatttgtggctaatatggtttctcaagatgggataagaaaaaaccatgctgataaaaaacaatatttatcatatcacgcacttgaggaatgtcttgaaaaactatcggagtttgcattgattaatcgattggttgtacaaatgccaaaaattggagctggattaggtggcggagattggaagcatattgagagtttaatacaaaaacatttatgttataaattaattaaatgtactgttgtgatattgtga

SEQ ID NO: 94347 - DNA, 351 bp, Enterobacter aerogenes
atgaacgaatatatttttgagaacatagattatgaaaacgatcctgaatgggttgttcgggattattttaattcaatgtatctacagggtaaattcatatggatgttaccgtatcttataaataaaataggctgcggtgttaacgaaacatattgttcattccctgattttgaagaccctgatccagaatgtcattttgagggcataatgtttggggtatgggacggagaacttatagttcctgaatttgtaggctttaaatatgtccgtctggcctgtgaaaagtatattcagttacatcctgaagatactgaaaaagtaaatgagttgctggctaaaattccagcctga

SEQ ID NO: 94348 - DNA, 870 bp, Enterobacter aerogenes
atgggggggcttagcggaggcagcagcgcggatgcggtggcgggtgcgcaggccgggaagaacgcggtggagaataatgctttgagtccgattgatttcggtaaaggcatggctgacatgggtttatcccagcagtcgctcggcgttcatatgctccagaatggtgccacaccagaagaactcacggcggcgctgatcaagaactcacagggacagataccggacggacagaatgcagctaaaggcctgatgattgcctgggcagaattctttggggttccggtgagtgcgttggcggcggatggggaaatgacgccgcaacgagctgcggaaatcttggcaagtggcgtgccgaccagtgaagcgaagttagtacaatatgtagcagctaaggcgtttttggttgttgcgaagaacacctcttatccatctggaattagttttaaaattgaccaactggaacatatgggttctgttgtaaaatacaatcaacagaaaggtattacaggtggtcataatgctgatgctttctattcaacagtaagtgagaaaaatgtgaaaattgtcggtgaaactcaaagcagcgtgaagggtattactgaggttcaatataaaatacccgcttacgatcgcgccggtaatattacaggttataaggataaaatatttaccaaaacaatctatgaccctaagatctttactgaccaaaaaatgttagaattggggcagcaagctgcaagtagtggttacaaagcagctattgcatctggacaacgagaatatacggcaaccgccggcgggataaaattccaagtttatttggataaaaagacaggaatggtagaaaattttcatccggtgactaaataa

SEQ ID NO: 94349 - DNA, 363 bp, Enterobacter aerogenes; identical to SEQ ID NO: 94345

SEQ ID NO: 94350 - DNA, 807 bp, Enterobacter aerogenes
atgcgacgtaaaactatatttttgtggtgtttattaagttttatatgtgctgttaattcatcaaaagcttttgcatatagtgaaaaaaaaggccttggcgttataccgggaaatagtttgaataagggatacacaacaggttttaaaaaacttaatgtgcagtggtactataattgggcgatctatccagagcggggtatgcctcatgggatattatatgtgccaatgcttggtaataagaaaacactgaaaaatatcaatgcggtaacctcatatccttatgtattactttttaatgagcctgatgtgtcgggagcgttgactaaatctatcagcccggaggaggcggctagcttattcaaaaatgtaatgaataagttgcagaatattaaggttattagtccagctccgcaaaatccatggaataactggcttacaaattttaattcaatgtctttcaattctaaaccaatgaatgctattgctatgcattggtacggcttgcctgatataaataaattcaaaagagatgttttatatatccataataagtataaaagcaatctatggattactgaatttggtattcgtattccatgttcagataactctcttgagaatcaaaggaaggtgtctgattttctccggaacgccctggagttccttaatagccaacagtatgttgaaaaatatagttggttttctcccaagaataatacatcagagagttgcgatttgagatatgatgttttgataaattctgacggtacgctaacagatttaggtttgctatattccaagtattaa

SEQ ID NO: 94351 - DNA, 744 bp, Enterobacter aerogenes
atgattatatttggccagcgtgtcatgcacgtagttatcgtaaaaatccagcatcgtcggcgagcccatcagcgccgcccgccgggcatcgccgcttttcttgatctggatatattccgactcctgcgccgccaccagcggaccgccaagctggtcggtttgcgtggtggggatcacatccagcagcacctggcccagcagcgccacgataccggtatgggcaaagtcataaccccatgccgcgcgatccagacgatccttatcgataaacggcacttctcgcggcccttcgctttccgcgggcgccgccgccgacggcagcgcgccggacgattcattcagcgcctgctgataaaaaggtttgcgctgataatacttatcggcgtattgcgggctggcaaagcgctcggtgcgccaggcggtgatccagctcagctggtccgccagcatcacctccagcgctttggccttcagcggcacatacaccggatccggcagcttgcccagcgggccgttctccggcggcttcgcggcggccgcggctttcgccttatcgccatccgccttgtcgtgagccgccttcagcgcggcgaccggatcccgcccctgggccacggcgatggccaccacctccgcctcgttgacggccggcgtttcggtcttcgcccccgcctgctgcgccccggcctgctgccaggcgttaaacagggcgatcgcctgggcggagattttgaattgttttaa

SEQ ID NO: 94352 - DNA, 915 bp, Enterobacter aerogenes
ttggccaaaatttggtatagaacaatcgagagattagataaaaatatccccattgtatggttgggatggggatatgattattatgatttaattggtggcgatgaaaaatggttgcttcaagatacctattctttttataaagaggagtcccaaaaaagaaacttaacacaaatcctcaaggatgcaattctctacccgagatggagacagtctcgggttattgaaaaaatacagtatttctcgcctgtattacaagatgaatatcagactttaagaaattgtcgcgcgtggaaatcttttcctgaacaagtcgactggaattatagccctgctgaaaaagatttgtcttactacgtttctagctccgatgatgtcggtgctattggtaataatgtattagtagggaatagtgcaactaatacgaataaccacctggagatttttcgtacgctaaggaatataaacttacagggaaggaagtttatcatcccacttaactatggcgataaaatatatggagaaaaaattggtagaatggcaaatgaattgcttggtgagcatgctgatgttctactcaaattcatgcctattgatgattacatgaataaaattagttcatgtggatttgttattatgaatcacgtgagacagcagggggttggtaatataataagcatgctttatatgggagcgaaggtgtttattcgtgaagaaaacccaacttttatatatcttaaaagaaacggagtgacagttttttcagttcaggagcttgaaaataatccccagcttttgttttctcctttatctcaattagaagttgtgaataataggactatagttgagagcttgtggtcaaattccacattattgaaaaaaacaaaaaaaattatatatactctgatgaacaagtaa

SEQ ID NO: 94353 - DNA, 261 bp, Enterobacter aerogenes
atgacgcaaggtaccgcgacaatccttatctacaggcccaaaccgattctcttctgcaagacgctgaatatcacgcagtcccgtatcaccactgattggcttagcatcttcacgtaccaacttcatcccattataattcattggattatggctggctgtcacctcaatgcccccatcgacaccaagatgaaaagtagcaaaataaatctcctcagtcccgcttacgccaatatcaagcacatcagtaccagcatccattaa

SEQ ID NO: 94354 - DNA, 729 bp, Enterobacter aerogenes
atgccggtgcattgttatggtaatccttgtgatgtagagcgtattcaggaaatcgccgacaactataatttaaaggttatttatgatgcagctcatgcatttggtgtgactgataagggggggagtatacttagacatggcgatttaagtgccatcagttttcatgctacaaaagtttttaatacttttgaaggtggtgccattatttgtccagatcagaaaacaaagacaagaattaataaccttaaaaacttcggaattgtcgatgagacaactgttgtagctcccggcatcaatggtaagatgagcgaaattaatgcagcatttggtttgctacaacttaaatatgttgatgataccatcttacgtcgcaaagaaattgatgaaagatatcgcgaggctttctctgaattaaaaggaattactgtagtacctcaatcaggacaagtgaatgctaactatgcatacttccctattttagtagaggatgatttccgcatgaatagagaggaactctatgattttttgaaggaaaataacgtgtattcccgccgttatttctatcctttgattagcgatttttcaatgtataaaggaatgaagtcagcatctaaggaaaatcttcctgttgccaatgaaatagcacgtaaggttctttgtctgccaatatatcctacattgacaaaagaagatcaagagcgagtaatttcactggtatggggggcgtaa

SEQ ID NO: 94355 - DNA, 462 bp, Enterobacter aerogenes
atgcgccatcgcattggcttccacattcaccttacccgtcgcgctgtccgtcgtctggctgtgaatgatttccgccacatacgggctcactgcgccactcgccgcctgcgccaggttaccccccgccagaccctgcatcgccgccgttaccgcctgcgccaccttctggtactttccgcccgtatcgtagtccgccgtcgccgtccggctcacctgcgcgctgatttgttcctcgctcggactgccattccctcccgctaccagcttcgcccgcgccgctgcccgcgccgccgggtcgctctgcgccgcctgcgcgttcagcttgccctgcgtcaccagcacatcactcacctggcgcccgatttcacctatcttctgcgccgtcgccagacggttctgctctttctccttatcaaatatcggactcagcgtctggttcgcatgcgccgcatcccggcttaa

SEQ ID NO: 94356 - DNA, 423 bp, Enterobacter aerogenes
gtgctgtcgacggtgcgcgaagtcggccattactcgtgccgttcgatgaccggcaactgcgcggccttaaccaggcttgccgatgaaccaggctatgcgcaaatcaacaccgccgacgccgaacggttaggtatcgaggatgacgcgctggtgtgggtcaattcgcgtaagggccgcatcatcacccgcgcgcaggtcagcgatcggccgaataaaggcgcggtgtacatgacctaccagtggtggatcggcgcctgtaacgagctggtgtcggagaacctgagtccgataaccaaaacgccggagtacaagtactgcgcagttaacgttgaacggattgccgatcagcgcgcggcggaacagtacgtgatcgaggaatacaacaagctgaaagcccgcctgcgcgaaagcgcgatgggttaa

SEQ ID NO: 94357 - DNA, 285 bp, Enterobacter aerogenes
atggcgcggggtttcggtgttgcgcagcgccgccagggcaatcagcccgccggtgacgcagaacgccagcgccagccacagggtgcccatctcgccaatgtgcggaatggtgaagctcggaatatagctgccgaacacgccgatgccgacggagtagaccgcccagaaccagcccagggccgagctggagctgtcgctgcggacgttatggataatggcgacgataaacgaatagaggaacagcggataggccaggccgcggatgccgtaaaacagcaggattaa

SEQ ID NO: 94358 - DNA, 285 bp, Enterobacter aerogenes; identical to SEQ ID NO: 94357

SEQ ID NO: 94359 - DNA, 285 bp, Enterobacter aerogenes
atggcgcggggtttcggtgttgcgcagcgccgccagggcaatcagcccgccggtgacgcagaacgccagcgccagccacagggtgcccatctcgccaatgtgcggaatggtgaagcttggaatatagctgccgaacacgccgatgccgacggagtagaccgcccagaaccagcccagggccgagctggagctgtcgctgcggacgttatggataatggcgacgataaacgaatagaggaacagcggataggccaggccgcggatgccgtaaaacagcaggattaa

SEQ ID NO: 94360 - DNA, 393 bp, Enterobacter aerogenes
atgcaatcccggatgacaaaggacattgtcctgaacgcactgctgatggctgtatggcggcgtaatccccaaaaacaggtgctggttcactcggaccagggcagtcagtacacaagccatgagtggcagtcgtttctgaaatcacacggcttggaggggagtatgagccgtcgcggtaactgtcacgataatgcggttgcagaaagctttttccagttgctgaaacgcgaacggataaagaaaaagatctacggaacgcgggaagaagcccgcagcgatatttttgattacatcgaaatgttttataacagtaagcgtcggcatggttcaagcaatcatatgtcaccgacagaatatgaaaaccagtattatcaacggctcggaagtgtctag

SEQ ID NO: 94361 - DNA, 285 bp, Enterobacter aerogenes
atggcgcggggtttcggtgttgcgcagcgccgccagggcaatcagcccgccggtgacacagaacgccagcgccagccacagggtgcccatctcgccaatgtgcggaatggtgaagcttggaatatagctgccgaacacgccgatgccgacggagtagaccgcccagaaccagcccagggccgagctggagctgtcgctgcggacgttatggataatggcgacgataaacgaatagaggaacagcggataggccaggccgcggatgccgtaaaacagcaggattaa

SEQ ID NO: 94362 - DNA, 285 bp, Enterobacter aerogenes; identical to SEQ ID NO: 94361

SEQ ID NO: 94363 - DNA, 522 bp, Enterobacter aerogenes
atgaagtgtttctgggttttctcagttgctttaactctgtcgtttacagccgttgctgctgagaagaacgacaatgttacgaatgtaaaaccgtccaccggtagggatttatatcttacctgcaaaggttatcaggtgaagggttcatctgtaattaacatcgataaaccctcttaccttgaagggacaggtgagcaggttgaatttgcaatcattactcctagtggtacgtatgatggacttaaggttttttttgattcatggggtttttctccttttggattgattgaaagtcatgtgatgcaggagcactggtctttagtccatgtaggagggcgcgcttcagttaagggggacaagattgattattcatttgttgataaccagccacaggcgggagatggttatcaacccaaaactggggtgttcctgtacggctgcatgacctcggataaaaggccatcttgggtcgaaaaaatctactcaagaacaggcatgtttcgagggggcatagaaggctaa

SEQ ID NO: 94364 - DNA, 285 bp, Enterobacter aerogenes; identical to SEQ ID NO: 94361

SEQ ID NO: 94365 - DNA, 285 bp, Enterobacter aerogenes; identical to SEQ ID NO: 94361

SEQ ID NO: 94366 - DNA, 285 bp, Enterobacter aerogenes; identical to SEQ ID NO: 94361

SEQ ID NO: 94367 - DNA, 210 bp, Enterobacter aerogenes
atgttcctcggcatgggcttcgtgctggcgtttctgctgctgctcattttcgccatccggggaatgtctctcgccgttacccgcctgttccctgagccgcctgccgcgcccaaaccggcgccggccgccgtcgcgcccgccgacgacttcgcccgtttaaagccggcgattgtcgccgccattcaccaccatcgccgccttaattcttaa

SEQ ID NO: 94368 - DNA, 153 bp, Enterobacter aerogenes
atgccgcaaaagtatctgttgtttggcttagtagtgatttgcttcactattttattattgacctggatggttcgtgattcgctatgtgaattacagcgcaggcagggaaatattgagctggtggcattcttagcctgtgatattaaacagtaa

SEQ ID NO: 94369 - DNA, 699 bp, Enterobacter aerogenes
gtggggcagcgcattcccgtgacgttgggcaatatcgccccgttagcggtaaaacccttccgtccaggcaaattggctctggtgtgcgaaggcggtggtcagagaggtattttcacagccggggttctggacgaattcatgcgcgccggatttaaccctttcgacctgatgctcggcacttccgctggcgcgcaaaacatctccgcttatatctgtaatcagcagggttacgcccgtaaagtcattacgcgttacaccacctcgcggcaattttttgacccgatgcgcttcgtacgcggcggcaatcttatcgatctcgattggctggtcgattccactgcacaacaaatgccgctggcgatgaactatgccgaggagcagttcgcgctgggtaaagagctgtggatgtgcgcctgccgcggtgacgactacacggcaaactatttttcccctacccgccagacctggcttgatctgatccgtgcctccagcgccattccaggtttttaccgtagcggtgtcctgctggatggcgtgaactacctcgatggcggcgtcagcgacgcgatccctgtgcaggaggcggcgcgcagactattgtggttatccgtaccgtcccttcgcagatgttctacactccgcagtggtttaaacggatggagcgctggctgggggaaagcagtttgcagccttttgtga

SEQ ID NO: 94370 - DNA, 1224 bp, Enterobacter aerogenes
atgaaacgtgcatttattatggtgctggactcctttgggattggcgcaacggaagacgctgaccgctttggcgatgttggcgccgatactctgggccacattgcggaagcctgcgccaaaggtgaagctgacaatggtcgtaaaggcccgttgaatttacctaacctgacccgtctgggtctggtgaaagcgcatgaaggttctaccggtaaaattgccgccggtatggacggtaatgccgaagtcgttggtgcctatgcctgggcgcatgaactctcttctggtaaagatacgccgtctggccactgggaaatcgccggcgtgccggtgctgtttgactggggctacttcagcgaccacgagaacagcttcccgcaggaactgctggataaactggttaagcgcgcgaacctgccgggctacctcggcaattgccactcttccggtaccgtgattctggaccaactgggtgaagagcatatgaaaaccgggaaaccgattttctatacctctgctgactcggtgttccagatcgcctgtcacgaagagactttcggcctcgacaagctgtatgagctgtgcgaaatcgcccgtgaagagctgaccgaaggcggctataacattggccgcgtgattgctcgtccgtttgttggcgacaaagccggtaacttccagcgtaccggtaaccgtcacgatctggcggtcgagccgccggcgccgaccgtgctgcagaagctggtcgacgagaaaaacggccacgtggtttccgtgggtaaaatcgccgacatctacgccaactgcggcatcactaagaaagtgaaagccaccgggctggacgcgttgttcgacgcgaccatcaaagagatgaaggaagcgggcgacgagactatcgtcttcactaacttcgtcgattttgactcctcctggggccaccgtcgcgacgtcgctggctacgcggcgggtctggagctgttcgaccgtcgtctgccggagctgatggagctggttggggaagacgacattctgatcctcaccgccgaccacggctgcgacccgacctggaccggtaccgaccacacccgcgaacacattccggtgctggtgtacggcccgaaagtgaagccgggttcgttaggccaccgcgaaactttcgccgatatcggccagacgctggcgacatactttggtacgtcgccaatggaatacggtaaaaacatgctgtga

SEQ ID NO: 94371 - DNA, 1479 bp, Enterobacter aerogenes
atgccttttacacttggtcaacgctggattagcgatacagagagcgaactaggactagggacagtggtagcgctggatgcgcgcatggtcactctccttttccccgccatcggcgaaaaccgtctgtactctcgcaacgattccccgattacccgcgtgatgtttaacccgggtgataccattaccagccacgaaggctggcagctccacgttgacgaagtaaatgaagaaaatgggctgctgtcctacaccggcacccgcctggatacgcaagaagaacatgttaccctgcgcgaagtcctgctcgacagtaagctcgccttcagcaagccgcaggaccgcctgttcgccgggcaaatcgaccggatggaccgctttgccctgcgctaccgagcgcgtaagttccagagcgaacagtaccgcatgccgtggagcggcctgcgcggccagcgcaccagcctgatcccgcatcagttgaacattgcccacgacgtaggccgtcgtcacgcgccgcgcgttctgctggccgatgaagtgggcttaggtaaaaccatcgaagccgggatgatcctccaccagcagctgctctccggcgccgccgagcgcgtgctgatcgtggtcccggaaaccctccagcaccaatggctggtggaaatgctgcgccgcttcaacctgcgcttctcgctgttcgacgacgaacgctatgccgaagcgcagcacgacgcctacaaccctttcgaaaccgaacagctggtgatctgctccttagacttcgtacgccgcagcaagcagcgcctggagcatctgtgcgatgccgagtgggacctgatggtggtcgatgaagcgcaccacctggtgtggagcgaagaggcgccgagccgtgaatatcaggccattgaacagctcgccgaacgcgtgccgggcatcctgttgctgaccgcgacgccggaacagctgggcatggagagccactttgcgcgcctgcgtctgctggatccaaaccgcttccacgattttgaacagtttgttgaagaacagcaaaactatcgcccggtcgccgacgccgtcgccctgctgctggcgggcaacaagctcaacgataatgaactcaatacccttggcgatctgatcggcgagcaggatatcgagccgctgctgcaggccgctaacagcgatcgtgaagatgctcaggccgcgcgccaggagctggtttcgatgctgatggaccgccacggcaccagccgcgtgctgttccgtaacacccgtaacggcgtgaaaggtttcccgaaacgcgagctgcacactattcgcctgccgctgccgacccagtaccagacggctatcaaggtctccggtattatgggcgcgcgcaaaaccgcggaagagcgcgcgatatgctttatccggagcagatctatcaggagtttgaaggcgataccggcacctggtggaacttcgatccgcgcgtcgaatggctga

SEQ ID NO: 94372 - DNA, 2358 bp, Enterobacter aerogenes
gtgacgcagccgcaagcaggatttttactcacccgtcactggcgggataccccgcagggaacggaactggccttctggctggcgaccgataacggcccgctgcaggtcacgctgccgccgcaggaatccgtcgcgtttattcctgaagcgcagcggtcgcaggctgaacgtctgctgcagggtgaaaacggctatcgtctggcccagctcgcgctaaaagatttccatcgccagccggttttcggcctgtactgccgcggccatcgccagctgatgcggctggaaaaaaagctacgtgaaaacggcgtcaccgtttacgaaggcgatatccgcccgccggagcgttacctgatggagcgctttatcaccgccccggtttgggtagaaggcgaaacgcggggttcacagctggttaacgcgcgcatgaaaccgcatccggactatcgcccgccgctgaaatgggtctcgctggatatcgaaaccagccgccacggcgagctctactgcatcggcctggaaggctgcggccagcgggtggtctacatgctgggccccgagcccgctacgccgccggatgtgggcttcagcctggtctacgttgccagccgtccgctgctgctggaaaagctcaacgcctggtttgccgaacacgatcccgacgtgctgatcggctggaacgtggtgcagttcgatctgcgggtcctgcaaaaacacgccgagcgctaccgcatcccgctgctgctcggccgcggcaatagcgagctggagtggcgcgagcacggttttaagaacggcgtctttttcgcccaggccaacggccggctgattatcgacggcatcgaagcgctaaaatcggcgttctggaacttctcctcattttcactcgaggccgtcgcccgcgagctgctgggcgaaggtaaagctatcgacaacccgtgggatcggatggacgaaatcgatcgccgctttcatgaagataaaccggcgctggccacctataacctacaggattgcgagctggtgacacggatctttcacaagacggagatcatgccgtttctgctcgaacgggcgacggtcaacggtctgcccgccgatcgccacggcggatcggtcgccgccttcagccatctctatttcccacgcatgcaccggctgggctacgtggcgccgaatctcggcgaaattcccccgcaggccagtcccggcggctatgtcatggattcccgccccggcctgtatgactcggtactggtgctggactacaaaagcctgtatccgtcgatcatccgcacctttttaatcgatccggtcggcctggttgaagggctggcgcagcccgatgaccgccacagcaccgaaggatttctcggcgcccgcttctcgcgcgaaaagcactgcctgcccggcatcgtcgggcagatctggcacggccgcgatgaagccaagcgtcagcataataagccgctgtcgcaggcgctgaagatcatcatgaacgccttttacggcgtgctggggaccagcgcctgccgctttttcgatccacggctggcgtcgtcgatcaccatgcgcggccacgcgatcatgcgccagaccaaagcgctgattgaagcccagggctatgacgttatctacggcgataccgactccaccttcgtctggctcaagcgcccgcatagcgaagcgcaggcggcggaaatcggccgcaagctggttgcctatgtcaacgactggtgggcgcaggaattgggtaaaagccaactgaccagcgcgctggagctggagtatgaaacccacttttgccgctttttaatgccgacgatccgcggcgccgataccggcagtaaaaaacgttatgccgggatgattcaggaaggcgatgcccagcgcatggtgttcaaggggctggagacggtacgcaccgactggacgccgctggcccagcagtttcaacaggagctgtatctacgcatcttccgccatcagccgtatcaggattatgtgcgggagactatcgccagactgatgaacggcgagctcgatgagcagctggtttatcgcaagcgcctgcgccgaccgctggcggagtatcaacgcaacgtgccaccgcacgtgcgcgccgcgagactggcggatgaacacaacgtgaagcttggacgggcgcagcagtatcagcagcgcggcaccattaaatatgtctggactaccggcggcccggagccggtggattaccagcagtcgccgctcgattacgatcactatctgtcaaagcaattgcagccggtggcggaaggaatccttcccttcgtcaacgacgactttgctacaatagtaacagggcaactggggctattttga

SEQ ID NO: 94373 - DNA, 717 bp, Enterobacter aerogenes
atgcggatccactttatcgtccatgaagtttttgaagcgcctggcgcctatctgcgctgggttaacgcgcgcggctatcaggccagctggtcgcgagtttatgccggggatccgctgccggcgaatgctgaaggttttgatatgctggtggtacttggcggcccgcaatcaccacgcaccacgcttgccgagtgcccatggtttgatgcccatgccgagaaaaacctgattgcccaggcgattgccgccgggcgtatcgtggtcgggatttgtctcggatcgcagctcatcggcgaagcgctgggggcgccggtgatgcaaagcccggaaaaagagattggccactatcctatcatcctgaccaccgccggactgcaggatgacaacatcgcccatttcggaccatcggtggtagtcggtcactggcacaacgatatgccgggcctgacgcctgcggcggaagtcctggcttccagcgaagggtgcccgcggcaaatcgtcaaatatagcgatcggatctacggttttcagtgccatatggagtttgacgcggaggtcattgagttattaattacccactcgcaacatgaacttgccgccgcaaaaggcaggcgctttattcgcagcgaagatgaaatgaggcaatgggattatcgcgagatgaatcaaaaactatgggcgtttctggataagctggtagcgaaacacgcactttag

SEQ ID NO: 94374 - DNA, 291 bp, Enterobacter aerogenes
gtgaacacattagaacaaacaattggcaacacgccgctggtgaaattacaacgtctggggccggacaacggcagcgaaatttggctcaagcttgagggcaacaacccggcgggctcggtaaaagatcgcgccgcgctgtcgatgattgtcgaagcggaaaagcgcggcgaaattaaacccggcgatgtattgatcgaggcgaccagcggtaataccggtatcgcgctggcgatgattgcggcgttaaaaggctatcagatgaaactgctgatgccggacaacatgagctag

SEQ ID NO: 94375 - DNA, 1017 bp, Enterobacter aerogenes
atggccgttaaatcactgaaaaaaggatatctggcgctggcagcttccatgctgctggtggcgcaggcgcaggcgactgaactgctgaacagttcctatgatgtttcccgcgagctgttcgccgcccttaatccgccttttgaacagcagtgggcaaaagaaaacggcggcgacaagctgaccattaagcagtcacatgcgggctcctccaagcaggcgttggcgattctgcaaggtctgaaggctgacgtcgtgacctataaccaggtgacggacgtccagattctgcatgataaaggcaacctgatcccggcagactggcagagccgtctgccgaataacagctcgccgttctattcgaccatggcgttcctggtgcgtaagggcaatcccaaaaatattcacgactggaacgatctggtgcgttctgacgtgaagctgatcttcccgaatcctaaaacttcaggcaacgcgcgctatacctatcttgcggcctggggggcggcggacaaagccgatggcggcgataaagccaaaaccgaacagttcatgacccagttcctgaagaacgtcgaggtattcgataccggcggtcgcggcgcgaccaccaccttcgtcgagcgcgggttgggcgatgtgctgattacttttgaatcggaagttaacaacatccgtaaacagtatgaagcgcaggggttcgaagtcgttgtgccgaaggtcaatatcctcgccgaattcccggtcgcgtgggtagacaaaaacgttaaggccaacggtactgaaaaagcggcgaaagcctacctgaactatctctatagtccgcaggcgcagaccatcatcaccgattactactatcgcgtgaacgatccgaaagtgatggcgtcgctgaaagataaattcccgcagaccgaactgttccgcgtggaagaccagtttggcagctggcctgaagtgatgaaaacccacttcgtcagcggcggcgagctggacaaactgctggcagcggggcgtcagtaa

SEQ ID NO: 94376 - DNA, 1128 bp, Enterobacter aerogenes
atgaaatttgaacttgataccaccgatggccgcgcgcgtcgcggccgtttggtgtttgatcgcggcgtagttgaaacgccagcctttatgcccgttggtacctacggcaccgtcaaagggatgacgccggaagaagttgaagccaccggcgcgcaaatcatcctcggcaacaccttccatctgtggctgcgcccgggccaggaaatcatgaagctgcacggcgatctgcatgatttcatgcagtggaaagggccgatcctcaccgattccggcggtttccaggtcttcagtcttggcgatatccgtaagatcaccgaacagggcgtgcacttccgcaatccgatcaacggcgatccgattttcctcgatccggaaaaatcgatggagattcagtacgatctcggttccgatatcgtaatgatcttcgacgaatgtacgccgtacccggcagactgggattacgctaagcgttcgatggaaatgtctctgcgctgggccaagcgcagccgtgaccgttttgatggcctcggcaacaaaaacgcgctctttggcatcattcagggcagcgtttacgaagatttacgagatatctcggtgaaaggtctggtagagattggctttgatggctacgctgtcggcggtttggctgtcggcgagccgaaggaagacatgcaccgtatcctggagcacgtttgcccgcagatcccggcagataaaccgcgatacctgatgggcgtcgggaaaccggaagacctggtggaaggggtacgtcgcggcatcgatatgtttgactgcgttatgccgacgcgcaacgcgcgtaacgaccatctgtttgtgaccgatggcgtagtgaaaatccgcaacgcgaagcataaaagcgatacatcgccgctggatgccgagtgcgattgctatacgtgtcgcaattattcacgtgcttacttgcatcatcttgatcgttgcaacgaaatattgggcgcgcgcctcaataccattcataacctgcgctactatcagcgtttaatggctggtttacgcaaggctatcgaagagggtaaattagagagcttcgtgaccgatttttaccaacgtcaggggcgttccgttcctcctttgaacgttgattaa

SEQ ID NO: 94377 - DNA, 690 bp, Enterobacter aerogenes
atgacccgacgcgccgaccgtttatttcagattgtacagatcctgcgcggcaggcggctaaccaccgcggcgctgctggcggagcggttgggcgtgtcggagcgaaccgtctatcgcgatatccgcgacctctcgctctccggtgtaccggttgagggcgaggccgggagcggttatcgtctgctggcgggctatgatctgccgccgctgatgctgaccagcaaagaatccgaagcgctaatcgccgcgattcgactactgaagacctggggcggagatgcgctttcgcagtcgttggagtcagctcaggaaaaaatgctggcgattttgccggaagaccggcggcgcaaagcggagcagacccggctgtttgcccctgaccttggcgcgcatcgttatgctaaaacctattttgacgttatccatcaggccgtatccaatcagcaggtgttgcagcttcactatcaggatgaatccggtcaggtaacgcggcgtgaagtgctgccgctggggctatttttctggggggagcgttggctgctggtggcctggtgcgaactgcgcagtgattatcgtaactttcgtctcgatcgttgtctggaggtgaaggtgatcgaacgtcgtttcagcgagtgcgccgaccgttcactgagcgatttcttacgtaaggtgagatgtgaggagcgataa

SEQ ID NO: 94378 - DNA, 396 bp, Enterobacter aerogenes
atggaaattagcactttgttaggacatttagataaaaccgctaagaaagctacgcgcggtcaatggatagcatttactgatacagcgtcaggaactttttcagtacatacgccggatgattccagctgtgaaaatatcattaaatgggctggttttgattgtcagaaaaacgcagaagcgaacgctgaatatatcgctgctgctaaccctgaaaatattcgtcgtctggtcaaatacacaaccgagttggaggctagtcacgctgagttacgtagcaccatggcggctatctataactcaattaaggaacacggcggattacatgctgtagctgtgatgaatgcggctaagcgcgcgcatgaggattcagcggctatcgccggggagactaattaa

SEQ ID NO: 94379 - DNA, 477 bp, Enterobacter aerogenes
atgactgatatcaccgaactggcaacagtgttgcgccttgctgctgagtctgaaattgcataccgggcagaaggcgacacgtcagatttatggcaggacgaagcgagcccagacaacgtcctcgcgctggtagaggcgctggagaaggcgcagacgaaagcggttgagcagggacgtactgcctgtgagttgttcgatgaggttactgctctgcgccagcgcatcgcctcgctggaagaaagtcacgctcaggtaatccagtctcgagaccattacaaacacatgtcagaggaaggcctgaagaaactggcggagtcccgcaccgtcaccgtgaagctgccgcagcgtcaggagccaacatcaagcgggcattatggggatgggtatcttgtaccgagtaacgctggtagcgcactgaattacgaagacacaatcgaagcgcttaccgccgcgggcatcaagtgggaggctgagtga

SEQ ID NO: 94380 - DNA, 294 bp, Enterobacter aerogenes
atgagtgaagctaaaccgcaggacgggagcactgtaaaaggctaccgcacattaaccgctggcgacattgagcgcatgaaccgccttaaaggcgtaagccgccacttctgtagtttgcttgaaaccgagcgaggtgaactattggctgtccgtaatggcccggcaatgttaagcgctgagcaggctcgggagattgatgaagctttgcgcagcctggctatcgcgcgcaccaaaatgcaggaagcttgtatgtgggcctgtcgcgctgtggcacgtccagatgctgattgttag

SEQ ID NO: 94381 - DNA, 222 bp, Enterobacter aerogenes
atgttaaaaaaagtcgtggctatccttccaggttatgatgttcaagttctaaacatagaagatgatttatcaatggcagactttattggagataaaggtgctattatgcggttgcctatagaaaaaataattatcaatgaccacgagtatttattctgtcgattctctaatgaagtcagcgaagaatttgtaaaggaagctgtagagaaaaatattctgtaa

SEQ ID NO: 94382 - DNA, 1356 bp, Enterobacter aerogenes
atgtggaatcctttccgtaaaaaagagggaaaagaaaaatcgctgcagcaacccgctagtcgcggaggttgggcgccattatttggtgtcattcatgaaccgtttgcaggggcatggcagcgaaaccttgaaataaaacaggatgatgttctttcttattatgctgtttttgcctgtatttcgttaattgccagtgatatttctaaaatgccattgcgattaatgcgtcgtgattctaaaggtgtcatgcaggagatttcttcaggtgaaatacctgcgatttttaaaaggcccaatgcttttcagaaccgcatccagttctttgagcaatggatgaattctaagttgtgccatggaaacacgattgccttaaaaattcgcaatagtacggggaaaataaaagaactcagactattggactggaacaaagttactcccctggttgctgatgatggttctgttttctatcaaataagcccggacagaatatcgggggtcgaatctgcagttacagttccggcacgagaagttattcatgatcggttcaactgcctttaccatcccttgatcggactatctcccatttatgcagctggtcttgcagctatgcagggacatcatatacaggaaaactctgcctattttttccgtaatggaggaaagccaagcggggttatcgaagtacctggttctctcacagaagagaacgccagaaaaatcaaagacaactgggattctgggtattcaggtgagaatgccgggaaaacagcaattttaagtaatggtgcaaaatataacccaactactgtttcagctgctgatgcgcagactgtcgaacagctccgcatgaccgcgcagattgtctgttccgtgtttcacgtgcctgcttataaggttggcatcggtgaattgccgacgcatgacaatatcgaggcgcaggatcagcagtattactcgcagtgtcttcagtcccttattgagtccattgagttgctgctggatgaagcgtttgaacttgagggggatacgggaaccgagtttgacgttaatgcactgctgcgtatggacagcgagcgtcgaatcaaatccctgggcgagggagtgaaaaataccatcctcacaccaaacgaagcgcggaaaagtgagaatctgcctcctcttgccggcggtgactctctttaccttcaacagcagaacttcagccttgaggcactggcgcgccgtgatgcttccgatgatccgtttggtaaaagcaactcgtctcagtcgtcagtcccaacgaatgaaggaaaggctttaaccaatgctgagcagtcggcagccaaagccatgatcagaggatttcttaccaaatga

SEQ ID NO: 94383 - DNA, 219 bp, Enterobacter aerogenes
atgagccgtagagaatttctggtttggctaaaataccgtgaaaagtatggtccgctcaacatcatgatgcgtactgaatggggggcctcgctgattgcttcggttctggctaatattaataagtcaaaaggtacacctacattcaaggtgagtgattttgccccgcacattgatgaaccaccaatatctttagaaaatgctatgaaaaattggcattaa

SEQ ID NO: 94384 - DNA, 372 bp, Enterobacter aerogenes
atgatcaagccattagctattattttgtcaacgattattcttggtggttgcgtaagtgcgccaagccatgaagagcttagcaaagcagattatgggaacctgcctgaaaactatcaggaccttatcaaagaaaatatgtcaggtcgactcaaagatccgtattcagcacaatataggtttgtagaaccatacaaaggatggtgcaaatctggatttactacttattatggttggctggttccttttactctaaatgctaaaaatagttatggtggatacgtaggtaataaatcttatctatatattgtaaataaaaataatgctcaagattatacatcctcctatcaagtgggaggatgtgggaaaagctaa

SEQ ID NO: 94385 - DNA, 2433 bp, Enterobacter aerogenes
atggctggcaagtccctcggtacgttaacaatcgacctgatcgccaaagtaggtggatttgttcagggtatggacaaagccgaaagggcttcccaaaaatggcgtgaccaggtaaaaaaagacgcgaaagaggtaagttctgcaataattgccgtaggcgcagccgcagctacagcagcagttggcattggtgccgcagggttagcaattgtcagaaatacagcgcagcaggtaacagaagctgaccgatgggctaaatcattaaagatgtcaacccaggacttgttgtcatggcaatacgctgctgaacaggctgggttaactggcgataatatcgcagatatttttaaagacattaatgataaagtcggtgacgcagttttaaataaatctggggaggcggctcaagccctcgatacactaggtctttcggcgaagaaactatctgagcaatcccctgacaaacaacttattgctatcagcgatgcattacagaaaataccaacccaggctggtaaaactaatattcttgaaagcctaggtaatgatttatcaaaaatgctcccattgtttgagaataacaatgagaagttgaagcagtttattcaattatccaaagactttggtatagctccgccgcaggaagatattgataatctagttaaagtaaaccagttctttcaggatattgagacaagtgctcgaggcctgaaaatggaaattgcctccgggcttgcgaaaatcgatctttcgccgcttcagtccggtcttgatgatattcgtgatgtctttactgaccctgcggtacttcagggcctttccgaccttgtaggtgaggcaatcagccttgctggagttgttggtcgtattgctggtggtttaggttcgattgcatcctatactcgctcacgtattggtgctgtttcagggagttatgatgcggctgatgaacgtgatgtagagcagagaatagaatttctcaataaacgaggtaaccaaagtaaagagcaaaagcaagaacttgattttttaaataagaggcttaattttttacgctcaattaaaggtacattaacacctgatcagataaataaaggggctaagggacttacatccttactttctgatcttggaattgatgcaccaaaggataatgatttttctttaggaaaaggtgagtcaaatcagactcaaaaaaattctaaatcaaaaaacaatgcttctgataatgcttttaaaagtagacttcttgatttacaaaaacaagcggctttaatcgataccacaggtaaaaaaacggcagaggtgtcagagctagagaagataaattttgatatcgccagtggtaatcttaaaaaattatctgaagcacaaaaagaacagttacgagatgccgcgaaagtgctcgactctaaaagggaagagcttagaataaataaagaaaatgcaaagctttctgaatttgtttccgggctggagcgtcagaataaattaattcgtcaaaggaatgaaagcgagtttgttggtcggtattctgggtctcaagaacgaaatagaatgaaggatttgattggggttcagcaagattttgaatctcagaaagaagatttattaaatcaataccagtcaggtgatataacaaagagcctgtacgatgcagaaacatcagccttgcaggaagcattaaataaaaggcttgaaatccaaagcgattactataaacagcaagaccagatgcgtagtgactataatgcaggttttatttctggatttgctgaacaggcgtcggcagcaatggatttatattcttccatgcagcaagtaggtgcgcaaacattcagtagtttaactgatatggtaatacattgggctgaaacaggaaaattgaatgctcaggattttgctgcaacatttatacaatcagtcggtactgcgctcttacagtatgcagctgcacaggttgctatggcggctttaagcgccttcactgcctggataggagtaccttatgttggacctgcagtagcacctgcccaagctattgcagccgcagccgctgcgggagtattcatgactgctattggttcggctctacatggtcaggctcatgacggtattgattctgtccccgaaactggaacctggttgcttcaaaaaggagagcgtgtaaccactgcgaaaacgagcgcgaaactggatgccactctggaccgggtaagcaaagactctacaggcgggaaattgcccgatgtacatatcagtacaacagtaaatggcgatcctgaccagaggactctggctttgttgaaggagacacagaagcaagcggtacaggaggctctgaatttgagcgcaaatcagatagctacaggaaccgggaaaatcggcaaggccatgggctttggttggaatgccgggaggaagttaacctga

SEQ ID NO: 94386 - DNA, 1386 bp, Enterobacter aerogenes
atgcgcccaataaagcttcttactctcagcgtgatattcgccttaaccggctgtttgtcacttgctccggactaccagcgccccgccgcgccggtaccgcagcagttctctctcagccagaacaaactggttaccacgacggcgggctaccaggagaccggttggcgcacctttttcgtcgacccacaggtaaaaagcctgattagtaccgcgctgaccaacaaccgcgatctacggatggcgacgctgaaagtgcaggaagcccgcgcccagtaccgggtgaccgacgccgaccgctacccgcagcttaacggcgacggcagcaccacctatggcggcaagctcaaaggcgacaccaccaccagcagcgattatgccgccggcttgaatctcagctacgacctcgacttctttggccggttgaaaaaccttagcgaggccgaccggcagaacttcttcgccagcgaagaggcgcggcgcgcggtgcatatcctgttgattgctaacgtttcacaaagctacttcaaccagcggctggcggcggcgcagctacaggtggcgaacgacaccttgcagaactatcagcagtcttacgccttcgttgaaaagcagctgctgaccggcagcaccaccgtgctggcgctggaacaggcgcgcgggatgatcgaaagcacccgcgccgatatcgccaaacggcaaggtcaactggcgcaggccaataacgccctgcagctactgctcggcagctatcaacggctgccggacgatagcgccagcagcgcggtggacctgaaaggcgtaaccctgccgccgtcgctctcctcagagatcctgttgcagcggccggatattttagaggccgaacacagcctgctggcggccaacgccaacatcggcgccgcgcgggcggccttcttcccgtcgattaccctgaccagctcgctctctggcagcagcagcgagctctccagcctgtttaacgccggcagcgcgatgtggaacttcatccccaaaattgaactgccgattttcaacgccgggcgtaatcaggccaacctcgatctggcggaaatccgccagcagcagcaggtggtcaactatgagcaaaaaatacagtccgcctttaaggaggtggccgacgcgctggccctgcgccaaagcctggccgatcagattgccgcccagcagcgctatctcgcttcactaaatatcaccctgcagcgcgctactgcgctctatcgtcacggcgcggtcagctacatcgaagtcctgagcgcccagcgcgacattttcaccacccgacaaaccctgctggaactcaactattcccgtcaggcgaatgaaatcaccctgttcaccgctctcggcggcggctggatggaataa

SEQ ID NO: 94387 - DNA, 336 bp, Enterobacter aerogenes
atgaagatattagctattctaccatttgtttttctgatttctggttgtcctggtggtaaccctgcgccacaaccacgatctactattattaatggcgaacatctctgtttcagtacggatgagaaagatgttcttaattattatcgtattgaatcaaatgagggtggaaaatatgataccgttagatacggtgaaggtttaaatgtatcttatcctgatgattgtataaatttcaaatggaagagtggttattcttatgcagtttcttacggactaaatgggaaaaattatgtccacgaattttttattgatcgtaccgggacgttgacaaaatag

SEQ ID NO: 94388 - DNA, 1218 bp, Enterobacter aerogenes
gtgaagggtatgcagaagatcaagaggggtaagagcttcgctggtgttgttcgttatgcattgcagccaagagcacatcataaaagcgatccagtcgtaatcgggggcaatatgctgggtgactccgctcttgaactgattgctgaatttgatggcaccaaacagcttcggccagatgcccagaaaccggtatggcacaactcgcttcgcttaccagcaggtgaatcactaacgtctgaaaaatggtccagtttcgcagatgactatatgaaactaatgggattcagtgatactcacctccgttgctatgtcctacatgacgattctgccggtcagcacatacacattatcgcaagcaggatcgacctcaatggagggaaactctacttgggtaggaacgaaaacctcatcagcacccggatcatcggtgaactcgaaatcgctcatggtctgacagtgacaaaaacagccccttccattgcaccaaagcaaccgaagcggaaaagaatctctcgcaacgaacagatgctttcacaacggactggccttccctcctcaaaagaagctctccaacagatacttgataaaagtttggcagatacacctgaccttttaactttcacaaaacgactggaagaagcggaagtaacttggacagcgaatatcgcaagcacaggtaaaatgaacgggttctcattctcctaccgcgatatcgctttcaaggcatctaaacttggaaaggcatactcttgggtaaatcttcaaaagcagcttaactacaaccatgaccacttagaagctatacgaaccaacacaccaacaaaagaccaccctgctgttcctgctcccatgccaatacctgttcctgttcctgctaaagatgttcctgttcctgttcctgttcctgttcctgttcctgttcctgctaaagatgttgcagcaaccgatataccaagggaaagcataagtgaaaaaattgccgaactggaactacggctcagagaagacaaacgacacgaaatcgtacaaaagattcttcagaagaatgcagtacaacagcgaaagcatctcaggctttgtagctggcttccctttttacaacggctcatagagcttctcggaagctacggtaagagcattcttcacaacaaccctgcgagattctcaaaagtctatgcaacccgacttctacataaagaaaggaaaattcatttatag

SEQ ID NO: 94389 - DNA, 1875 bp, Enterobacter aerogenes
atgaacaatatcattttatttaagtctaaaaaacaacttacggcagaaaacaattataatgaattcataaaattttgtcgctatcaactatctgggctaacccaaactcaggattgggaacaatatgtttggaaagggtatgtaacctttagaaagataggggttgggcataaagtatttaactccaaagatgcaatgcatgaagattttctcgattttgcaaaagcatatattaggtatcagcactcattgaaacccttgaaaaattatgggaccataatgatggctttgagatgtctcgaacaggctcttttgcaggttctgagcaatgctctcatttataatgttacagccgttgtttttgatgaggcaatgcagatcggaagtagacattttgaaggtaacgttctcgctcaatgtgggatacagcttgaaaaattatcaaagtttctatgtgaacataaccttgtgaaatcaggatacatatcctggaaaaaccatgtgaagcagaaggtcaaaaacaactatcttcctgagatggaggactatcacagaaacgataagttaccggatgaatcagcattacttgccattgctgatattttttctaaaaatgatgagctactgagtccaagggataaattcaccagttcagtatttgcacttctgctttgctgtccgagcagaatttctgagattctagccttacctgctgattgtgagattacacaaaaagatgataagggtatcgaaagatatggtctgagattctattcggttaaggggtatggccctaatatcaagtggattccacaggttatgataccagttgcgaagaaagcgattaggagactgctttccttatcacaaaatgcaagggaattagctcaatggtgcgaaaaataccctgataaattttaccgacatgaactttgcccaaaagttgatgaaaaattaaagttgactgttgtacaggtttgtcatgcacttggctaccctctacatgatcgtaaatcatgcgttctaaaaattaaaagaacgagtttggatggtgggaaaagtttcttaaactccaatgattataactattcattgagtgacctatgggaaatgattagctcaggttttagcagagactttccttggtatgatgaagaaaaatctataaaatttagcaatgccttatgtttattgacccctcgccaactttctttatcacaaatgagcgatatctattcattttataaacctactaatggattcttttttagagacatacaagataaaacaagtcatgagtctggatttaaaaatattttcgcccgatacggatattatgatgatgagggtaaaccactacttattcgctcacaccaaccacggcacctattaaatacaatagcccattatggtgaaatgtctgagcttgatatagctaaatggtctggtcgtatcaatgtgaatcagaacagagtttataaccatgtgtcggaagaagatatgttagataaaattagagctattaaattgaacaagagtaattattgtaaaatggagtcaattccctcaaatgaattgacagttgattttgataacctgaatcaaggagcaattcacttaacagaatttggctactgtgtgcataactatttagttcgtccttgtactaaaatcaatgaatttatagaatatgataatgaaacactggacatgaaatcagtagatagaattagactgcaatctgtccgagagaaaataatgcaattaaagagaataactaagatcgcttatgaaaatggtgattatggtgcagacaaatggttgcaacaccatgaaaaaaatttggaaagaattaataagcttttgaataattaa

SEQ ID NO: 94390 - DNA, 1428 bp, Enterobacter aerogenes
ttgctgatccttggctttgcttctggtttacctctcgcgctgacctccggcacgctgcaagcgtggatgaccgttgaaaatatcgatttaaaaactatcggcttcttttctctcgtcggtcaggcctacgtatttaagtttttgtggtcgccattaatggaccgctacacgccgccgtttttaggccgccgccgcggctggctgctgacgactcagcttgcgctgcttatcgccatcgccgcgatgggctttcttgaacccgcaacgcagttgcgctggatggcggcgttggctgtggttattgctttttgctccgcatcgcaggatatcgtctttgacgcctggaaaaccgacgtcctcccggcggaagagcgcggcgccggtgcggcgataagcgtgctcggttatcgtttgggaatgctggtttccggagggttagcgctctggttggccgaccgttggctgggctggcaaggtatgtactggctgatggccgcgctgcttattccgtgtattatcgccacgctgctggcgccggagcccagcgacgtcattccggtgcctaaatcgcttgagcaggccgtcgccgcgccgttgcgcgatttcttcggtcgcaacaacgcctggcttattctgctgttaattgtcctttataagctcggcgatgccttcgccatgagcctgaccaccactttccttattcgcggcgtcggttttgatgccggcgaagtcggaatggtgaataaaacgttgggcctgttcgccaccattgtcggcgcactctacggcggcgtgctgatgcagcgcctgacgctgttccgcgccctgctgatctttggcttgctgcagggggcctccaacgccggatactggatcctctcggtcaccgataaacacctttattcgatggcggcggcggtattttttgagaacctgtgcggcgggatgggcaccgcggcgtttgttgcgctgttaatgacgctgtgtaacaagtcgttttccgccactcagtttgcgctactgtcggcgctgtcggcggtgggtcgcgtttacgttgggccgattgccggctggtttgtcgaagcgaacggctggccgacgttttatcttttctccgtcgttgccgccgtgccggggattttgctcctgcttctgtgtcgccgtacgctggaatatacccaacgcacggaaagcttcttgccgcgcacgcaataccctcagacttacgccctggcgctgcttatcctggcggtaggttgtttgatgctggcgatatggctgctgctgttggcgatgaacgcgctggattacacctctttctccttcctgcctggcctgctggaagtcgccgcgctgaccgctatcggtggtattttgctcggcgcgattctggactatatggcgctacgcaaaacgcagctgatttaa

SEQ ID NO: 94391 - DNA, 1083 bp, Enterobacter aerogenes
atgaaatacactcttccggcgttggcgctggccatcagcgtgacgttaggcggctgcgcgactcaccattccgctgccgttgcgcaaccggttgttaactctcctgcggctaacgtggcgcaaccgctgcagcgccagctagcggaagggttgtacgagatggcgctaagcccgcagggtgatgcgctgtacgtcgccagcgccgaaggctttaaagatgtgcagggcggggcggtttacaagctggatccgcaaacccttaataccatcggcctgacgcataccgatctgaaaaacttcgctttgcagctctctgcggatggtaaaacgctatacgtcagcaattcgcttgacggcggcatcagcgctatcgacaccgccaccggcaaggtaaaaaaccgcctgctgttcagcgagcgcaatgaaaaagggctcccctatggggcgcgtcagctgctgctgttaaataataccctctacgttggcgcggtcgccgacccggcgcaaatctgggtggttgacgccactaccatgaagctgaaaacgcggattaaaaacaccggtaaatggatgaccggcctgcactattctgcacaaaccgggcgcgtatacgccgccaacggcagcggtgaaattctggtgatcaacccgcgtaaccaacgcattgaacagcgctggaagccgctgggcgacaagccggcgctgctgcttaatatggccgaagatagcgacaccggtcgtctattcgtgaccgataactcgaaagcgaaaaccaccctggtgctggatatccacagtggcaaactgcttaaacagctcgaggtcggcgattcgctggcggtgcagttcaatgggaaacgccacgaaatttatatttcacagcgtgaatccggcaaggttatcagccttgacgacagccgctacacgctgaagaaaagctgggcgctgccggccaatcccaacagcctgctgctttccgccgatggtcagacgctgtttgtcaccgtcaagcagcccttcaataaagaccactccactaaaggcccggacagcgtcgtacgcatcgacctgaacgagcaataa

SEQ ID NO: 94392 - DNA, 630 bp, Enterobacter aerogenes
atgactgagtattatccggcggtgtttggtaatgatgcttttaactgcccttattgcggtgcttattcccggcagctttgggtacgattaaaatatgggcttcacgggaattgcgattcacctttcactttttcaaaatgtgaacgctgcgatgagaaagcttactggcacgaagcaacaatgatggtaccagcttctgcaaacatcgaaatgccaaactctgatatgcctgaagactgtaagtccgactatatggaagctagaagcatagttaatctgtcacctaaaggtgctgctgcgctccttcgtctgtgtcttcagaaacttatgatccacttaggtgagccagggaaaaatatcaataccgatatcaagtcgctcgttgagaaaggattacctcctcgtattcagcaagccgcggacatctgccgtatcgttggtaatcaggcagtccatccgggagaaatcagtcttgatgacgaaccacagtttgcacatggtctctttaagctactaaacatcattgtcgaagaccgtattaccagaccaaaagaaattgaagcgatgtttcagagtatgccctctaacgccttgaaagggattgagggtaggggcaaatcaaaagcatag

SEQ ID NO: 94393 - DNA, 429 bp, Enterobacter aerogenes
atgtcgggagtgttggcaagtacagccgctgctgttgggatcattgataaagctgtaggaattgcaaagaaactcgctgatggcggggagcttgatagggcaaccctaaaacttgagcttgcaaacctcatgacggagcttgctagtgtaaagatggaagttgttacaactcaggttttacttttcgaagccgaacagaagaataaacagcttgaagaacaattaaaggacaagcagtcattcactttttctgacggtgtttattggaaagaaggggatgatgttgcattctgtcctaaatgctttgaaactgaccataaacggatacataccatttttcgagattataaatatgttggtttctcacgggtggaagaggaaaactggtattgcagggtttgtgacaccacttatgagatagctaattaa

SEQ ID NO: 94394 - DNA, 195 bp, Enterobacter aerogenes
atgaaaaagattttactttgtgcgctggcactgctgccattggcggctcatgctttgacagttactttgatacttcaggatgtaattgaagcggcggatggtaagatctgcgtgtatggtgaccatctacgaaccgaaaccatcaagatccgcaatggtcaatgtagccatacgaaaattttccaaattaattag

SEQ ID NO: 94395 - DNA, 420 bp, Enterobacter aerogenes
atgagtgaatttatagtaaatatattgaaaagcgacttctttataaacttgttgatgagccttgccacaggcggctacatgggtattgtaatatcaaaagctgtcgccttttctaacattaaaaaggaagcgttacgcatcgttcgaactattgatacacttggaccaaatggtgcagtatttcataaaactgagaatgtcacgaccttgcttctattaagctctgaactcctgggtcttaaacataaaaaagcagcacgcattatcaacgatgtttttaccgatattaacaaggagatcttaagtccttccttagattcatctatcagggatgaaatcctcgctaatgctcaaaaaaacatcaggaacttacctgccagtaagcttgttctcttcaatccttttgacttcagtttataa

SEQ ID NO: 94396 - DNA, 315 bp, Enterobacter aerogenes
atgaaagtgactgatgaggctttattacattctgggtttacgccatcagatttgcagaagataaagaacaacattgaaagctacggcggaacgttaggggaagcgatccaagatctggcaaatcgattcagggttattttatggataacatcatcttgtctgatggtttttatcattttagtagtgttttctgcaaaagaaaccgtggttggtggtggaatatcaattctgatcgctatcggcattgttctatttatacagccgccagtcctgtcttacaaatcctggcggttcttgagaaaaaatagagtttaa

SEQ ID NO: 94397 - DNA, 807 bp, Enterobacter aerogenes
atggatatcatgctgtttaacaggggctggaatagaacctggtcagatacaatggtgaatttggaagcccggaaacttatagaaacagcaaacaggctgtcagcattccatctgcatgatggcctgacacggataaagttcgttgaagagataaaacaggtcgtagaaaaagaatttgcagcagcacggcgggccaaaacagacgaggaatgtgtcgcatgcatcaaaaatctgcgcgctgaaacaaataacctggaagaacaaggacgcctgttaagaaccagagtcgcgcagctttatgcaaagatcgagttcgttagggaaaataataaaatcgtcggatatgtgatttcagccattcaagttgtggtttctggaatggctattgctggcggtgttttgatggtttcgacaatgacgcctataggtatgctggctggagctatccttgtaatggatggaatcaatggtctctcaaaagaaatcattcctggtatttatggcaaggaatttaagacacaagggtttgtagctgatggtgctatggaaatggctcactttatggggttcaagccggaaataggactagcgctttataacacacttacattaggtgcgagtgtttatagcatcttcggattagcaagcaaacctgaagcgtggaggctttttagatggatgcctcgtgatttctatcggcaggttgatacgatgagtcgaccaaaaataacaatgaaaatagtaggctatggactcaaggctaaagttatttttgacttgttttccacagaagcgccataccattaa

SEQ ID NO: 94398 - DNA, 915 bp, Enterobacter aerogenes
atgttgcatgaacggcccatgagctatctgtatgaagtcggtattcaaggaggtattagacgggcagccgatattctggggatcaatccgtcggttatcagccgccagatagcgcaactagagcgaacgctggaactacccttactggagcgacaggggcgaaatgtagcgctcaccgaagccgggcgcctgctggcggaggattactgcgaaagccgtcagcgacgggaaaaactggaaagccaactaaaagatttacgtcacatgcgtggcggcaccatctctgtcaggatcggcggggggctggtcgccacttttatcgagtcggtcatgagcacctttgcgcagtcgtggccaaacgtgttcgttgatattagcgttggcaatatgcaggagatgcttaacgatatcgccaacggcgaagcggacatggcggtcgccttcggccccatcggcaacccggaacttaaacggcatagcttccagtggggccccatttgcgcagtggtcgctgtagagcatcccatcgcgcggcagccgacggtgaccatcgatgaactgacgcaatatcgcctgatcgcgctaacagataactttggcctgcagcgccatatgaacgccatgtttaaaacggccggacggcagttccacccggcctaccgctgcaacctcttctccaccgccatgagcctgagccaggcgggtctggggatctcttttatgactgagtttgccgctcgggaagcgatagcccacggtattttacgggctattcccatcgatcatcccattgccagcagcgcccagtgtcacttgctacgcaactcaaatcgtcgcttttcccccgccgcgcaccatatgtggcggttgctccataacgcctttcgcgacgcgcagcagggcctgacgatgtga

SEQ ID NO: 94399 - DNA, 1068 bp, Enterobacter aerogenes
atgatgacgccagaacaaaaatttgcccgctgggtaagggtaagtattgccgctttcctggtgatattcgcctggtttatcgttgccgatatctggatcccgctaaccccggattccaccgtgatgcgcgtggtgactccggtctcgtcgcgggtctccggctacgtctcgcacgtctacgtgcacaacaatagccaggtgaaaaagggcgatctgctgtatgagctcgatcccacgccattcattaataaagttgaagcggcgcaaatcgccctgcaacaggccaaactgagcaaccagcagttggatgcgcaaatcgccgccgctcgcgccaacctgcgcaccgcgcagtacaccgcgcgtaatgacaaagtcactctcgaccgctaccagcgcctgagcactatgcaaaacgtgtcgcaatcggatctcgataaggtgcgcacgacatggcagaccagcgaacaatcggtcagcgccctgaatgcgcaaattcagaacctgctgatccagcgcggcgagcgcgacgacaagcgcaacgtgacgctgcagaaatatcgcaacgcgctggaagaggcgcagctcaacctcggctggacccaggtgcgcgctgagaccgacggtatggtcagcaacctgcagcttaatccgggaatttacgccaccgccgctaccgccgtgctggcgttggttaacaacaataccgatatcgtcgccgactttcgtgaaaaaagcctgcgccatacggcggtgaataccgatgcggcggtggttttcgatgccctgccgggtaaagtcttcccggcgcacgtgaccagcagcgacgccgggattcttgccggtcaggaagcggtgaatggccaactgtcgcagcctgagcagtccactcgctgggtgcgcgatgcgcagcgcatgcggattcacgtcgcgctggatcaaccgctggataagccgctgccgaccggcgcccgcgccaccgtccagttgtacaatagcgacggccccttcgcccgcacctttgccggcctgcagatccacctggtgagctggttgcactatgtctattaa

SEQ ID NO: 94400 - DNA, 1413 bp, Enterobacter aerogenes
atgacccgttatcaacatctggccagcctgctggctgagcgtatcgaacaagggctgtatcgccacggcgaaaagttgccgtcggtgcgcagcctgagccaggagcatggcgttagcatcagtaccgttcagcaggcctaccagacgctggaacagcaacagctgatcgtgccgcagccgcgctccggctatttcgtcgccccgcgcaaagcccaggcgccggtgccgccgatgtcgcgcccggtgcagcgcccggtggagatcacccagtgggaccaggtgttgaccatgctcgatgcgcgcaacgataaatcgatcatcacctttggcggcggttcgccggacgtcacccaaccaagccttaagcctatctggcgcgaactgagccgggcaattcagcacaacctcagcgaagtgcttaactacgacgagctggccgggcgtcgcgaactgcgcgaacagatcgcccgcctgatgctcgacggcgggtcagtcgtcaccgccgacgatctactgatcactagcggctgccacaacgcattatcgctggcgctgctatcggtgtgtcatcccggcgatatcgtcgctgtcgaatccccctgctactacggcactatgcagatactgcgcggcctggggctgaaagccattgagatcccaaccgatccggaatccgggatcagcattgaggccttagagctagcgctggatcagtggccaatcaaaggggtgatcctggtgcctaactgcaacaatccgctgggatacatcatgcctgacgcgcgcaaacgcgcggtgctgtcccttgcccagcgccacgatatcgtgattttcgaggatgatatttacggcgagctggcgaccgaatacccgcgcccgcgcacgattcattcatgggatatcgacggccgggtgatactttgcagctcatttaccaaaaccatcgcccccggcctgcgcatcggctggattgcccccggccgctactacgatcgcctgctacagatgaagtacgccgccagcggcaccaacgtcccttccacccaactggcggcctgtaactttattcgcgaaggccattaccaccgccacgtgcggcggatgcggcagatctatcagcgtaatatggagatctatacctgctggctgcgggagtttttcccctgcggcatctgcgttacccggccgaaaggcggctttatgctgtgggtcgagctaccggagcaggtggatatggtctgcgtcgccaggcagctgtgtcggctgaagatccaggtcgcgccgggatcgctgttttcagcatccgggaagtatcgcaactgcttaaggatcaactgcgccctgccgccgattgagaagcataaagaggtgatggtcaaactgggggaagcggtgaaagtggcgatggagtga

SEQ ID NO: 94401 - DNA, 267 bp, Enterobacter aerogenes
atggaaaagaaacctaattggctagtaagaaacataaaaaaaatcaccgccgtgatttctatttacccttggatattattacttttagcaatgatgaaaagtggaccggcctatgcagcccttgccgctaccgctatggttattcttttatttatcgttttatccatcgttaattttattatttcagtggtaattattgttattgctgatatatcaacaccaagtactccaaaaagctacgtagcctatttctttgccatgaactaa

SEQ ID NO: 94402 - DNA, 2199 bp, Enterobacter aerogenes
atgactgatttaaaaattgccgttagccgtacatgtccaaactgtttttctacccagcgtaatattgtcaatactagcgaaaccaactttattgatgtggccgcggtagtattaaccctggaagatatcgaatgcggtaaactcgatgagttaaaggccaccggctataacatcccggtatttatcgctattaataaagaagaggttgtcccggccgagtatatggcttcggtgcagggggtatttgaacacgacgaaacccgcaacgacttttacggccgccagctggaagccgctgcgcataaatatgaaaccgaactgcgtccgccgttctttagcgcgctggtcgattacgttaaacagggcaacagcgcctttgactgcccggggcatcaggggggtgaattcttccgccgtcatccggccggtaatcagttcgtcgagtatttcggcgagacgctgttccgctccgacctgtgcaacgccgacgtcgccatgggcgatctgctgatccacgaaggggcgccatgcattgcccaacagcatgcggcaaaagtttttaatgccgataaaacctacttcgtgctcaacggtacctcctcttctaacaaagtggtgctcaacgcgctgctgaccccgggcgacctggtactgttcgaccgtaacaaccataaatccaatcaccatggcgcgctgctgcaggccggggcgacaccggtctatctggaaaccgcgcgtaacccgtatggttttatcggcggtatcgacgcccactgcttcgaagagcgctacctgcgcgagctggttggggaagtggcgccgaatcggaaacaggatgcccgcccgttccgcctggcggtgatccagttaggtacctacgacggtaccatttataacgctcgtcaggtggtcgataaaattggtcatctgtgcgattacatcctgtttgactccgcgtgggtcggctatgaacagttcattccgatgatggctgattgttcgccgctgctgctggagctgaacgaaaacgatccgggcattctggtgacccagtcggtgcacaaacagcaggccggtttctcccagacctcgcaaatccataaaaaagacagccatatcaaagggcaacagcgctatgttccgcataaacgtctgaataacgcctttatgatgcacgcctccaccagcccgttctatccgctatttgccgcgctggatatcaacgccaaaatgcatgaaggcgagagcggccgcaacatgtggatggactgcgtaatgaacggcatcaaggcgcgtaagctgatccttgaaagctgtaagcacatccgtccgtttgtgccaaaaatggtcgatggtaaaccgtggcagtcatatgaaaccgcgcaaatcgccgttgacctgcgcttcttcgagtttggcccaggcgaacgctggcacgcctttgacggttatgccgagcatcagtactttgtcgatccgtgcaaacttctgctgaccaccccggggatcaataccgccagcggcgaatatgacgccttcggcgtaccggccaccattctcgccaacttcctgcgtgaaaacggcgtggtaccggaaaaatgcgacctcaactccatcctgttcctgctgaccccggcggaagatatggccaaactgcagcagctggtcgccctgctggcgcgcttcgataagctgctcgacgccgatgcgccgctgcaggaggttctgccgtctatctacagccagcacaaagagcgttatgccggttataccctgcgccagctgtgtcaggaaatgcatgatctgtatgcccgtcacaacgttaaacagctgcaaaaagagatgttccgtaaagatcacttcccgcgcgtggtgatgaacccgcaagaggctaactacgcctatctgcgcggccaggtcgatctggtgccgctgccgcaagccgaaggccgcgtggccgctgaaggcgccctgccttacccgccgggagtgctgtgtgtagttccgggcgaagtctggggcggcgcggtgctgcagtacttcaccgcactggaagaagggatcaacctgctgccaggattcgcgccggaactgcagggggtttatatccaggagcacgatggccgtaaacaggtctggtgctatgtcatcgcggaaagcgagaaacaaagcgcgctgctgaaaggggaaactgtatga

SEQ ID NO: 94403 - DNA, 555 bp, Enterobacter aerogenes
atggccggggaacacgtcattttgctggatgagcaagataaacccacaggtatgctggagaagtatgccgcccacacgctcgatacccctttgcatctcgcgttttcctgctggttgttcaatgagcaaggccagttcctggtcacgcgccgctcgcttagcaaaaaagcctggcccggcgtgtggactaactcagtgtgcggacatccgcaacagggcgaaaccttcgagcaggccgtcacccggcgctgccacttcgaactgggcgtcgagatcgctgatattgcccccgtccacccggccttccgctaccgcgccgtcgcaccgaatggcatcgtcgaaaacgaagtctgcccggtttttgccgcacgcgtggtcagcgagctgcaaccgaatgatgatgaagtcatggattatcagtgggttgagctgccggaaatgttaagcgcgctggccactaccccgtgggcctttagcccgtggatggtgctggaagccaaaaacaaaaacgcgcgtcaggcgttgatagactttgtcgcgcgtttacgcgcgtaa

SEQ ID NO: 94404 - DNA, 783 bp, Enterobacter aerogenes
ttgtcaaactatctaaactggctgatgcaaaacaccctacccggtcaggtgttgctccagtcatggcttacccgcaacggcatagatcgtaagctttcatacctctatgtgcagaatggctggctcaggcggatcgcgcacggcgtatactgccggacaggccgtgaaccagactgggtggacgcggtttattgcctgcaaacgcagtgggaaaaaccggttcgcgtggcgggcctgaccagccttgcgctagagggccatgcccactataccgaaccgggtaaacctcaggtctggctcacacttccggcctacgccaaactgccgggatggttcgccgcctttgagccatccgcgacatttgtcacgctgtatacctctggcctcaccgtcgatgtaacacgatttacgacaacactgaatatcggtgaccgacagttaataggtagtgtcccagaactggccgcgtatgagatcgccagcggcgttcctgcattgatctcattcgaacatgccgatgccctgtttcaggggatgaaccttctcagcccgcgtaaattacagacactgctctgcgccagctattcggttaaaaccaaccgggtaatgctctatcttgcccggcgcaatgagcatccttattttcggtatctcgatcaaagcggtatagaaacaggtacgggaaagcggcaaatcgttcccggcggctggctggagccggattatcaaataaccgttccccgcgcatttaaaccggaaggagtcgaagatggatctgcgtga

SEQ ID NO: 94405 - DNA, 930 bp, Enterobacter aerogenes
atggatctgcgtgatagttatgcccgacaggtcaggctattaatggctaccctgccgcatgtggcaaaggagtcctgtttcgccctgaaaggcggcacggcaatcaatttgtttgtacaggatttccctcgcctgtcggtagatatcgatctggcgtataagacctatgcggatcgcgataccgatctggctgccatcaatgacgccttgatgcgtattactgaatcactgaacggcagagcggggatcaccgctatccggcaggagaacaaagcggatgaaaagcgcatcatcgttaacaccgctgatgcgaagataaagattgaagttagtccagtctggcgtgggctgctgttgccaccaacagaaatgccggtatgtgaacaggtggaaatggaatatggcttcaccaccatgaatgtcgtctcgcaggcggatctttacggcggtaaaatctgtgccgcgctcgaccgccagcatccacgcgatttgtttgacgtactgaatatgctggagaaaccgggcctgacgcgcgagatctttgacggttttctttgctatctggctggacatccccgccccattgccgagctgctgtcaccgaactgggatacaccgcggatcgcaactctttacgcacaggaattttcaggaatgacacagcaggaaacgtcgctgaagtcccttttatcagtaacgacattgctgccacaagcgctgcaatcgcatcttacgaacagagatcgccagttcttgctcagctataagcaaaatacccctgactggtcgctgtatcgctatcctgaaattcaacacctaccggctattcgctggaagctgcgtaatctggcggtactgaaggaaaagaacccggccaagtatgcgacggcggtgagcaagttagaaggcgttctggagcagtacttttag

SEQ ID NO: 94406 - DNA, 636 bp, Enterobacter aerogenes
atggatgcaaaacagatagctcaagggatagttgatggcttagcgtcgataccagaaagtctttatcttactgttgtgaggacgatagagggggctggtattgttgagcgacaatacaaaaggcgaaatgaaatcgaaaacgagcgattctttcgtgtattaaaaagtttatcttcgaatgaggcacctattaggcagttagttactattgttatatctgatttttataataagttagatgataatactaaaaaactaataaatgacagattaagttatgctgattctaaattgggaagtcgaattggagctcaggcattcataactcaatatctggcggaagggattattagtagattgagaatgagtaaactaatgcgacgagttactcgcgtagcatcagctgttaccttgaacattataatggttcaaggtttgatcgaggaagccgcgcgagcctctcgtagattaagaacccactatgctgaaacctactttaaggtttcacctatgaacctggatatggtttacttccttgttgaagcggatctggagccttatttgctttttattaatagccatccggtacagtgcaagggtattgaacatgaaatctgcaaaatcctcactcgctaa

SEQ ID NO: 94407 - DNA, 297 bp, Enterobacter aerogenes
ttgccatttgccgccgcgaagctcaaaaatgtagatatcagctatcactttgcaactgtttcgctcctggataaacggttgttctgtgctgtttccgagcacattgcgctcccgatatttcttctgcgttatgtctttcatggcgcagggagcgcacagagggcggccagtcgccgccaccctctgtactcccgggctctggccgccaaaatcgccacttcgtggtaccttcgacttatcccggaaggcctcagcgattttgaggccaccaacaccggcagtttcaggcagtattga

SEQ ID NO: 94408 - DNA, 1314 bp, Enterobacter aerogenes
atgctggaataccacaccgcgctacgcggtgctttttttgatattagccaacccgccgccagcgctgacgatatcgcccgctacgcacgatatattgatgatggcgtgctgtttatttacgccgggaagattcaggcgctactgccatggcaggaaggcgaagcattactcgatccacataaaggctatcgcgatctgcgcggtaaactgctgctgccggggtttgtcgacgcccatattcattatcctcaaaccgaaatgatcggcgcctttggcgaacagctgctggaatggctgaccacttataccttcccggtggaaagccagtttgccgatgaacggtacgcggcagatatcgcccgtttttttgtcaaccagttgctcagccatggcaccaccaccgcgctggtgttttgtacgcttcatcctgcgtccgtggaggccctgtttaccgaggcgttgcgcctgaacatgcgcctgctggccggtaaggtgatgatggatcgccatacgccggagtatttaaccgaaaccgccgaacaaagctatcgccagacccgcgaactgatccagcgctggcaccagcgaggccgtctgggctacgctattacgccgcgtttcgcccccacctccacaccggaactactacaagcagttcagcggctgcgggaggagtttcctgatacctggctgcatacccatctgagtgaaaaccttaatgaagttgcgtgggtaaagcagttatggccggagcatgagcactatcttgatgtttatcatcactatcaattgaccggagcgcgcagcgtcttcgcccacgggatacatctggcggagaaagagtggcggtgtctgcatgagaccggttcggcaatcgccttttgtcctacgtcaaacctgtttttaggtagcgggctatttcgcctgcccgccagctggcaacatcaggtccggatcggcatcggcagcgatgtgggcgccgggaccaccttcagcctgctgcgcaccctcggcgaggcctataaagtggcgcagctacagagctatcgcctgcgcgccagcgaagcgttttatcatgcgacgttgggcggcgcgcacgcgttacgcctggatgacaaaattggtaatttccagtcgggaaaagaggccgatttggtggttatcgacccggcggtgacgccgctacaaaagctgcgcggcgcacgctgtcatgatgtctatgagcagttgttcgtattgatgaccttaggcgatgaacgaaacattagtgagacctgggtcaatggccaacaggtatggtgtaacgaaggctga

SEQ ID NO: 94409 - DNA, 240 bp, Enterobacter aerogenes
atgtacgtggaattagtgtatgacaagcgcaatgtgcagggtttggcgggagctcagaaaatcatactgactgagctgacaaggcgggtacaccggattttcccggatgcagaagtgaaagttaagccgatgcagactaacgcgttaaacagcgactgcacgaaaacagagaaagaacggcttaaccgtatgcttgaagagatgtttgaagaatctgacatgtggctggttgaggaataa

SEQ ID NO: 94410 - DNA, 504 bp, Enterobacter aerogenes
atgaaattaaaagaactcactctgtataccccggaaaaaaaagaagcggcaaatgtcctttatctgaaggatgttaacggcaatgactggtatgagtcacaggagaaattcaaccctgcatgtttaaaaatcgcatacactgacgatggagttattcgcagtgctgactacgatgtttctgcgctgtggccggttaatatgtccgtagcggaagtggatactaaatctgtaccggacggatttaatattaatggtggatggcgatataacgggaactcgattgtcgcggtcccagtcaattatcaggcgaacttagaccagttaatagccgaggctgagtctgttataaaaattctggaacgtacggttcgtcttggaattgcaacgaatgaagaaaagaacagcctggttgcatgggaaaaatacagcgtattactgagccggattaaagcggaggatttgccagaggcaggacttccggaaaaacctgtcgctatagtatga

SEQ ID NO: 94411 - DNA, 1734 bp, Enterobacter aerogenes
atgtctgagaaatattacagcatactgacaaaccgcggaaaggcgcttgaagccgaatccgcggccagcgggaagccggtaatcctgaaggattttgtgattggcgacgggaacgggcaagcggtcacgccagacccggtaaacactacccttgttcatgaggtttatcgcggtgcaatatcttcgctggcggtttccccggagcaggataatcagtttattgcgcagctggtattgcctgctgatatcggcggttttaccgtccgtgaagtgggccttctgacagagagcggagaactgtatgccgtcgggaactgcgcagcaattgaaaaacctgaaagtggtgtgagtgtccaattacagtttcgcctggcggtaaatgaaaccgctgatattgaacttaaggtcgccacgggggacgggcttttcctgcgccaggatgccaatctctccgatgtggcggatgtggcgcagtcccgtaaaaatctggagctgggctctgctgctggtcatgatgaaggtgactttctgctaacctctggcggggcgatgaccgggcctatcgggtttccggtagacaacgacctgagcagctatgcattaaaccgtcaggctccatccagtatctgggacgtctacaagtcactgacggtcatgaatagttcatggaacaggattggtgtgattgactccaaaattcagtttgggcgggcaattctgaccatctatggctcaaacagtcatgatgtgggcatggccgtacagactggtttcgtcatgattgacatcatcggtacggacaaaaaggcaccgggctgtactcttacgtactatcggcctgacgaggctaaaggttcgtctatcgtgagtgcgatagtttcagctaatccgaatgatggcacgaagtatgatttgtgggtacaaacacaatcggcggtggctggtctgatgatggttggtcagcagagttaccctgatttcttcaagccgtatgacccaattgggcatcagactacggaaccgacacctgcaacaccaactggcgtcgtaaatctggtcacggctaataaagatggcaaagtcaatatcaaaggggaattaacggttgccgggaaaaccacctttaacgaggaggtttaccttgaagacaaacgcgtcatgattgatgaaccgaaccccggcgcagtttcaaatggtcagtatgtcacctcagaggcttattgctggcgtttattagggcgcgggggaacagcagacccggcaggtgcgaccgctaaactattttatcgtgaactggttggcactaacaatgaggtgattctccatattgttggctttggtaatgatgtcagcttcgcatttgacggtggtagcggggattttaaagcgcctggtagtgtgcgtgcccatgaagtgtatgccggtaatgcgtatttaaccggtgatggcaacatttggggcacccggtggaatgctaatggtcagtggttgtgggatgcaattactgagttgaataattccactttgaactacgttaactcgacgtttgttcgggatgtgcgtcaggggtctcccggaactatcgttttaaagcgtggtgcctggaactatgttcccggtgggtgtgcgtttaccggatggtacgtcgaaggtgacgcgccagttgatgacactattcaatacaaacccactcagatattaatcaacggcgcatggcgcacaattgcaggataa

SEQ ID NO: 94412 - DNA, 564 bp, Enterobacter aerogenes
gtggacgataaatttcgctccctgcttcctcctgcatcacttcaccaggagagagcacaggagcaggccggacgggaacagatccgggcccttgacactgatatggtgcggaaagtgaaaaatccggacacctgcccgctccatttgttgccgtggctggcctgggaattcgccgtggacttctgggatgacagctggacggagcaggaaaaaaggcaggttatccgtgatgcagcttatgtacaccagcacagggggaccgccggcgcagtgaggcgttcattgagtgccgtcagtctgccaaccacggttgttgaatggtgggaagaaacgccccgtaaggccccctataccttccggattgaggtttacagtcagcagggaattgatgctgcgctttacagcaggatccgccggcaggtggataaagccaaaaacttacgcagctggctgagtgggattgatgtcatcgctgatttgggctcaaacggtaactgctatgtgggtggtgccgtgaccagctatatcgatattgtgattgaggtaaaaacagaaaatgtctga

SEQ ID NO: 94413 - DNA, 921 bp, Enterobacter aerogenes
atggcaagcagctatgacgtgattaacctgtctgaactggccgttcctgatgccattgtggtaccggatgcggccactattttttctcgctggctggcacgtcttcgggcactcgattcgacgtttgatgcgctggtggagtctgacccaacgtacaaacagggcgaggttaatgcttatcagctgactctcgctttccagcgcgtgaacgatgcggtcagagcggtatttcttgccagtgctcaggggaacgatctggatcagattggcgcggcttttaacgtccagcggtttgttaccacgccagccgatcccgaggcggtacctcccgttgaggcggtactggaagatgatgatgcttttcgtgagcgtatccagttgtcctgggcgcaactgaatactgccggcgcgcgtaatgcttaccgtttttttgccaaatctgcgggcgctgacgttctggatgctgatgcctatggcccggagacgcatggccggccgggtgaagtggatgtgtatgtgctttcccgttcgggtgatggcgttgcaccgcaacccttgctggaaaaggttgcgtgtaccctgaacgctgacgaggtacgcccgctgacggattttgtcagcgtgaaaagtgccgagaacattccttatgcggttacggctgagctggaaatcccggatggccctgacgcgcagactgtgcttcagaatgcgataagggtggtgacgtcgtacaccgaactgtcgcacagaatcagaatgctggtgtcgctggatgcattttatgccgcactgagacaggcgggggtggtcagggtacggctgagcagcccggtcgcggatatcgagccggaagccgggaaggcgccgtggtgtaccgccatcaatgtgacccgaaaacaggaggcgacaggtggacgataa

SEQ ID NO: 94414 - DNA, 354 bp, Enterobacter aerogenes
atgaacggtgtgaactgccggactggcaaacgtctgtccggtgctgcgcatttgcgccagtcggtgagcgacatactgaatacgcctgtcggtagccgggtgctggttcgggattacggcagtgatttgtttgccttagtggacaatccacgtgatgacctcacccggttacggatcattgccgcgacggcatcggcgcttgccagatgggagccacggctgaaagtcacccgtgttttggtctcctttccggataatgattccgggtgcatcgtcgatatagagggaatcaataaagagaatcattcacctgtaaccactggaggcatacccgtttatggcaagcagctatga

SEQ ID NO: 94415 - DNA, 1116 bp, Enterobacter aerogenes
atggcgcagagtgtttcacccgaatatgcgccggcgttcagcgtcagcgcggaagggaaagatattacgcgagcgctgcaggaacgactggtggagctcaccctgactgattatggcggcgccaccgcgaaagcggatgaactgaagattacccttcattcggaaaccatggcactgccggccaaaggtgcccgcctgcgggtgggactggggtttaatgaccaactgaccgacaaaggctggtttgttgttgcgggggtgggcagcagtggcccgccgcggcgtattgaaatctatgcgacggccgcgccgatgaacgcccagaagcaacccggcgatgtactcagccagaagacccgcagctgggataacctgcgtctggccgacattgtcaaaacggtggcaacggataacgggttgatcgctcgcgtggccagtgagctggccgacatccatattgaccatgtggatcaggtggctgaatcggatgcgaatctgctgtccaggctggcccgcacctgtaatgccgtcagcaaaccttccggaggatactggctctttctgctgcagggcgcgacggcaaacgtttcaggggagcagactggcggtgtgaccgtgacaccggaagatgtttcaaactggtcctacagcgaaggggaacgtggtagttcgacaggaaaagccacgagcaagagtggcaagcctgccggcaagatcggcgtgcgttactacgatgaagtggatggtaaaaccaaaaccaccaccgtggatcacgatgggccgtctctcgccaacccctatacccaacctgcgaaatccaccgccgatcaacaggcaaaagccagaaaaacacaggccaggcgaaatgaacaaaaaatgacggtgaccgggccgtgtcgcccgaagcacattcccctgaccgctgaatcatcggtcaccacatcgggatttggttcccgtgaagacagggcctgggtggtggaatcgctggtgtattccctcacttccgccgggctcagttatacctggaatctggtggtggatattcataaaccgaccaaaccagcaaaaaaatccagcggcaaaggtaagaccagcccggattacttcggctaa

SEQ ID NO: 94416 - DNA, 471 bp, Enterobacter aerogenes
gtgagcgaaattattcctgtctttgaagatttcgggcagtcgcagtcttcttccattcggggaggtcaggctgcccgggtgatgatgatgcttggcgacttcgcgttctcgatagactccactgcgtacaaccagctgacccgggaagccagctggcgctggagtgagcaggagcgcatcggtaaacaggatcttctgcagtataccgggaaacccggccggacggtcagactggagggggaggcgcatgctatgttccgcaaaggtgtggatgcggtaaacgatctccatgaccttagcgaccaggcaaaaccgcaacagctggtcagcggtgaaggggatgtgctgggctggtgggtggtgaccgaattttctgactcgacgaataaatttctgccggggggcggtcaccgtaataaaagctggaatatgacgttaaaacattatgccgacgatttatcagacctgtga

SEQ ID NO: 94417 - DNA, 1689 bp, Enterobacter aerogenes
gtggccggaatcagccaaaaccttaaagccgtcatcacctttggcggcaacatcgacagctcctggggtcgttcggccagcggcctgcagaaaagcctgaaaggggtcgggaagcagtcagagaaactgacaaaggatcagtcgaagctcgccgccgaaattaaacgtgcgaagctggccgggcagagtattggcgatctgaaacgccggtacagtgaggtctcccgtgaaatccgtaaaacggaggcagaacagcaaaaactgaatgcgcagatgcagaaagcgcaacggctggccgcctttaagggggctggtaaggggctgtttcgccggggcctgggcgtcgccgggcaactgggcgggatgatggcaccgggtctggccattggcggcggcggggcggtggccactgcgctgggggcgttgatagcgccagccgccacaaacacggagacggcccgccgggccagtgtggcaaaaagctacggcgtggatgtgaccacattcgatgcgtgggacacactggcgaaaaagtacgatatgaacggggaaaatattgctgacctgtttgaagagtacctgcataaagccggcgagtataagcagaacgggaagcagggtagcctgcaggatgcttttgagaccctcgggtttaaagccggggattttgccgggctcagtaatatggctcagtttgacaaaattattgagcgggcgctgacccttaaggatgattcgaaatcgtcttttgcgctggactccctgtttggtggagaggcaagtaagttgctgatgctcctgaagcagtccgggaaaagttatcgcgatctgatggacgaacaacggcgatataacctggtcacaaaagagggagcggacggggcgatcaccggcagccgggccatcagcgacctgcagaccgtgttgtcttccgccatggcggagatttctgggcaactgggtaatgagctgtcacctgatattcgcaaactcacggatgatttagctgactggtttaagggcggtgggatccggcgtgtcgtgaattttctgcgccatgacctctaccccggtgtgctgacattcggtcagggggttttctttgtcgggaagattatttacgcactggctaaaaaactgtcctggcttctgcccgatgaaagggccgatctgcagggggtactgacctcactcggaaaagacgggattgatctcgcccgcttcagggcacaacaaaccgggcaggcagactggctcgaacaacagttgctggcccatcccgaactgcctgaacaggtgaaaaaatcgtacgccgagacccacggttatttcaagcgtgatgatgaagccttcaacaaatctctggaaatgtatctcccgcctgatactgatggtttaccagactggaatgcggcactgaaaggccctggcggcgctgcagctaatcaatcagatagtgggtcatctggcggagcatgggatgtgctgatgcagcagttgtccgaggctgataaaagcagccagacaccgcaatttaacgatcacagtgtcaaaaattacagtttcaccattaatggtgcgcccggacagagcgagcaggggattgctgatgccgttgtcggcgtcactaaaacggccccggcgtttgcgggaaacagcagcatgcaggatggagggtttaactggtga

SEQ ID NO: 94418 - DNA, 300 bp, Enterobacter aerogenes
atgagttttcctggcgaaacacgcgttattaccttttattcaccgctcacgctggatgatggttctgtactggaacaggtgtccatgcgggagccactggtgcgtgaccgtattgcgcattccaaggaccgcggcaatgacgaagagaaagaggcccgcatgattgcgcaattgtgcagtctcagtgagcaggatatctggaagctgaccgctgccgactatgcgcaactgctggacgccttcaacgtttttatgctcccgcccgccgagcgtccgaaaaagggctgctgcgggcaataa

SEQ ID NO: 94419 - DNA, 507 bp, Enterobacter aerogenes
atgagcgaaaaaaacacactacgcgtctggaccttcttccggcagggggtacgtattcagggggcgcatgaattcacaccgccggcactgtccatcgtcaaaaccgacctgcgcacgggggcacaggatgcgcccactcccgttgatgacggcatggaagcgctgacctgccaggtgaaattctacggcatcgacacggatatgctgaccgcgttcggcttcgtcagcggcaaccgtccacgttttaccgcttatcaggggtatctggcgaatggtaccgcactggggacgatcgaagagatagaggggtttgtcttcaacgtcacaccggacgcccgcggtaatgcaaacctgtctgaaaatgcggtgacggtcgatatcgccgtgagctattaccggcagaccagagatggtcgtgaactgtttgccatcgataccgagcggttttcgcgccgggttaatggtgtggatgtcctttccggcctggcggcaaaagtccggctctga

SEQ ID NO: 94420 - DNA, 1470 bp, Enterobacter aerogenes
atggcgaatttacatggtgtggaaacgatcgaactgacttccgggacggtcgcggtcatgacgatccagacggccattattggtctggtgggaacggcgccggatgcctccactggcacgcctgcctcaggaaccagcgggacgcccatcctgaataacacggtggattttgcggcaaccacgaccggaagaagtggcaacgtactgcgtgtggatgcgcaggcaggcctaccgccatccgaaaatcccgccgcggtaccgacaatggcggaatgggatgcggcgtcattaacgctgaaggtcacgctgggttgtgatgataaaggtgtactgacggcgactgctgccgatgtggtggcggcagtcgcggaagtgcaggacagtaaaatcagcgcgaaaggggacggcacagggctggtttcaccattcagccttcaactcgcgggtggtgaagatgagccttttccgctgaatacgccggtggcagttgtcggtaccaccatggtgtcccggctcggtgaaaaaggaacgctgaagcaggcgctgaatgaaattaacgatcagcgtaatgccctgacggtggtggtcagagtggctgaagatgcgaaagaggaggcacaacgggctgccgttcttgccgggatcggtatgttggcttctgcaaaatccgtgaccacctatcagccgcgcattgtgattgccccgggcttcagcgaggacgatgccgtgggtaaggcgctggagacggtggccgggaaactccgggctgtcgcttatgttgactgcgcatctggtgccacgctgcaggaagtggtgcagcgccgccagtcctatggggcccgagtggaactgctacgcccccgcgtgcaggtcagcgatgcgtcaggccagctggtataccgaccctattccgcttttgcggcggggctgcgtgcgcgtatcgattatgaaaaaggctggtggtggagcaaatccaatcaggacatcaacaatattctgggcgtggagcaggttgatgaatttatcctgggggaggaaaactgtgatgcgaacctgctcaatatgcagaacgtctccaccatcatccgccgtgccggctttaaacactggggaaaccgtctgtgtgccaccgatcctcagtggcgtttcgagtctgttcgccgtaccgccgatgttatcgaggacagtattcaggaatcgatgctggaatatgtggatcgaccgctggaccgggagaacgccgacgacattattggcaccatcaatgcgtatctccgccagctggtcaatcttggcgcgattttcggtgggcgggcctggctggatgaggagctgaataccgcggaaagcatggcggccggcgtcctctatatcaactatgacttcggtccgaaatcgccgactgaacttatcagcctgcgcgtccgggtgaataacaactatgcacttgaggagatgctggcagcatga

SEQ ID NO: 94421 - DNA, 624 bp, Enterobacter aerogenes
gtgagtgaaattgagggcgatttacagcggcgcctggcgaatcttgtgcggcgcggcgtcatccactccgtgaaacatgacggcattccgaagtgccgggtggatctgggcgatatcatcaccacatggctgccgctctgtcagggattttccggcgctaaccgggcggattccaatccgtatgcggtgggggatgcggtcacggtgctgtcggaggcgggtgagctgaataatggccgggtgtttcccggctggaataccggcgggcttccggtaccggaggggagcgacagtgaacatatcacccgctatggcgacggtactgaaattcgttacgaccgtgccgctcatgccctgaccatcaccctggtggagggaggcacttacaaaattaccgggaaaggcacgctggacggtccggtagaaatcactgacaccctgactgttcaggggaaaacgcagataaatgccgatacgaacgtggccggaaatatcggtgccacacgggaaatttcggacggcgcggggaaaatgagtgacatccgtagcacgtttaaccgccacgaccatgaagaaaatggagacggcggcggtaccacaaatccccctaatcagaaaatgtga

SEQ ID NO: 94422 - DNA, 555 bp, Enterobacter aerogenes
atggcggaacctttattactggcgcagtaccatgaggcggtgattgcggcactgaaaaaaatcagctgggtacgtgatgctgatgcgtatccggaaaagaatatcccgcgattctccggtctggttacgcccgcggtgtatttcaccattaacagttgggagcaggccgggggaaatgaggggcagctcaatatcgggctgacctgcgatctgtttgtggtggtggatgctgccggggcggggatatccagtcccgaaatttttgtccgcacggcggcggcagacatcacccagtggattgacgggcagcagtttggcctggggcatattgagcccgcggtgtttacgtccgccgaacgcgatgaatttgatccgcgtatggatgattacctggtgtggcgtctctcctttacccagtcggcggcctttggtgtcgatccgtttgcgcggtttaatgctccactcaaagccgcctggcttggtaaagcgccagatatcggtcgcgcgcatgtggacgattacaaactgatttatgaggcaacatccggtgagtga

SEQ ID NO: 94423 - DNA, 657 bp, Enterobacter aerogenes
atggcccgtgaaaccagactgcgacgggatttgcccgtcgatatcgatgttgatgctatctggcgtattgctgaaaaagtgggggcgacacaaaagcagtttcgggcggcttattcccgcgcgctgcggcgaacggcggcaacgttacgcaagaaggcgatggctgatctgaaaacgggactggctccccgcagccttaatctggtccgccctcgtctgttgtcattccgccttgatcgtggctcacaactggataatttccgtctctggtttggtctgaatgccatcaaggtcaaagacctgaaggggcggattaatggccgggtaagaccccaccactcccgacgggataaatccacggggcggtttattaaagcgcgccgccaggctgaaaacgcgggatttacacccaaaggtagcctactgtctccccggacgtttgaaaacggggaagtggcccgctcccgcagggagaaccggcgaacggtggtgattcgcgatcctgacacccggcggacccacgaggcggaaatcgatatttatgagccgatgctgaactacattgaggataatgcctttgcggaggcaatggagattttcatgcatcactttgaaagcgatatccgtggccgggtaaaagcgaaaatatcagtctga

SEQ ID NO: 94424 - DNA, 357 bp, Enterobacter aerogenes
atgaaccgctttcgtcaacgcctgttaaacgcggatgcccggatctcccgggcatttgcggaggaaattccggccctgcttaccatcggtaaggaaaaacgtccggtggtggtgattttcgaatcgccggatgtgcctgtcagcgtgccgggcggcggcgaaattcaggatcatgctccggccttcagcgccatgacggcggatattcagggactcgcaaagcacgatggtgtggtggtgaacggtatgccgtatcgcgtgacccatgtcgggacggatgaagaagggcggacccgggtgacgctggcctacggtgagccgggtaagccacagccggaaatcgacaagtggagttga

SEQ ID NO: 94425 - DNA, 336 bp, Enterobacter aerogenes
atggcaaaaaactatcagcaggatggccggacaatcgattttgagaataccggtgctgaggatattcagtcgggtgatgctgtgctgtcaggcgggctggtgggggtcgcccacgataggatcccgacaggttcgtggggggtactgcacactgccggtgtgtttgttctgcccaaagcggcggaagccgtcaccatcggacagaaactttacttcgccgacgggaaactgacggtcgctgcgggtgaggcagctgccccgaatccccttgccggcaccgcatgggcggctgctgacgtgggggacgacgctattcctgtacggctgggttactga

SEQ ID NO: 94426 - DNA, 2115 bp, Enterobacter aerogenes
atgcaacggcaaaaacgagcaatacccggcatgagccggacgatgatgattaatccccgggccagcctggcgggtgtcgatgcggcaaacggtcagtgctggtacgaaattcgtgcactggccgccgggcgcgttgaaatcttcctttatgacgtgattggcggctgggggattacggcccagcagttcgtcactgactgcaaagaggcgggtgtatttgaggccagtgcggtggctttgcatattcacagtcctggcggcgatgtgatgcagggctttgccatctacaacacgctgtcgcggctgaaagcgaaggtggacatctgggtggatggagtggcggccagtatggcgtcgatgattgtctgcctgcccggcgccacggtccatatgccggaaaacgcctggcttatggttcacaaaccatggggtggtatcgcgggtgattctgacgatatgcgcgactatgccgactggctggaccgaaatgaagccctgatgctcagtgcctacatgaacaaaacaggactggggcaggaagagctggaggcgatgctgaaagcggagacatggcttaacggcgccgaggcggtggaaaaaggtttcgccgatacgcttgaacctgaactgcaggccgcggcctgtgtgaatgaaaataaactgaaggattaccagaatatgccagaacagattaaatccctttttacgccgcgcgtcgaagctcctgtgaaccagccgcagcaacaggctccggttcagcagccagcgccgctacaggcaacccttaaccagccgcaacagcccgctccgcagatggcaaatatcgatatttctgcgctggctcagcaactgcagctgcagatgcagacggcgaacgcggagcgcgtgaatgccgtttctgctgtgtttgaggcgttccccaccttcgcgacgctgaaagcggaatgcctggccgactttacctgcaatgctgaaaaagcccgcgataagctgctgcaggcactggcggcaggcactaccccgagtgcaggtccgggcgcgattcatctatatgccggcaacggtaatctggtaggcgactccatccgcgcagcgattatgacccgtgccggatatgcccagtctgaaaaagacaatgcctacaacggatacactctgcgtgagctggcgcgcgcctcgctggtggatcgcggcattggtatctccgggcactcgtcacctcttgcgatggtggggctggcgtttacccacagcagcagcgattttggcaacatcctgatggatgtggctcataaagccgcgctgatgggctgggatgaagccagtgaaaccttcgaccagtggacccgcaagggtacgctgaccgatttcaaaaccgcgcaccgcgcagggctggattctttccctacgctgcgcaaagtgcgtgccggggcggaatacaaatacgtcaccctgaaagatcgtggtgaacccattgcactggcgacttatggcgagctcttcagcatcgatcgccagaccatcattaacgatgatatggatatgctgacccgcattccaatggcgatggggggcgctgcgcgtgcaaccgtcggtgacctggtctgggctgtgctgaccagtaacccaaaaatgtcggacggtaaaccgttgttccatgccgaccacggcaacctggtctcttctgatctcagtattgaagggcttgatgccggccgtcaggcgatgctgttacaaaaatccggtgagcgccgtctcaatattcgtcctgcctttatgctgacgccagtggcgattgaatcccgtgcgaatcagttgattaaatctgccagcgtaccgggtgctgatgctaacagcggcatcaataacccgatccagaactttgtgacggttctgtccgaggctcgcctggatgacagcagcccgacagactactacctggcagcggcgcagggtcgtgacaccatcgaggtggcgtatcttgacggcatcgatacaccctatctcgaacagcagcagggcttcaccgtggacggggcagccttcaaggtgcgaattgacgccggtgtggcgccgctcgactggcgcggactggttaaagccaccaaaaaataa

SEQ ID NO: 94427 - DNA, 1521 bp, Enterobacter aerogenes
atgggcattcttgaaagaacactgggggccatttcccccgggtgggcagcggcacgcgcaagggatcgtctccggctcaatgcgtatgaagcggcaaacccgtcgcgcctgcacaaagcgaaaaaacaagcccaggcagcggataccgcggtgtttgcagcgggtcagtctctgcgggagcaggccaggtggctggatgaaaaccatgatctggtgattggcctgttcgacaaaatggaagaccgggtaattggtgcccacggcatccatgtcgagcctcagcctctcgatctggagggtaatcttcattctgattttgccgggcagctttccgcgctctgggcggagtggtctgtgcgccctgaggtaaccgggatgtttacccgtcctgaggctgagcgtctgttattacgttcagcgctgcgtgacggcgaggtgttcacgcaactggtcagggggaatgtaccgggcctgcagcatgccacctccgtaccgttctcgctggaaatgcttgaagcggattttgtgccgttcaaccttaacagcacagcaggccagcagattcgccagggcatcattgtgaacgactgggggcgtcccgtcgggtatcgggtttacaaataccacccggcaaacatgacgcgcttcagtgctgaactgaaaacgatctccgctgacaacatgcttcacctggcacagcgtaagcgcctgcaccagctgcgtggcatcagtctgatccatggggtaattacccgcctttctgatatcaaagactatgaagagagcgaacgcgtggcggcacgaattgctgctgcgctgggcttctatatcaaacgcggagatgcgcagtcgatgggcgatgagggggagttttccgcgcccggcggccagcgccattacgatatcgcgccaggcatgatttatgacgaactccgccccggcgaagacctcggcatggtggagtcaaaccgtcctaacgtccatctctacgaattccgcaacgggcagatgcgggctgtggccgccggtacacgcggcagttactccagcattgcccgcgactataacggcacttacagctcacaacggcaggaactggtggagagcttcgaagggtacaacgttctgcagcagtggtttgtcggccagcacagccgcccggtttaccgggcatggctggcgatggcgttactaagcggtgtcgatgtcccgccggatgtggatcccaaatccctctataacgcgctttatctcggcccggtcatgccatggattgatccgggcaaagaggcgaccgcatggaaagcgattgtacgtggtggtgcaggtaccgaagcggagtggacgcgcgccagaggccagaaccctcaggaggttaagcgccagcgtctgcgggaaactgaattcaaccgtcaacacgggctggtgtttgattctgacgccgccaatgacaaaggagcgatgccagatgcaacggcaaaaacgagcaatacccggcatgagccggacgatgatgattaa

SEQ ID NO: 94428 - DNA, 216 bp, Enterobacter aerogenes
gtgacaaaagaagatcttctaaaaacgctgatgatggtgcggcaggcctatcaggactcccttgacggcaaaagtatctccttcactggcgtgaacggccgcgccattaccaatcacgatccgaaagcgctgcgcgaagagcttgattactgggagcgacgctggcgggcagccaataaccgcggtggttcgtacaaactcgctaaatttctgtag

SEQ ID NO: 94429 - DNA, 2121 bp, Enterobacter aerogenes
atgtcggtacaggccacggcgctgtcacttaaaaaggatactggccagttgattcaggcaccccgaaggatgccggttgccgaagcagtggcaaaatttatgcgcgtaccgacgtccggtggtaactcggtaccgtgggacccgatggtagcgccgtatgttctggaaccgatgaactgcctggcgtcccgtgaatatgatgcggtgatatttgtcggtcctgcgcgaacggggaagaccaacggtctgattgatggctgggtggtctacaacattgtctgtgatccgtccgatatgctgctggtgcaaatgacgcaggacaaagcgcaggagcattccaaaaagcgccttgccagaacgtttcgctgcagtcccgaagtcaaaaaatgtctcagccccagacgaaatgacaataacgtacatgataaatatttcctctcaggtagcttcctgaaaatcggctggccctccattaacgtcatgtcatcgtcggattttaaatgtgtggcgctgacggattacgatcgcttcccggaagatattgatggtgagggcgatggtttttctcttgcctccaaacgtactaccacctttatgtctgccgggatgacgctggtggaaagttcccccggtcgggatatccgtgacagtaagtggcgtcgccagtcaccccatgaggcaccgccaacaaccgggatcctgtcattatataaccgcggcgatcgtcgtcgctggtactggccatgcccgcactgtggggaatattttcagccggcaatggaggctatgatcggctaccgggatgaaccggacccggttaaagccagtgaggcggcgcacctgctttgcccgcactgcagcggcatcatcaccgccgataaaaaacgtgagcttaacggcgtcgggatctggctacgtgaggggcagagtattgatcgtgacggtgatattaccggcgagccgcgccgttcacgaattgccagtttctggatggagggccctgcggctgcgtaccagacctgggctcaactggtctataagctgctgaccgctgagcaggaatacgaagccacgggcagcgaagaaaccctgaaagcggtgattaacaccgattggggattaccgtacctgccgcgggcagccagcgaacagcgacgctctgatgttctgttgcagcgggcggaggattacggtaagcgcctggtaccgcctaaggtgcgtttcctgctggcggctgtcgacgttcagggtggcaaaaagcgccgtttcgtcgtgcaaattattggctatggcgaaaacggtgagcgctggctggtggaccgttacaacctccgccagtccctgcgttgtgatgagcatggtgaggcagagcctatccatccgggcgcatatccggaggactggcagttactggtctccgatgttctggaaaaaacctatgcgctgcagtctgatccggtgcggcgtatgccagtgctggcgatggctgtagacagtggcggtgaagaaggggtgaccgataacgcatataaattctggcgccagtgccggcgcgatggactgggtaagcgtgtctacctgatcaagggcgacagcgcaaagcgccagaaaatcattactaaaacccacccgaataataccgaacgcagtgaccgccgggcagatgcccgcggcgaggtgccggtgtatctgttgcagaccgacctgcttaaggaccagctcagcaataacctggacagggaaacacccggagccgggtatatccattttcctgactggctgggtgaatggttctatgaagaactgacctacgaagagcgcggtgttgacggtaaatggcgtaaacccggtaagggtgccaacgaagcctttgacctgttctgttatgcccacgccgtggcagtcctgcgtggatacgaaaaaatccgtgactgggaaaaaccgccagcatgggctgagacgcaggatatgaatccaaatatttttgaaggggaacgaccccgggagataaccgtgaaaaatacaaaagccgctcagtcgcctgttcccgctgagcctgaacagaaaaagggtctgtccggcagctggctggggtcttccggtaagggaggctggttgtga

SEQ ID NO: 94430 - DNA, 495 bp, Enterobacter aerogenes
atggaccatgaattaaagcggctgcaacttaacgtcagtcagctggctgcattgtccggcgttcatcgtcagacggtgtccgccagattaaagaatgtccgtccggcaggtggcaatgacagtaacctgaagctgtatggcctgacggatgttcttgctgagctgatgaaaatgcctgcgccggtagcggaaggcgaaatggaaccgcaggatcgaaaagcctggtatcagtctgaacgtgagcgtctgaaatttgaacaagaggttggcgaactgatcccggcgtctgatgtggctcgtgagtttgctgagatggcaaaagccatggtgcaggttcttgagacgttaccggacattcttgaacgtgattgtgcgctgaatcctgcggcggtttcccgcgtccagtcgattatcgacgatctccgtgatgaaattgcccggagaatcatgagtgacgaagagaaagcagaggagggcatcccggaggaggaataa

SEQ ID NO: 94431 - DNA, 1293 bp, Enterobacter aerogenes
atgagtaacgtttttctgcctaatacaatgatggggactctacgctataaaagggtgtatgagtttttcgaagaacctcgtttcttttcagcagaaaatgaagttagttcattatttgttgtttactggattggtgaggacgaggatgccgatagttggtatgttatccctgtatctccaacgcgattggagttaattgaaagaaaaagaattgatttacgttcagttttaattgatcaggaacaatcatttttctatgaggtacgcgccccttatgatcgagaggttgcgcctacatggagtgttaaaggcgtagatgccatcaatgatattgctttgccagctcagggactgtttattagctctgtggttcctgttttagagaatggtcgaatcggtgaggcaattaagtattccacgcatgagattcatttagaaaaaagctcaaagaaaagcgctggaaatttggtgctaagtcacgtttcgaatgtgtgtgatagctttagtgcgttatatgatagtttactggagtatagcggattaaaagataagctacgtccagtagatgctcgtcctggttcgtttatcctttcattccaagctgaaaagctgaacgcctatgaagagattttacgcgatttgagcgctcttattgaacgtcgtgctgatatagtcgatttcatagaaaacaatgggatagatatccaagccttttctgatttgcttcagtctattgtatcgactggaacaaatatggaattaaaaagcaatcagactggtgaggttatatttttgctgactaaagcaggagctgagttctatcttaggttaatcagcaggatgtctgcacttgcagttagtggtcatcaaattccgcaagcagatactttagaaaaagtttttaaagtagttgaagtcaagtggagtggtgaaccttgtactgtagagaatacaggtttgcaagaaagacacgtgtattattacctacatgctgcaaaagttttagggttgctgaatgctaatggcaatgtaactgcgatggggcaaaagttaattcaatctggacaagagaacaaatataaaattgctgcgagatgctttgaggtgagccatattggttgggcttggattaactggtcagaagttgagaatttatctcaaatagacccagatacagctgagaaatttttacttgaacagtgtaattcattgagtaaagacactatagccagaaggtcacgaactcttaggcattggggtaaagagcttaaggaaaaatatactccgttctga

SEQ ID NO: 94432 - DNA, 564 bp, Enterobacter aerogenes
atgaacaagattctcgttgttgttgggatggcagccgtcattattatcgcggtcctctgcatgctgctggcccgcagcaatgctgcgttgaccacgtccgagagtgacaaccggatattacgcagtgataacgcgctacaggcgacgctaataaccacacaggctttcaacttcaaccggtttaatcaggctgcagaaagcgccagtcgcttaaattctctgattgatgcgggtgccgaaaagaccgttatcgaataccgggagattctctatcgtgaaaaaaactgtgatcttactgtgcctgctgatatcgctagtgggctgctcaactacgcgaaccgtttacgtgccagcgcaatgtactccgattccggggacgctgacacagccggtgatagtcccgttgcctcccgcgcgctgacgtactgccaggcagttctgtggattaatcctttactgtcagccattgaaaaggcgaataatcagttgagtagtatacgggagctcgaacaaagcagaggattagagctcagaaaaagcgtgaggcctaacgtgcggttttaa

SEQ ID NO: 94433 - DNA, 534 bp, Enterobacter aerogenes
atggccaacctgaaaacgaaactcagcgcggctatgttgggattaattgcagctggtgcgtcagctccggttctaatggatcagttccttaacgagaaggaaggaaacagcctgaccgcgtaccgggatggcagccagggtatctggactatttgccgaggtgccacgcgtattgatggtaaacctgtcacgcagggaatgaagttaacccaggcaaaatgcgacgaggtgaatgctatcgaacgtgataaggcgctggcgtgggttgaccggaatatccgcgtaccgttgacgcctccgcagaaagtcggcattgcttcattctgtccgtacaacatcggccccgggaaatgcttcccgtctacgttctaccagcgcatcaacgccggcgaccgtaaaggcgcatgtgaagcgattcgctggtggattaaggacggtggaaaggattgccgcatacgctccaataattgctatgggcaagtatcccgccgggaccaggaaagtgcgttaacgtgctgggggatagatcaatga

SEQ ID NO: 94434 - DNA, 1335 bp, Enterobacter aerogenes
atgcaagaaaccctatcatttttagatcgcgatgagtttcaaaggaaatctattgctgaaaatattgtaaaactactcaaaccggaaatcgatatttcaccacttgtgatagatggtgactggggaacaggcaagactgaattcagtatcaagctaaaaaatcttatccttgagcaagagcctaaatcgaaggttatctacattgacgcttttaaaggagatcatgcagaatcacctttacttttgataacatccgcaattgcccggactttgccagaaagggaaaagcaaacattcataaagaaagcacttcctgcaattagatttggtatgaaaacagccttaaaagcaggtgctggttgggtattgcgtcaagaaactgacaatatggcagatgaattccaagacgcgataaaaaaagccagcaacgcggcaattgacgggactgttgaaaacatcttagaagaccacattgaagcagagaagaacataaattcacttaaggcttgcatagaagagatttcatcaaaatataaaaccgtaattatcattgatgaactagacagatgtaagcctaacttttcaacatcaatacttgaagtaataaaacatattttcgacacacagaacgtttacttcatcttggttaccaacacaaaacaactcagggcatctatcaatcatatctatggttacagccttgactctcaaaaatatcttgataaattcataaaatacacaatttcgctacccgatacatataaaaatggacgttctgaaagttgtaaaacttccgtcacttactggttacaactagctaaagatagcccatccttatcatttatagaaaaaaacatcggcgaaggcgttcggcaattaattagccagacaaatctctcactgagagaaacgcacacatacgcaagaaatttaaatatattccaaacgcttgaaggaaatagattcaatgaaaacacctattatatctatagactcattttcataactgcagtatatatccattgtttcggggataaaaacatactgaaaaacgaattcacttctgaatcaattgataaattagccgaccttttaaaggtggattcaatcccatattcatttgaaagaacatctgatgtatctagaataacaataatgttctatggattgataaaagacagcctatatgttaaccctcgattcgcacctaaaaacgaagttgaattaaaacaatttgacgatctttatcaaagattcgatgactcccatttccttaactctacagttaaaagcagagttaatgatttcattcaagagatgtccttcataaaataa

SEQ ID NO: 94435 - DNA, 366 bp, Enterobacter aerogenes
atgcgtgacattcaaatggttttggagcgctggggtggctgggctgcaagtgatagctctggggttgactactctcccatcgcagccggctttaaggggcttcttccacaaacaagtaaaactcgtctttcatgcactgatgacgatgcgctgattattgagggatgtttggcgcggcttcaaaagcgtaagccctatgagcattcgctcttagttgcacattatctttatggcatctcaaagcggaaaatcgctaaagctcgcaagaaagatgaaaagctaatacgcattgagattcagatggcagagggttttatcgatggttgtctgagtatgttggatgtgagacttgatatggatgcatag

SEQ ID NO: 94436 - DNA, 285 bp, Enterobacter aerogenes
atgtatccggattacgttcagatagaaatgccatcgctattctgccaggcagatgcgacatggattcaggagcagttactgcagttaccgctgtctctcagacgaaagatagcgctgaagtactcagaagtttacgaggttgaatttaacgcagagcccgtttcataccgtcaggagaaccgggcaaggcatgaagctaatacacggcttcgactgttcgtgagaaatcacggcagggcattgcaggggtatacgactcagccacccctcgccggatcgcagtag

SEQ ID NO: 94437 - DNA, 678 bp, Enterobacter aerogenes
atgtcaacagcaaaaaggattagggaacttctagatataaagggatggagcaaagcagaattgtctcgccgcctgggagtcagcgcccaaacggtggtgtactggacgaaaggcacaaccgtgccaagaggtaagcatttagctaaactttctgaactaagtggctacccccaatcttggttcttaggagaggaacaaactccgtcattcctatcttcatctaaagttcttgaagaaacaaatagcgtaaaatttaaggtgttagacgttgagtttagctgtggtgatggaaccaatgttaaaggcgattttatagatgttgtacgctctattgagttagatccagaatatgcccgtcaagttgtaggcaatcgcccattcaagaacatagagataggtaatgcccgaggagatagcatgtcgccaacaatagcccctggcgatcttttatttctcgataaaacaataacttattttgatggagatggtatttatgccttttgctttgaaggtgagtgctatgtaaaaaggctacaaaaaataggaagcaagatagttgtattgtctgataatggaaattatcagccttggagcattgagaaggatgctcttaacgcgctctatatccaatctaaagttatctcttctgtaccattcaacataaatagatttggttag

SEQ ID NO: 94438 - DNA, 420 bp, Enterobacter aerogenes
atgaaaacgcctttaccaattgaaatgctggaagatgtatcagcagaaattattgagaatacttctctccttgagattatttatcgcaccgctgatatggatcctgaagttgataactcagttgcctgtttaatccggtctatgcagaaaacgcttgaaaaagctcacggatatatcgaaatgctggcttctaatcctgcccccccaaaacagggaaaggatgagagcgatattgcagatgatgtttttgatgttgtggttacggctaaaaaactcgaagagcttgcgcatatatatactgaaaattacttcacagatgccgacagtgacaacccggcctgtcatatggccgctgttatatatgactactcgatagaggtatgcaaagaaatccaaaatatcgaatcgaaattagcttaa

SEQ ID NO: 94439 - DNA, 195 bp, Enterobacter aerogenes
atgttaagcaaagatagttccattgaaacagccaaaaatacagctgataacctgtatcaactgatggaattaattaacactaacatcattgatatggatatcgagcaaatcatatcgctttctggcctctgcttagatttatcagcgcaagtttcaacgtggatggatgcggaatatgaacgccgtgaaaaatag

SEQ ID NO: 94440 - DNA, 210 bp, Enterobacter aerogenes
atggaaccggatatagcggcagtaacacacaacaaaatacaagtagtgctgactattgaaaatggtcaggtcattgatactagaaacgtccgcgataacgaattaatcgcgagcatggatacgtttttctggatggcgaagaaagctggctatcaggtcattcctccagcgccgggggttagccatgctgacagccatacgcattcctga

SEQ ID NO: 94441 - DNA, 405 bp, Enterobacter aerogenes
atgatcgacaaccgcaccgccagcgccatcgacccggcactacagaaacatgataccccagtcggcccgctgttcgtcgctcaactgcacggccgcatgaagaaatgcttcagccgcgatacagcaattcggtacctggcatttttcatgacttcccgagcattcgctcgctctggctttcaacaaagacacccaatgattcggattgaccgcgacgacatcgaaatctggcgtgatggggaaacaacggatcaatacagattagtccatcagcgttgtgtccgccgcatacgccatatccttgcccgcaaacgcgaaatacaaaagtggtgcgaaaagtgggatgccatgcatgaccgttacatcaaagaacgtgacgaactccaggccaaaaaaccgttttaa

SEQ ID NO: 94442 - DNA, 702 bp, Enterobacter aerogenes
atgaataacttgatcaacattaagccatccatgaccagcctggaaattgccgagttggtagagaaacgccacgacaatgtgaagcgcaccatagaaactctgattgtgcgcggcgttatcacttctcctcaaattgaggaaaagcctaccgccgggcgccctacagcagtttatgtttttgaaagtgaagaaggtaaacgcgacagcatcattgtggtcgcgcaacttagccccgagtttaccgccaggctggtcgatcgctggaaagagctggaggaagagcgctcccgcccaaaatcacaggcagagctgatcgccgaaatggctctgctgaatgttgagcaggagcgccgcctctaccaggtcgaagagcaggtagaaaccgttgcggaggcggtcgaaaacattaagcgcggcaccatgcgtgccggttacgttggttatcgccaggtggtcgcaaaaagcggcatgactgatgcgaaatgccggaacctggttaacgcctaccgtatcccgaacgatacgcacgaattcatgacgcctgatggcctgctgtctcgtcgggcaatcgtagagtttgaaccgttcatgaaagcattccaccaaatgatggcagaagctgagccccgcggtacccgctggtatcaccccaagatgggactatttcaggctattgggtgggagagtaaccatgagcaatag

SEQ ID NO: 94443 - DNA, 423 bp, Enterobacter aerogenes
atgagcaatagcgatatctggatgccagccggttcaatcgaggaagcccacctgcgggccttaacgtgggtttgcgatgcgtacctgttttacctggtcagcctgcaccgtcgaccggtttaccgtcaccagtacggcgatatttcgcttaaccagccagcgctgcaggggtttgttgactcttacctcaaggacaaggggtggagcattgagcgccgtcgtgcgcattacatcaacattctggatctcattaaatatatgcatcgcagcaattcggaatttattgactggggaacagtgccggtgcttacgcctcgggggctccgctggatgaacgcctgcttctcgcgcctaggtgaaatggttaacagctatggcggctgggagaactacacctttgctgttcaggaagcaaagcgatga

SEQ ID NO: 94444 - DNA, 213 bp, Enterobacter aerogenes
atgatttttctggatgttataccgattacaaagtactgcgaagagatgggtgagacgcttgacgccgttaacaaacggttacaacgtggagtatggctggagggggttcatgttttaaaagtcgatgggtcaaaagaacgttggatcgacttaaaggagattgcaaattgggcaagacaaaacaaggatcattatctctcccaagaggagtaa

SEQ ID NO: 94445 - DNA, 1173 bp, Enterobacter aerogenes
ttgggcaagacaaaacaaggatcattatctctcccaagaggagtaaccattcgccagcataaaactggcgataccctggtgatcacattcacctacaagggggttctctgccgggagcccctttccagaatggaagcaaacgcgcgcggcgtgaagtatgccgagcgcctgctgggggagatacaaaatcagatcgtcagtggcacctttgaatatgctaaatatttccccaactccaaaaagctggagctgttcggggtagtaaagaagaccaaaaatataaagtcttacctggacgagtatctgaagatctgccaaaaccgaaacctttctccgtcgactatcaaaggttatgaaaaatgcctgtcggcgctgtcagctctgcataaactccacgtgtcagagctgacgccagcggtccttaaaaactggatagccagccggaaaacaaagctgaaaaccacgagaaataacctttcgtttctgcgcagcgccatcgacgaagcggtcacggatggcctgctgacaattaacccggtaacccttgtcagcgccagccgataccatgtgatcgacagcagcccaagcgccgacgattacaaggttgacccatttacgccagcggaaaccctcgctatttaccagagttgcagatacccggaatgggaaaacctgttccgcttcgccttcaatacaggtctgcggagctccgaactgtgcgcgctgcgctggcctgatatcgacatcatagcaaacacagctcacgtacaggctgccagtgtcgtaggcgtactcaaaggtaccaaaacaaaggccggcacacgtaaggtggagctgaatagtgagacgctggcagccttgcaggctcagaagcaatacacctttatgaaaagtgagttcatattcagcgatccaaaaacgggagaaccctgggcgaacgccgacgcgatccgtaaaaaagcgtgggtaccgaccctgaaaaaagctggcgtgcgctatcgtaacccgtaccagacgcggcacactttcgccaccaagcatattagccagggagttaacctcttctggcttgccggacagatgggccacaaagggccagagatgctgtttcgtcattatggtgcatatttagcatcctatgatggctcaacggtaagacatctcataccataa

SEQ ID NO: 94446 - DNA, 1323 bp, Enterobacter aerogenes
atgcgtgtaaaagttaataattttggaacaatatctgaggcggatgtagccatcggtggtttgacagtaattaccggagaaaatgacaccggaaaaagcaccattggaaaaatattattctcaatggtaaaggcaatttctcgttacgaagaagatctcgaagaagataaagaagtacaagtaacgtctttagtggagaggatctacttcaatcttcgtagaagaatcaatatcgtttcttctccagaaataagggatttattcaatccacgtaaattctatgctttggcaaaaaatgatttatacaacactcttcatgatagagaaatatttatacgaaatttagttgataaaaatgaattatcagaactcgtagcggactcatgttacgatcatttaagaaaaattcatgaactaatgatcgaaccagaagatgaacaatcagccataagccgtgcattgagaaaagcttttttctcagaatttagaggagagattattcaaaaagggcatgctacccctatcaaagcttcattagaagtagttgatggtgcgagtcctttgattgacatcaaatggactcgtgaaggaatgtcgcatttcaaatatactgatgcgcttggctattctgatgcaacttatgtcgattcaccaagtgtcatgcagtatcataacctcgttgggtatgcaaagactttattcgataacgaaacaggtcgtatgaccgtgccgttacatgttaaagacttaatatctaaattaagtgattctgtatatacactgtttccacatgcagatttatttgcggattcgacttattacaatgaagccctaaatatttccaaaaaaatcaataatacatttcatggcgaagtaacttatgacacagaacaaaatgaatttttcttggaaaaaaaaggctataaagttacttcaagcaatatagcctcaggcatcaagtcgttaggcatattagatatgctcataaaaggtggctctgcaacttacaattcattattgataattgatgaacctgaagttaaccttcatccaaaatggcaaatattttatgccgagatagtatgtgaattagtttccatgggtgttgacatcataattacaacgcatagcccatatattattgatgcattaaaacattatagcgataaaacagggattgataatcaattttatttgacagagcgtttccctgatgaagattatacttactttgtagatatcactcacaatatatctttggctattaatttattggcagcccctctgcgagatttaaaccaggagtatttagatgatttctaa

SEQ ID NO: 94447 - DNA, 618 bp, Enterobacter aerogenes
atgatttctaatgaggagattatttttaataaactattggaaatttatccatcagcaatgagtgaacttacatcacttagttttaacgactcaggaaatcgtcaattcatcatatctgacttccaaggctttaattatgacacagtaatgaactgctcgtctgcatataaaattgagaccaaagagaaatcccccgacgcattattcctccataatgaaaaattatacttcattgaattcaaagaaggaaaagcgaaaaaagaggatatccgtttaaaaatacatgaaggcgtaacaactttataccactttgtgtgtaaacacttgccaagcattacaagacaagagttcgttgaattaaaagtaaattatgcagttgtttgtagaagtgatggttcaaaatctatgattagcgctgaaatgataaacgtattagaaaatacttctaaaaaatatagtttgaaaaatcttgaaggatttttagttaagcaaacagcagtaattgaagaacctaaccagttattaaaatttcttaatagaatcagtaccggctcagttacttccattactgtctttgagcatttgggacaaacacaaacattcagcttaccagcctag

SEQ ID NO: 94448 - DNA, 1155 bp, Enterobacter aerogenes
atgaataacgatattctaacagcatttaaagcttcagatttagttgataaaaacattaactttcttattggctctggtgcatcagcaggctatataccgactttatggatcacagaggatatatcttacgaagatgtacttaccaacaaaaaatatcaagaaatcgaaaacgtcatttatcactcttactacaatgacattttatctaaaagtttttgtataatcccagataattttaaagaaaagttaaaattcaaaaaaacatttatcaattaccttaaatttattaaaaatctttcttctttagttgataaaaaaagcgctaaccaaatacgcagagcgaacatatttacaacaaactatgatctttttttagaaaaatcatctgacttactattaaagaacaacactagctttatatttaatgatggaggtagaggactgcacacgcgtcaccttaatataagtaatttccatacatccacatggcatcagggaactaatgacctttataaatttgaaatacctactatcaacctcataaaaatgcatggttcaatatcgtggaataaagtaaatgaagatactattagcatacgctacctcgataaccttcctgatgaactttcaattgaaacagatcactacttaaacatagaagagacaatagaaaaagtagatgaattatatttctttgatggtgctaaaagcgctatcgagctttctcgagaggatgaatataaattacaaagatttagaaatgaatatgacaaactagcaattgttaatccaactaaagcaaagtttgaagaaactgtcttccagcaacattattaccaatctttacgactgttaagttatgaactcgaaaagccgcaaacaattttaatttgtttcggattctctttcaaggatgaacatataagagaaataatccaaaaatctttaagcaatccatctctgattatctatattttttgttataaattaaaagacaaagagaatattaaaaaaataatcaacagtaagaaaattgttttcatatcgccttgtgattatgccgatgaaaacaacattgatttcaagaggtttatatcatgtatattcccaaacaaaaatgaatattcattacgggggttaacatgcaatttgtaa

SEQ ID NO: 94449 - DNA, 1776 bp, Enterobacter aerogenes
atgcaatttgtaataggaatcgtaacttcagtcaaagggacatcagtcagggctctgattaaccctaacctttatcaaaccacatatatatatgatggtaaattatatcgaggcgtgtctattaatgaatacatagtaataaaaaaaggatatcatgaaatagttgggaaaattgagggcgaagaaataattgaaaagaaaaattataactcagagcaacccaattcagataaatatgatagatttatagatcttaaaattataggttacgtgcaagacaataacttccatcccggaataaaatatctccccatgattcaagatggtctatttttagcttcagattcgttaatcagcgctatttatacatttagtggtaaagttgattcaaagtctataacaataggaagatcattattagaagacatacccattagaataccaataaatggtgtattcaattctcacctgggtattttcggcaatactggaagtgggaaatcgaatactctcgcgaaactttacatagaattacttacctcttacaaagataaaatattcgcgaactcaagattcatgttcatcgatttcaatggtgaatatcgtactatgcataatactttcaaagattatagttcttatgtggaacttgacacacattccgtcgcaggaaaagagaaattaattttgaagcaatctgagttttgggatgcagaactattatcagtgctattttctgcaactgaaaagacacaaaaaccctttctgaatatattaattagaaatagaattgaatacggagaagaactaaatgattattttcagaaaaccttgcaagttatgtttggtcagaaccaacatagagaaacaataagtgttttacgtagcattataaagatcattaatccagataatgaggaaaacataggtacagaacttgcagcattcagttggttttcaagaggggaaagtaataaatactatctaggcaatgtttatccaaacactcctgaagagtatttggcccacatccctttgcttagaaatacttttatcaaccccgagcgacttacagcatttgagcaattgtcagtacgtgcaacattacaacttatacagtcagtatcaaggaactatgttcaatatgaacatatcagccctttaattggtaaaataaatgcatcgacaaaatcacttgaaaaagtcattaaaataatttccgatgtcgaactccaccccacgcctttaacatttatttctcttaaaaattgcaatcaagacataaaaaagacaataccaatgatgattgctaagtgttctttcttagaacacaaacgttttgaagaaaaagcaagaagcttccatttaattattgatgaagcacacaacatcctttccgaaagttcggttagagaatctgaaacatggaaagattatagactcgaactatttgaagaaataataaaggaaggccgtaaatttggttttttcataactatctccagccaaaggccagcagatatatctccaacaattgtatctcaaatacataattactttctccatcgcttagttaatgataacgatatatttttattaaaaaactctttaaataatctcgatagttcatctcgctccctaatcccttcattaccgtcaggtgcatgtgtactatctggtacagctttccatacacctgtagtaatacagattgagcggttatctaaagagcttgcgccagagagcgatactattgatttggatgcatattggtaa

SEQ ID NO: 94450 - DNA, 141 bp, Enterobacter aerogenes
atgagccgacaccatgtatccagcagtgaaggtcagtatgagaaagactctgacgagcaggttttggctaataagctggggatcgctacttctgatgagatggatgaggctgaacttgtcctgtcagaacaactctactag

SEQ ID NO: 94451 - DNA, 504 bp, Enterobacter aerogenes
ttgtcctgtcagaacaactctactagtctgtttttgaagaacagtttccggatggacagctcagctgtcgccatgctaaaacgctggcactaccgctggttaggtaacatctacgagtgggctggacaagaaagagcggttaacttcagcaaaggcggctttatgtttgccccctctgcacagttgccaaaactactgaacgaattcgataccaaatatcttgctcctttcacgccatgtagcggcatggacgaagaacaactcatcaccgctatcgccataacccatatcgagctgatacttatccatccattcagagagggaaacggacgcctttcgcgactgctagccgacgtgatggccgttcagggaggatacaaaccgttggattatcaaagctgggagcaaaacaaaactcagtatatatcggccatccatgctggcatatcaatggactacaagccgatgaaacactgggtcggtgaggcattaagaaggggttaa

SEQ ID NO: 94452 - DNA, 318 bp, Enterobacter aerogenes
gtgtatttttatcagcctgatacccggcgtgatgaaccggtgaaccatgcgctgacggagccggcagaacgctatccgcgctacggttttaagaagctgatccagctgctgcgcaggcagggtaatacctggaaccataaacgtgttcaccggatttactgtctgctgaaactgaattttcgtcgcaagggaaaacagcggctgcctgtgcataatccagcaccactggcgacaccgcaagccaaaatgcttttatcgaacggttcaaccggacataccggacagaaatcctggatttttacctgttcagaacactga

SEQ ID NO: 94453 - DNA, 198 bp, Enterobacter aerogenes
atgcgtaaagcccgattcactgaacaccagatcatcgccgctctgaagtcctttgaagccgaacgtaccggcaaggatgtgtgccgtggggccgctatttcggaagccagctattacaactggaaggctaaatatggcgggatggaagcggccgatataaaaaaattaaagaccttgaggatgagaatcgacgtttga

SEQ ID NO: 94454 - DNA, 723 bp, Enterobacter aerogenes
atggacactgctttacttgcatctcttgatcttgaaggaaagaaaaaactggagcgagcaatcgcaacgctacaaggtgatgttaacgctgcttccggcgtattgtttgttgatccgaagctcaggcttgagtactcacgccgtatcaaaaccatgtctgacgatctctactccaaagcttcacgcagcatcattagctgggaaaaagcagccgaggaagcgaaccaaacgcgtaaccttcttatggaactcatccgttaccgaagcacacctgtaggtaaagcgctggcgcaaaaaatgaaggcacagggcaagacgctgaatgagcttatagcctataaaacaaaggcattgtacggcgataaagtaaattttaataacctttcggtttcgcagaaaaacgcggtttacagcaccgtggtgcaatccgccggcaaatccaaccatgaagtaaatattaaaatgcagcgtttatccggggccggacgaggattgatattcctttcgcttgccatagccatttatcaaatctatgaagctgaggatagaattcttgagactcaacggcaacttgccatcagtagcgccggggttgccggagcctggagcgggggagcgctcgctgggctgatgtgtggtccaggagctcctgtttgcgttgttatcggggcttttgttggcggcgcgattgccgcatgggaaatcagcgggttctgggactaa

SEQ ID NO: 94455 - DNA, 480 bp, Enterobacter aerogenes
atgtttaagctgctacacaatgtaaaacttcaactcagggaagaaccaacgccaacagccatgggcaaatatgaagttctgatcgctggaaaaagcacgggtttcatggttcctgtgcaggtcgtagaagttgctgttcaggtggatgataaacgtctgcttttatttcttactgatgacgttccctatgaagaagcactcaaaatcgtactactcgatgtgaatgatggcgtgaaagaaatattaacgctgggtggcgcgtacctgacaggttcgttcactgacctgaaaatacattcaaactcagtcgagttcagttttattggcgatacgacatggcgggttgaaataccctcgaggcccttcattcagctcccattcaccggcgacccgcgcggcgtttctcgccctgtagcatggaaacattatattaaaatcaccgcccgccctgcacctgcgcgcttcgatggcagccgctaa

SEQ ID NO: 94456 - DNA, 2562 bp, Enterobacter aerogenes
atgagcacaatcgacaatttagacgcccataccccaatgatgcagcagtatctgaagctgaaggctcagcatccggagatcctgctgttttaccggatgggcgacttttacgagctgttttatgacgacgccaaacgcgcctcgcagctgctcgatatctcgctgaccaaacgcggcgcttccgcgggcgaaccgattcccatggccggcattccccaccacgcggtggaaaactatctcgcaaagttggtaaaccagggcgagtcggtcgcgatttgcgaacagattggcgatccggccaccaccaaagggccggttgaacgcaaagtggtacgcatcgtcacgccgggcaccatcagcgatgaagcgctgctgcaggagcgccaggataacctgctggccgccatctggcaggacagcaagggcttcggctacgcgacgctggatatcagctccgggcgctttcgcctgagcgaaccggccgaccgcgagaccatggcggcggaactacaacgtaccaatccggcggaactgctatatgcggaagattttgccgaatcgtcactgattgaaggccgccgcggcctgcgccgtcgcccgctatgggagttcgaaatcgataccgcgcgccagcagctcaacctgcagttcggcacccgcgatctggtgggcttcggcgtcgaaaacgccccgcgcgggctgtgcgccgccggctgcctgttgcaatacgtcaaagatacccagcgcacctcgctgccgcatatccgctccatcactatggaacgccagcaggacagcatcattatggatgccgccacccgtcgcaatctggagatcactcagaatctcgccggcggcgttgataacacccttgcctcggtactcgactgcacggtcacgccgatgggcagccgcatgctcaaacgctggctacatatgccggtacgcgataccgcggtgctggttgaacgccaacaaacgattggcgccttacaggaacgctataccgagctgcagccggtgctgcgtcaggtcggcgatctcgaacgtattctggcgcgtctggcgctgcgtaccgcccgcccgcgcgatttagcccgtatgcgccatgccttccagcagctgccgctgctgcgcgagctgctggccgacgttgactgtcagccggtgcaacagctgcgcgagaaaatgggcgagttcgccgaactgcgtgaactgctggaacgcgcgatcatcgatgcgccgccggtgctggtacgtgacggcggcgttattgctccgggttataatgaagagctggatgagtggcgggcgctggccgatggcgcgaccgattatctcgacaaactggaaatccgcgaacgcgagcggctgggccttgataccctgaaggtcggctacaatgccgttcacggttactacatccagatcagccgcggccagagccagcacgcaccgatccactacgtgcgccgccagacgctgaaaaacgccgagcgctacattattccggaactgaaggaatacgaagataaggtcctgacttcaaaaggcaaggcgctggcgctggaaaaacagctctatgacgacctgttcgaaaagctgctgccgcatctggccgacttacaaaccagcgccagcgcgctggccgagctggacgtactggtgaacctcgcggaacgcgcggagaccctgaactactgttgcccgacctttatcgataaacccggtattcgcattaccgaaggccgccacccggtggtggagcaggtgctgaaagagccgtttatcgccaacccgctgcagctggcgccgcagcgccgcatgctgatcatcaccggcccgaacatgggcggtaaaagtacctatatgcgccagaccgcgctgattgcgctgctggcctatatcggcagctacgtgccggcgcagaaagtagaaattggcccgatcgaccgcatctttacccgcgtcggcgcggcagatgacctggcgagcggccattccaccttcatggtggagatgaccgaaaccgccaatattctgcacaacgccactgaacacagcctggtgctgatggacgagattggtcgcggcacgtctacctacgacggtctgtcgctggcatgggcctgcgccgagaatctggcgaataagatcaaggcgttgaccctgttcgccacccactacttcgagctcacccagttgccggaaaaaatggaaggcgtggccaacgtgcacctcgatgcactggagcatggcgataccatcgcctttatgcacagcgtgcaggacggcgcggccagcaagagctatggcctggcggtcgccgcgctggcgggagtgccgaaagaggtgatcaaacgcgcgcggcagaaactgcgcgagctggagagcatttcgccaaatgccgccgccacgcaggttgatggtacgcagatgtcgctgctctccgcgccggaagagacctcgccggcgctggaagcgctggagaatcttgacccggattcgctgagcccgcgtcaggcgctggagtggatctaccgcctgaaaagcctggcgtaa

SEQ ID NO: 94457 - DNA, 531 bp, Enterobacter aerogenes
gtgctgtatggcgtacgcatccagaaggagacgcagccgggtgtcattgtgcacaagcttggcggcagtggttctcatactaacaactgggtgaatgccgatgaaacacgctgggagactgcctttacaaccctgaaagcgaatcttgccaccatcatgttaggaaccaatgaccagggcatcaaacttgctccggagacgtttaaatcaaacctcctgacgatgattaaccgcatccgcacagcgtcgccgaccacggacattatgctgatttgtccggcagagaataaccgtccgggcggtaacgccatccctatgtccagttatgccaggaagatgtacgaactggcgcttgagcaggatgtagcattccttaatctgcaaagctctttcggagttcaccctgcagattatgcctatggatcagcgcgtccgtggatggtgggggatggattgcatccagacccggatactggagggtatgcgattgcagctgcattaatcagggccatatcgcttccacaggtataa

SEQ ID NO: 94458 - DNA, 240 bp, Enterobacter aerogenes
atgtttgtggaactcgtttatgacaagcgcaatgtcaaggaactgcctggcgctcagcaaatcatacttactgaactgacaaagcgggtacatcggattttcccggatgcagaggtgaaagttaagccaatgcagacgaatgcgttaaacagtgactgtacgaaaaccgagaaagaacggcttaaccgtatgcttgaagaaatgtttgaagaagctgatatgtggttggttaaagaatag

SEQ ID NO: 94459 - DNA, 1029 bp, Enterobacter aerogenes
gtggaaaggattttttggcttgatgcgtctagagctattgctattgcccttgttgtttttactcattcacacgagcaggccggcatccacagtgagctattaagaagcattttttatagcattgatagattgggtgttcctatattctttatgatttcaggcggccttgttcttccaagggctgcaaagtccagtattctttcattttatagaaagagaataccgcagtttattattctgattttcttatggtccgtcataactaatactgtaaatacttatgcatctggatctggattcattgactccgtatcttcagcatttattaattataatggtatttatcctggtcattttggcgctgcggctcaactatggtttatgtactccataacgcaattgtacttaatagctcctttccttggcaggctcttgaaatcattgaccaataaggaaatattgatatttatactaatttgcgttctgcttaaccagataaaagttactggcagtttttatgacggggaatggggggcattgttttggatgggaggggatttcaccggttcatatatatcatattttatggttggatatttggttttagaacgcggcatattagatgacgtaaaattcaatggggttattccatgcttaatgattacaatcatacctttacttattctcgtggcaaccgacatcgcgactcataaagttaatgatgtgctacactggtacaccggatctctatttatctttatttctggcgtgggtttatttgtattaagcaaaaatatatttgaaaatttaaatagccgattccttagcataattagcgcatgctcatttggtgtctacttatcacactatgcatttatgtacgcaattaaatgggttgttaactcaaaagggttcgttttaagtgatattgaaaaagtgttagtctacttttcgttatcatttattctatccctaacgtttacatggatagtgatgagggtaaagtatttaaaatatttcataagctag

SEQ ID NO: 94460 - DNA, 159 bp, Enterobacter aerogenes
atggcgatatattacagcgagagcaccaagggattttatgatatggatttcgcaaattacgctctcccagatgatgcaatagaagtaacggaagagcagcgggatgcactaattttggaatcaatgagtgcagaagaaatagattattcaggcgagtga

SEQ ID NO: 94461 - DNA, 1014 bp, Enterobacter aerogenes
atgagtattaagaaactcgatgatggtcgatacgaagtggacatcagacctgctgggcgtaatggaaaacgtatccgcaggaagtttgagaaaaagagcgaggcgttagccttcgagaaacacacgttatacaaccaccacaacaaagactggttatcaaaaccgacagataagcggcatctgtcagagctgatcgcactttggtggaatctgaagggtaagcatgaagaacacgggcgaattgatttgagcaaaatcgagttgttttcacgaatcaccgacgatccctgtgcattccagattacgaaaacagttatcagccaatactgtgctacccggcgtagccatgggatcaagacgtctaccattaaccgcgacttgaacagcatcagtgggatgtttaccgccctcattgaagctgaggtttatttcggtgagcaccctattcgtggaaggaagaagcttaaggaagagataccagaaaccggctatcttacgaacgatgagatcgagctactgctctcaaggctggaaggtgacaacaaaaagattgccattctttgtctcagcacaggtgcgcgatggggggaggcagcacggctaaaggctgaaaacatcatacagaatcgaataacgttcgttaaaacaaaaggcaacaaacagcgtaccgttccagtttccccggaagtcgctcgatatattgccgaaggcaagcgagggattttattccccggtgcttcttacgatggattcaggcaggtgctgaaagaagtaaaaccagatctcccggcaggtcagtcaacgcatgcgttacggcatagtttcgcaacacattttatgattaacggcgggagtattattacgttgcagcggattctcgggcatgcgcgaatagagcaaacaatggcatacgctcatttcgcccctgagtatctgcaagacgcgatatcgctgaacccgctcaggggcggcgtgaatgtgggaaatgtccacattgcgtccacacacgggtaa

SEQ ID NO: 94462 - DNA, 219 bp, Enterobacter aerogenes
atgaaaagtggaattagcggagcggtctcgcagctgaatagtaaaaccagcctttaccgtggctttactattttgaagctcccacgcaaaaaaccatacagccgccagcgctatcagatcacgcatagcggccattacttcgggattgactttgcattagctgaagcatgcaaaacgatagaccgaattattaataaaaaccgctttattactcattaa

SEQ ID NO: 94463 - DNA, 231 bp, Enterobacter aerogenes
atgagcactgaaaacatcccttcaattgccagcctgctgaagcatggatgccaggtcacacatttcaggaatacacgaggttggattgaaactcctgacgggcgtttctttaagccggaacctaacaaggttcgttttattaaagaaatgaacaggccttttatttatacgcagaaaataaataaagggattgtcgcagcattgattaacgcgcttaaaaaaatcctgtag

SEQ ID NO: 94464 - DNA, 273 bp, Enterobacter aerogenes
atgtttaccgaagagaaaacatcgtgggaacgtgaaatgctgatacgcgaagcggtggaaagcgcagagcagggcttcaccgttcacctgaagaacggcgctcgcgttaatgtcaccgctgacagcccgtcgattgacttaattatttacggtctggagaaaacaattcgcggtaatcatgagcgtgtacgaatgacctttattgattatctgtatttttggcacgaaaggttattcaagctggctaaaagaaaaccgcgccccaaccactaa

SEQ ID NO: 94465 - DNA, 225 bp, Enterobacter aerogenes
atgtcgatcaagtcaataaagttggaaagcggaataagtgatccggagtttatgcaaataaacaccgatgcgcgcataagtgagcgcgcccaattgctggggctgcttcgcatctacatgggcttactgaaaaaggaaagcctcaccccggaagagatttatttatcagtcgagcggtggatcgtcaaccgcgaattaaccaataacgagggtaacaagcaatga

SEQ ID NO: 94466 - DNA, 549 bp, Enterobacter aerogenes
atgaatcactttatgttagatattcgcgcgctggggaaagcgccagactcgccgatctttgcaattgagtgcgtattcttcgagccatcaatggggaagattggtccgcaatactatcgagcaatagacattagaacggtgggtagcgttaatcctgaagctgttctccaactcatgaagggggactcagcacagcgagcagagatcatccacgcgacctgtagcgaggctggtgcagtagagggggtatgtcggtttattcgtgaaacggcatcaaaacatgaaaccctcatttgctggaccgccggagattccgcagatgttactaggcttgcgtgcgccctgtctcgctatgggatgggcccgcgtctgccatccttcgaaattcgctatctctcaacgttaatccacatcgccggcgtcaccggatatacgccgcatcctcgtcgctcgacagcaacctacatgctgaccgatgcggtatatcgggcggagcaggtttgcgaggtctggcagcgtctgaccagccctcactttgaatccctgtga

SEQ ID NO: 94467 - DNA, 228 bp, Enterobacter aerogenes
atgcatccgcgtctctccgttatttgcagcgcaccgctgccagtctgcaccagggcgctagccgccctgaaatgtttcgcccgcggtcagcgcaatttttcccgcgttaaaccgcatgcctatctcgttatccgcattggccgtcgctggcgcttgctcagtaagaacggcggccaacagtggcgactcatgacccacgaaacctataaccaggaatatcgcaaatga

SEQ ID NO: 94468 - DNA, 195 bp, Enterobacter aerogenes
atgagccattcaccggaatacatcaaaggagcactggcggcgctgaacgaagttcaggccatcgggttatcaatggcgatgatcgccggggtggtggtcggtaaagaggcaggagatagcgtcaataccattatcaaggatgctactggttctttgatccaaaaatacaaagaagcagaggtgaaaaatgattaa

SEQ ID NO: 94469 - DNA, 888 bp, Enterobacter aerogenes
atgattaagtcacctctgaaatgggtgggtggtaaagcacgcgttatgcctcagttgctggagcacttgccgaaagctgattgcctgattgagccattcgttggcagcggtaccgtatttatgaatacggattaccgccgttatgttctttgcgatagcaatcgcgcgctgattaacttctttcttcagttgagggatgacacagagcgcctgatcgctgttgcccgggatatgttcaagcacggcaacagtaaaagctggtattacggcgagcgtgaccagttcaatactctggcatgggatgactcggaaagggattgttacgcgacgttgtgggcggcgtctttcttatacctgaatcgtcattgctacaacggcctctatcgtacgaataaagagggcggcttcaatgtcccgtttggcagcttcaaggctccctattttccagaaactgaaatgcgcatgttcgccgaaaaggcgcgggacactcacgcaatctttctttgtaatgactttcgcacctctattccatatatcgcgaagaacagcacggattcggtaatttactgcgatccgccgtacatcccgaccagcaaaacagccaatttcaccgcctacggcaagccgttcacgttagacgaccaccgcgcgcttgtttcaaccctgcttgatgttaatcgccaacacggcatgcgctcggtgatctccaacagcgatacaccagaaacgagcgagatctattccgctttcaaccttcacgccttcagtgtccgccgctctgttagcgccaaaagccgcgacatggccggtgaggtgattggcgttttacgcatatgtgatggccgcgccatagctgatcagcaggagtctattgatgaacaagattga

SEQ ID NO: 94470 - DNA, 174 bp, Enterobacter aerogenes
atgaacaagattgatgccgttgtaacgcgggttttggacgtccgcccttatcgagatttctggatcgtggaggtcgaggtgtcgagctggggcggatacagccagacgacagttatctgcaattccgaaaaagaagcccgggaagtgcgaaccggcgacaccgtgacgatctga

SEQ ID NO: 94471 - DNA, 156 bp, Enterobacter aerogenes
atgaacgaacaaaccaattaccgccagttctggcgaaacctcgtgatctgctgtgtgctttgcgtgctcctgttttggatcccgatggggtacctctcttttcgtaccgcctctgtggtgtgggaggcgctgtggtcgcttattacaacgaaatag

SEQ ID NO: 94472 - DNA, 1017 bp, Enterobacter aerogenes
gtggtcgcttattacaacgaaatagacccattcgccgcccaatggctgcgcaaccttatcgacgccggccacattgcgccgggcgtcgttgatacccgctcaattgaggacgtaacccctaatgaccttatcggattcaatcagtgccatttcttcgccgggatcggcggatggtcgcttgcgttgcgtcgagcaggatggccagacagtcgcccggcatggacagcatcatgcccctgccagcctttcagcgcggcaggcaaagggcttgggtttgctgacgagcggcgcctatggccctccgcacattggcttattggccaacgccgtcctgtcgtggtctttggcgagcagtctggaagcgctgacgcggaccactggatcgaccttgtacaagctgacctggaagggctgggctatgccttcggggcgcttgcgtttccgtctgcgagtgtcggtgcgccgcactggcgcgatcgtgcttactgggtggccgactccgacggcgaatgcatggaagcacccatcgaatgccggtcgtcaggggtcgccgaatttgcaaacggtagccgcattgtctggttggccgaccccaactgccacggacgggaagggcggctatcagggtggcaggattcgaaacggaaaactatcaacggatcggctggatgtgacagcacaacttgcgggttggcctacgccgacaacaagcaacgaccgttcaccgcgtccgcaggaagctatgaggacatatcgcgacaatggaacaaaaattcagaagcggttgcaggatgtggcggcgctgtgcagcccggcccggttaacggcttctggcgagatgctgattggctgtgcggcagagatggaaagtggcggccagttagacccggatcattcccgctggctgatggggttcccggaagagtgggaagactgcgcgcctacggaaacgccatcaacattgaagcggcgacagcgttcataagggcttatatggcggcggtggattatgtctga

SEQ ID NO: 94473 - DNA, 2616 bp, Enterobacter aerogenes
atgtctgactcccccgctgtagcctgggaatggaatgctaaacggcaggccattaacccaaaccacgccgcagatcctgaaattgagtatctcaccccaaaaggcgagcggaagacgatcgcctatggtgatctagttgatgcggtttaccgttaccccatgcgcccacgcgaaggggaggcgcgagaagcatttgaccgtaaaggccgcgccagctacctccgacgccgggtgcaaacgctcccggcatttatccgtaagcgtttcgcccagcaccttgaaaacctagaacgcaacaagccaaatgatgcggtgcgttggttgttcggtaccttcgagcgtcatgttttacgccgtattgatgcggtgaatgcgcaatacctgcctcaaagcaacctgcccgcaatccttatcccgctgcgagatgaattccatctgctgccgtgggccgacaaaaagcgcctgaaacgactggcttataagctcgccaacctgatgaaaagcgagtttatgcgcgagtttgattttcagtatgagaaaaccgctgatgttgagttttccacgctttacgcatacggctttatcgccagcaaagcgacggcgctcaatattgcgatcccgggttgggataagtattgcgatgaatcacttcaggccgaagatgcgctgcgtgctattgcgcgccttcagaaagaaaaatggtggttgagtaaaatccgccgtatccacgatcgctggcgcgaacacctcatgattgcaacgggttatgtcagcaaggtggcatcgccgtattgctctgatccctgcttcagggagtgggtagctcagaagaaagcaaatcttgaatttcttaatgcgatggagctggaagaccaggacaccggcgagcgtagttctttgctggataaggtcatgggtagcgtatctaacccgaagatcgcgcgccatgagctgatggtacgcatgcgcgggtttgaagatatggctaacgaaatgggcctggtcggcatgttctacaccttgactgcgccgtcgcgttatcactcaacgcatgtgcaatccgggaagcgaaacgataaataccgcgacgccagcccgcgcaaaactcagaaatacctctgcaaagtatggtcgcgcgtccgtgccaaatgggggcgcgaaggcattcgcacctttggttttcgtgttgccgaaccgcatcatgatggaaccccacactggcacctgttgttattcctgcgaccagaagaggctgagtacgccacggctattttccgcaaacatgcgctgcgtgaagacggtggcgagccaggcgctcaagagcaccgttttaccgtcacgccgattgatgaagaatttggctcagcgacgggatacatcgcgaaatacatctcaaagaacatcgacggttacggcatggatggcgagttagacgacgagtccggccagccagtcaaagagatggcaaagcgcgttagggcgtgggcttctcgctggagcattcgccagtttcagcagattggcggcgctcccgttactacctggcgcgagctgcgccggttaggtagccgtgagctggtattgcatccggaacttgaagcggcccgcgcggcagctgatgcgccggactggccgggatacaccaacgcccagggcggcccatttgttccgcgagattgcctgcgcgttcgcctcaactacgaatacaccgaggatggcaatgattatggtgacacggtcgccaaaatcactggtatctattgcccgtactcgggcggtgattctgtcattttcacccgcaccaccgattacaagattgtgccgaagcgtaagccgtcgccggtcgagaatttgaccttagaaggccgcgcagcggcccctcggagttctgtcaataactgtacggggcgctctgcttcggatggaaaaccaccgtcagaaacggcggtgacggctgataaaactgcgccagacgacagttcagtgacagaacttccgctgaatatcgaagacttaaggcgatattcacgccagcaaaggcaggagatcacctccaggctgaaaaaaaccggtagcgaaagctcagatcaagccttcgtgcgcactgcgcgaggtcttcgcacgtctgttgatgatgaaaccgcgctgacatgggggccaaaagttaccgccgcgaaagatatgagcctgacgccggaagaggcagagcagcgctggcgggagcagctgcggatcgaggccgagcggcgcgcgaataactacgccgcagcagttgcggaataccagaggaaaaaagccgaagccgcactgcgtcaggcgcagcaaaaagaagcattgcagaggaatggcattccagaagaggtgatcgatagtatcggcgcgcagctgcgtagctgtcggattttcgtcagtgatgacgttgtgcggtcaatcgccgaaggcgcctgcgttcgctacagtggcggggtgctggcggcggacggtggccggttacgggaagtgaaagtatggcgtgcaggtgagaaagataaaacgactactgagtttatggccgttcatcggttgattagacgtttgaaaaaagcagctaaaagagcaagcaaaggggagaaatga

SEQ ID NO: 94474 - DNA, 255 bp, Enterobacter aerogenes
gtgggtatttctaagaaagtaaaggctttttttgttggtgatgaggtattggttaacgatgggggcgatttcaaatctgttttagaaaacatcaaactagtcgctaaagcgtgcgaacctctacgtccactcatcacaaattttgagaatggtgatcttacacaagagcagttcattgctaaaagcatctcgtgtatagccaaagactacattcagctccgcgaatataaagattcaatggatcttcaatggtga

SEQ ID NO: 94475 - DNA, 1548 bp, Enterobacter aerogenes
atgcttttaagaaaaatagttatagatgggattcaaattgatttggtgaacgatggatatataaaaaatgaacgtagttatttttcaataattgttggtccaaatgggagtggtaaaagcaggattttagaagctatttccgctactggaataataaggcagtatttggagtttaaagggcgtaagagtgcagatggacgtaagaatctaagaatagatcgtcgccctataggatttttagatggtgtatctttcaaggaatcatgtcttttttacgaaaataaagagagtaataatctatctgtaaggcgatttaatccaaactatccgggggttagctatgatcgttttgcttgtgaattcactggggatgaagttccatctaaaataatttgcgtgacaaatagcatatttaataaattcccaagcgttacaaataccccattcatggagtttgagtatgattacagttattatcaaaacctgtcaatatctgaagatatacttgaggatagcaagggtttagttcatggttcaaagtcaagaatattttctaaacttatattaaattcatttttcagtggtaaagagactttcaataagttggtttacttcttaaacacttttggaatatctggaggctataagcttcatttaagagctggtagtatgcttcaaggcgtttcctctaaaggggtatatgatgtatctaaagtgagggagtggtatgagcgaaaaggaaaactcaaaaatcaagatgaccgtggaattacgaaggatataatcgatgtgttagatgaggtttttaaaaaccttttcactaaaagagtgatgaatgattatgaaacatttgacaatagtcatttttttcccgatagttattcgtttcaaatagatataaataatgaaaatgattcagatagtgatcttaataaaaaaataaagctcattgcggaatatggatttatttatgtagagaagatagaatttacgaaaaatgatcgtgatatatcacttgactctatgagttcgggtgaaataaatttattccttctcttgtttaaaattaactcagttattgaagataattcgataatactaattgatgagccagagttgagtttgcacccatcatggcaaaatgaaatagtaccatccttgcaacgggcgttttcgttatattcaggatgtcactttattatttcgactcactctccacatgttgtggcaagcatacctgaaaatgattcttgtgtgactatattgaatgattttccgagagcatttccaggccatcgttttagtgggaaatcttcagattttcaattattttctgttctgggatttgttggggctgagaatgattacttaataacacaacttattcttattatttctaaattgtctgaggaagtcccattgtcgcaaggagaacaatatcttctggaagaggccggtaatattttaaagaatgaaagtacttcaagtagagtaaagcacttaattctgcaagcacagcgattgaatggagtagactatcatgaataa

SEQ ID NO: 94476 - DNA, 708 bp, Enterobacter aerogenes
atgaataaaattcattacttacagcctgtagtattttcaacagagtcccaaaaatatatagataaatatgatcgtaaaaactataaggtatgggatgataaagcaaaggaaatggttaaggtaaagaaagagttaaaaacacatctcaaaaaaaagcagaataaaaaatgtgtttattgtcgtgtgaatcagcattctcactatgatcaaaattgggatgctgagcatattctccccaagaaaatatatcctcaatttttatttcatcctacaaatttagctttgtcgtgcaaggagtgtaatcgcgagaaatacgaaagagatatcctaatgaataaagagaatatggatctttcaatgtatccagaggatgcgatgaattatgaaataattcatcctttttatgattcttatgataagcatttaaaaattgagagatctggtgagaagtatctttacactccgctatcaaaaaaagggttaaaaacatacgctatatgtaatcttaagcgttatgcgataagtgagatgatagatatgaattcaaatgagaatctcgggggtgttttagaaatgtttcttcacttgttaaaagaaaattcagacgcgccttctaagctatgctcgttaagcgaagaaataaagaaggaaataaaagaagatccatcattggagtacatggcattttctactaattttgaaaactag

SEQ ID NO: 94477 - DNA, 1035 bp, Enterobacter aerogenes
atgcgcggcaggcagtatgccagggagcaggccgatctcgccgtctcgctaaaagctgcacctgagctgaactcgttcacattcgacggcccctggccggtgagtggcgcgtatgacctgctcgataacatgtactgcgccgataacgggcggtactacgaaacaccggttgactggtacgggctggcccgccagttcggctatgccagctggcatcagtcggcgctgtacttcaaacgcaacgtgctggccggttgctttatcccgcacaaactgctttcccgccaggtgttctcatccttcgcgcttgactggttcgtgttcgggaacggctatctggagatgaggaaaaaccggcttggcggttctctcggcttccgtaactcgctggctaaatatacccgtcgcggctccgacctggacacctactggtttattcaatccgggctacaggatcaccagtttacaactggctctgtctgccacgttcttagccctgatattcaccaggagatctacggtatgccggagtatttcgccgggttgctgtcggcgaacctggcacattctgccgataagttccgcaaactctattacgacaatggctcacatgccgggtgtatcgtctacgtgaacagcgcaatggccgatcaggagagcctcgacaagctgaagaagacgctaacagatacccgacgcggtggggcattcaagaacattcttcttcatgcccctaacggcggcaaagactccgtgcagatcctgccgttcagccagatatcggcaaaggatgaattcgtaggggtgaagtcctccacccgcgatgacatgttagccgcgcatcgggtgccgcctcaattaatgggcgccattccggaaggcaacggatcatttggcgatatcgagaaggcggcccgcgtcttcgccgtcaacgagctgacgccctacatggaagccatgaaacatgttaacgactggctgggcgaagaggtgatccgcttcaatccttacgcactgctcgaaagcacgaagtaa

SEQ ID NO: 94478 - DNA, 1722 bp, Enterobacter aerogenes
atggcgattgaagaagcattcatcatgcagcgggcgcggcagctttactggcaggggtacccgccagcggagattgcacgcctgatgggtattaatcagaacacggtttactcatggaaaaagcgcgatgaatgggacgccacgccaccgatccagcgcgtgacgacgtccattgatgcacggttgatacagctcaccaccaaagacaaaaagaccggcggcgacttcaaagaaattgatctgcttacgcgccagttgaaaaagctggacaacggcacggcggccacccagccgaagaagaagatccgcaagaaacaaaactatttctcagagtcgcagattgcagcactgcgcgagaatattctcggctcgctgcactggcatcaaagaggctggtacgacaaccaccactggcgcaatcgcatgatcctgaaaagccgtcaggttggcgcgacatggtactttgcgcgtgaagccctggtgcgcgccctttccgacgatgtgaagtacaagcatcaacgtaaccagatctttctgtcggcgagccgccgccaggcgtaccagttccgcagctttattcgctctgctgccgctgaggttgatgttgagctgaaaggcggcgacatgatccagttgtttaacggcgccgagctgcatttcctcggcacgtccgctgcgacggcgcagtcatacaccggcaatctctattttgatgagtttttttgggtcggccagtttgccaacctgaagaaagtggccggtgcgatggcgacgttaaaagggctgacacgtacctatttctccaccccatcagcagaaagccatgaggcttaccctttctggacaggtgaagcattcaacaaagggcgcagccacggaaagcgggttgagttcgatacgtcctggaaaacgctaaacagcgggctgatgtgcccggacaaaatctggcgccagatcgtcacattgcaggacgccatcgatcacggctgggatctgaccgacattgacgaaatccgcgacgaaaacagcccggaggaatacgacaacctgtacgggtgccagttcatcaaaagcggtgaaagcgcctttgactataaccggttgctggcatgcggcgcagacggctacgacgactggcccgactggcgcccgtatgcctcccgcccgatggcggatcgcccggtctggattggctacgatcccaacggtgccagcggcaaaggcgacagcggcgccatttcagtcaatgccgtaccaatggtcgccggtggcaagttccgcaccgtcgagacgctacgcatacgcgggatggagttcgaagagcaggccaatctcattatcggcatgctgagtcgctataacgtgcaacacatcgggattgatggcaccggcatcggtgaggctgtttatcagctggttaaaaagcacttcccggcagcggtctgttaccagttctcaccggccagcaaacgcatgcttgtgctgaagatgcagcagctcgttcgcggtggccgctgggaatatgaccggggagagcttgatctcgttggcgcgttcaactctgttcgcaagattgttacccccggcggcgttatcacttacgacactgaccgctcgcgcggcgtcagtcacggcgatctcgcctgggcgacgatgcttgccaccattaacgagccgctggggcaggaaggcggcagcagtatgactgttacggagtattaa

SEQ ID NO: 94479 - DNA, 834 bp, Enterobacter aerogenes
atggcaggcacagcaaaaccacgtaagaaattccgcgttgccgtctccggaaataccgttgatggccgcgaaattcaaccgcagcaccttcgcgatgcggcagcgaattacaacccggaggtgtacggcgcacgcgtcaacattgagcattatctctctatgttcccgaacagcgattttggcgcgatgggggatgtggtggcactcagcaccgaagacattaccgacggcccgttagcagggcgaaccgccctttatgccgagatcgaaccatcagatcgcatggtgcagatgaccgacaaaggccagaaagtctactcaagcatcgagctgcatcctcagtttgccctcaacggaaaagcctatgtggtggggctggcgatgaccgataccccggcgagcctgggtaccgatcgcctgaagtttgctgcgcagcaacgtgcatcggtgatggccttcaacaaccagcagggcgaagcgccaatgtttaccgaggccctggaggctgaggtgatcgaactggccgcccagcgcagtgaagaagggactaactggtttaacaaggtgatgggaatcatcggcaagggccagaaaaccgacgatcagcgcttcacccagatgcaccaggttgttgaagccgtggcgctctcgcagtcagagcagattgatcgctttaacaccgccgagcaggagcgccagcaggacaaagtcgccattgagaaactcaccagtgagctggccgaactgcggcaaaagttgagcaccaccgatgccagctttagccagcgaccaccggcgggcggcggcgcgaacgcgcagctggctgattactga

SEQ ID NO: 94480 - DNA, 1050 bp, Enterobacter aerogenes
atggaaaacaatacccgccagctgtttgaccagtacattttgcgccaggcgcagttaaacggcgtatcacctgcggcagttgctgcgaaatttgcggttgatcccacccgtcagcaaaaactggagcaggcagcgcaggagagcgattctttccttagcaaaattaacgtgtttggcgttaatcagcagattggtcagaaagtgttgattggtagcaaaggcccgatggccggcgttaacaacagcaccactacccgccgtaatccgggcgcaaatcatacgatggagccatttgattacatgtgccgtaaggtcaattacgactacgggatcagctacgaacagctcgatgcctgggcgcatatgccgaacttccagccgctgatcagcgccgcgatggctcgtcagatgtcgctggatcgcatcatgattggctttaacggcaccaaatacagcgacccgtcagatcgtgccgctaacccgctgttgcaggattgcggcattggctggctggagaaaatccgcactgaagcctcacaccgcgttatttccggcgtcaccatcacctcacgcgatgaagataacaaagtcattgcgaaaggtacctacggcaacctcggcgccgcggtctatgacgcgaaaaacagccttatggatgaatggcacaagcgcaatccggataacgtggtgatcctggcgggcgacctgctgactaccggaaatttcccggccattaacgccatgagccagaccaatccgaacaccgaaatgctggccggtcagctgattgttgcgcaggaacgcgttggcaacatgccgaccttcatcgcgccttacttcccggtcaatggcgtactgatcacgccgtttaaaaacctgtcggtgtactaccagcgcggcggtctgcgccggacgattaaggaagagccggagtacaaccgcatcgcgacataccagtcctcaaacgatgactttgtgatcgaggattacggcaacgtcgcatttatcgacggcatcacctttgccgaggcgccggaaggcggcgcgtaa

SEQ ID NO: 94481 - DNA, 861 bp, Enterobacter aerogenes
atgctgacaccggcacaacgacattttcaacgcgtcatggctgaacgtcatggcaaggctgaggatttgtccgatacggcgcgcactgcgcatgagcagatcctgcaccgcatgcgcatggatatggccgcgcttaaaaaaattcagggtgagcaggcgaaagccgcgctgaagcgccagatgctacccaattacgaggggtggattgagggaacgctcgaaggtaatagcggccgccaggatgaagtgatcacgcgcctgatgatttgggcgatagatgttcgtgattatccactggcggcgcgaatcgggcgatacgtcatcgcgcataacctggcgatgccagaccgctttaaccgcacggcggcgacggctctggtcgatgaaatttgtgatccgatcctggtgcaggttaaggccgacgacagcaccgacgtatcgccatatctggcggtgctcgatgaagtagccgagtttaccgccgccagcgatatgccagacatggtgcgcgccaaactccacaaagcacgcgcttttgccctgcgcaacgggacgcctgccgagcaggaaaccgcgttagagctgctgcgcactgcactgatcatggatcctggcgcaggcgtgaaaaagctgatcgacaaactcgccagtcagctgaagaaaaccgctgctgcgactatttccgggagtgagtctgctggcggcgatggcgaagaggggcagagtgatagccctgcagcaccaccggttccggcggtggcggccggaaagcctgcgcctaaagccgcccgtaaaagcacaaccaaaaaaccagcggcgcgcaaaaccacaacgaaaaaagcgcctgccgccaaaaaataa

SEQ ID NO: 94482 - DNA, 498 bp, Enterobacter aerogenes
atgagccttgtagccccccgcacaataaccccctcagcagaggatgtgccggatgtggacgacggcggcgagaaagtcaccgccggtgtgttctggcccgagattgtgttgagcgatgcccgtaaagagatgcgcatcaccggcacggtgacaacttcgcggctgaagcatgttgttatcgaggcggtgggccataccgctgaccagctcgatacctggcggatcgaacagcagaacgccggatttgcatcactggataccgtgccagcaatggaaattaacgggcagagcgcgaaggtttaccgctggcgccgtgcggtttacagcatagcccgcgccctgctgatcgaaacgttccgtgatgtggatacgaccggcgacgctggggagaagaaagccgctgcgctggcaagccaggcaaacgatcactggcgtgatgcgcgctgggctatctccgatattcgcggcgaagtgcgcaattctgcggaggcattctga

SEQ ID NO: 94483 - DNA, 201 bp, Enterobacter aerogenes
atgaaagtgaaggccttacagggcgatacggtggatttgctttgccagcgttattacggcaccacccagggcgtcaccgagattgtgcttgctgcgaacaagtcactggccgatcagatcttcatggaggccgggcaggtggtggaactgccggaggtaagcgcctcggcaacaaaggagacggtgcagctatggagttaa

SEQ ID NO: 94484 - DNA, 282 bp, Enterobacter aerogenes
atggagttaataaaccgcgcctggaattgggctgcatacctctggtcggtgtttctcggcagcgtcggcatgatgacgcaaaaggactggctgacggctattgcggcagtaacaggggtagtggtggcggtgttaggtgaaatgcatcgccgccggatggcccgtatccatgaaaccaataacgtgctgttgaacgatttgatcgacgccatacgcgacgacacggaaaaccggcaggacgtgaaagagctgatccgcactatcagggaggcgccacgatga

SEQ ID NO: 94485 - DNA, 552 bp, Enterobacter aerogenes
atgaaaaagggcgttattgcctgctctgtcgccgcgattatctcgctggccgccgtgctctggccgcagtcactgcgtaccagcccggaagcgcaactgaagatggcgaaatatgaggattgtcgcaagaccccgtattactgcccggcaggcgtattaaccgtggggatcggctcgaccgggaaagtgcagaaccgggagtatgccgaacaggagattgcagagcgctgggtgaatgatctgatgcgcgcagagcgttgcgttaaccgagagtttaacggcgcagctgcaccacagcgcgttttcgaggcgctgaccgatagcgcatttaatgtcggctgtagtggactagcctggtacaccaacaggcaggggaagaaggtcagaacgacaatctggcgtaacgcgcagtcagctgactggcgcggcgtctgcgaacgggtaacggattttgttaactcaggcggcaggcgcttgcagggactggtcaaccgtcgggaagagttccgggagtggtgcttgtcagatccgatgttcaagggggcgaaatga

SEQ ID NO: 94486 - DNA, 396 bp, Enterobacter aerogenes
atgaaaggattgcttgccgttatcacggtgatctgtgttcttctggcggtggcctgcatccggttaaccacggaaaccaacaagcgcgaagccgcagaaagagcgctggcaggcgctaaccaaaaactgagccagaccagcgatgtgctggccgaagtgcgggcgctgcgccaggacgtcagcgagattgaagccagtgtgaaagcgctggggcaaaagcgtaacgaagccggggagaaacgtcgtgaaaatatcaaaactgaactggccggcgatccctgcgcttctgctcttgtgcctgacgttgtcgctgacagcctgtaccagcgcgccgccgaagtcgccgccggtgatcattcaggagcctttgccagaaagcctgacggcaaaaactga

SEQ ID NO: 94487 - DNA, 459 bp, Enterobacter aerogenes
gtgaaaaaagccgaattgttacgcgaggcgctgatcgccgcaaacacctggtgtaaggccaaccctgaactgatcaccgtctgggtggagaaggggagcattgagacacaggcgaccggcgaaccctcgtttatgtatcgctacaccatacaggtgctggccgtggactttccggggcaggtggatgatctcatgctgccgatcatggcgtgggtatggcattaccagcctgatttgctgctcaacccggacaataaccgcaaagttgagtttgacgcggacattatcagtgatgacatggccgatgtgctgtttaaggtgccggtctgggagcgcgtcatggtggaactcgtcaacgggaaacccgttgctacgcacctggcggaagaccgcccgcgcattaatggcggtgagtgggaagtggtcttcgatccgggctttgagggagcgatgacatga

SEQ ID NO: 94488 - DNA, 642 bp, Enterobacter aerogenes
atgagcaacgatgctgcgctgtttcaacagcttgatcaggtcttcgcggaaatcctttccgctatgacgccagcacgtcgcctgcgcacggcaagaggtattgccaccacgctgcgtcgtactcagagccagcggatcggtaagcaggttgcgccggacggcacaccgtaccagaagcggcaccgccgggtactgcgttcgcaggccgggatcgggtttatctggcaaggggaagagcgccgcctgcgcaactggcgggcgacgcgtggtagtcgcgggcgcatgttaacggggtttgatgaggggcgcggctcggtccggtcgttttaccgtgctgatatcgagcgttatctcaatatcagcttcaacgagactcgccgcgatacgacaaaagccgatccaatgttccgtcgcctgcgcaccgcgcgctttctgaaagctcgcgccacctctgaaggggcaagcgtgggattcactggcgtggcggcccgtattgcccgcgttcaccagtatggattgcgtgaccgggtgaatgacagcggtgcgatggcgagttatccccgccgtgaactgctgggcctgagtaagacggaacgcatgatgattgcccggcaggtgattgattcgctgggagtgcgctga

SEQ ID NO: 94489 - DNA, 585 bp, Enterobacter aerogenes
atggatattgccgaactgatccgcctgctggagaacatcggccgcaccggtacggtgacggagatcgacgaggaaaactggcgagtccgggtgcaaagcggcggactggaaacgacctggctgcgctggaacgcgcagcgggccggagcatttaaggtttgggtgccgccgtccattggcgagcaggtctggctcttgtgtctcggcggtaacacggataccgccatcattggcggcagcctgtacagcgacgacaacccggcgccgggcgcgacacgtaatgaaatggtggtaacggctcctgatggtgcgcgttttcgttatgacgccgaggcgggcgccttacaggtgaagggtattaaatcggcagtgatcgaggcgtcggtgatcgtcactctggatacgccggaggtgaactgcaccaacctgttgcgcgcgaagaatcttgatatcaccgaaggcggagaaatgagcggcaactttaaccataaaggtggaaagttcatctccaacggcgtgcaggtggatgaccatgatcacggcaatgttgaacgcggtggtgactggacggagggcacccgatga

SEQ ID NO: 94490 - DNA, 369 bp, Enterobacter aerogenes
atgagcgagcgatatcgcggtatgaatgcgaacggtgccgggacgctgacggatgaagatcatgtgtggcagtccgtgggcgatattctgctgacgccggtaaatacgcgcattatgcgccgcaattacggatcgctatgcccggatttgatcgacagcccgcagaacgacgttacgcgcctgcaactgatgagcgccgctgttatcgcgctggcggcatgggagccgcggatcgcgctggacgctatcaatattcactattctgcttcgggcgcagtaacggcggagttatccggaatgctgactgaaagcatggaaaagagcaccagatcggtaaagttaaggagcgccaaaaatgccgacaattga

SEQ ID NO: 94491 - DNA, 900 bp, Enterobacter aerogenes
atgccgacaattgacctctcgcagctgccgcagccgaccattatcgaggaactggattttgaagaaatcctgatcgaggtgaaagcggtgatggtggccgcctatccggcggatcagcaggctgctgttatcgcggcgctggcgctggagtctgaaccgctgaacgttatcgcccaggcactggcatatcgcgagatgttactgcgccagcgtattaacgaaggggcggccgcctgcatgctgagtcattcgaccggcgacgatctggataatatcgcggcgaacctcgataccgaacgcctgataaagaccgaagcaaccgagacaaccgatgccgaaatggaaagtgatgaggcgctacgcctgcgggcacaggctgcttttgagggaatgagtgtcgccgggccatcggcggcctatgaatactttgcccgtagcgccagcggaaaagtagccgatgcccgggcgtccagcccggcaccggcagaggtgattattgcggtgctgtccaccgaaggcgacggtactgcgtcgccggaactgctcgatgcagttgccgaagcggtaaacgatgaagaggttcgcccgttaggtgatcgtgtgacggtgcgcagcgctgagattgtcgattacgagattaacgccacgctgtacctgtatccggggccggagtcagagccgatcatcaatgcggctgatgcatcgttacaaaagttcctgaagcagaacgataaaaaaatcagcagagatgtggcgcgctccgccatttcagcggcgctacatgtccagggcgtacagcgcgtcgtgctgaattcaccggcggacgatatcaggatcagcgatatccaggcggccaggaatatcggctacaacctggaaaatggcggaacggatgaataa

SEQ ID NO: 94492 - DNA, 609 bp, Enterobacter aerogenes
atgaataacacgcttcttcctccgtctgccagcgcgtggatgcgtggagccgaagcagccacggcgaagctgtccggaatcacggtagccattcgcacgctgtggacgccgacggcatgcccggttgatttactgccgtatctggcgtgggcgctgtcggttgatcggtgggataagaactggccggcagagaaaaaaatagcgtcaatccagcaatcctactggcttcatcgccgaaagggcacccgcgcagctgtgcggcgagtgattgaagatatggggttttccgcgacgtttgcggagtggttcgacgtcggcgacgagccagggactttccggcttgaggttgatgttaacgaggttgggttaacgccaaagacactggatgaattaaaccgactgattggtgatgcaaaacccgtgagtcggcatctggcacaaatgacgattagcacgagcgccagaggaaatgcctggattggcgtagcaccatttgacggcgcaataaccactgtatacccgccaggatatacacccgatgacagtatttattttgatggcgctgcgcactatagcggcaattattatttttcaggtgagcagaaatga

SEQ ID NO: 94493 - DNA, 3327 bp, Enterobacter aerogenes
atgacagatattatcgaaaaatcagtttgggaaggctctattcatctgttgtcgcgtactgaaaaagtagagggcggaatgagtggcgcagcgaataagcaggcacagcagcttgctaaccgcacgcgttatctgatggatagtctggatgtgattaaatcgggtgagtcgccgtactggtcagaggaagccgcggcgacagctattgaacagggtgtcattccggaaggtgcgcttttttctgtcaggagcaaaagtgagcgaagctgggttgatgaatacagaaatgtgaatggtgcgccagttgctaccggcaaatctctgccggatgcttccgctattattccgtttattgtaccgaacgaatccgatccaacgggaaccgctacaggtcttgctctaacgcgcggcgggcaatatttcaccgtacgtcatgatgatgacgaatatccgataacgtattatctgaataataacggtgtggctgaagtcgttgatcgggtgccgggagtatcaacggttaatcagattcatcgtgatatcagaaaagcaaatatttatttgtcagggaataaccttttcaacaaagatacagtaacagtcgggtattatttatttgaaggaactggcgagccgcgagtaaacccggattattgttattcagattatattgatgtgaaagccgatagcatttacagctcagataaaagcattcgcatcgtcacgttttatgatgagaactacaactatcttagtgacattattaatgtgtattcattcacggtacctgtgaatgctgcacacgttcgcctgtctgtttctttgcccatgatcgatgattttcagctgtcatttggggcaggcgttctcccctatgaaagctatcagatggtgctgccgcaaaatgtccaggccgcccgaatgaatgtgattgaggcgctggactttacaccaggtaaaaaccttttcgatccggcggttgtactgaacggagtgcacctgtcatctatcgggacgatttacactgatggcgattacagcacgtcagtatcgggttatatccccgtaacgcagggtgagcacctttgtatcaaccagcagtggaaaaccgccgcttggtatgatgcaaatggtgtctttatcagcagacaatttgatgcgtcgtatttagggaaacctatcaatgcgtttgtgattccagagaacgccgtgtttttgcgcgttgaggttccggcggcggttgttgcggctaccatggttgaacgtggtgaaaaggcgactgcgtttgagccgtttttgctcgcatcaccagagcaatacgcgggccgaaaggtgcagtatgggaaggcggtgaaagatgatactccggttatttttggcgcaggtaccaacctgtttaacaaaaatacagtccggactggatatatcaatgagtatgggtctgtatatcccgcacaaggctcatcaggtgcggattatgttcactccgactacattcctgtgaaagtgggcgtgaaatataaatcaaacctcccaatgcggtttgtggagttttcggacgcaaataaaacatttatctccacggtcaccagtgtgactgatttcaccccgttgcccgggatggaatatgtgcgcgttactgtattgcaggccaatgcggcagggttgtttttgtctgagggcgcttatctcgctccgaaatcggactttattcatgtgatggcaccgaaagataaagacggcacaccggtgcgtattccgggtgaaatggtatttgcggatgaactggatatcgattttgtacatcatggcctgctggtatccgggaaaaatatgtataacaaaaatgccaggaagtcgggttatattgatgagaagggagttatttacgagcctgactcacgatattattactctgattttattccagtggtgccaggagaaaagtacgcgtttaattctgattcgcggtttgtcgcattctacgcacagaacaaagcatttattaatgcaatagctgataccgggcagcatatcagagttatcaacgcgccagcggattgttattttgtcaggatcacaacatctgttgcgataagcgacactttccagatggaaaagggggaggtatcaaccgcatatgagtcatttgcgtactctctgctttctgaattgccggatggcacgcctgtaactggcgagggtgttcaacccgcaccagaagatgttcctgatgtatatggtatcgagaggctgcgggaaacgcatatgcgcctgaacaaattatcatatggcggtggtggtcggttttcatgggcccagataggggacagctacacgcgtggacaggtacgttacgcactgaagtgcgcgcagaaactttggcatatctataacggcgtcccggcgacggtcaccgttccgcccgttgggtttgggtatcgctcgtttggttacgatcagtatggcgacaataccgatattgtcggaacggaggttacccaaacgggttttgcctgccagtacaacaccgggaacgggcttgatatttcatccgtttccagtgctacagccgggtcaacaatcagctggaatgatgattttagcctcgggtttgcatatacgttgtatgcaggtggcgggagcggtgttatcagttataacgcgccgggaatgtcggcgccggtagagatcgacctgtccacctatgcggtaggtatgcagatgatcccactggcagaaatgccagagacgggcagcggaacggtaaccataacggtgatttctggcaccgtggtgctgtacggtgtccgtattcagaatgagacaaaatctggcgtaattgttcacaaactcggtggtagcggctcacacacaaataattgggttcatgctgatgctgaacgctggcagacagctttcgccactcttaatgcaaatctggtcaccattatgcttggtactaacgatcagggtgtgaaaatggccccggagacgtttaaagcaaacctcctgacgatgattaaccgggtaagggcggcctcgccgacggcggatattttgctaatttgtccggcagaaaataacaggccggggggaagcgccatcccaatggcgagttatgcacggcagatgtacgaactggctcgcgagcaagatgtggcgtttctgaacctgcaaagctcgtttggcgtaaaaccagccgattatgcttatggctcctcgcgtccgtggatggtaggtgatggcttacatcctgatccggagaccggcggttacgctattgccgcagcgataattcgtgctctcggtttgccagcgatttaa

SEQ ID NO: 94494 - DNA, 1074 bp, Enterobacter aerogenes
atggaaaaagtatatcaagccgttctgactactatcgggcgtgacaagctggccgaggcggcaattactggcgagccagtaggtttttccagtatggcgattggtgacggtggtggggaaacgccagtgccagatcctgatgcaacagagttggttaatgaggtatttcgtgcaccactgaaccggctggtaattgcagaccaggcggcgaatatcatccgtgctgagatgattatgcagccgcaaagcggcgggttctggatgcgggaggcagcgctttataacgatgaaggggagtgtctggcagtagccagcttgccgccatcatataagccgcagcttgccgaggggtcgggtcgcctgcatgctgtaaatatctggatcgccgtcagcagtaccgccgatattgagctaaaagctgatccgtcagttattctcgctacggttgatgaagtaaataaagccagggatgaggcgaaggactacgccgatcaggtcgttggtgatctggataccagtattcagcagattatcgctgacgctatcactgcggcgcgtcgggatttctgggaagaagaaaacccgccaggaacggtgcgcttctttgctcgaaatatcgatccgaacgagaaatggccgtggtcgcaatggacttacactggcgagaataaaacaatccgcgtcggcaaggctgacggttcggacgtcggaagcgatggcgggcaagatgaaattactcttgcaggggaacacttgccgccgcacaaacacagggtaaagggaaaaacccaatcttttcattttgaacggattgaaaccgaagacgcgggagagcatagccatgaatttccgttaaccggggacgccagtaatacgggcatggctgatggtggtgatccggcaaaacaagatggcactcagagaacatctacacaaccggcgcaccggcatggtgttaacatccctgatcatgggcatgaaattgactttgaatcagagagcgcagggggcggaaagtcattcagtatcgttgaagctcacatcctgctgatgtgctgggctcgggtggcatag

SEQ ID NO: 94495 - DNA, 489 bp, Enterobacter aerogenes
atgatgatggttttcggaatgtttgtttttacgctgcgcacggccccttatcagcagctccagcacgcgcaggaatggcggcatgttaaaaatgaccgggttaatcagtctgccggttggcagtacatcgggccaggtgaggataatattaccctgtccggggtactctatccggaaattaccggcggcaacctgtcgctttctgcgctggagactatcgggtattctggtcgcccctggccgctgattgaaggtgatggcaggatttacggaatgtacgtcatgacgcggctggagcgaggcaaaacagagttcgatcagttcggtggcgcaaagaaaattgaatttacgctaagcctcagccgggcggacgcagattttcgcgagaagctgcaatcatcctccatcagcgatgccctggcagaccttcagagcagtgctaccaaagccattaacgcaacaaccagctctcttaatcgcctgttttaa

SEQ ID NO: 94496 - DNA, 2727 bp, Enterobacter aerogenes
atggatcttagtattcgcgttgcgttcagcgccattgataaactcacccgtccggtcaacgccgccagtaaagctattggcggcctttctgaatccctaaagaaaacgcaatcgtcgatcaaggatctggagaaaagcgcagcggcattcgacaagctacgctcgcaggccaatgaaacggcgcagaaactaaaaactacccaacgagcctttgacggactcaaccagaaacagcgcgaaggcggccagcttaccgaagcccaggcggctcgtcttgaatcgctgcgcggcaagctctcgcggctgacggatacctataacaaacagaccacgcagctgcgcacggcggcgcaggcggtgcgccagcacggtgttaacctgtcatccggcagcggtgcaattcagagcgcaatccggcgcacagagcaatataaccagacgctggagcgcgaacgtcgccaactggcggccacgacacgcgcccaggcaagctatgaacgcgccaaagaaaccgcagggaaactccgtggcgctggcatggggatgacacttggcgcagcggctacaggttatgcggcggggtcgttcctggcgcctgcggtgggttttgatgaggaaatgtcacgcgtacaggcgttaacccgcctcagcaaaaactcatcccagctgtccgacctgcgcgcgcaggcgaaaaagctcggcgccgaaacggcctttaccacccgcgacgctgcgagcggtcaggcatttctcgcgatggccggcttcactcctgaagctattcaggcggccttacccggcgtgctaaacatggcgctggccggtggcatggatcttggcgaaagtgccgatatcagctctaacatcctgtcgcaattccgtctcgatccaaaggaaatggatcgcgtcagcgatgtgctgactgccgcctttacccgcaccaacaccgatttaaccaatatcggcgaagcgatgaaatacgcgggtaccggcatggccggtctgggtgttgatgttgaacgcaccaccgccatgatcggcgtaatggcgaacgtgggtctgcgaggtagtatcgcgggtacaggactgcaaacgacgttctcccgactcgcagcacccaccaccaaagcacaggccgcgctgaaacaacttggtgttaccgtggctgacgctaccggcaaaatgcgaccggcagaagccatcctctcggatatctataaatccgtctcgaagtacggcgataccgatcaactgtccttcttcaaagatatcgcaggggaagaagcggccaaatcattccaggcgctggtgagatctgcgggtagcggtgagctgcaaaagctactgacagatttacgcggatcacagggtgaagcgcagaaagcggcaaaagtgatggccgacaacctcagcggcgatctgaaaaatctggatagcgcatgggaaggcttccgcattcaggttgaagaaaccaccgacgggccattacgtaaactgactcaggggctgagtgatttaattacgtcagccagtgaatgggtgaaagaaaacccgcgattgacgcagacgctaatccttgtcgggggagcgctgaccgtcttcgctggagccataggcattgccagcattgctgccagttttatcctcggccccctggcaaaactccgtctgattctcagtatgatcggcatctcatcgatcaccgcgaccggcggcatctcgacgctcggtatggcgttctcaggtttaagagtcatccttgcttctctactcgggatccccggcctgattctggcggcgttcattaccgccggcctgctcatctggcgatactgggagcctattaaggcgtttttctccgggatgtttaccggcatcagccaggggctttccccgctgattcagtcgttttctttcctggtaccgctgtttgacgccatcagcaccggagtggcgaaagtctggggctggttcagccagttatttacaccgattgatttttcccgcgatgcgctggataagtgcgccagcgccgggaaaacatttggcgaggtgctgggtaccgccctgaatctgctttttaccccgctccgcttgctgaccgaaggagtcagcttgttgcttgaaaagctggggttaatcccttccggaattgacgctgcgcgggctaaggccaacaacctcgaacccaaaaaaccgacatcatgggagtgggatccgaagcaaaagaaaatggttcaaaaggcgtgggactggtcacctaaaaaatcagattcccccgttaccgcaggcgcgccgcccgtctcctctccgctgtccggcaacaccggcacgttacgccgcattgctgataacacgaaggcgaccgccgacaacacgaaggaagcgcgcaaaaagattggccccggcgacattatttttaaaaacctgcctcgtgcgctggccttgcgcggcgcctatcaggaggcgcggatctcaccgcaggcaataccgcgcgttgcagctccggcggcaggcggcattctctccgttccttcagcgaaacaaggcccgctgtcaacgcccgtttccaccccgacaagtagtgcgccagtgtttaacctggtctttaacgaagtcggccagcattcagcgcgggatctggaaagaatggtcaggaatgccgttcgcgatgcaatggccagcacaaccagaagtaaccgtggctcgttccgcgacagagattag

SEQ ID NO: 94497 - DNA, 300 bp, Enterobacter aerogenes
atgtctgttactttaagcaagcctatcaaacgcggtgatcaggaaattaaaaccatcgctatcaccgacaccatcaagcaggctggctcgctgcgcggcctgaaactggttgatgtgctcaacttcgactatgactccgtctccacgctgctgacgcgcacaaccagcccgcaactgacagctgtcgagattgccacgatggcgaccggcgactttactgcgctgtgtgaagagatcacgccttttttgacgaaagcggagccgtccgcagtcaccgaagcggcgacggcgagcaagtaa

SEQ ID NO: 94498 - DNA, 516 bp, Enterobacter aerogenes
atggctattcctaaaaaactgcggctgtttaccctctttgtggacggggaaaactatatcgggaaagtgcctagcgtcacgctcccgaaactcacccggaaaacggacgactatcagggcggcggcatgcttggcgcggcaggcgtcgatctcggcctggaagccggggcgctggatgcatcaatgattgtcggtggtgtagtcgaagagctgatcctgaaatggggcggcgatattgacgaattgcgcctgcgctttgtaggtgagatttacagcggcggtaccagctcgctgctggaagtcgaaatgcgtggtcgcattaccgaaatcgataagggtgaggcgaaacagggtgatgacactaaccacacttatgcgatcaaaaacacctattacaaagagtcagtagacgataagcccctgctggaaatcgacttgctgaacttcatctacaaacgcaacggtaagagcctctatccggatcgcattgcctccgcgctgggcctcggccagtaa

SEQ ID NO: 94499 - DNA, 1182 bp, Enterobacter aerogenes
atgaccgacaactttttccacggggcgcgcaccaaagaaaacaccgacctacagaccgtaatcaacgatgttgattcaacagtcattggcctggtggcggttgctgaggatgccgatcccgaaacttttccacttgatacaccggtactgattacgcgagtgatcagcgttctgggtaaagccggtaaaaccggttctctgtacaaatcgctcaaggctatttccgaccaggtcagcacccgcgtgatcgtcgtgcgtgtcgctgaggctaaagccggggaaggcgccccgacgcagtcgcagctcatcatcggcggaacgaaggcagacggcagctataccggcatgtttgccctgctgacagcagagcaaaaaaccggttatcgcccgcgcatcctcggcgtaccaatgtatgacactcaggaggtcaccgcgcagttacgcgtgattgcaaagcagttgcgggcgttctcttacagctattgcgatggctgcgaaacgatcaccgaagcgaaaacttatcgtgaacaatttgcagagcgcgaaggcatgctgatctggccgaacttcatcgcctacaactcactgaccggcgccaatgaagaatttcccgccgtggcttatgcattaggtctgcgagccctgatcgacaacgagcagggctggcataaatcgctatctaacgtggcggttaaaaacgtgctggggattaccaaagacgtgttctgggcgctacaggcggaagactccgacgccaacgagttgaacgccaacgaaatcaccacgctgattaagcgtgacggcttccgcttctggggcaaccgcaccacagataccgaagaatatattttcgaggtgtacacccgtaccgcccaaatcctggcggacagtatcgccgaggcgcaatttaccactgttgacagcccactcaccccggcgaacgtgaaagacgtggtaagcggtattaacgccaaacttcaggcactcgtcacggcgggcaaactgattggtgcggcgtgctggtttgatatcgtcgataacccgaccactggcctgcgccagggtaaggctgtcgtgcgctacaactacagcccggtaccgccgctggaagatttaacgctgatccagaccttcaccgatcagtattacgaaccggcttttgcatcgttgggaggtgcgtaa

SEQ ID NO: 94500 - DNA, 1155 bp, Enterobacter aerogenes
atggcgctgaacacagacacaatcgacaatgcaaaaagcctgctgaatgcaggcgctaaggacttcaaaaattaccaggatgagttgtcacgcatcccggcgtttaatgtcctgattggcggcaaggcgttgaccgtactggatgagaaaatgatttctctggagctgacggataacaggggatttaacgccgacgagctgacgatcaccgttgatgacagccagggtgatattgagctgccgccgcgtggcgccgagctgtcgttatcactcggctggcagggggagccgctaatctacaaggggatttatattgtcgatgaggtagcgcattcagggccgccagaccgcatcgagataaccgcccgcagcgctgatttccgcgatgaattcaatatcaaacgcgaggtgtcgtggcatgacgtgacggtagagcgcatcgtgtcggctatcgctcaccgttacaaactgaagccggttatttccgagcaactgatgaatgccgaaatagatcatgctgaccagacccaggaaagtgatatgtcgttcctgacgcgtatggcggatattctcggcgccattgccacggtgaaaaacggttgcctgttgttcattctgccgggtggcggcgttagtgcgaacggcaaagcgctgccggagttcgccattacgcgcggtagtgcagaccgccattcgttccgtattgcagaccgcgacgcttacactggtgtgcaggcttactggctggatctgaatttcggcaaaaagaaaaaagtcacggtgaagaagcgtaagaaaaccacgaagaagaagccccgcagcagtagccgggagggggattatcttgccggggaagatggtaatgtttttgtactccgtacaacttacagcagcgaaatggcggcacaacgcgcagccgccgcaaagtggcaacagcttcagcgcggtgcagctgaattttcgttaaccctggcttatgggcgcgcagatctttatccggagatgcacggaaccgtaaagggatttaaagatgcgatagacaagcaggactggataatcgcgagggtggggcatacggtagacgatagcggattcaaaacccggctggagcttgaagcgaaaatacctgaatggattgcagaaagtgagggttag

SEQ ID NO: 94501 - DNA, 249 bp, Enterobacter aerogenes
atgtttaagtgtcctgtttgtggtgccgttgcaaaaacgcgtaccagtcgctcgttaagcaataccaccgttcggcattatcaccagtgccagaattttgaatgtagtatcactttcaccacgctaaacagcgttgaaaaactggtaacaaagcgcgcgccgcgtgagaagttgccgccgggctttatcccttcagatgcgtttccggcatcgcactacggtgacgatcagctcagctttgcaatatga

SEQ ID NO: 94502 - DNA, 399 bp, Enterobacter aerogenes
atgacaacaacagatctcgccccgaagggcgaattggttttacgtaccctggccatgccggcggataccaacgcgaacggtgatatttttggcggctggctgatgtcgcagatggatatcggcggcgcgattatggccaaagagattgcccgcggccgcgttgtgaccgtccgtgttgatggtatgacttttttacgcccggtcgccgttggcgatgtcgtgtgctgctatgcccgctgcgtaaaacgcggtaacacctcaatcaccattaatattgaggtatgggtgaaaaaagtatcgacggaaccgctgggccagcgttataaggcaacggaagccctgtttatttatgtggcggtagacaatgaaggcaagccgcgagcgctgcctgccgaatga

SEQ ID NO: 94503 - DNA, 1182 bp, Enterobacter aerogenes
atgctcacagatactaagttacgaaagtcgctgggaaagcgcagagagaaggttgaggttatctctgacgcaaacggcctaaatgtacgtttaagcataaccggttcggtcacattcttctatcggtatcgctggcagggtaagcctgtgcagttgagtatcggagaatatccaaccatgtctctgtcgcaagccagagacagaaggcaacagttcagggcgtggttgagtgaagggtatgatccgcgacagaaagtgttggtagagaaagcggagagaatagaagctctgacagttgatgaggcttatgaatattgggtgaagcattactgcatcccggagggactcatcaaaattgaagctaatggcaagagtttcaaaaaacacattagcccccgtatcggcaaggctatcgtcgaccagacagtaaaggcaaactggctcgaagtttttgatgcgatgggaaggagtgttatctcaggcgagatgctgtccctgaccaagcgtgcattccgattctgccacaacaggggggttatcaaaaacaatcctcttgaatcgctgcggcggtcagatgttgggatcgctgcaaaaatgaaggaaaggaagctctcagacggtgagctaaagcaggtgtgggatactcttttctctcttccaccttcacagcagcttgtcataagattcatgatcctgactgggtgccgtgcggcagaaataagaaagtcacgatgggactggttcgatttcaaagaaagaacatggacagtgccagcagaggattataagaccggcaaaactattcgtcgcgcgctgccggatacggcgatccgacttctgcaagagcatcagcgcgggtcaatcactaaacacgtccttacacctgcccaattccgtgataaagaagatgtaccacctggccaaacgttagtctcgacctacgctatgcaggtcgtacggaagaacgggatgaaggagtggtcattgcatgacttgaggcgaacagtggccacgcgcctgtccgaacttggagcgccgccacacgttatagaaaagttgctcggacatcaaatgggaggagttatggcaagatacaaccttcatgactatatggacgatcagcatgagtggctggatatctggcagaagcacctgcaggagattattggatatcctatttag

SEQ ID NO: 94504 - DNA, 204 bp, Enterobacter aerogenes
atgaatgacagcatcctggttacaagcgaaatccttgcccgttacaaaatttcccgcagcacgctctatttctggagcacgccggaacgtatgccgtcctgcttttcgtgtccgttcccgaaaccaaccatacccgggaatccaaagcgctggcgcgaatcggaaattaagtcatgggaagataaagtcaacttcactaaatag

SEQ ID NO: 94505 - DNA, 342 bp, Enterobacter aerogenes
atgattggaatactcaaaccggtccaggaatcacaatggcctgtaaggtgccacgatcctaagcggagcaacgtctgggctaactcttattttctggtccaggagtttcaggaagaaaacggcgttatccgtctatcagtgaatgccaccagcattgccagctcaggccggtggaaagatggcatcagttgggatgcgctgcaggagataaagtcagctgtcggttacggagatcgtgatgccgtagaaatatatccgcgggattcagacatcgttaacgtggcgaacatgcgccatttgtggattacaccggagccaatctcttttgcctggcgtaaatga

SEQ ID NO: 94506 - DNA, 690 bp, Enterobacter aerogenes
gtgaaagaacgcggaatgatttttaacggtgaggtggttcgcgccattctcgacggccggaagacgcagaccaggcggatcatgaaggtgcagcctgagccatcgaaatcgcgaccaggggatttttggttttcatcgaaaaaattagaaagcatggtgcacatttctgactttgcgccgggtaactcacctattgccgattatcaccttttcattcaggagcattgctgcccgtttggtgctgtcggcgaccgcatctgggtgcgtgagacgtgggcgcgctacaacatcgaccagaacagccacgacttagcgtaccgcgccacaactccagcagactggccagaagaaggccgctggcgtcccagcatccacatgccgcgctgggccagccgtattctgctggaaataaccaatgtgcggattgagcggctgaacgctattagcccggaagatgcagagtcagaggggctagagcgtaccaactttacaggtttcggcgacgagcctggattacctagctatccagagccggatgtttatttcgacccactgaagaaacagtggaaggaatatccgcctgaagcattcgcggggctatgggaatccatctacggcgaaggaagttggaaggccaacccttgggtgtgggttatcgagttcaagcgcgtagaaggcggtgcagcatga

SEQ ID NO: 94507 - DNA, 219 bp, Enterobacter aerogenes
atgacaccagccgacgaaaacgccatccgcgccgcctgccgccgctgcaccgaggaaatcaaacaggctatgcgcaaaaagccaaagcctaactgggacgcaacagttaagcccatcatcaagaaacaccaccagcaaattgcacctctgggagttagcctcctggagttcgtcgtatacacagggcggcttaatcgccgtttcggagtggaatcgtga

SEQ ID NO: 94508 - DNA, 240 bp, Enterobacter aerogenes
atgggcttttatgttcagattcaaaaaacatcctctcacgatggaaagtctaaatatgttttttacaacgaacgtggcagaggtgagttcagcatcaacgaaagcaccggaaaaattgattactatcaaaaaatgccgaatgataccagtaacatagccttctcaagagcggctataaaggtgttaaaatactgggaggcaaatggcaaacttccagatcaagaagtatgggcttcttaa

SEQ ID NO: 94509 - DNA, 480 bp, Enterobacter aerogenes
atggacaataaaatagaatctgcattgcagagtttatatgacatactgagtaatgaaggtgtcgagtcaaacactgctgtccaaaaaacaattacaactaacgctctacttaaagattttgacttggcagaaaaagaatatgagcgaatcagaaatgattacactgatattcaaaaaatatctgaaactttagacaaagacaatgatgttgttgatagggtaaaaaatcatattttttataatgagcatgtaattcagtatcaagataacaccgtaagggttggaaggcttgatgctgaccctgaaatagtcaacgcatgggacagacttgcttgcaataattgtattgatacagattatgatttctttgctcatgaggagtatgagtcattcatagcactaaatggcgatgtgatatacaatgaagcacatagactaacaatagaagcaggcttcatctgggaaccgaaggaggaatga

SEQ ID NO: 94510 - DNA, 411 bp, Enterobacter aerogenes
atggaaaacaaattacttgaaaataaagacataaacaaggaaagtttgcagagtatttttgataatgctggaattaaaacagctatcattaataatgacttggtaatccaaaaggataatattaagtctattgtctattgtaaacctgacgtcgttagcattgtttcgagctttcgattaaagcctgacttagacgaaaaaatacttcaggcaaaacttgtcgatctgaatcatggggcttacccacatcgtttcttcattacatcagacaataaaacattatcaatatcaataacatatctcacaagtgtcggaatatacatacctcaatttgtgcttactacaaacgcttacttcgcattcatattacttgattttaagcgtatagactgttcagaaattttaatgtaa

SEQ ID NO: 94511 - DNA, 696 bp, Enterobacter aerogenes
atgaaaacgacactcgcagaacgactcaaagaagcgcgctctaaacgaggccttactcaaaaggctctcggggagttagttggggtaagccaagcggctatacagaagattgaaactggcaaagcaaatcaaacgaccaagctggtagagatcgccaacgctcttggggttcaaccagaatggctaagttccggtgaaggcgtgatgaataccggcggagaacactctgcccaagttcaatccagacactcagcctcagacactttcagggttgacgtgcttgatctcacagtaagtgccgggccaggcatcataaacaatgaattcatagaaattctgcgatcagtcgaatattcagaagctgatgcccgccagatgtttaatggacgcaaggctgatcaaatcagaataattaacgtccgtggcgatagcatgagcgggactatcgagcctggagaccttcttttcgtcgatatcagcgttcagcgcttcgatggggatgggatttatgctttcctctacgatgagacggcacacgttaagcgtcttcagatgatgaaggataagcttattgtgatatcggataacaaaacctatgtaccatgggaacctatcgagaaagacgagatgaatcgtgtttttgtgttcggcaaagttattggcagcatgccgcaaacatacagaaagcatgggtag

SEQ ID NO: 94512 - DNA, 231 bp, Enterobacter aerogenes
atgaacccagtaattaaaaccgcgatcagtattgtcggttctcagaaaaaactgggcgatgcctgcgaagtttctcagcaggccgtttacaagtggctgcataacaaagcgaaggtttcccctgagcacgttggcagcattgttagcgccactggaggagcaatcaaggctcaccagattcgccctgacttgccgacattgttcccgaatgccgagaagtcagtagcttag

SEQ ID NO: 94513 - DNA, 147 bp, Enterobacter aerogenes
atggcaaaaaattcacgctattaccataccgctgtacataaaaacataacccgcgaccgcttcatccgcacggttaatccgattgtggcagagaagatgcgcgccatcctggaagaactgaaacgcaaggagagaggccgtgggtaa

SEQ ID NO: 94514 - DNA, 897 bp, Enterobacter aerogenes
gtgggtaacgtatccaatttagccgaagccagagaggccagaaggctccatcaaccgcgtacacaaggcggtaaggggtttgccttgctgcaccgtaaaattatggatgtgccgttctataaggatgcagaggcggcgcatttgtgggttcaccttctcctgcgagctaaccacgaacagacactggtatcgactgatgtcggagatgtgatctgtgaacgtggcgagttcatcacagggcgaaacacactagcgatggaaacgggattgactgctgatcgtgttaaatcactgctccgtaaattcctgaacctggggatgatcaccaccaaatcgaacaaccgttttactgttctaaaagtggtcaaatatgacgaatatcagtcaaatttttgtccagcagatgtccagcgagtgtccagccaaaatgcagttatatcaatgcatgcggacgtgtcgtgtccagcagatgtccagccagtgtccacagataacaatatattaaataactctcttactaacgtaagagagagtgcatcagcgacagaaaatcaggacaagaaaaaaacgtctctcagctgtgagcaggtggttgaggtttatcaccgtgtactgcctgaagcccagggaatacgagtcctgactgacaagcgtcgcaatctgatccgcaacttctggaaaaaagccggagcagcgaaccgccagctcggcggtgtagggttcaccctggcagactgggaagcttacctgaactacatcgctaccaactgccgctggatgctggagaatcgcccggacaaccgcaccggtcgcacatggcgccgcaagtcgcttgaatacttcctgaacgttgacgtttacgtaaagacgcgcgagggggcctgcgatgacctctga

SEQ ID NO: 94515 - DNA, 1431 bp, Enterobacter aerogenes
atgacctctgaattcatgacccctccgagcagcattgaggctgagcaaagcgtactgggtggactcctgctggatgacgacagcagcgaacgtactcagaaagttctgtcgatactcaagccagaatcgttttactcgcgcgcgcatcaggtaattttcgcggaaatgcgtcagatgtaccgggaccagaagccggtggacctgctgacactgttcgatgcgctggaaagcaagtcgctgactgaatcggtaggtggctttgcatatctggctgaactgtcaaaaaacacgccaagcgcggcgaatattgtggcctatgcaatgcgtgttcgtgagacagcaatggaacggtacggcatcgagaaaaccacgaaggcgatcgaattgctctatgccaggaacggtatgacggcagatcagaaattcgacgctatccagggtctgtttactgagataaacgaccacgtcaaaaccgggagaagaacaggccttcgcacgttttatgacgccgtaaatgactggtcggccgaatttgacgaaaggatgaaaccggacggtcgttcccgcgggctgtctaccgggatccgttctctcgatgagttgcttggtgtgaagcgaattgtacgcggaagcctgtttgtcatcggcgcgcgcccaaagatggggaaaaccactctgtacacgcaactggctgttaactgcgccaccgtggaaaacgctcctgcattgatgttctccctggaaatgccagaagggcaaatggttgaaaaaatcaccgctcaacagggacgtcttacgccgaacctgttctatccggatatgaccaaggacgattttggttaccgcggcgactgggatggtgaccttcgtaaagctaccggcgtgatgagtgccctgatagacaccaataacctgctgatcgacgacacgcctggagtcgggctggcgcacatcgtatctgaagcaaggcgcatcaagcgtgagcgcggcaaggttggaatggtgctggtcgattacctgacgctgatgaccgctgataaagctgaacgaaacgaccttgcctatgggctgatcactaaaggcctgaagatgctcgccaaggagctggactgcgttgtcgtgctgctgacccagcttaaccgagatctggagaaacgaaccaacaagcgaccactgccaagcgattcacgcgacaccggtcagatcgaacaggattgcgactactggctggccatctaccgtgaaggcgcctacgacgagaacgctaaccaaagcgacacagagcttctgctgcgccttaaccggcatggtgagacaggtgttgtctattgcgagcagcgtcacggagcgatttatgactgcgatcaggaagctgccagtcagcgccggcgcgagaaagaggaaaaaacaaccaagcggggtggattttga

SEQ ID NO: 94516 - DNA, 303 bp, Enterobacter aerogenes
atgaaaaagaactctggcaaacaagccgttatcaacttcatcggcctacatccaggctgcaactttcaggatatccgccgcggtaccgggcttgactcttcggtggtcaattcctccctgtggcacatgaaccgtgacggtctgataaagcgggaaggtgagtgcaggagcttccgctacaccctgatcgataccacaactatcaccgaaagcgatccatcggttcagtatcgccagcgtcctggcggcgtaaacccaatgaccaacctttttaaccagtgcctggcgggagtaagaaaatga

SEQ ID NO: 94517 - DNA, 669 bp, Enterobacter aerogenes
atgaatatcgacacagtaaacgaacttattcagtcgctggagtcggctggtgagctatcaatcaaagaacgtaagtatctggagctggcgaaggagtatgcgaacaaggaagcggagggcgtggctcaggcgctaacgttcgagaaatgccgcgagctttcaggctgcccggctggcgtagacctgcaggactgggtgaagcagctggtaggggagaatgtggggctgaagtctggggcttcgtatttctcttacggctctgaacacaatttcgaatggcacaaaactgctgaggaagctgtcgaggcggctgaggcagcaattgacgactatcgtggtgatgcttgcgacgggtggagtgaagaagtcgatagcatttgctggggcatcatcatgcaatcatcaacgaaggttggcgaacgcccacgcaatgaagatgaccgttgcgatccagcgatcgatacagtttgcgattatgcgctgttgccgaatatcgaaacccccgccaccgatcgcatcgtagccgggattaaggctgatggggtggaagagtttgcgacttactgcggtgaagaaaattctgtattcgttgaggcaagggcttattaccgctcattacctgatgctgcctacgagttcgccaagcagctgcgcgagggggccaaatga

SEQ ID NO: 94518 - DNA, 291 bp, Enterobacter aerogenes
atgagaagtgtaattgactttgaaggagccaggtttttcgttaatggtcgcacttcaaacgtactcccggacggtactgaggtgaatattcgacaccagctaaatataacgctgacggatggaacgcagtttataaaaagtatctggtatccattcaattgggagcgatggattgataaaaaacagcaccatcgccatgcggatattggtggcttttaccggaaggtatcgccacgacaagccatattgctgcaaaaggcatgggatgaatatcaggagcgtacagcatga

SEQ ID NO: 94519 - DNA, 429 bp, Enterobacter aerogenes
atgactgatatcacccgactgttagcaagcctcaaacgccgctcagcccacgcaaaagagtttggggacagcattacgtttgtaaagctgaaagacatcgacgcgatggtagaggcgctggagaaggcgcagaggacgattgcatttcagcaaggagaaattaaagcgcttttgtcgtcgctggagtcccgcaccgtcaccatcgagccattccgcgcgtttgtcactgatgctgacttggcagcgctccaccgcttcgccgaatgctgtgatgaccctgaatctggcggtcacgatttggaaaaagaacaggtaagtcggcttgagagtatcggcgcgttacagcgctctgggcgtattagctacatcaccggctttggtgatttccttatttcgattacggctggcatcaagtgggaggctgagtga

SEQ ID NO: 94520 - DNA, 294 bp, Enterobacter aerogenes
atgtggcgaggaactgaccgcagcagaagccagatgatactgaccagctatcggtacgattatcaggagaaaaactcacaatcagtttatctggtgcggcataacagccgcattcagcagacggttctggagcaattcctgaccgtagagcgcgatagctttggtcgctttatgccaactatcgaactgaaagactttccggaaggacttagcgaccgtgagtcgatgctcaagcttgccgactggctgcaccgtttaggtgtggcgatcgaggataactggagtcaaccatga

SEQ ID NO: 94521 - DNA, 579 bp, Enterobacter aerogenes
atgaccaaatcaaccataaccagagagcgcctggaacaattggcaaacttcaaaggttcgccagtgacacgacaggaagagcaggaactagcccgcatggcactggccgcaatggacagcgagccggtggcgtggactgatgaagaagagttgcgcgatgcgaatgaaagcggaagcggttatttgtttggtattgagcgtgatgcaaacaaattcgccgacccgcgacgccagataatgctctatcgccacgcgcagccagcgccggtagtgctggatgaacgcgcagctttcaacgcatggaacaacgaggacaatctaccaatcgcaggggttggtgccaaaaatgccgcatggctggcatggcaagcccgtgccatgctccaggctgaacctgtaacgacggctaacaagttgggaaactctccggtaattccggatggttcagcggccattcttcgtcgatggttggcatttggctgcggtatgaaaaatataggaatccagttacctcgcaatttacttgctgaaacagaggtcatgctcgcagccaccatgcaggaggtgaaccgtggctaa

SEQ ID NO: 94522 - DNA, 282 bp, Enterobacter aerogenes
gtggctaatcttcagttggcagttaatggtgaatacttcgaccagatgaggtcaggagagaagacggaagagtatcgcctggttaattcgtactggtgccgtcgcattctggcgcggaaatatgatcgactgattatcactcgtggctatccaaagcgtgacgacatgagcaagcgtatcgatatcccctatgatggttacgaaatcaagatgataacgcacccacacttcgggccagaaccggtgaaagtgtttgctatcaaggtaaatattgatgcctaa

SEQ ID NO: 94523 - DNA, 141 bp, Enterobacter aerogenes
atgagccgtgatgttatcgaacgcatctgcgatcgctggtacaagctgcgcctttgccggcaccgcggcactgtacttgttgactaccgcattctgaagaatttcgtccgcatctatcaggcttcaggagagaaagcatga

SEQ ID NO: 94524 - DNA, 690 bp, Enterobacter aerogenes
atgaatacccagtaccttgagtatgttcgccagcagctgatagtggccaccgccgatctgagcggtgcgacgaaaggacagttggttgcctttgcggaaaacgcaatgtttgaagcgacggcacgcagcaataagcggatgaaggtagtcgaccctgcaacagggagaatggttaagccgagtaatcctccggttcccggtaagcagtcccgcgccaaaggcgcaaccatagccctggtgcagcccgttgagtattcgacagcaagctggcgccgggcgctcctgtcgctggaagaacatcagaaagcctggttgctctggaactacagcgagaatatccgctttgagcaccagatggtgatcactcagtgggcgtgggcgcagttcagtgagcaacttggcgcaaagaaggtggccggcaagacgatggagcgcctgaagaagcttatctggctggcggcacagaacgtgaaagcagagctggcgggtaagtatgtatatcagcaccaggaccttgcagccctgtgtggcgttaagcctgataactggtgccataactacgctgattactggcgggctatttgcgccatttttaagcggcttgatagcgactctcttctctgcgccgtgagaacacgatcacaacaaaaagcgactttttcgcagcaaggtcttgcaaaagtcaattaa

SEQ ID NO: 94525 - DNA, 210 bp, Enterobacter aerogenes
atgaccgctatcaaagctacttacataagcaaagaccagaacctgaccgatggcaccaccgtttactggtttgatgtaaacggagaaacctacggggttgtgcatggcggcgaaagctataacgccaaggttgttgattgtgacgggactccatcagaccaatacacaattgaccagttcaacatttccgaagagatgatcgcagaataa

SEQ ID NO: 94526 - DNA, 231 bp, Enterobacter aerogenes
atgtacagcaaactgttagccatatgcctgatgacgatgttgatcgggagctgcgcgaaaagtttacccgccccggtggtggttgatacggcctgcaactgggtacgaatcatctacctgaccgagcacgatatcgatgtgctggataagcagaccaagcgtgacattctggcgcataacaaatcagtgttggttaactgtccgtatcaaaccgaaaaggctacaaaatga

SEQ ID NO: 94527 - DNA, 255 bp, Enterobacter aerogenes
gtgggattatcaaaaaaagttaaagcattctttgcaggtgatgaggtgctggttaacgaaggtctgggctttgcatcatcactggagaatataaagttacttgcaaaagcatgtgaaccactcaaggcaatcatttcagactatgagaatggaacactcaaccaggagcagttcattgctaagagcatttcatgcatagctaaggacttcatccagctccgtgagtataaagactcaatggacatgcagtggtga

SEQ ID NO: 94528 - DNA, 201 bp, Enterobacter aerogenes
atggcaaagcaaaactggtttttttcatggaatgcatacgatgcaatcacggggcaatacctccctgagtattcccatagcgaaacttacgttagtgacaactcggcatcccctcatgaagtatttgaagatttgatggagcagaagggtaggttgcgcgaaaacctaagaattcactgcattgcattcaataagctttaa

SEQ ID NO: 94529 - DNA, 639 bp, Enterobacter aerogenes
gtgaccagcataaatgtcagcaggccatatcctcctgttaatttcatcggttccgagaactggcagccatacaccaggatcattcctgctaacgaagtgcatgagtgggttaacaagcaaatcctcatcgacaccggaagcatttacaacccagaccatgggcaccttctcgatgctgacctctgctttatgtgggcgtctgattccttcgcgaagaaagggcgctatgttcttggtcaggccgaacaggtaatgcttcgcgccggcggctggcagaaagccagaatggaacagcagatgcatgaatggttcgggcgcataccgaagttcatcatcacgttggctgccgattactgctctcaatgcagcgaccttgagttctgcgcattggtggagcatgagctttaccacattgcccaggctaccgatgactccggcgcgcctaagttcaacaaagagaccgggatgccggttcttactctacgcggacacgatgtcgaagagttcgttggtgtggtcaggcgttacggcgctagtaatgatgtgcaggagttggttgatgcggcaaacaggccggcggaggttgctcatctcgatgttgccagggcgtgcgggacttgcatgctgaaactggcttaa

SEQ ID NO: 94530 - DNA, 471 bp, Enterobacter aerogenes
atggctgcactaaaaccggaagtgaaagccgccatcgttcaaatgcttgcgtgctatgacagcctgtcaattgttgtcgaggctatccaaaaagattacggaataaaggtcacacctcagcaagttgaatcgcatgatccaacgaaggtaagcggcaagggtctggcaaaaaagtgggttgacctcttcaacgccacgcgcgaacgattcctgaatgaaatctccgatatcccgatcgcgaacaaatcctatcgcctacgcgtcctgcagcgaatgtccatgactgccgaaaacatgaagaacattggcatgacggctcagctactggagcaggcggctaaggaatgtggagatgcatatacaaacagacaaaaacttgagcacacagggaaagatggtgggccaatacagcaatcccacagcattgaagtcgacgaaaaggcgcttaacagcatattgagcaaactatga

SEQ ID NO: 94531 - DNA, 1560 bp, Enterobacter aerogenes
atgagccaaatactcgaatgggaagatttgagcgaagcagaacgccaagccatcaaagtcctgtccgagcgctcatttctggcctttaaccgcatattctttcagttgttgcagggtgagaagtggtcagttaactggcatcaccgatacattgcgcaggttatagaggatatcgtcgtcggcaagcgccgtaatgtcgtcttcaacgttcctccgggcagtggtaaaacagagatgttaagcatccatgcgccagtgtggacaatgcttaattgccagaaggtgagaaacctcaatatctccttcagcgatacccttacaaagcgcaacagccgcagaagccgagaaataatcacctccactgagtttcaggcgctatggcctcattcactgggcgttaatcaggctgatgagtggcaactactgaatgatgatgggaaggtaaaagcggaagtggttagtcgagcagccagtggtcagattaccggatcgcgtggcggctatcagatgcccggcttttcagggtggataaacctcgatgacttcgacaagcctctcgacgtgttctcagaggttaagagaaagaaagcgcagcagacattaaccaacactatccgctcccgtcgcgctaataagtcaaaagacaacccaacaccaatcgttgccattcagcagcgactgcacacagacgacagcagcgctttcatgctgtcaggcgccatgggtatcgactttgaacacgtcatcattcctgcgctcattgatgaagcctatatcgactccttaccagagtggcttaaggatcattgctggaatgacgtcaaagacagcgagaagatgcgaggttactggtcatactggcctgccaacgaatatgtaggagatctctgccggcagtgggacacggatgaatacacatttatgtctcaggggatgcaaaagcctatcaaactcggcggcaacgtatttgatggttcatggtggcaaacatacgggcctgacgcagataaacctgaacccgatcgctatgaatacaggttcactaccgcggatacagcacaaaagacagcgaaccataacgactggtcagttctgtgcgagtggggggtatacaaagatgacctgtatctcattcacatggagcgaggtaagtggaaggcgccagagctggaaacgaacttcaaagcgtttatctctcaagcatggcgcaagaatcgtgaatccggaacgctcagaaaaatctacgttgaagataagtccagcggtacagctctgattcagaaccttgagaaaaaacttccaattaagataaccgcgcttcagagaaataaagacaaggtaactcgcgctatggacgtcctgccggtggtcaaggcgcagcgcgtatatctacctgctgaggcgtcattctcatcagagtttattgctgagcatagtgcttttacctacgacgacacccacgaccacgacgatatcgtggataaccttatcgacgccgtgactgaggagctgctcctcggcagtgatgctttacgcagactcaaggcgcttgcaagctga

SEQ ID NO: 94532 - DNA, 1257 bp, Enterobacter aerogenes
atggctaaacgcaacaacaggcagcaaaagaaacacgataaacagatgcgcatggacagctatcaaaacgtgttcatgaatatcggtacgggtggtgacagatcggcgtacagccgtatccgtcaggctcacctgctaagcaaaagcacactggacaatatttatctcggggatggcctggggcgtcggattgtcgatatcgtggccgacgaaatgttccgggctggcttcgcaatagagggggcaagcaatgagccagaaatcatgtctcgttgggatgggctcaatctgacgcagcagtttaccgatgcggttgcttgggctcggctttacggcggatcactgatgcttttcggcgtcaacgatggtggcgaactgcaatcacctgtcggcgatggagaacttgagtttgtcagggtttatgaccgttatcaggtgcagcctttccttcgcgatctgaacccggaaagcatcacctacggtgagattatccagtaccagattaacccgatctccggtacgccatattacgtacacgccagccgttgccatattttcgacggggagcggttgccgaatcagattaggcaccagaatcagggttggggcgcttcgtgtttgcagggtatctatcaggcactaaccgacttcggcctgagtcacgcacatgcaacaagcctgcttgaacgcaagcagcagggagtttggtctgctgccgaccttgctgaactgtgtaaggacggcgaaggtcgtgatgctgttcaggctcgtctaaacatggtcgacatgacgcgcagcaatggcaacaccatcggcgtagatgcgaacacagagaagtacgaattgcttaatggcaatcttgatggcgtggtcgacgtgcaggaccgaaagcagttgcgcatatctgcactgactggcatcgatgaacaaatcctgttcaccaaaacgccgtcaggacagggagcggataaaaccactgttcctgagtcatggaagcagttgattggccgtaagcagaaggatgaggcaagaccggcaatagaaaaagcggttaactttctcactactgataaaacgtggacgattaagttcaacccgctttctgtaccaaccgagaaagagcaggcagaaacggctaaccagtggtcacaggctgatgagcgttattcccaacttggctgggtaagcaacgatgaaggtgttgccacactgaaaaaacgtggcggttacgtttatccagaggtgagcgatggctag

SEQ ID NO: 94533 - DNA, 804 bp, Enterobacter aerogenes
atggctagggtatggcttcacccgtatggcgttgagcgcgactatagcaacgctcttgtaaaggctaccagacagttcaacagggaaatcaattcagcatacggcgatatccgtttcgatggctggcaggacgacatgaatgcaattcttgcttatttgcgcaatgcaggtaacagaatcttcaacatagtcatcgaaaggctgccaactttttttgcattaacctctcagttcaacgatcgccagtggcgcctgatagtaaaaggcggaacaggatacgacatcccgccatcccaggctgtaattgccggacagacaactgtccccacatcttctggagtgctgggggtggatgcttaccgcgctgagccatggctaagggatatgcaggaaatatggatcgcagaaaacacgcgcctgattaagtcaatcccagctgatgagctttccgatatggagggagttattcagcgcggggtgatgaacggctccagcgccggaaccatcaagaagcaaatccaggagcgctacggcgtaactgaaagacgagcaaatctgatagcagtagatcagatagggaaagctaactctgcgcttactcagcagcgacagaaggatgccggaatagatggctatatctggcgcggcgtattggacaatagagagcggcaattacacgtcgaaagggagggaaagcattacaaatggtcctctcctccttctgacggccaccccgggcagccagtgcgctgccgatgttatgcagagcctgactggtctggttctgttttcgatatcgattaa

SEQ ID NO: 94534 - DNA, 1101 bp, Enterobacter aerogenes
atgaagacagttactcgctatgacaggggtgagcttcgtgcgtctgtaaatgaggatggctatctggaggacacgcccgtagtaggccgtgtcggaatccaggtatacagaaacccagatggtggcgttcgacgcgaattgcggcctcctgaagaggtatttaatgctgattcgctcgcatcattcaaaggcaagccaataactctgggccaccccggcgccgtaaacgcgaagaactcacgaaagcatcaggtaggaacgatgctggatatcggtaagcaggatggtaataacgtctctgtgccgatcattatccatgctgacgaagcaatcaatcaggctaaatcaggccgcgcaaagcaactttctctcggctaccgactggaccttgatgaaaccccaggtgaatgggaggggcagccctatgacgccattcagcgcaatatcagaatcaaccatttagctcttgtctcaaaggcccgtgccggagacgtggcaaccctgaatctggacggtgatgaagaaatcatcgttgaagatgacgacaaccaaccaaaaggcaaaacaatgcagaaattgcgactcgacaacgggcttgagtacgacgcttccccggaagtggtcgtggcgttcaacgccctgaaacaggatgcagaggacgctaaaaccaagctgtccgacgcgcaaactaccatttcaaccatcacagcagagcgcgacacactgaaagctgacgctgcagagtttgaaaacaagctgaagcaggctcgcgaagatgcagagaaaaccatcaaggctcgcaccgagctagaagcaaaagcagagaagcatggcatcaagtgtgatgggctggatgatatcgctgtcaagaaagcggttgtagccaagctgaaaccatccatcaaactcgacggcaaagacgacacctacatcaacgttgccttcgacatggcgattgagtcggcacctatggagcagcagcgcaaaacagtcaatcaggacaaagctcaaacccgcgatgactccgctgaaccaaaaggctctgctgctgctcgccaaaaatacctcgaccgcctgcacggcaaaaaggagacagcataa

SEQ ID NO: 94535 - DNA, 510 bp, Enterobacter aerogenes
atgcctgttcagacttcctacgataacgatatgcagatcgcaatgcctggaatgcggtcagattcaactcatcaaatcacagatggttgcaacgcagcacaaggtgctatcaagcctggttatgttgtggctcgcgtatcagtagccaatgacaagcgtgtagttaagcaggtatcagctgccggagatgccgccaacctgatgggtatttgccgcttcagccactacggctgcgtcaccggccaatacgaaaatggagatgccgtcaacgtaatgacatggggccgcatctgggcggtaacaaccttgtctgcagcaccaacaatgggtacaggcgttaatgttctgacctctggcgcagacgctggcaaggtagcggctaccggtggctccctggctctcggttgggtgtttaccggcaagttcaccacattcaaagacagcgctggcacaacagttaatctggctgaagttcaaatccgcaaccagaccacgcagccaaccgcataa

SEQ ID NO: 94536 - DNA, 939 bp, Enterobacter aerogenes
atggaacagatgaattacgacgaagcggacctgttcgcaattgagcatggtgcggcggccaacggtattcggctggatgaaggggagtcaatcttcctggctcgtgaactggattacgttaagtccaaagtttacgaagtcgaataccccgcactgactgcgaccactctttttccggtgacttcagaaatcccttcatacgccaaaactttcacttacggcgtatgggatgcagtcggcatggcgcgcatcattgctgactactctgacgatctgccaaacgtaggcgttaactatcgtgaagaaactggaaaggtcttcagcctcggtaacttctacgaatatagcctgatggaaattcgtgcctcacaggcaaccggcaagaatctgccaactcgcctggctaacgctgcgcgtcgtgcgcatgacgtgaaggttaatgacctggctttctatggcgatgatgattatcagatcgtcggcgtactggatcaccctaacatcccggtaaccacttctgccggctggaccactggcgagatcgcctctggtgaactggaagatgctgtttctgctatcgagacggtaactaaaggcctgcatgccgctaacgtcatcgcactgcctccaagcgcttttaaaatcctgtccaagccaatgccaaacaccaacacgtcatacatgacctacttcaatactcagtacccaggtatgcagtggatccgtgtaaacgagttggaagatatcgatggcgcaggtactaaagccgcgctggtaatggaacgcaacgctgataacgcctctatggaaatcccgcagccgtttgaacagttaccgccgcaggctaataacctggcatttaagatcccatgccatagccgcgcgactggcgttcaggtttacctgccactgactctccatctcatcaaaggcatctaa

SEQ ID NO: 94537 - DNA, 204 bp, Enterobacter aerogenes
atgaagatcactaacacctcagcacgactgtattacatcggcggccagaaactttcacccggccagacagcagaagttgatgataaatggaaagataactcatcagtccaggcatcaatttccaatggcgaactgcggattgcctctaaagatgaagaagttaccgcaacagcaatagagaaatccaaaaaggacactaagtaa

SEQ ID NO: 94538 - DNA, 408 bp, Enterobacter aerogenes
atgaactatgccgcattcgaaggaaagacgccgctggaaatcttccgcctgatcgccccggagtttgcggccgttcctgacgaagtcgtcaattcgtatctcgaactggcgtctgtttttgtgtgtgaaggtgactatgggaaatattacaacgtagcactggccttaatggccgcacacatcatggcttcacctggtggatattctcaggacggctcaacctcatcgggaaaagttcaatccagaaaagagggtgatcttgcgatcacttacggaaatatctccagtgataccagctatctcggcggcacctcatacggaaacctgctgctgatgcttcgtaagaagatgggcggcgggtttgcattgatgactcgcggtgttattggcggctgcctatgtccgtaa

SEQ ID NO: 94539 - DNA, 282 bp, Enterobacter aerogenes
atgcgctcctattttgatagcagcattgatgacttaaccagattctctgctcgcgggattgccatggttatttcagggcgtgggacgatgaatcagttcttcaacgcagctggtgcaaggatggtgaacggggtgaagaaaagcatcaacaatggagcgtgggttccaaactctccagtaacaatcgctttaaagggttccgataagccgctgattgacactggcgtcatgctgaactctgtgactttcgcaattcacaaatacggagatacaaaagcatga

SEQ ID NO: 94540 - DNA, 354 bp, Enterobacter aerogenes
atgaacccttttcggagaccgtacaccgttttaacgccttcagaaggacaataccttaacggcgagtggatagaggggacctataacgaatcctctgctcttttttctgttcagtcgattaaagatacccaggaagtagagcaccttgctgaagggcgaagaattgacgatttcaggcgcctgtacagcgatagcaagttacagataaccaacgatggtggaagcggggatttgctacagccggtcttaatagtcatcgatggtttcaactacgaactaattcaccgggagccctggcagaatggaatcatcaaccactacaaatattattgcgtgaggaaatacgatggctga

SEQ ID NO: 94541 - DNA, 507 bp, Enterobacter aerogenes
atggctgaccttatagagtcggtcgcagaatctctcctttctcagttaatcagcattccagttatcagagcgaatcagaacgggccgcgcccgaagccaccttatgccacctatcagataagtgccagaaccactgttggtggtgatgattatggtctggtggacggtggcggcctaatgccagttaaaggcaccagggaaggggcgatactggttaacttctatggaggcgaggcgagagagaacgcggacaatctggttaatgcaatcaggaaaacaacatcgcgctacctgatgcatcggcttcatcttgttatcaatacaagtggaagcgtaactgaccttaccgcattacgagatgatgcgaactttgagcccatggcaaacctcgaccttacctttcgctacacaaccaattataccgacgatgtcgggcttatcgaaacagtggacgtcaccggggaagttggcggcgaaggcatccacgaaacaatcaccatcgaataa

SEQ ID NO: 94542 - DNA, 1353 bp, Enterobacter aerogenes
atggcctcattgaaccagattgctaatgttgatatttcactcaacacagcaacggtaggaaaggcgtctttcggtatccctctgattgtctctccgaccaccgcatttaccgatcgggtaagaaaatacagtagttattccgcagctgcaggcgacaatcttgacgcggccacgctgtctgcgcttcaggccgtgttcagtcaggatccgcgtccggctatggcgtatgttgggcgacgcgacgcagcaggtgtagtgtttacattatcgtccgcacccgttaccggaaagatttatacctttagcgtgaatggtactgacgtaacctacactgcagccagtggtgacactgaagaagatgtgcttgatgggctcagtgcagcgctaactgcaagcacagttaaagatatttttgctgcgccagtggtctccgatggaaaactaacgctgactgtatctaaccctggcgacaatgtagtgcaaccaaccaataatttgtctatcgcattatcaggatcgacaactggcctgtccgccgacatggacaaaatcaaagccgcagacaatacatggtatgggtggtcactggttgagttgggagacaatttgattcagcaaggcgccacatggacagaaacgcaaagcaaactgttctttgcgcgtaccgcgactgtcgctgtctggtcctctgctgaagacgatatcgcgagcacattacaagacgcgcaatatcttcgtacggcgctgattgcgcataagaactctgtttctgaatatcctgatgctgcagttatgggaaggttcttcactaaagacccagggcaaactgtatttgctcttaagtctctggtgaccatcactccaagcgctttcactgatacggagaaggcgctcatcattgccaagaacgcaaatacctacgagcaatactcggacaacatttatctattcggtgtcgggactgagaatcaggcgtcaggaaaggttgcatccggagagtggattgatattgttcgcgaccgagactggctgattaatgatatccagacagctatcgccggcgtgatgatccgcaacagcaaagtgccatataccaacgtgggcattgcgttaatcatcaacacactgcgcgcgcgattgctcaatgcacagacgcaaggtgtcatcgctcctgatgagaaagatagccttggcgaaacagtaccaggatttaagctttcttatcccaacgccgcggatgttgacgctgatatcaaagcatcccgcattctttatatctcgttcgatgctcttctggctggcgctatccagttggttaagatcaccggcacactttcatacagttacgaataa

SEQ ID NO: 94543 - DNA, 450 bp, Enterobacter aerogenes
atgtctgctaattatggcttgtctggcacatttgacggctctgaagttcatgtaattatcggtaccgttcctctgtccggcttctctgatggcgactctgtcaccgctacgcgaacaagcgatctgttcagcaagcgtaccggacttgatggcgctaccggacgcgccaagaacactgacaaatcaggcaccatcgaagtcagattacttcaaaccagctcagctaacgacgcactatccgcgttgttaaacatggatagcctcggccttgagggtgatgccgtctttccaatcagtgtcattgacatgtctggtcgaaccgtcattgctggcgctgattgctggatccaaaccgcgccgccggtagcattctcaaccaatgcggttggtgaacgtgtgtgggtgttcgcatcagctgctcttcaactctatgtaggtggtaataactaa

SEQ ID NO: 94544 - DNA, 432 bp, Enterobacter aerogenes
atggaaatgcatactttcaacgttggcgaaaaggaattttctgcggcaaaaatgaatgccttctcagctgcaaaacacctcgtgaagctaaagacattgcttgataaagggctggctcagggaactgaagcaaacgccattgctctgctatcgggaattgacgagaagacgcttgaaaccgtcatcatgccaatcatgcgcgacgccatggccgcatgtgttaccgatggtgtgaagcttgattcagagcagaacatcaacagggttttcaccgcagatacgctttttgatcttttccaggttatctgggaagtgctgaaactcaatttcgcccctttttttactcaaatcttgagcctgtttggactgagcccggaagagttatcaagccgggtcaaggcgctggcaagcaaaagcgcccaggcaagctaa

SEQ ID NO: 94545 - DNA, 1557 bp, Enterobacter aerogenes
atggtaatccgtgagttgctcattcgtcttgggcttcagggcactgaacaaaccgggcgagacctggataagattgacggtaaggttcacagcgtcaccgagagtttcagggggcttggaactgtactgacaggactccttaccggcataagcatcaaaagcatcatcgacgtcgccgatgagatgcaaaaccttcgctctcagattggcaacagcactggcgatatggataacgccgccagcaagctggatgagcttaccagacatgctaatgacgggcgtgtatcggttgaggcttataccggttcatgggcgaagatgaacagcggcatcaagcaatttggcggcgatgccgatgatacaaccaagttcatggatacgctttctgcggcattcgtaagtaacggtaccgctactgagtcagctaacgcagcgctgttccagctatcccagaccatgcaaggcggcgtcgttcagggtgaggagatgaactccctcattgatgcgcagggtgagctgttcaatgacatcgccaaagcaatagctggcaacgtccagaactataaaaaaatgcagtctcaggggctggtgacggccgagatgcttctcaaggcggttaaccagttctacgacaagtacacctcccgtgtgaaaaccatgcctatgacggtgcagcagtcgctaaccatcatcggtaataactggaaactattcacggacaggcttaaccgggaatcgcagatcatccccaaaattgcaggtatgtttctgtggatgtcgaataaagctgaatacgcgatgcagattgtcattgatgcattgggcggggctgaaaacgcggtaaaactcctcactgttgctatcggcgcggcaggtttgctcggcgctatctggcttcttcctgctgccttcgcagcgcttatgtctcctgtaacgctattaattgcaggtatggttttactctatgccattggcgaggatgttaatcgatggctaaacaatcaatcgtcattattggggagggccgttgggccggttactgattataccgactcaataagccagctaaataccgcccttgatttaaccattggtaacgtcaaggaggttataaaatggttcaaatggatgacgttctgggttgagaaggggaataaggcactggccgatttctctggtgcagatgtaggggatattgtctacaaaaacttaaaccctttagctggaagtgccgacatactatctgaagccatgaaattcttctctaattctggcccagcggcaaagttcacagcttggcttggcattggcggggactctgttgaagcaaagccagggtcacaaaaaaacagcctgggtgtgatcgctccttcgcttatttctccgcaaaacaataggccgcaagtaaatgtgaacatcggctcaatagaagttccagcagggtctccatctgagcaagtgtcatttctaagaaactctgccactgaggctttctcttctgtaggaagcgaccactttaccagtgacatgctttttaatcgcggggtgactcgataa

SEQ ID NO: 94546 - DNA, 702 bp, Enterobacter aerogenes
atggccggaactgatttattggggttcatctggagcggaagttctgatggatttttttcgatagatgatccaaatgtcggctcgcttgagttcgactctatagatgcagaggttcacgactggcagcgggatgtaactcaaaacccggttgaaaatggttctccagtagcggaccacattattgacaggccaaaaaatttaaccatcacaggcatgattagcaactcgccaattgatggttcaaatatcttcctcggtggcaatttacttgatacagacagagtcgcggaggcatttcaggttttagacgctctgtataaatcaaaggcactgataaccatctataccaggtatgctaactacgttgatatggcgatatctggtttaaatatcccaagaagcccagatctcggcaatgcaataaccatcactattcaggctacacagattcgcatagttacgacacagtcaacaaatactcctcccggccttggtgtaaagaaacagagtgattcgactgggaaggccggcacttccaatagtgcagacaagtcaactcaaaaacgtgcgtctcctgttcagaataatgggaagtcaacttcagatatcggactacttgaagggattgcttcaggtgcaggaagtgccataaaaaatcttaaacaaaaggctgctgatatcatctccgggagcaatctgtga

SEQ ID NO: 94547 - DNA, 342 bp, Enterobacter aerogenes
gtgataaccattaacttcattcagggatatcctgaccagacatctgatgttgcgatcggcgaccagacatttactatccgggtgaagtggaatgagaggttcgccttctggtcaatgggcatctatgaccgggaatcaacaccgattgcgacgggaatgagaatggtgcgagattctcaactaatagggtttcttggcctgtctcagttcgatggtgacttcatcttcatgcgtacatatggtgataaagatgaggccgactttgactctctcggcgatgatttcacgctggtttatgtatcaggagatgaaataaatgccgttgtttctgcggacagctga

SEQ ID NO: 94548 - DNA, 939 bp, Enterobacter aerogenes
atgccgttgtttctgcggacagctgaattaatagtagggcggccttcaggtgaagctgtaagcattaaagatctgcggttcgagtttgatatccaaaaaacatcaagcaagacagcaaacaaatgcaatctcaaggtatataacgcctcaccaacgaccattgcaatgatggaaactgtaaataaccttgtcatcctcaaggcgggttatgagcaagatattggtgcagtgactctgtttactggaacggtttgccgatctattacttatcaggatggtccagacgtcctgaccgagatggatcttcgagacagtgtcattccactacgtgacgctaaaatatcagcaagttacccaccaaatacatcagctttaaccgttttacggggcgtttctgcaaacttcgggcttccactaaagctatctgtaaacgtaacagaccggcagtatcagtctggcttcgcccataatggtcgggcaagagatgcaatggatagggtatgtaactttctaggacttgaatggtctgcacaggatggagagttgcagataatcaagaagggtggtgtttatgcagaaacagccgtcgttctgacaaaggatacgggaatgattggctacccacgcagggaagccaagcagatgaccgagaaatcagcagctaaagatggcatcaaatatggacaaaaaggtgtaatcaggactgttgtagatgtagaagacccaactgctaagctaaaagagcgcgttacattggaagtgcaagggtatcgcgtgcaatcgctaattaacccagctatctaccctggaagctacgtaaagttaatatcacgtggtattgatggcgagtttttccgagtagaagaagccaggtacatgggtgatacgcacggtcaatcctggttcgtagaagcgcttttaaggtatccaaatggctga

SEQ ID NO: 94549 - DNA, 675 bp, Enterobacter aerogenes
atggctgacagaagtgatttcattgaagcgctgacccagatgattggcagcgagcttgaccaggtaaatacagcgataccgtgcactattactggctataacaatggtagagttacggtgcggccggacggtgaaaaaaaattcccggacggcgatagtaacgcatttccaatccttcacaatattcgtcttgtgtggccaaagtttgcgaatggtcaggcaggtgttaaggggcccgtaggcgcaggtgataaggggcttctgattgtatgccaacaggccatagatgaccctgacgacctcaggaagttcgaccttgtagacagctatgttatccccggaggcggttatgatgactcggttcctggtaatgatgatatgcgtttgtacttcgggaatgcttttatagcgattgatggtaacggaaagatcaccattaacgcccccggaggcgtggaggaaacgacgccgcttcacacggtgaaaggccaactgactgttgagcagatgttcacttaccaaggtgggatgactgcatcaggaggagagggaagcgtggcctctatcactggcacggtaaacgttgttggtgacgttgtgataaatggtattaaaataggttcacataaacaccctggcgacagcggtggaactactgggggacctgaaaattga

SEQ ID NO: 94550 - DNA, 342 bp, Enterobacter aerogenes
atgatcgacttcagattaaaagacgggaagattgccttccagaacggacttcttcagtacgttgatggggctgaaagagtcagacaacaacttgaattcaggctttccctgtttcgtggcgagtggtttctggacggtgattttggcaccccatatttccagtcaattcttggtaagcaagtgactgaaaccggagccatcaatgccattaagtctcagattatggatgttgatggagttacggcaatcaactcattcaactggaactttgatcgtaagaatcgcctgttaacggtagagtttgaggcgcaaaccgattacggcatagtccaatacccctga

SEQ ID NO: 94551 - DNA, 1419 bp, Enterobacter aerogenes
atggcagatacattcatcacggataccggccttgagaaaccaacccttgctgaatgtgttcaggaggttgggaattcgcttgagtcagttgtcggccccattaaccgggaggcagatagcacaacggggcaatgggtaggcgtagaggctgaggccaatgcggtacattttgaggctatggagcgcctgtggaattcacgatttctgaattttgccacaggaatggcactggacgcgattggtacatggtttggcatatcgcgtaatcgtgaatcgtacacgcaggtgaatgcggtgatctacggaacagaatcaacactggttccggctggggccatcgcttcatttggtaactaccagtttgtattaactgaagcgtcagtcataagccgcaccgttctggttgatggtgtcttccgtgttaataacgccacgcaggcatcttataccgtccgcgtcgccgggattgataagacatacacaaaacaaagcggtgatacagcaacaggcattgctgaaggtctggcagagctcattgatgctacgtctaacttttcatcctctaacaacggttcctcagtatcactgacgtctgaaaacttaatccagggttattcggtctctcttggttctgggctgtcatggacaacaattggatctcctgctgtctttcgggcaacagaaaccggggcaatagttgttccggttggcggcctttcaacaccagtaagtgctgtgactggatggaatggagtgactaaccaggtatcaggttccaccggctctggcagggagtcagacaccgattaccgattgcgcttacagaacgcgcgaggaagcaatggcggggcggccactgagccagcaatcagatctcgtcttttaactgaggtagagggcgtaacgctggcggttgtaatcgaaaatgacacgatggcgactgttgacagcattccgccaaaggctatccattgcatcgtttccggcgggcttgagcaggacgtagcaaacaccatctggaagtataaggctgccggaatagcgacatacgggacaacgacgataaccgtacaggactcgtatggaagatcgcatgacgtaagcttctcaaggccggtaaataccccaatctacgtaaaagtagaagtaaccatgctagatccggaagaagaactcccttcaactgttatcacgctcatcaagcaaggcgtccagaactacttcgcaaccctatctcttggtgacgacgtaattacgcagcgcatttatggctatgtgtacagcaacacttccgggctggggaaaatgaatatcaccgttagtcaggatggaaccaacttctctgataacaacatctccatccctgatacggcttatgcgtcagtatcaactgataacattgaggtgacaggtgtctga

SEQ ID NO: 94552 - DNA, 762 bp, Enterobacter aerogenes
gtgtctgattgggttgattatgactttgattcgcagatacgcaggcgcccatcgagctatctgcaagacatgaagcagccagttgatgttttctctgcaatgggggttatgcacccccaaattgaagcgctggccaagtatatttatgactcagaaaacatctacaacgcatcaggttatgagttagaacgatttggagaatatgcaaatataaaccgggatggtcggagcgacgatgagtatcgcgttgccattctgaatgctgttctatccgcatcatattctggtacaccatggcaggtgatgaacatagctgctgcatcaacaaggagtacagacgttgaattggtagagcggtctgatgctgccttttctgtccatataactggtgtgtcaatacctgaagagattgactctcttgttgatatagcttctgcagccggagtaagagcttatgcaacgtttgattatggtcttggtgggttttctcttgcaggaatagacacgcagtctggttatgccttacagatttccgataatactgccatgcaggttgacgacgatacggcattgggaattttaaggggtgcaacatatcttggtgggtcttatcttgacactgtatatgcaacgacaggaataagtgggttacttcaggttaacggagaatatatatccgttaaaaataatgattatcttcttattggcagcggatttaatgtcgctggcacatacttatgtggcgcaatgccaagaggttaa

SEQ ID NO: 94553 - DNA, 654 bp, Enterobacter aerogenes
atggctgacattttattaaagtacctaacagaattatcctcagcaacaagcgttgcagatgatgacctgttccatataaaccaaggagggaatgacagatctatcgctttctctgtattgaagagatttattgttgatgcaatgtatccagcaaactcaggcatagttgtattttttgccaaggcattcaacccaaacaatcaataccctggcactgtctgggcaagagttcctggcgttggaaaaacaatacgattggcatctgaagacatggcagatgttctaagtcaggggggggcggatagcgttcgcctatctacagaaaaccttccagagcataatcatgttgtaaatctgcagacgtcatcttttgactatggcaacaaaccctcgtcatcaaacggacagcacagacataattttcagatgagggtaaacaactacgctaactcaacaggtggtaatgatgttgttaaaacaggtggtgggacaacattctctacagaagatgcaggagcgcatacgcataacacttatatagggccacatcagcacagtgtatatggatataccgataactcctcaactccaaataacccactaaacatatccaaccagtatgtgaaacttattgggtggtacaggacagcataa

SEQ ID NO: 94554 - DNA, 1188 bp, Enterobacter aerogenes
atgaaaactgttaacgaactgatcaaggatatcaataagctcaactctaacctgcatgaaaaagatttcctgctgacgtgggagcaatcgccggacgagctgaagcaggtgctggatgtcgccgcagcgctgaaaacgttacgggcggaaaacatcgcgacaaaagtttttaacagcggactgggtatttcggtctttcgcgataactccacccgcacccgcttctcttatgcctcggcgttaaacctgctcggcctggcgcagcaggacctcgacgaaggtaagtcgcagatagcccacggtgaaacggtgcgcgaaaccgccaatatgatctccttctgcgcagacgctatcggtattcgcgacgatatgtatctcggcgccggcaacgcctatatgcgtgaagtcggcgaagcgctggatgacggccacaaacagggcgtactgccgcagcgcccggcattaattaacctgcagtgcgacattgaccatccgacgcaggcgatggccgatctggcctggctgcgtgagcacttcggctcgctggaaaatctgaaaggtaaaaaaattgccatgacctgggcctactcgccaagttacggcaaaccgctttccgtcccgcagggaatcatcggcctgatgacccgcttcggtatggatgtcaccctcgcccatccagagggctacgatctgatcccggacgttatcgaagtggcgaagaaaaacgccgcggcttccggcggcagcttccgtcaggtcaccgatatggcggaagcctttaaagacgccgatattgtctacccgaaatcctgggcgccatacaaagtgatggaacaacgcaccgagctactgcgcgccaacgaccatgacgggctgaaagcgctggaaaaagcctgtctcgcccagaacgccaatcacaaagactggcactgtaccgaagagatgatgaagcacaccaaagatggtgacgcgctgtatatgcactgcctgccggcggatattaccggcgtctcctgcgaggaaggcgaagtcaccgaagcggtgttcgagaaatatcgtatcgccacctataaagaggccagctggaagccgtacatcatcgccgccatgatcctctgtcgcaaatatgccaaacccggtcagttgctggagcaactgctgcaggacgcgcaaaaacgcattaaataa

SEQ ID NO: 94555 - DNA, 699 bp, Enterobacter aerogenes
gtgttcaatatagctgagcgtcaccttaatatcgcggtgtgggagatgggcgaagcgatgaatatgttctgctccgggtttgagggcgaactgtttaaccgcgagggtgaggcgtggccagaggcggatatcaccctagtggatctggcgatgtttgcccgtgaagggtacgaagctcaattagcaatcgcctatatctcgctgattaatcatatcaacaaccttggcgagcgcgaccagcacctggcgcgacccatcgttaatattaccgacgaagcgcatatcatcaccgttaacccgctgctggcacggtttctgaccaagggttcgaagatgtggcgcaagctggggatctggctgtggctggcaacgcagaacctgagcgacttcccggatgatgcgaagaaactgctcaatatgatcgagtggtgggagttactggtgatgccgcccgaggaagtagaacaggtcagccgctttaaatccctgacgccggaacagcgtcagctcctgctcagcgccaccaaagcgccggggaaatacaccgaaggcgtggtgctttcgccgcgtgtggaagcactgttccgcgtggtctcccctgcactgtggctggcgctggggatgacggagaaacatgaaaaggcggaaggatgcgaattatgcgggagttggggtgtagtgaactggaggcagcgatga

SEQ ID NO: 94556 - DNA, 1287 bp, Enterobacter aerogenes
atggttgagatttacttaaatgatatagatgtcgatgatataaaacatatccggcagtcagatgatattgaggtatttattcctttagagagtgttggtttctcaaactcatattttgacttgtgcgatgactatcttgaggctatatgggcaggagaacgattggcaagcacttgtcaacacacccgggcagtctcatattacaacagtgaaaatcataaatcgttcattaaattatctttaacaaagccaaacgaaaaatttcatgaagcgctaagggattgtatagtactttataaaagatatgatgacagtctttatagcgaaccacccttagaatacagtaaaatcatagatgcagtactctctatagaaaatgatctagataatttaaatataaaggtacctgccttgcatgatttttattatgcaaatttaataggaggtaaatattttgagatgatgtctgatgttccagatgaatatcgaagtgaaataaataagtatcctgagagagctttgggtttctggaagagcgcttacagtagcaagattggtgatagatgttatacatcaccagatgcttgggttttaccaaatactgttgatataaataatttttttaaagttaccgagcaaaactacaaatttgaaagttttataccctctagcattgtagtgttaaaaggggtctcttacactacctctgatgtcatcatttcttatttcccaatgaatcattactttaaatctaaagtttgtagtagtattgagttgtcaagagatgaatataggtggccaccagatccatttgattggtctaactctacatttacttattcgccctataataattttttgagagagctgatagacaatgatagtagcttactctcccaaaaaccgactcatgagcaatgttatgttgatccaaacggaactttagtaatagttgatgacggtaatttttaccatctcctttacgataccgctgagttgaacttatctcagataaaaaactttaacgaaacattaggtgaagtcattttatctaccggtattaacataggtttttccgcagggttaacatataattggtccgagattgatgacgagcaatttgaacaactttgctatgatataatctatagtcatccatattttaataatgaaacgatcagacagttaggtaagtctcgttcacgtgatggaggtagagatatacaagtatatgatattcctaccgaaccattaatggagcccaaaaaaatggattttccagtgtaa

SEQ ID NO: 94557 - DNA, 978 bp, Enterobacter aerogenes
atgagtcagaaagcatggtcttttaaagcagtaggtcaggatgatctccggtacttcgggaataacggttatcaagatgactcaactagtttttatcgatatgacaactttgtgccaaaccataagcaagtcaaaaaaggagatattgtcatagtaactgatagaaaaaatgttcagggtatatcagttataaccaatttatcttcagccccatacataaaagctcgtaaccgatgcccatatgaaaattgcacgccagcaaagttaatccttcggaaatctaaaaaaccaaagtggcgctgcagcaatggacatgaatttgaacagcctaaagtagaagacgttcctgcatttgaatttaaagctgaatataagaaaaactacatgcccgttaattctatctccataatagatttaatatctcatacactgcgctacaacgtccaaagttctatacaagaagttgattttgaatgggcaaaaagtctattttgtaatgtcattcagttggattctactgaagcggacattgatgatattcctctcgatgtagatgatcagcgaaaggttattctacggcaaattaagcaaaggcgtgggcaaaaaacttttcgcgacactctgatatcccaagcagcaaaatgtgcaataagtggttgtgaaatcattgatatcctcgaagccgcacatatcaccgcatacaaaaatgatacacataaccatataagtaatggactattattgcgttgtgatatgcatactctttacgatctggatctatttgcaatcgatccggattcattcgttatttactttgctccacagatccaagataaagagtatgtaaagtatcatgggaaaaagctgcacgtaacgtacaagattaatcacggagctcttgtcgaaaggtggaaacgatttactgaaaaatatgccttgactgaagtcaatttgctaaatcttactatgcatgtttaa

SEQ ID NO: 94558 - DNA, 1275 bp, Enterobacter aerogenes
atgccgaaacgtatacagattgcagaaaaaaactatcttcctgccctcattatctggcccgtcatttatcttattctggcatttatctctctgaaactggacgatccgcaaaatcgtgtagcgatggtctggtttcctgccggtgctgctgtcagcgctttcctttctctgccgcgacgattctggcccgcaatgtatatcgtgctctttgctgcccgcgcagggatggatctgctgatgcgccattcttcggaaacatccctgatactttccctgatttcagtcagtggtgacgttacagtagcgctggccgtacagcactacagtcgtggacaggatgattttcgtaaggtgtgtgtctggctaatcagtactcttatcatcagcgcgctggctggtatggccgcagcaggatggctgtcttcgcgtcatcccgtgtcttttgcggataccactgctttgtggtgggcggcaaatgtcagcggcaacatcgtcgccactaccatactgacaggtctgacatgggagccagcccggaaggcaacgagggacgtcgtaaagaccctcgccagcgtgctgttggtcgcggtgattgccatactcattttctcttccccttccggggaagagtcccgggcggggctcatttacggactggcctgcttgccggtcctgttgactgctgtcgtcccggtcatcgccggtgcccaggccggcgcgctggcttttctggcactgagcatcgttgtggtttccttttcatggcaccagacaggccccttttttattaatggcctggatccgggcgaaccgctgcttctcgctcagggatacctgtccggtacggccatcctgactatctttgtccggctgttactgcggttgccggataagctaaacggtccggggcgtaagcagatgcatcacgaagaaaccgcctttcgcatggatatccgaagtggccggatcgactgggatctgcagggaacaccggtgctggcagatacggtggcacacctgcctgacagaaaaatcctgctccagagcgtggatactgctgtcaggcaacagttaacatcacgctgggaacaggcaatccgcggcctgcccgtaggcggatcgttgatattccggcttacattgccgggagatgaacacgtaatgatctgcgagcggggactattctttttgcccggtacaacaggtggattcctcgtcggatactggttacccgctagtggtccggtttccgttatccgtccggaggaccactga

SEQ ID NO: 94559 - DNA, 1161 bp, Enterobacter aerogenes
atgtcttctgttgcgcgtttaagaaaaatgtccctcagtcggggactcgataaatattacgagtcggtatcagttcacaaaaagggccatcttcaggaattttaccgggtcaatgtgattaaacggcacccactggccagccggaacatggatgagatcaccacagttgatattgcagcctaccgtgatgaaaggctgacgcagtgcaaccccaggactgggaaccctatctctggcaatacagtaaggcttgaactggcgctgttatcatcactttttggaattgcacgagtggaatgggggacatgtcgtagcaatccggtcgaactggtgcgtaaacctaaagtatccaaaggtcgcgatcgccgcctgacatccagtgaagagcgcagactgtcccgttatttccgcgaacgaaacttaatgctgtatataatttttcatctcgcgcttgagacagccatgcgccagggtgaaatccttaacctgcaatgggaatacattgacctgcagcacggcgtagcacatctgcccgataccaagaatggctcatcgcgagatgttcctctctcacgtaaggctcgtaacatccttcagatgatgccggcccagctaaaaggtaagttgttttcctatacgtcatccggtttcaaaaacgcctggcgaaatgctctcaaggaactctctatcgaaaatctgcattttcatgatcttcggcacgaggccatcagccgtttcttcgaactcggtacgctgaacgttatggaggtcgcagctatatcaggccaccgctcgatgaatatgctaaagcgctacacccatctgagagcttaccagctggtcagcaagctggacgcgcgacggcgccagactcaaaagatcgccccctacttcgtgccctatcctgcccaggttgagcaggacagcgaagagtcaggtgacatcaaggtaatgctatgcgatttcgaaaatctgacggtatcagcgcctactcgcgaacttgcattggcccgcgccagcgaactgctactgcggacactggctcttgcagcccagcgcggcgaacgagtccccgcgccgggggagcttcctgtcaggacaaacaatcacatcatgatatgtccgcttaaccccgaccaggcactgtcggccctggtataa

SEQ ID NO: 94560 - DNA, 477 bp, Enterobacter aerogenes
gtgtttttgattctcctttcagcggtaccactaacgctactgctgtattgcccgataatgacaatcgtcagtgccgtgacgccctggaaagggttccgaacggccttggttcgacatcgtaagaagcattacacaaccctacatctgtcgacatttgaccgggttggccatcttaatctccgacgtgcggcacgctttcaccggagctttctggccacgttgcagctggcgctacaaagagacaacacgccggtgtacttcacatcccatctgatgcgaccggcacacctgaaaagcatgactatcctgatgtcaaaaatgggggaaacgcaccgctggcgcagcaccacagtcacgatacctccagccatcagaaacgggatacggctgcaaacatttttacaggaatggcgctggataaccgtacctgaaaccggcgtgcttgtactcattcggccgcgccggaaagagcgctaa

SEQ ID NO: 94561 - DNA, 837 bp, Enterobacter aerogenes
gtggcaaacagtcttacagcaattttcacctcgcttctggcgctccccgaccttgatcggaacaggattgcagaactgcttcagcgcaatgataagaagcccatgcagaccacatcacttcggttgcgacctggtacccgtcaactgattgatgagctgtcaggcaaaattggagtttctcagtcagagttgctgaatatggtaattgaaggctcttttcgcgatatcttcctgccattcagtaatactgcaatcagcgttatagaccgctttgagctactgatgcagtcacacgagcttagcccgacggacatcgcagaactgctgtcgtcatggaatgttcgggttagtgtgctacaggacagggaacgtacaatggactatctgtccaccccgcttctccaggcgctcgctgactggtttttcgtttcgcctggctggttgcttggaagcaacgttccacctgtcgacacaggcagcgcgagtcatcaatggccacaaacggaagaaactttccgggaggtaattattccttcagccgaaaacaataatgacagcattattttctggaagactgaaaatacaactgaggataaagatcaggaacgaaacggcatattaattaagaagaaaatatcttcatctcagctgacatattttccggtgctatccattattacgcgcaccctgaatacagagcaggaatgctggaaagagcgactcctcagggaacacgcagcaacaggtactatccgccccgtcaccttaggtgcagggctggcaacagcacttgaacacggaacaacgttacccgtacttatattcagacagctttaa

SEQ ID NO: 94562 - DNA, 1206 bp, Enterobacter aerogenes
atgaaaaagactcacattgcaaaaacactgatatcttccgccgtcatgatggcatttcatgcaggagcagcaacctcttatatggaagcccgcagcgatgcgatgggcgggactggcgtagcttccgcacattacggtacagctgccttatccaacccggcactcctgacgaaatttggcgcgaacgatgacttcagcctggtgctgccgtccgtaggtgtccaggtagcagacccagataatgccatcgataataccgatgacgtaaaggatctgtggaacaattttgacaatgcagttgaccgccagagcggtgtcagcgaaagtgcagccgcattacgcaacaagctggaagacctgaaggacgtaaaagcaaacggacaggtcggggcatctgtcattgctaccactcctaataaggtgcttccatttgcggttgtcgtgaagtcctggggcaccgtttccgtaaacggcaaggtcagtgatcacgatctacagtatctcgataatatcgccagcggcgccatcccgtcagatatggtagacaaggatgcacttacgtcccgcgcttatggtcgggctgccgttatcaccgatgtcggtgtggctatggcgcacgaatttgaaacagcgggacatagctggtcactggggatcacgcccaagtatcaacgcatcgatcttttcaactacagcgcaaaggtaaacgacttcgacaaaaatgacctgaattcggatgactaccgcaatactaaaaccggatttaacgccgacatcggtctggcaacaaacctcggcgacaactggatgctgggtctcgcggtacagaacatcatcgcccgcaccgttgacactaaagcagtgaatggtgagaaagaaacattcaaagtaaaaccacaggccactgcaggcgtggcatggagtaacagtatcctgaccaccgctctcgatgtggatctgaccgaagccagccgctttgagcgagatgacaaacgccagttcgccagtgtgggtgccgagctgaatgcctggaactggatgcaggtacgcgcgggttatcgtcagaacatggtctccagcgagggcaacgctttcactgcgggtctgggcttctctcctttcgacgtagtacatctggacctgaccggtattgcaggaaccgatcgtacctacggtgcggtcgcacagttgcagttcacgttctga

SEQ ID NO: 94563 - DNA, 474 bp, Enterobacter aerogenes
atgaattatttaatgcttcccggcgtgttggccatctccctgctcgccggctgccagtcctggactacgccatcaacgtctccagtttctccttcccccgaccgttacggcgcggcctcatccgttgccgttacccgtcacacacagtatcagatgtggaataacggtgtctggtccggttcgaaaaccgcgccatcatccatggagatcattcgatccaacagcgctgacgtctctttcgactgggaaggtgatgctgtggagctactggatgaactggcgcgggcacgtggcctgcagttcaactacagcggcgttcgcctgcccttgcccgtaacattgcacgttcgtggcatgacgttcagcaatgtgttgcgcgttatcgaagcgcagaccgcatggcgcgcaaccctgaatcagtaccctgggctgctccagctcaacttcatgcaaccggagaccagaaagaaatga

SEQ ID NO: 94564 - DNA, 807 bp, Enterobacter aerogenes
atgaaatgctttctcttgttactattccctgctctgctcctgactgggtgtgcaggagagcggccggcttcaccgacagatacaggggcaccacctccggatatgcaggcctggctcaacccggagcgacaaagaccagcaggtctgtccgaaacgcgctggcagatgcttactgatgctggcagaacactgggattccgaggaggaaaatcccagcgggcatgggagttaacccaggcactcaacgcccgcgaatccaccctcaatgccctttacgatttccgtccacttatcagccctgaaggctggcttcctccggttattgatgaagcgcaggacgtagcacacatcactcctgatcaaattcgcacagcctcaaaagtctggaccatcatccgaccggagcgattcgtcagtaacccgcccagctggcgcagctggttactacgcggtctggccaccacggcaacccctggcacagaaggtctggttgtgccggaagacagcgcccagagaaaggtctgggaagacgcactgaaaaaaggctggcaggaaggtcgcgaaaatgccgatctgacctttgaggccagcatgaatcaactcacccgggactatcgcggcatgatgctttattccctgctctggcgacggggcatgatttctcggccggaagtcaccgagcagcagcagactgttactggcagtggtcagaagctcgttaccggcgatcgtgttcgccgactcaaatcacatgcctcgtttgagctacagaaatcacgctggcgcccgtccgttaccatccagtaa

SEQ ID NO: 94565 - DNA, 1161 bp, Enterobacter aerogenes
gtgaacatatcagctatccctgactcgttcgggcttttcccgttcagcggtgcctataccgccgacgagttcaggacattttttgcctggtgttcggcacatggagtcagtgatgtggatctggttggcggctcaccagtttcagtgagtcgttatggccgacgtgagagagtctcagacaccatactgccgaatatcatgctgggaaatatgcttgacgacctgctggggccagaagtgcgcccccgagtgcagggtggaagaccgctggacagagccattcaaatcgacggcgacatgcatgggcgatatggcctggaaaggggggaacgcgtgcggctacgcgcgcacatcatccaggggacatctgcccgggaagaaaaggctctctccgtcactctgcgtgtgatcccccacatcattcccgattttctgaagctgggtatcgagcccgatctggcggcggcaatgctgccaaaaaccgggctgggtcttatttgcggtgaaacgggttcgggtaaatcaacgttgcaggcgtcgttgtatcgccactgccaggacacacagcccgatcgcaaaattgtgacctacgaagatccagtagagtacattctcggccgccccgacgaccttctgccgccgcatcaggctcaggtaagacgtgacgtcgcaagttttgcagatgggcttcgctccgcaatgcgccgaaacccggaggtcatcggtatcggggaaattcgtgacacggaaacagcagaggcttctgtccaggccggtgaaagcggacatttaaccatcggtacactgcactctaaatcaccaggtgaaaccctgaaccgactgcttggtctgttcccgcctcagattcgtgatgcacgcgcctgggagatgcttgggatgttacggtttatcgtagtccaggtacttgtcagaacgacagacggcaaacgccgggctctccgggaatacatcgtcttcgacgatgagctacgcgatgcactacagaatctcccgtcagagaagtggccggcccacatcgataacatcctgagactggagaaaaggcgcattgtcgatcaagtgcgtgaaggttacgtaacgggtgatatagacagacacgaagcggcactctacctaccgacacaggagcttagacattga

SEQ ID NO: 94566 - DNA, 288 bp, Enterobacter aerogenes
ttgaaacgagaaggattctggcgctatgccaccccgcctgtcaccttttttggtatcccgctgccgttcctgttgctgtatctggtctggtttcgctggccgtccatgaagacgctgtatatctgttccgccattctgggattctttgttgccctgaatttctttggctggagtgtacgggctatctgcctgcgcgtaataagtaccttcaggggaaagattgcctccggtcgcccctggtggtaccggcattttgttgaaaaaccacgagactggactggtctctga

SEQ ID NO: 94567 - DNA, 3543 bp, Enterobacter aerogenes
atgcaaaaaagtcaccgcgtatggcttgccgtacctcacgaagagaaggacgacgccatcaacgcccacccgcgtctcagcgatgggcagaaagcccttaaatgggacgatgagcaccgcctctggtatgcccgaccaggagccgacctgaccaggttcgagcgatggatgccccgcccccatgaactgtcgatgaatgcggacgatccggtaacagagtttgctcaaaaacttgaagaagcaggactgctggttaaggggctccccgtgatggatggaagccttcagcgcgtaccgacgaaacaggacaagaaaggttcgaaaagcggagcttacaaggcttacctggacgggcgccctgctggatggtaccgcgattatcgcagcgccgacgctaaaccgacgcagtgggtgttttcaggtggtggcgagatggatccgcttgcgcgtcttcatctccgtgcacacgcccagcaaacgcgtgaagacaatgcccgtgctctggagcaacagtacaaccggcaggcagagtacgccgcccgatatgttgaccgctacccgcaggctacaacgaacgcctatctgacccgtaagggtgtggcggctgcgccgggtataagaatcaacgataagcaagaacttgtgatccccttcagcaatgcgcatggcgacatacgctcttaccagcgtattccgctcaccggcggaaaagacgcccgcatccttaaagacagtgaaaaaacaggtaactggtttgcactggggacgccacagaatggcctgcctttgctgtttgctgaaggatatgccacagcagcctctctgcatgaggcatcaggtttgccggtactgatgacggttgatgcgggaaacatgatcgccgttggccagaatgctcgtgccgtctggcctgacagtccttttattttctgtgcagacaatgatcatcagctgaagaatgcgcagacaggacaacctgaaaataagggcatcctgagcgctgagaaagcggcagaactcacgggcggcagagtcatcgttcctgatttcaccgaagaagaaaaagcacgcttgctgacggacttcaacgatctcgataccagcaggggcagagaagccttccgtgagcacatcagcgaccgcctcaggtctgccggcatcgatatccggacagactacgcacccaacgatgcacaatttctctcacaacaggacccaaaaatggaaaatctggaaagccaggaatccggccagtcttcgattgccccggatgaacctgtcgttattccgtctgaaagccacaggcaggatgattcagtaaaaccagcgcctcccgccccgcctgaacctgaaataatctctccggcagcggtgatgccgcccgatgaagccagtatcagtgcggcaccggttgagaataaggctgaacacgatgaacccgcccccacgtccctgcgagacgctgatgttttaattcctgatacgcagagcaccacggacgtgacgatcgcgacatcttctgcggatgccggtcagcgtagtcatagtgccatcgaatcaggatcgaatataccggtccctggcctcgatgattatgcagacatacgcgcgcagatggacgacccacaatttgctgaatgggtgaacagtcagtctgctgacattccccatatgcctgctcaggaacgacagacagaccatgaactgtcagaaacgggcaaacaaaccctgaagcctgaggcagcgtcacatgaaacagacgctgagtctccggagccgatcgttcctgaattaccaatccctccacagtcccccggagcaacatcaaccgggcaaaaacaggagcagacgcaaactgccgatgtggatccaaacacgtcagagccctccccgggcaggaaggaaacggcagagagtgagatgcatgaagcggatgggcttgtctacggaccgcgaaggccggaaccgcttcagcgagaagatctcgatgaaatcattaaagccctgtcaacggaagaacagcgtgacaataaggtgctttaccgtctcgacggggaagatgcgtttcacgatctcggcaaccgtctcgaaatgtgtaacggtgcgagtgaggacaagcgcaaggtgctcgccgcgctggccgtggcatcacgctattacggcggcgtggtggagctcaccggcagtacgcagtttaaagagcaggccatgcggatcattattgaatatgacctcgatatccgaatgaagctgcctgcgcagcgcgcgcagcttgaggctatgcggcaacagtttggggcaaccagggattcagtcacaacgcatattcctacgccggacctgaaccgacagactccattaactgatgccgcatcgccagtgtcaccggcaacagccgcccccgaagctgttacccctgacgctccgggcataccagtgccccccgtatcaccgacgccgtcagcacaggcaactgccgcaaagcagcctgccgtttcaccctcaacagagcctgtagcgcctaagcaggccgacagcatccgggtccctgatatgcccgctgagccagccccctctgcactgaaaccaggccagagcgtcacggcggtcctcaagaactttggtgaagcgatgtacgaaaataaagagcaaaagggcaagagcttctttatcgagctacagaaccgcggtggaagtcatacctactgggggcaggatttacgggagctgatcgcgcaccacaaaaccggcgatgtggtcacgctgacgctcaattcccgtgacagctggcaggtacctggtgaggaaaaagagcgcgtaaaaaataactggtcattgacgtccgcctcaacaggtcttgccgtggcacatgatcgaccggagcagggacagccccttcaggctttcccggtcgatacgtttggccgcctcacacagcaaatccgacaggcctggcctgagtacaccacagacctgaagctgccacctcgcctggaagagcgtcagttttatctgggcgaagacaggcatcctgtaaagtcaccggtagccgcggccagcatttcgccaccgtccacggaagcaccagacaggctggtacccgtcatggcctctatggacacacagtcaaaccagttagatctgctgcttgtccagtctgcgggagaacacctgcaggggatggttcgtctggatggcacgctgtatccggcactggccacgccaaccacagacaacagtcagctggttattaatgccatcaccgatgacggtccccgctttgtaggctacggacaggcggtgaatttcgaacccgacggcaccacccgtgccgcacctcagctgatgacgttccacctgaaaggtcgggaagaggatacaccgcttcccgcccggctctacacaccggaaaaacaggcagataccttgttccagcgcctcggttttgaacagacctggaaacaatgggatgacgcccgaaagccggagggcagacaggaaaaagcgcttcatcaggaacactcccacagccccggccgctaa

SEQ ID NO: 94568 - DNA, 351 bp, Enterobacter aerogenes
atgcgatatcacatgcttaaagccggacttttgtccggcttcatgcttttttctgccgccgctgcggcggcaacctgccgtgcaggaagtgctgctgaagcgggtagccaggctggttatgagcgagccagggcggccgcaacagcctgggaacagcgcgaaagcaatgtctcatcctccctgcagtcctgtctgtcccgtatcaagaacgtcaaggtgaccctgccgcaattccccgggctcgatgaaatcatttcgcaactggaaaataaggtctgcgaagcggccctggataaagtcaacgaacagatcccagacaacatcgatccctggaaaaacttcaactcctga

SEQ ID NO: 94569 - DNA, 702 bp, Enterobacter aerogenes
atgacaaaacagacacaatcagccccccctgcaaaggggcgggccccctcccctgcggaggatccgctgaaaaacgccgtgaacatgatgaaaacggcagaaaaacgccagaaaatggcaccagagctgatgaagagtaacctcctgctggggagtggcctgcttatcagcatcatcctcaatgctggcctgacctgggctttgatacaacagccacgggattactttgccaccgacagtgggcgcctggttcgcctggctcccacttccgaaccagcatggagccaggacgatgccatcgcctttggcagcaaggctctgatgcgggcctttaacctggacttcgttcattatcgtgaacaggtatcctctacagcatcgctgttctctgaagcaggacacgccagttacatccaggcgctaaccaactccaatatctacgatgccctgaaacgcgagcgtatgaatcttaccggctccgtaggggctggtgtcgtcatccggcgtgggcgtctgtctgacggaacctggttctggacaatgcagtatccggtacgtttgcgcctggttgggcagacgaccagcaagcctgaacaaccgtttgttttcgaaattaccatccagcgcgtagatccacgacagaaacccgtcgggatggaaatccgccagatgatctcacgcaacgctccccgcaacctctga

SEQ ID NO: 94570 - DNA, 981 bp, Enterobacter aerogenes
atgaaacttcgttatctcatgaccacactactgctgtgtggtccggccctcgtagccgccgctgacaatactggctggcaggatgccaggacgcctagtgcaacaactgccgccgctcctcagggggcagaagcgcaaacaacaggtgtaccggcaacccggattagtggagagctcccgcccccggaacaaagctcgccgctggtagatgaggcagcaggtttagactcgcctctgtcagcggatgagatacgcgaattgaggcttcgactgaccgacaacgagcgttctgtaaatgccccaatgataagcgtggttccgcgtatcagttcattaaccctcaatctttctccaggcgccagtatcccgctggtacgcacggccatgaataaccagagcgtcgtcaccctgacggacatcagtggcgcaccgtggccacagtcagatccgccaattaatgccagcccgaagagttttgatgtgaagttcaatgctggaaccaacatgctggccataacaccactgcgcccgtgggctgcggggaatatttccgtatatctgaaagggcttgatgttccaatcatgatcaatgtgacaagtggtgagacagacacccgtactgccagtcaggagatcgacagtcggctggatttacgcgtcccgcgtctgggtcctggctcagcagccccgggagtacccgtcgataaaatcgcactccacagcgccacgttgcaggcttttctggatggcacaccaccagaagatgcccgtcgccttaaattccagggcaacgtccctgacactgcgatctggcaaagcggtgatgatctgatggtccgttcccgcgcaatgctgcgcgacgagtttgaacagacactctcttcagcggatggtacgcatctctggaaactccccgtcaccccgttactgaccttctcagtaaacgggaaatccgttcacgtcacgccggagcttcagtaa

SEQ ID NO: 94571 - DNA, 1308 bp, Enterobacter aerogenes
atgagcgcagaacaggatgccggtaagaacggcaaaaaacttttttcaataattggatttagtgccctggttttagtgaccgcgggttatctggccatgtcgtggctgacacatgacccttcaggaacagattctgccgtcaaccttaacggtacggcctcaagtgccgtaaccaccacgacggagagcccgcgttaccgtgaactgcttaaagcctcaaacgatttaggcgcgcaggaagccgcacggaccgattcatccttcatcgccagtctcccggtcggccttgaagtcacggaaccccctccggataaggtgccagaaacaaaaccggtggacctgccacctccgccgccagcagcatcacgccatgcggaaaacccggccggagaagagcaggcaaacgaaaagcgccaggctcaactgcaaaaactgcttaagcggatcagtgacgcacagactggcggcgatgcaccggtgctggcaactgccctggcaagtgttacgcagacatcgccagcgaatggcacaagaaacctggcagagacaaaaactgaaacagagagtgcacaggtcttcatccacgcacttacgcgtgcggccggttatatggagactgccgtggattcagataaccccaactcagaggttgttgcggttattcctgccgggccgctggctggcgcaagacttcacagttcgtcagtaaaacttgccggcaatggactggatatcagatttaccagtatgagctggaacggcatggagctgaacgtcaatgcaagcgcacagagtgagaaaaacctgatgtcttctgtggcctccgatgttaaccatcgatggggaacacacatcgttctgcccgctgtactgggaggtcttggtgatcttggcggtctgtacaaggatgctaacactcaggttatgcagtccagtgtcggtaccgtcaccggacgagtgggtaaacctgatggcagcacagtggctggcgtaatggttggcggcacagcccagaccggggcggaagtcatcaaacaggagatggcccgtgagccgttccgccaggtcaccgtgaagcagaaagaagttatctccattctcttcgttgactcggttacttctgacgacattgtcagcagcaataaagcggctcgccccgcaatcaatagcaccttatcagcacccgctgccgcagagcagcaaaccgaaacccgcctgcaggaagccatcgcgcgccgccaggctgaaatccgtcgtcagtatggcgataccgtacccgtgaggaacaatgatgaaccagaaaattga

SEQ ID NO: 94572 - DNA, 771 bp, Enterobacter aerogenes
atgaaccagaaaattgatatgcctgaagaagaaacactggaaagcgaggatgattttggcgcgccagatcctcgcgagaaaccgcccttctggaagcgagacctgctgtttggctattctctgccgtggcttctcgggataacgcttctggcagtggccagcctctggtacctgttcggtccatcactgtcattgacgaataatacgccgtctgaaaccagcttcagtgaagttgaaaatacactcgacggtgcacagcatagtacggttgagtctgttccgcagcaggctgtctcgccagccgcggcgcaaccggcggcacatacgtccctgccaatggctcaggacgacagggcgagcatgatgacggatatccgtgacgagctgaacgatcgtgaccgcaagataaatgactctctgacgtcgcttaaagacagcgttacgcgcctgtctgatgctatcaaaagggatgaggcttacgcagtagaaacgcgtgcacagcttaatgagctgacacagaagctggctgttctggaaacccgcgtaagcacctctgatgcctcaaaaacagcttcccggccccaaaaacggcagacaaccagtgctgttgcaggcatgaaaatcatgtcgctggaagcaggaatggcgtggatcaaatggcagggcagtacctggtcagtccgggagggggatacgctgggtaaagtcactattcgtcagattgatcctgccacgcgctctgtggtgacaaccggaggaaccctgcgctaa

SEQ ID NO: 94573 - DNA, 525 bp, Enterobacter aerogenes
atggcactggatgccgtcacgctaatagagaatcttgcttcgggcatcttcaccgctgggctggatttattattcagctggtccgagatgattggtttttttggcctcatcgcacttctgacccggcaacgttccagtcgaagtccattgtccccgggcaagtttgctattggccttttttcctgcgccgcgctggtatctctcccctccatcattaatgccagtggtgcgcagcttggctttggcgccacatcttttgatgcaatcgcgtatgtgcaacccgccacctatggcgttgctgccggggctgctaacgccgtactttctctggttcggctagcaggagtgggatttgtctatacggcactcgatatgtttcgacgatcagagcttgaggggcacaccgcactcagttcaagtgaaagcattcgcgctgcgacagtaaaactgtttgcagggaccggtatggtcttttcacctcagctcatcgatgccgcacttgccactctcggcctctctttttaa

SEQ ID NO: 94574 - DNA, 405 bp, Enterobacter aerogenes
atgtcacttttccgtgctatttccgcgcgtctttatgccgtcgttattttctgccagctgaccatgatgcagtgccgcgagcgcatgattcaggggctgtgtgctctggtcacgttcctgttacccggcatggcattcgctgatggcgatctcgccgatatgttcggtagcgccgcctctggtgccaaaagcggtaaaacttccggtctggaaattgcccaggcgatcggtgtgttcatcttcatcggttccctgctgtccttcaaaaaagtgggcaccaatccgcagatcactgtgggccgctgctgtgcaggtctggccatcggcgcactactggccgtagtccctgaaattatgggacgaacccagaaacagctcggtaccagctctgtcaatatcagctaa

SEQ ID NO: 94575 - DNA, 864 bp, Enterobacter aerogenes
atgagcaaaaagaaaaagacacctcactgtccatggctacatccgcttccggttcctgatgttgtccattccacagcccctttacttcctccccccgagagcgtttctggagggctgtgttattgctgtaatgctgacatgaaacatctgtttgcgttaccggaatccctgccactatcccgacttgcggaagacgcgcaggatgccaggacccgactcgtcagagcgaaagacacgctggctcagctggagtcacgccccgccccgcaggtaccggttgaatatgagaaacacgcccgggctctgaaagctgcccgaaccgggatgcagcacgcatcacttgccgcccgccggattgcgttgcgacacatccccaaaacactgctgaccgacaccagtctcctgtctgacagcgaacatgctgaattagaacggctaacgacaccgtttcacctctgttacctatgccatgcctggcatgccctcaacggatttgctgctgctcagggggtcatggtctggctaccggacctgcacccacgtaatgttgttgccctgaaccgaaaagccctgcaggccgtcttcagcaccagaccaagcgaggttcgggaaggccgtcgggtactgtcagaactgacccgccatcgtcttcctctggaagaacgtttcgggggatggcgaccagctgactatgcagatgcgcttaaacgtttcccgccagtcatgcgcgatgaaatgcgacaaaaaatgaacggagtggcgttaatcctgacacctgattcagtgacggacagtgacgttctgtcaggagcctcgcagacaacaatattatcctcacagtcatctggtaccactgtcacgtaa

SEQ ID NO: 94576 - DNA, 3054 bp, Enterobacter aerogenes
atgaatatcaaccgccttgtcttcactattgaagacgttatgaatacctgttcccgtttcgccgtctctgctgactttgtcgactactgcgacattcgtacggtgatcggactggacaaacaagatctggagctcagaccctggctggaagcgccttatataggtgtcacccatcagggctatttcctttctgtattcgaaatatccggggcattacgtgaaatgtcggaaacagcctcagacgatcatccggatgcgtttgaaggaatgatcgcgcacctcgcgtccacgctcagcaccacctggaaaaatatcggccataaactggccttcattttcgaacgagacccggaaaaagggcgtgacgaagtcagcgccatgatcgccccgcaaatgcgttcaattcagcacatcggcgtccagctggatgacctgcttaatgagaagatcaatgtcatttctccgtggcttgttcgtgagcgctgctggcttgccgtctggagctctccgacactggtgagtcatcaggaaagaaccgattttaacgccaccgttcgggccattcaggataaagcacctgtcgcgcgctttggtcaggagccctggcgctggcaaatgtctggtctgaagatccggcacgacagctttatcaccactcttgaaaaagcactcgtacgcggtggagacggcttgcttgtccgcctacttgatgtgcctgagttctgtaatgaaatcagacgtgaaacagcacgcaacagcacatcggccgcatggcgcccggcattacctgggaaggctgcgccagcgggggcgcttcaggagggcgacgctacggcactgcttgctcccttcctgaatcttcaggtatttggttgtacgccagaaacagaaggtaatctggtgcatgcaggggggctgtggcacggcatggtggccataacacttccgcctcagcatccacgccccttcaatgagcttgtgaaattggttccacgttccgttccctggcgcatacgaatcgacatcatgcctggtgggatgaaagcgctgggctggaaaaagactatttcatcatttggacaatttattccctctattcggccactttacgacgctttcacacagctggctgcaacggatgaacgcgatccggtctgcgtgatgaccattgtggcgtccacctgggggcatacccgggaaatatgctcccgtaatcagatgctgcttgaatcagcgttgcagggctggggagtctgtaacacgaccaccacattcggtgatcctcgcaggggatgggtcaacagtatgctggccgcgtcagcgggctccggccctgttccgctttaccctccactctcccatgcgctatcgatgttgcccttcaaccgaccaggtaccgtctggcgaggggaaggcaacctgatgctgcacacggaagacggatgcgcctgggaagtcgggctggggtcttctcgccagaacaagcataccgaacttgcccctggcgattcgggtctgggtaaatcggtactgattaataccctgacggagatacaggtatcttccgcccaggtttcgcttccttatgtggctcacattgataaaggattcagcgcgatggggttaatccagctgatacgtgacagtctgcctgaagagcgaaaggacgaagcagtcggcatcatactcagcaacgacccgtctaagtcacgcaatgtcttcgacatcctgtatggcgctcgtaagccagtgacaccagagaagcaatttatcgcgtccatgttgacggccttctgtatcgaaccggataaagggaccccgcctaaccctacagatacccggcaaatagtgaaccgcctgattgatctggcgtatgacatgcgtagtggtattgagccaaacatgttccgttcaaacgtagagccagaagtggatgcggcactggagtcatccggtttgtggggtgagcacgatccggagtggtggaccgcgacaccatggtacgaagtacgtgacctcctgcatgaacgtggacaattatctgcggctcagcgggcacactaccaggcggtaccagaacttgctgatatgcccgcgctactacgcagtgaggtcattcaggaaacttttggccgaatacagcgtaacggctcacaggagcccctggtggagtacattgagcgctgcatgattcaggcccgacaggactacccgatgatggccagtcggactcgttttgcgctgaacccgaacacacgcattattgccgtagacttaaacaacgtcgccggcgataagaccccggcaggcagactgaaaaccggcatcatgttcctctttgctggccacatcactgcgggtgattttttgctgccgcagtatcaggatgaggtaatgcaaatactgccggaagcctacctcccgggcattatgcgacgcatcaaccagctcgatagtgaaatgaaaaccaaaatctatgacgaactgcacaacgtcaaaggtattgatttcatcttcgaagcactggatacgcaggatcgtgaacaacgtaagtttggtatccgcacggtgctgagtacccagttccttaccgactatccgaaaagcctgctcgactctgccaacaccctctggctgctgcgcttccgccaggaagatattccacttttacgggacagttttaagatccccgaacacaatcttcatgcattcctgcgtatgccagctggtccggctgcagacggtagtggcgtaccgatgctatgtatgatgcgcacaacccaggggacgctggcacgcattgtccggtttacgctcggaccgctggagctgtggtcgcttaactcagacaaaaaagacggcgcgctacgcagaaatctctcggatacgatcggtactgcccgtgcccgtcagttactggcggagaagttccctcgcggatccgcaaaaaaactcattgagtacagggagcgtaacagtggcgcccgtggtgataagggcgtcatcgaattgatggcagacgaaatgataaatgagctggggtatgacctttga

SEQ ID NO: 94577 - DNA, 573 bp, Enterobacter aerogenes
ttgatttgttccatccacctgacgccacgctgtcgccgcccggtaaagggccaggtcagtctttcccgcctggtgatcgatgccgacggcgtggagttcgtactgccgtcccggcacttccgtacagacagtgcagtgaactcccgggcggtatacgcgaccgatcgccgggcaacgcaagaggcctgtggcgtgcttctttcgctcaaagcgcgaccacgccagctggtcacaacggccatctggcaggtcaatgagccaggcgaaccggtgcgggaatcgcgtcatgtggtccagtggttgctacctgaaaatacagtggcggtgttaacagatgatacctggttatggccggagggggcagataccccacaactcagcccaggagactggccggtactagatatcacccctccagctcatgcaagaatcacgcgtcgtgggctcacaatcatagacacccgcagccgggaaggacgtatcagcagacgctttcagaccttccctctggtcgccctcgcccccggcacacagtcaccccgccttcccgacgtgtttaccccgctcaaataa

SEQ ID NO: 94578 - DNA, 1203 bp, Enterobacter aerogenes
atgatacaacgtcacctccccgcgctggcgctggccatcgcgtccagccttcccactgttgccagtgctttaacggtcaacgtgaactccagcgttccgatcacgactcaggttctgcctgagatggccaccatccaggcaactctggtcgaaatactacagatgcaacaggccactggtacagccatcacacagaacgccgacaagctcggcgccctgattaatcaggatgggcaggctactcgccagcaaatgattttcaataatgaaacccaacgtctggaggaggcacggcagagtttttcggtaccggattcgatctgtagtgattctgcatccggtgtggcagcacaaagtaaaagtgcatcaggcagcgccgcgtcaaaactctcatcaggcaaaggtgtttccagttcagcggtgcggaagaggatttctacagcatcggaagaacaggcccgagacgcttatgacggtgcgaacgtacatgccgcgtactgtacggcagcagaatatgaacgctttggcggaaccggtatctgccctgccgtcagtaatttgcccggaggtgacagtcaggtacgctccatctatggcggcgcgggacctgaagggcaggcaccggcactttcctggtcacaggaacagattgatgccgctatggcctacatgaaaaacacggctcgcccttcagcaggccgcacgcctggcaaaggtgaagtcaacactgttaccggtcgtacgtatgtagggttgctcaacgaatacaacggtatcatcgatgccgcgtctgaacctcagctctcgctgattgccgacagtaagaccagtgaaactacccgtgatgccctgaaagaagcactgcagtcaccttccgcagcgcagtattttgacaatgtggcttcgccggaggcgaaggcgaagggctacatgagccagcgggaatttgaatcgtttgaggccggacgtcgatatgccaacacagcctatctctccgacctacagcaaatggacggggataaccttatgcgcgaactcatccgaactacggcacagatgaactggcaacttaacgacattaaagagttgctgcgcaaagggaacgtgatcgacggccagctgctcgccgcctttgcccgccagtcctacgccccacgtctgaaacagctcgaatcagccatgaaccagggagctgccaaatga

SEQ ID NO: 94579 - DNA, 543 bp, Enterobacter aerogenes
atgacactggaaaaaacagtcgcacggaaaaaaggactacctggacgtattacccggggactgctgagcatatttctgccattgcaggaaacgaagtggtatttgcgggctgcccggcacatgacatcacgaaatattgagcgaatgcgtgatgcttttccggagctcattactgacgacaaaccgccgacttctcctgactgggaaaaagccgttgcggaatcaggttgtacccccgcacagctggataaggggtatgtgagccagcgcaggcgctggcgagtgctgttctggcttatggccataccggttccgcttgcagcactgacaccattcattattggtgggagtatctccgcgcaccagatcagcacctgtgtggtgctgttttccggtgctggcgtagcatggtcaaaagcgctaatcgtaacctaccgactgtggcagttacgcaaccgtcgcgtaagtcttgctgaaagaggcacctttcagcatttcatggcggaaacccatgccgtacgagatgccattctcgggaaatag

SEQ ID NO: 94580 - DNA, 2160 bp, Enterobacter aerogenes
gtgaaaaatctcattcgtgcgctttgtgcagggctgcttatctctgttaccccggcacgcgcaggtgtcacttacgatgacatagtctctgctgcaaccaatgcacaggacctctcccgacaggcactggtcactatcttcggcgatgtggtgctggaccctctcgccgccggcaataccacgatgatcgggaatctgtttgctctgtttaacggaattatcgccgtccttgccgtcgtgtggtttgtatttattggtctgaagcacattaataaaacggggcatcagggcaaggtattcagcggggatcgcgatatcaccagcacactgagcacagtgtcaggatttttgatgattatcccgaccgccaatggctggagcatgtcccagctaatcatcctctggggcgcgtcgattatgggcgtaggttctgccaacctgatggtgtccaaagctgccagtgatattgccagcggctactccctgactgtccagcccacacaggcttcgacccgcacttctgcacgcggtatttttgagatgcagctttgtaaacatgccatcaatactgcgctggacgattacaacagcacggcaagctcgaccacagccagaatggcagggatatccggttcttctggagggaattatacctaccgggtcactaatggcagcggtgtgtgcggcacggcgacgataccggaacaacagaaatcggactcctcgtctggttccggaagcttctttaaccccttcagtaaccgcgatacaagtgaagtggtggatgcgcaaaacaaagctatggaagcaatgatccaggatatggacagcgcggccagcgagtttatggcagggtttatgaataaacgaacaaccggcaacggcacactcccggatattgaaacccgcattcagagagcagccagtacgtacgaacaaactgttcagcgcgcattaccggcgcagagtgaacaaaatggcatacaggacgctgtcaggaattacctcgacacatatggctgggcggctctcggtgcctggtaccagacttttgcaacggccaatcaacgcctgacagaagttgccagtcgcgcgcctgcaaccagtggaatgtcatctcttggggaaattggcagcggagacctgttcagtgcggtaatgagcgcctaccgtacccagttacaaaactctaattatgcacctccagcaggtacagcaacatcacaaaacgagttaagtgcttctgaaggtaatgacccaaatagcatattaatgaactcgttcgctccatttttcgtcagtttaaccagcaacatcgcaacaaattatagtgggacaggaacctcaacggggcaggtaaacccattagttaaaatgaaaaatgttggagattacacgctggttgcagcggagggaactttaacagcatacacagtcatacgggctgctgttgcgggtggagagtcatcccttctcgggaaggttgccaatatgacaggagcaattagcgctgtagataaagggcttgatgccatttcgccagcagtatatttcttgttactacttatgtttagcgcgggatttacactttcaatctatttgccatttattccgtttatcttctggatgactggtattggtaactggattgtcagtgttctggtaggttgcgcagcgggacctctatggggggcaactcacctaggtacgtctcaggatcgaggcagtcgtgcggcttatggttacatttactttatagataccatgattcgtcccgcactcatggtttttggatttttctttgcatctgttgcgattgttgctactggaactatccttcatgcactttttggtgtcgcactggtcaatgttcaagccaactcgttaacaggtttattcagcatggctggttttttaatgatctatgctcgaatttgcacgacactggtatctagcatatttgccttacaggcatatttacctgactacgtcatttcgttccttggcggtagagatgcagcaaatactcttggaagcatggctggttctgtcaaagatatgttcgtagccggtgggaggaatatacggcatacccctggcgttaatacgaaaggtatgaatggtcctggggaaacaaataatgatggaataaaaagttga

SEQ ID NO: 94581 - DNA, 633 bp, Enterobacter aerogenes
gtgaaagatagattccctaagtggtgggttttatactctgttgcaaagtctttatttttaaagttcggtataatctctttcttgctgattttttttctatgctccatttcaatcatcatggatgagcacgtacgcccggaggcatatctatacgccataacaagttgcttactgttattcggtccatttgccatcaattatgttatagccaagaaacgcaaaaaaaagatccttgctgttgttgagaaaatcaaggagacagggcatttcaacccggaaagcacttctgagggctggctcttctggaaaagtacctacctgggttttgactttcagcaaggaacctttttgtacgtccgaatctacccgggcaatgtaatggatgtcattggcttcgatgcttacagcctgacacgtacagaggttgaagattcaaagttgcgtctctttactaggttcacatcattgccgatgattcctatcgataccggtgctgcatccagtattgctaaccatctgcatgcaatgaacaacaaaggatacacctataacttcaacttcaacgatgtcgtgaataaaaaacgtgccgagatcgaatctctgacagggctacctgttcccgttcttgcctga

SEQ ID NO: 94582 - DNA, 1209 bp, Enterobacter aerogenes
atgacatccgctcgcgcgggaacgactgacccgcttgaatttcttggagccctcgccatcctgggcattatgcttctgcttgttgcatggctgttcttgcctgagtttgtgtactggtcatgtttcattttgcataccctgtggggcatggctgattttggccccttccacacttgggccgcaccgcgttataacctgctggccgtcaccgccaacaatgccgaaaacatcacttacgatcagtggatcaacgtgatgaagcaaacgacggtgatcctgatgatattcctcattcccctgtctaccgcttcgctgtggagctggttatgccatcctgcacgaaactggcaaacgcgacgggtactcaatatcagcacgctgcccttcgctatggaaaccatttctcctgcaattgcccccattcttaatgagggggattccagtcgcctgttgcttgataaacgtcgtccagaaagacgtccggcacaaagccctgagggtttcgctgaagagcatgaactcatcagtaatatgcagctcgatgttgcccgctgcagggctgtttttatggcccagctggggcgtccacttaatggatggaaaagtctcgcccctcatgaaaaggcattattcgcaatattcggccttcagtttttcctggacgaccgaccggccgcacgtcaattaatggatgccctgaaccgctcctgtcggataaaaagccgccgtgataaggggaaattctcagttccggtctatgcgctggcgagaaccgcttttaagcgcgtcattcagagcgaaggcgcgaaacagtggttgcgtgagcaccgttacgtcagaagtggtctggtctggctgtacgcgcatgatttacggctgacaccacctaactggctatggctaaagggggtagaccgcccactcttctatgccctgcaccgggcaaacaccaccaaaggatttattgaaggtgcaggtatcgtcgccgtcgcccgcaccgagagcgaggctatccgacttggcctcccctgcccgcaagcctgcgtcgatgaagccattgagggattgcgcatcgatatgctgtccctggggctaatctggaacgaacctcagccagaccgcgaccgcaggcgtcgtatccggaccaactggtcactcacggaagacgtcatcactcgcccgggtgacgatgacgatctcatcttctga

SEQ ID NO: 94583 - DNA, 1185 bp, Enterobacter aerogenes
atgtcgctggaaagcacctacaccacctttcgttgtaacgacaccattgtggttttacatcaacacggacacggtgttcctcaggccctgttgacctttcgtgagcctcagcgtatggccatccacgataaaaagctcatcgctttttatccatattcagcagaagccgtgacacttcttgatgacccgatgcacgatgcggcggaagtcttcaacaccatagcgcggcacctcaaaacccagagtaaggcaataatgaaacgccgtattaagtcccttgccctgtttgtgagcggcgcgctgatagcatcttcgttatggctcctgggtacggacaaccatttctcactcaatgtgggaaaccagacaatgactatcccggcagaaccaggcgcaatcgcaccggcccggccgcggcagactgttgctgttcaggagccagccaacccggcggcagtcaatacagtcattcaggctgcccaggctgaatccgacaacatgcagaatattatgaaggaaagtcataaatccttaccggcttcaccttctgaagccatgaaaacagcaccggcaccggtaacgtcaaccacatcagtaaaaaaagaagcgacggaacagccagcgcgacagaagatggtggaaatactgaagcgcagtaccgatcgcggtctgttcaccatccagctctcaaccgggcatgagcgtacgctgtatgcattcctcgatccaacctgtgcggtctgcagaagtatggagccggcaatcgaacagctggcgcagcgttacaacgttgttgtattccctgtatcagtcgtgaatgacggcggcgatgctgtagagaagatcattccggttttatgcgagaaggaccagacagctcgtgctgttgcatggagtgatcttttccgaccggacgcaggtatgctggttccgggacagacaacacctccacaggtgagctcagactgttccgcgtcggctcaggccgtagtagccgtaaacgatactggcttccgcacctttggtttttcaggtacgccgactgtgctgactgactcgggcattcgcctggcaacgggcatgctgaccgcgccggataaaattgatcacttcctgaaaattacagatccaatgtcaccagaacaggtcgaccgctttgtgagttccctcagtatccaggagtaa

SEQ ID NO: 94584 - DNA, 2301 bp, Enterobacter aerogenes
atgaattatacgcccgtaaaccaggcgctcatgaagcgcaatgcctggaactcccctgttcttgagcttttacgcgaccacctactgtatgccggcattatggcaggaagtgtggtggcggggtttatctggccactcgccataccgcttttgcttttgctggccatcgtggccagcatcagctttggaacacaccgctggcgtatgcccatgcgaatgcctgtccacctgaataaagtagacccctctgaagaccggaaggtacggcgcagcctgttcagaaggttcccctcactgtttcagtatgaaacaacgcaggaaagtaaaggtaagggaatattctatctcggctacaggcgaatgaatgatatcggtcgcgaactctggctcaccattgatgacctgacccgtcatgtgatgttctttgcctcgaccggtggagggaaaaccgaaaccatctatgcgtggatgctcaattcattttgctggggtcggggcttcacctttgttgacggtaaggcgcagaacgacacggcgcgcacctgctactacctggcccgccgctttgggcgtgaggatgatgtggagtacatcaacttcatgaatagcggcatgtcccgcagtgagatgatccacaacggtgataaaagtcggccacagtctcaccagtggaaccccttctgctatagcactgaggcctttgttgctgagacgatgcaatcaatgctgccgaccaacgtacaggggggagaatggcagtccagagcaattgcaatgaacaaggcgctggtttttggcacaaagttctattgcgtccgtgaaaacaaaaccatgtcgttgcagctgctgcgcgagtttatgccactggagaaactggcagagctttactgccgtgccatagacgatcaatggccagaggaagctgtctctccactctataattatctggtagacgtaccgggtttcgatatggccaccgttcgtcagccttcagcctggacagaagagccgcgcaagcagcacagctacctgactgggcagtttctggaaaccttcaacacatttacggaaacgttcggtaatatcttcgctgaggatgccggtgacattgatattcgcgacagcattcacagcgaccggatactcctggtgcttatcccggcaatgaacacctctcagcacacaacctctgcactggggagaatgtttgttacccagcagagcatgatactggcccgggacctgggacatcgtctggaagggctagattccgaagctctcgaaatcaccaaatacaaaggccccttcccctacatgaactatctcgacgaggtgggagcctattataccgagcgtattgccgttcaggccacacaggtacgttccctagacttttctatcgtcatgatgagccaggaccaggagcgcattgaaagccagacttcagccacaaacgttgccaccctgatgcaaaacgccggcactaaggttgcgggtaaaatcgtaagtgatgataaaacggcaaagacaatcactaatgccgcaggacaggaagcccgggcgaacatggtcagcctgcaacggcgtgacggtatcattggtacctcctggatcgatggcgaccacatcaatattcagatggagagcaaaatcaatgtgcaggatctgattaaattgcagccaggtgagaactacacggtgtttcagggcgatccggttccgggagcatccttctacatcgagccgcaggacaaaacgtgcaatgcacccgtcattatcaaccgatacatcacgattaacccaccgaaccttaagcaactacgtaaacttgttccacgaacagcgcagcgccgtcttccggctccggagaacgtcagcaaaatcattggtgttctgacagaaaagccctcgcgtcggggtaaagcggcaaaagctgaaccctggaagataatcgatacctttcagcagcgtctggccaatcgccaggaagcgcataatctgatgactgaatatgatacggaccaccatggacgggaagaaaacctctgggaagaagcgctggaggtaatcagaacaaccactatggcggaacgtacaatacggtacatcacgcttaataagccggaatcggaaccgacgcaagtaagcgctgaagaaattcagctcgcaccagatgcgatactgagaacgctgactctcccgcagccggcttatattccgccttccagatatcgaaacgagccatttatctccccgaaactgcctgattcaccacatccggatatggagtggccagagtga

SEQ ID NO: 94585 - DNA, 270 bp, Enterobacter aerogenes
atgaagaagctactatttgccgccctctttggtttttcatgcgttgccgctgcagcgccacagcctgttatcgacaccgatgctgtgactcagttgactgaaatccgtaacatcctcctcgcgaaccagcagaaggtgtatgcttgctccgatggcgaaaagctatataccgtcgggctgcagataaaacatggtcattcagaatacaaatgtgttttaaagaatgaccatgctgaatgggaagaagtccgacaatttgcattaaactaa

SEQ ID NO: 94586 - DNA, 651 bp, Enterobacter aerogenes
atgttgtcggggccactctgggttccctatgtgaacgcatttttgtccagatacgtacgcattgatataccagatgcgagcacgactggatgggtatgtctggtgctggggctgctctgtttgatagcgaacgaagcactggaccgctggccatttaaacagaagatgactgcagaggacaaggaagacaagaacacactttatgagttattcagccagatgcatttgcctacttatgactggtttttccatcatgggaaatcatcaatggtttatattccggccctgcattaccaccatggcgttgaggggtatattcaggcaacccagttccaccttcatgatcagaaaatcagagaatctgtcgagttgttttaccaatcatgctcgcgtgcattttcttatggattttactttgctgaaaccagtaaccccaatttgcagaagttcagcaatcagcacaatgttcatactgatccgaacgcaaaggctgctcacgatgatttcctgaatgcggtatatgaagcagaagggcatctgaaagacctgtacaaagcggttaaaactaaatatccggactttgatatggaggcaacgagtaaggccgccagggatgagcagcgggctctatccgaaacaactgggttttga

SEQ ID NO: 94587 - DNA, 492 bp, Enterobacter aerogenes
atgcaattctacacagtcagcgattcatacattgcacatctaaaaggtgtcgaagcccgcgtgcctgataactatggtggtagcagggcatttgtcggtattgttcttgagatcaatggccttaaatatctagccccattgacttctcacaaacccaaacaggatcggattccttcttctgcaccaagtgctttcaagctgcacgaacgtaccgacccgaccaacaagcttggaatgatatgcctcaacaacatgctgcctgttactgatgacgttatcgagctactggatatttctgctcagcctgcgcgctatcaaaggatgctatataagcaatacgagtacattaaagtgaatatcacagaaatagaatcccgcgcgcagaatttgtacaaaattgtgacagttgatcagaataagttctttacaagtatttgttgcgatttcaaggtccttgaagaggcttgtaatagttttaatcgtcccacttga

SEQ ID NO: 94588 - DNA, 2700 bp, Enterobacter aerogenes
atgatcccggttattccaccgaaacgacaagacggcaagtcctcctttggggacctggtgtcgtacgtttctgttcgtgatgaaccgcgcgatgatgatttaatggaagccgtgaaagcttccggaacaaagccagaaatgccgcacagcagtcgcttttcccgtctggttgactacgctactaaactgcgcgatgagtcgtttatctcgctggttgacgtgatgcctgacggcggggaatgggtgaatttttacggtgtgacctgtttccacaattgcacatcaattgaaagtgcagctgaagaaatggagttctccgcacgtaaagcgaagtttgcccacaacaaaagcgaccctgtattccactatattctgagctggcaatcgcacgaaagcccgcgtcctgaacagatttacgattcggtcagccatacactttcccgtctcggtttagcgggccatcagttcgttgctgccgttcacactgacacggataacctccacgttcacatcgctgtaaatcgcgtacatccggagactggttatcttaaccgtcttgcttacagccaggaaaaactgagtaaggcctgtcgtgaactggagctcaaacatgggttttcacctgacaatggttgctatgtgattgcccctgataatcgtattgttcgtcgtacttctgttgaacgcgatcgtcaaagtgcctggaaacgtggccgtaatcagagcctgagagaatatatcgctgacacggcaatagctggtttacgggagtcaccggtgaccgactggccttctctccatcagcgatttgcgaaagaaggtctgttcctgacaaaggagagcggcgagctaaaagtgaaggacggctgggaacgtgaacgtcctggcgttacgctttctgcgtttggacacgcctttgataccgataaacttattcgtaaactgggtgagtttattcctcctgcacaggacattttctcgcaagttccggctgtcggccgctatgaaccagacaagattattatgccgtctcgccctgaacggatgacagagaaagaatccttatcggactatgcgatcgcacgtttacgggcgccgctgattgcacttgatcaggatccaacgcagcgaaccatacagtcagtgcatacgcttctggcacagtctggactgtatctgaaagaacagcatgaccgtctggtaatctgtgacgggtatgactcaacgcgtacacctgtcagggcggaacgtgtgtggcctgcgctaacgaaggctattctggactcgtataaaggaggctggcagccggtaccgaaagacattttccagcaggttccccctgcggaacagttcaccggcggcggtctggaagccaccccagtttccgatcgggaatggcgaaaactgcgaacaggttcgggcccacagggggcgctgaaacgtgagattttctctgataaggaaagcctctggggctatgcggtttcacactgccgtcaggatattgagacgcttatcagtagtggtgaatttacctgggcacgctgtcatgagctactggcgcgtcaggggctgttgctgatgcgcgagcagcagggcctggttgtgatggatgcttacaatcacgaacagacccctgtaaaggccagccacgttcatcctgatctgacgcttgcgcgtgcggaacctcatgctggttcgtttgtttcggtgtcggcagacatctttgaacgtgttaagccggtcagccgttacaatccggaactggccgtgagcgaccgcgatattccgggtatgaaacgtgatcctgaattgcgtcgccagcgtcgcgaagcgcgcgcagctgcgcgagaagatctgaaagcccgttatgcagcctggcgggctaactggcagcgccctgatttgcatggccgtgaacgttaccaggcgattcatgacgaatgcaggatgcgtaaagcgcgcatccgcatcgaacatcgtgaccctctggtgaggaagctgcattatcatattgcagagcttcagcgcatgcaggcactgattgcgctgaaagaaaccatgaaggctgaacgagctgagcttatcgggcaggggaaatggtatccgccgtcttaccggcagtgggttgaagctgaagcggtgaaaggtgacaaggctgcgatatcgcagctgagaggatgggattaccgggatcgtcgtggtaatgcggtgaaatccacaacagacaaccgatgtgtcgttatctgtgagccaggcggaacgccgatgtattctggtgttcctggcctgcgggcttcactgaagaagaacggtcgcgtccagttccgcgatccggatacaggccgccatatttgtaccgactatggtgacagggttattttccggaacagtggcgattacgatgcgcttaagcgggatatggtcaaagtcgcgccagttctcttcagccgttctccgagcgtcgcgatggcgccagaagggaataatgaacagttcaatacagcttttgccaaaatggtggcatggcacaatgtgaaccatggcgatgatggtgaataccatatcgcgcggccggatgtagaccagctgcgtgttgagcatgagcaacaattcacaaatgtgttgaatcaaagcagttatgctccggatgccaaagcttcacatcagaatacctgggaacctccgacaccaagatag

SEQ ID NO: 94589 - DNA, 336 bp, Enterobacter aerogenes
atgagcgacaaagcatcccgaaggggaagtgataaacggcagaaaaccgtaatcaagaccctgagattcacgccggatgaaatcgaagagattgaacagaaagcgaaagcagtggggcaaagcgtatcggcttatatccgtaacgcagcgatgaacagaaagatgatttcgctcatcgacgacagctttatgaccgagcttttaaggctggggagactgcaaaagcatctctttgttgaagggaaacgagtgggggataaagagtactccacggtccttgtcgcaataacagaactgtcgaccacgctcagaaacaaactcatgagtaacgattag

SEQ ID NO: 94590 - DNA, 309 bp, Enterobacter aerogenes
atgagtaagaaggcgttttattcagatgaagatatcgagctggcaaaggttgctctggctggtttaccggatctgacacctcagcgcaaatcacaaaaggaatttttggatgcaatccgtgatgacctgttagcactggtcaagaccaaaggttacacggtctcagacattaaagagacactaaaaaccacggggtatgaaatcagtgagagagcacttcgtgaaatcgttcgtgatgctgataaaaacaaaccagcccgtaaaaatcgcaggtcgacggcaggaagttcgtcatcaccaacgaaataa

SEQ ID NO: 94591 - DNA, 219 bp, Enterobacter aerogenes
atgcctcactacatatcccgtgcgcctcatggcgtcgcctgtatccgtcttgataacggtgatgaagctctctttgtgaatggagaactgatttcctcatgtacagccagtgaactttatccgcgtattattgcctcagggttgaacctgtcgacggcacttagcttgccatttaaacagcttactgctcaggttcctgataaccctaaatggacatag

SEQ ID NO: 94592 - DNA, 243 bp, Enterobacter aerogenes
atgaaagaccagttcatcgtcgcatgtcgcgaatactttgtaaaggagagggtaaaaacacgtcatccacggaaaatccgtgaaacgttgaaaccagacgctatcgcgccacatctgaaacaactggggacatcacttgtccgttgtgggcgtattcataaaccgatccatattccagcacttaacggggctgaatgggatcacgtcctgagtacacttgagctttcccgcgcgtacacctga

SEQ ID NO: 94593 - DNA, 267 bp, Enterobacter aerogenes
atgaaaaaagtgcagatcctgcacttttatggattttttttgtggattaatttgatgctaaatgacgacgaaaagcatgttgtcaggactgacatctgggtaccttcggctccccgtcgctgccgggtcgtcgcctgcacttcgcgtggtggccgtacgcccaccgcgctacgcggagccgcacgcgtctccgtcctgacggatagcaagcgatacctgaacctatcccgcttgcagctgccgttccggcagcgccgctcccactga

SEQ ID NO: 94594 - DNA, 831 bp, Enterobacter aerogenes
atgacccagattagttttgccgatttcttcaatgagacaaaaaagcgcggagccgcccgccctgtcgtgcaggcggctccggctgtccagtccgagccagccctcccgcgccttatcagcatcgacaccgcgcgtaagcagtttatcagtctgtttaaccagactgcccgccaccttcaccgctgggatgtattcagcgattttgtcagacttgccgcgagcgaactggatattgcgcgggtgagaacgccagagaacgcggaaaactgccggaagatctgcgcgcgatacgacgctgacgatatccgcaattttcatgagttgttccgcctgatggtgtgtgcgctggaggctaaattccatgacttcatcggctcaatttttatggagcttgagctgggatcgggaggtatggggcaatattttaccccctattctgtccagtcaatgatggccagaatgctggtttccggcattaaagagacggtcacgcgggagggtatcgcgacgataagcgatccggcctgcggttcggcaggaatgattattgcctatgctgaatgtctgcttgaggctgatatcaatccgtccgcgcacctgttcgccagttgcatcgatattgatccggttgctgccgatatggcatttatccagttgtctcttttggggattgcggcggaggtggtgacagggaacacgctcacgatgcagttcaatcgtgtacgttatacgcctgtttactatctcaacgactttgaagcgaagctgaacactcagcgcagacttaaagccatgatggactttatgcgcgatatatcgaaagccgcctga

SEQ ID NO: 94595 - DNA, 264 bp, Enterobacter aerogenes
atgcaattcagtgaagtttcgattgttacaccaaccgccctctatgtccagatgcaggaggctcaaaacgcgcccgtgaaaaagcaggtgcgtatcaaacgcggtgaaatcgcctgcaatgccctcagtccggaaatgcgggcactgggccgtcatattgcgcactgccggaaaaaggggcgatccgtacgtattcccgccatgcgcgggagcgagtggggtcatgtgctgcgcacgcttgaactgagccgcgcctgtaactga

SEQ ID NO: 94596 - DNA, 360 bp, Enterobacter aerogenes
atgcatttacacacgactgattctttcgattctcttgattccagcgccagcgccgaatcggaaatggcctactggctgagccgtgaaaagtccgcactgatcgcccccgtggaaatcgatgtgaacaaattccacgatgcggcaggaatgcacccgccgatgatcaactggcgttgtgataccgcgcaggacactgaaaccttcatgctggcagagatgatctgtatgaacgtgacggacatttttgtccgtattggaaagcgttatttccgcgtacgtgattacagcaacctgaatcacgccgatatcgtggcgaaggtgaaagcagcattcagccctgagagccagagccagaaatga

SEQ ID NO: 94597 - DNA, 273 bp, Enterobacter aerogenes
atgcacacacgaaacgtcaacgtcaaaaccgccgctcaagaatcttccaggaagatggaggaagaacaaaaccttgtttctgtcgcgaaggagtgggtggctcaggccactgcgctgaaagcgggcgtcactgtcaccgtgtccgatgtgtcccgatatggcgacgtgcaggtggagatccgcaccaacggaacgcttaactggcgcgcctggtcgtttcaaccggattttctttttgaactgaaacgcaacctgcaatacgtacagctgtaa

SEQ ID NO: 94598 - DNA, 579 bp, Enterobacter aerogenes
gtggccattgccctgcccgtctttctggttcagtccatcacggaactgctgtcaggagaattaaccagcaggaaaccgttcaaaacggtcacggagaggcatacgaagaagccctgcctgaagcacagcttcagcagactaatcacaattgcgtatatgaacaggacaaaccggagggagcagaggggctgcgccggaggcgcgccccgcttcccccgaaccccgcaggggtacggtccgtcccggaagttcaggcgtgcggtcgcgtcgggatggaaaaaggggctaccggcgaaccggcaaccccttcataaaggcgcttcaggcatgtcagagcaactcagccctgaaaaggcggggtttcccccgcctccaggtagcttacttaccggattcgtaggccataaaagccgccacctccctgttcgtgtccctgtaccggatttcgcaaagcgatttccgtgtcaggtaagtgaatatcagcagtgtgagacacactatcaacacacaccagagcagggtacttcgtggcagtttcatagcttacttctccttgcctttcggcaggtaagcggctaa

SEQ ID NO: 94599 - DNA, 231 bp, Enterobacter aerogenes
atggccgtgagaaacaatccgtggaaaacggagctgaaggttgcccgcagccagcgcaataaacttcggactatgtcggaaaagctgaaagagatgtgctgtgagtgggacgggttaagtggctggctggagactgaaagtgagcgcctcgcagaaagtattgaccagcatcttgtggcgctcgacgaacagatatacgcctggtctgccggcaaaagtgagcctgagtga

SEQ ID NO: 94600 - DNA, 732 bp, Enterobacter aerogenes
atgatccctcgtcacctttctcttgtcacgcaactgccggagcgtgaggcagcgttacgagccattattgccgtagaagaggggggcgggcggtacggaagccgacacccgcagccgtatccctatgccagagcatttttccggttcctgactggtagcagtaaaattagtggaaaggcgatcaaccaggtgcgcggggcgtactggctgaagggcgataaaatttctctggcccgatatgaagaggcgtttgacatactgatcagtagccgcggtcgcctgtgttaccctccgctcggtaccgacatggtgcagaacctgtttccggagcaggcgttcagcatcagagaacgccacacgcagcgggaagtgcgcgaggataatctttattcccgtcaggaatcacggcgacaccgtgaaaaagaagagaagtaccagaaccgcgtagggcaggctgaaatcgacctggcatttcagacaccggagacactgcgggcatggtatgagttctggtcccagcaggatatacgggactatgacatccagcgaatgttgtgggcgtggacggaacgcagcccctcgttgtctcatctggtgaaggcttactacgaccgtgcgcaagacattgttctcgatgtacatgatgtggcgggctcctcaacaccggcggagaaagagctggagcgctggatggtaccgaacaaaatcacgctgaggtctatatggccgtga

SEQ ID NO: 94601 - DNA, 423 bp, Enterobacter aerogenes
atgaatatgccaaactttaagctttcctccatgatcggtgaagatttcgaaacctgccgcgccgctggttactcctaccgccgtgagatgacacacgctgttatgggggcactgagtgcgcctgaaaactgggatgttaacggggagtatcgtagcgagttcgggggcttatttcccgtgcagatccgtttttcgcccactcatggccgatttgaagtggttctgtgtagtcctggtgagtttagtcaggactggatcatgctgttggtctggagaaaagggcaggaagtatcctgtatccgctcatgcccacaatttgacgctgctgtgataaaccatgtgctgagcctgaccagcaggctggacagtgatggatactcaatattcgatattctctcaacgctgcgcatggaggtggcctga

SEQ ID NO: 94602 - DNA, 1986 bp, Enterobacter aerogenes
atgacagttgcagatgttaaatcaaaagcaccaaaaaaaaccagtaagaataaaactgccggaaacgaggcgctgaaagctgccctcgatgcggcagtcattgagtatgttccgctgaccgatctcattaaatcaccgctgaacgtgcgcacgattccctacaccaccgagagcgttaagcgactggctaactccattgaaagcctcggactgcttcacaatctggttgtccatgccctgcccgagggaaaatacggtgtggcagcaggtggtcggcgtctgactgcgctgacgctcatgtctgaaatggggcgtatcaaaccggattatcaggttccggttaaacgtgtcagcgacgagcttgctgttgaggcttcttacgccgagaacaacgagcttgaaaccatgcaccctgccgagcagatcacagcgtttggtacgctggcggcgcagggaaaaactcccgcgcagattggcgaggtgcttgggtacggttcccgccacgtccagcgcatgctcaaacttgcaagtcttgccccgtcactgcttgcacttctggcagaaggtcagcttgatgttgaacagtgtcaggtgttgtgtcttgaaagcgatcctgagcgtcaggttgctgtttacgaaagcgtaaaggaggaatggggacgcactaccgtaaacgcacttaaaaatcgtattacggaaagtgaaatttctgtctcgcatccacgtttcgcatttatcgggcgggaagtttatgaagccgcaggtggaattgtccgtgaagatctgttcagtgagcaggaaggggacggaacagtagacagtctgcttgttgaacgtctggtactggaaaaacttgaattgatcgctcaggaaatccatcaaaaagagggctggatgtggggtaccggacgtctggctgcaattaacctttacggacctgacggaaaggactaccgcattctgccggagccagatgcaatctacagcgaagatgacagccgccgtatcgatgaactgtccgacaaatttaacgctctggatcctgacagtgatgaagccgaggtcattagcagcgaaatatccctcattgaacatgccgctgagcttcgtgggtggacagaagatctaaaagcaaaatcaggcgtggtagtgagcttcatgcacggtgcgcttcgtattcagcgtggtatatgccgcatgtctgatttacctgaccatgacagtaacggggaggattccgcgcagtctcctgccgtgactcatatgcatcgacctgatgcagcagaagggatcagcatcccgctgctcaccaaaatgtcatccgagcgcactctggcggtacaggccgcgctgatgcagcaacctgaaaaggctgtggcgcttatggtctggcgtatgtgtacctgcgtctttgctggatgtgtgaccacgccgcatccgttccgtatcaacctgaccgtttctcacagcagcctcactgagaacgccccgtccggtaaagaaggcgcagcgtttgaagtcctgatgaccgaaaaagagcgcctgaaaaccctgctgccagcaggatgggagaaggacttcacgaccttcttcgccctgaacggagaggtactgatgtcattgctggccttctgtgcggcttgttccgtagatggtgtacagacgcgtgataatggacacacatcacgcagccctctcgatacggttgaggccgcgataggttttcaccttcgcgactggtggcagcctacaaaagagaactacttcggtagcctgaaacattcacagatagtcacttcacttaaagatgcaggtctgactggtgccgctgctgacgcagaaaaaatgaagaaaggcgacgcggcagtgcatgcggagttctttatgaagcagaaccgttgggttcctgcatggttacagtcaccgcagcctgatgcaaaagacagcaccgataccgacactgacaacgcggcaattgccgcttga

SEQ ID NO: 94603 - DNA, 330 bp, Enterobacter aerogenes
gtgggaaaaacattacaggaatttctgaatcagccagtgctgctgcgcgaacccaccgccgaagaaaacgaactggcggctctattgaatggcagtaccgtcactgcacccgtggtgctgcctcaggggccgtttacccgtgaagaggcgaccgctctggtggcgcagtacaccaacgtcagtattgagaacgatcagggtacttattttcagcttgttgtgcggggtgaagaagggtttttgacgaagtgcgcgtggaactttgagaacgacgtgggggcattgcttaaccgcgcccttgccagttacagagccagaaaacagcagtaa

SEQ ID NO: 94604 - DNA, 255 bp, Enterobacter aerogenes
atgagcgaatttaatctttcggtacgttcaaaagaggatcaggacaggatcgccgtagacctggccgcgtcaggtgtggcatttaaagagcggctaaatcagccagtggtgccggaaattgtggcacgagaggtgcccgaagagcttcgcgaatattttctggaaaggttgcgccattaccgccagcttagccagcagttgccgaaagccagcgatccacaatattcagaaatggctgaggcaaataaaaagtaa

SEQ ID NO: 94605 - DNA, 192 bp, Enterobacter aerogenes
atgaaacttgatccacagacccgtgacatcctgcgtcagtacaaaaatattattaacgcccgtcgacgtgaaaatggtcaacgggaattaagaacggagcaggtgatcgacgaaatatgctattacatgacctgccagcgtgcggtgtatatcggcggtcatttcattttgcagggtggaaaaggtaactga

SEQ ID NO: 94606 - DNA, 501 bp, Enterobacter aerogenes
atgaacactaccaccccggcgatttatgtaggtacataccacaaatacaactgcggtagcctctacggtaaatggtttgacctcaccgactttgatgataaagcagagtttctggaagcctgcaacgagctgcacgccaatgaatccgacccggaactcatgttccaggactgggaagggatcccgtcagcatttgcatccgaatcttccgttgactggaatttcattgaagcctacaagcgcgcagtagaggacggtatggatgctgcatttattgcctgggtggaatactccggagagtgtgattatgacgccttcgaggatgcttattgcggagaagctgagagcgaagaggactacgcctggactatggcagaagagtgcggccttctcaatgacattccggaatcgctgcgttgctatttcgatatgggagcctgggcgcgggatttgttcctggatggtctggtatttctggatggctacgtgttcaacggttga

SEQ ID NO: 94607 - DNA, 780 bp, Enterobacter aerogenes
atgaccattgcttaccgctttatgcaccgtcatacccgaaacacgctcgtagcccgcggctggccagccaacatggatatcgatacaagcctgaattactccagaggagaaggcgttgcgttctatggccagctcgatgctttacagttgcagcgtctgttacctgagattgcactgcgtggtttgatgtccgatcaggcaatgaaggtgctactgccattactggcaggaagtgaactgattgtccgcctttatcgtaattcgctggggcatcgtaaggctcatgccggaaccatttcgcttgaatatgataattgccctgagggtatgtccacgaaacatatcctctgtctgctgaaagccctgcgtgatgagattaaccacgtctgtagctgcgtggcatccgccggataccgcctgatggaagccttgcgccccgccgctgaaccgctggtatttacccgccgaacccgtaatttcctcctgacagtaacggaagtggagcaggtgcaggatgatgcgcagtgggataatgaaacgctcgacgcgcgtcttaaagcggtactcgacgggaaggagacctttcgccgtctgcaaatccgtctggaatgcaatggccgtacagtcgggcagacccacgtgccttatgcccttcgtcaccctgacagcccatcccgcgactggtttgacagacactggctgcgggatgtggtcagcagcgcacgaaccgagattgacgcgatgatgaaatccttctccggcatccggattgccgcctga

SEQ ID NO: 94608 - DNA, 423 bp, Enterobacter aerogenes
atgtacggaacccgcgaagaactttgtttacagcttgaaaacatgttcacgtctgacgaacccctggtcctgctggtctggacggaagaggggattagcgtggcctgccgtgaaacccagccagaaccggacgaggttgaaatccgggcggtgatgaaggcgcttggtgaaatgaaaatgacgcaataccgccaggagggggtaaataatctgactgtcagcgatctcctgacccatcagcgggaagcggcaaaccgccaggtgagtgtaccggcagctctacttgcacgcgtcctgcgcgactatgagtgtgagctggagcatcgcgccggaatggcctgggaggccggacggccggaacccgattccgtaaaggaagcaaggaatgacgtctacgcactgaaagacgcgctggtagcctga

SEQ ID NO: 94609 - DNA, 222 bp, Enterobacter aerogenes
atgaactacccgggccttgaatccctgcgcgcggacgtggccgcgctcagcaatgccatgtgtgacgtgcggatgctgctgaaccgtctcgaatctcagcaccggcacgacgcggcaacgctggctgaacgtatggccgcccagacccttcgccggatcaattccctgcttctggaagcctaccgggaagccctggtgctggacgagacctttcaggactga

SEQ ID NO: 94610 - DNA, 693 bp, Enterobacter aerogenes
atgtcccgttatatcctgggtgactgcgtgcaggtgatgtcccgtttcccggcacgtgccgtcgattttattcttaccgatcccccgtatctggttggctttaaggaccgtaccggccgcactctggccggggacaattcgtcggaatggcttcagccagcgtgccacgaaatgtaccgcgtactaaaaaacgacagtctgatggtgagcttttacgcatggaaccgcgcagatctgtttctcaatgcgtggaaatcggccgggttccgcgttgttggccatatcgtttttgcgaagagttatgcctccaaatcaacgttcgtgggctacacccatgaaaacgcttacctgctcgcgaaggggcgaccgcaaaccccggaccgtcccatcccggacgtgatcccctggaaatacactggcaacagacaccatccgacggaaaagccggtgcagagcctgcgaccactgatcgaatcgctcactcgtccgggggccattgtccttgaccccttcgctggcagcggttccacctgcgtggccgccgccgaagccagccgccgctatatcgggatcgagatgcttgagcagtaccacgccgccggcgttcgccgtctggcacaggttgaacgggcgagaaggatgccagcggccaatgacggtacgttttaccctgattatccggaggcggcatga

SEQ ID NO: 94611 - DNA, 468 bp, Enterobacter aerogenes
atgttcagactgacctgtattgaactcaataacggcgaattcgccgtgtatatcaacaaccattatctgtggagtgaggatgccagcggggaacgactctacctgggtgaggtgctggagcagctttccctgatgccgggtgtagaaacctgcactattcacgaggcagttccggaggacgaagaatggtgctggaatgacattgccgatcgcgtgttgccgtcgctatcctccagccgcgagggtgtcaccgtggcagctctcatcgcgcggttacagcagtatccgccggacgcactgtgtatgggaacgttctggctggctgaggattttctgtcgctcgatggcagtctgtcggaggaggaaattgcggaagccatgcgtgtctgttatcgcagccacgatgccggcatcggttttaactgggacacactgcagttcgctatcgaccacgtaaaggggcgctga

SEQ ID NO: 94612 - DNA, 582 bp, Enterobacter aerogenes
atgactgataacagcatccccgttgactttaattccagagacgcactttcccattttaaagaatgtttaaggttagaagtcataaaccggaatggagaaaagaaattttcatggtttaaagtctttcaccgtgtgctttttagccataaaaagagattttacttttggtggcgacttgctaattacatgaatcagaccacgtccagacgatatcagaaatgggcaaggaagataaatgctaatctgcgttgcaaatatggtgctgacattagtatcgaagcgcaaatcggtgaaggcatgaaactcaatcactatgtaggtatagttatccgttctgaatgtaagatagggaaaaatgcaaatattcgtcagaacacgacgattggaaggaaaacgtccaatgatgtaatcggcatgactgtaattggggataatgtagatattggtgctcattcttgcatcataggtgatatcaatataggacataacgtaacaataggtgcaatgacatttgttaacaaagatgttcccgacaactcaattatctacaacccagttacatcagtaataaaaaccaaataa

SEQ ID NO: 94613 - DNA, 936 bp, Enterobacter aerogenes
atgcacaatcttcgcgtcaaatcttgggatgactgggaaactctttgtaaacattggatgaaacatatagccaagatgaaccatggcgttgatactagctatcaaatctatggcagacctgggcagaaacaacatggagttgatataaaacctgaattaccaaactgcggtattgttggacaaagtaaatttattcagggcgcttttaaactggaagacctctatgctgagttgtctaaaacgaattcctacccgggaccaattaccaactactacctacttacaaccgccgacaaatgcacttccatccaaaacgcgagcagctataaacaaatagatcatcaccgaccagatggatcgtattttgttgtacatatctattattggtcagatatacacaacatagactttatacctaaagaggttaaaaacaatttattccctgaagccaaaacactgttcgacactgatgacggagaaataaccaacaaccctgaaaaattgttggaaaaactcgataaactaaaacaactaattagaaacactttcagtgaagaaaacattaaatggctggaaacctggaatttcagaagttataaaatttacgctagggactatgacgtttttagtttagcctatctcgattggaccatgattgaattggcgatgagaaataataaccaaaaattgctacatgcgtaccttaataatacaagcaggattaatttttatgcaacatggcctgtcagtaagacccttttctatgcgcttgaagaatttagaaaaatagcttacaacaactatagcactggggcgcttgatggaagtgaaacattcttaactgtttcagatttaaaaaatcgggattctatcgcctatcaaatggaaagtgctgcgtcctatttagctcaggtgatcagacaaattcaaaagtga

SEQ ID NO: 94614 - DNA, 765 bp, Enterobacter aerogenes
atgaatctatacgcacttctgactgcaacccgcgtgtgccagatactggacaatcacggctggcctgctcttacagttaatgtcgcggagaatggctggatgatgaccatgaaaactacaatgaccacggatgctcttgtgagattaatttcggcaatgattgagcggggccgtatcggcaaagaggcgatggctggtttaactctgtcgtgcgttaaaaattcggtggaggcaaccatcagtgcggaagtctgtggtcgcgacatttccattgaggtcaatttagcaggtatccctgaagctcagtgtctgtgccatgattacctgaaaatggtccttaaagatgatttgcgggttatctgcggcgacgtgtggcgggatgcagaaactattctgctgcatactggtgcccgttatgagggatctcatgtttttgaacgtacgagccggaattttatcgtcgcagcggaagtgttgccggaacttcctccaatgaaccagccaggcgagttgctgctgcaggcgtggctaacagaaattttggtatatagctctgatgtcctgacgatcggcctcgttgtgtatcgcgattatggtatggtccggatgagcgaattctgtctgcctgaagtctgcgttattcgtcccaacgcactcgtaaggcactggctgaaccgtcatcacgtcaccactgtaacaggtatggctcgtaaccttattacacttgagaagaaaatctattcaagttttgtacgtaaactataa

SEQ ID NO: 94615 - DNA, 429 bp, Enterobacter aerogenes
atgtttgaattattgcgtgttgattgcgaaccggaaattatacccatccctctttatagcgagaggtgcccagcggggttcccgtccccggcgcaggactatgtcgaagccgaacttgacctcaatgattactgtatatccagacccagctcgacatactttgtgcgagctattggtaattccatgactgatattgggctacattctggcgatctgctgattgttgataaagctgaaaaggcacaccacggcgatatcgttatagctgagattgagggtgaatttactgttaaacgattactgttgaaaccgagaccagggttacaggcaatgaacccagcctaccctactctatggccagagcctgagcagctacaaattttcggggtcgtaactgcctttgtacacaaaacccggggacatgactga

SEQ ID NO: 94616 - DNA, 1272 bp, Enterobacter aerogenes
atgttcgccctggcagatgtgaacagcttctatgcgagctgtgagaaggtctttcgtcctgacttacgtgataagccagtggtcgttcttagcaataatgatggttgtgtgatagccagatcgaaggaagcgaagcggcttgggatcaaaatggggatcccctggttccagctgaaggcaatggagttcccggagaaaatccttacgttttccagcaattatgagctttacgcgagtctgagtaaccgggtcatggcacatctggaagaactggcaccccgcgttgagcagtatagcatcgacgagatgttcctggacattcgcggcatcgatggctgtactgactttgaagatttcggacgacagctgcgtgagcacgtcctaatcggaaccggactgacaattggcgtcgggatgggcccaacaaaaacacttgctaaatcagcacaatgggcttctaaggagtggcctcaatttgggggcgtgctggctctgaccactgacaacctccgtaggacggaaaaactgctctcacttcagccggtggaggaagtttggggggttggccgacgcataggtaaaaagctgaatacatacggcgttacgactgcactgcagctggcgcgcatgaaccctgcctttgtacgcaagaactttaccgtggtactggagcgaacagtacgcgagctcaacggtgaggcctgtatatctcttgaagaagcaccgcccgcgaagcagcagattgtctgcagccgatcattcggggagcgcatcacgacttacgacgcgttacggcaggctatctgccagtactccgaacgcgcggctgaaaagctgcgcggagagcatcagttctgtcggcacatttcggtctttatcaaaacctccccttttgcagtcaacgaagcgtattacggaaacgtggctagcgaaaagctactcgtacctacccgcgacacccgggacatcattaatgcggcagtaaaagccctggaccgtatctggctcgacgggcatagatatgcaaaggctggcgtaatgctgaatgacttcacccctacgggagtagcacagttaaatcttttcgatgacgctaagccgctggaacgaagcgaggagctaatgaaagccctggatggcataaaccattcaggactcgggaggatatggtttgctggtcgtggaattgcaccagaatggcaaatgaaaagagagatgctttctccggcatacactaccaggtggtccgatatccccagagcctcaatttga

SEQ ID NO: 94617 - DNA, 390 bp, Enterobacter aerogenes
gtgagcgaggaacggaagaagttaacggtttatcttcatccggaccaggtggcggataatgtgtctttagacattattgattctgtcccacggaacgatagaggggatttatataggaaagcgcttatctccggcttagctcttcatcacctcgacccgcggcttcctggcttactagcactgttgttggataagagtttcactgctgatagcctggtgggtttactcagtcagacaacgggatggaagccatcccaggccaatattcgtgatgtgcttgcagaactgggggcggggacattttattctgcaaccaagcctgaaatcgttgaagatgatgagaagcggcgactggaagaggcccggatcaaactgaaaggcctcttctga

SEQ ID NO: 94618 - DNA, 972 bp, Enterobacter aerogenes
atgaaagtgtattgtgatgatggttcaacaactgtaaaacttgcatggttcaacaataagaaactttataagtcattgtcatctaactcttttcgtcagggatggaaggtagaaggtatgggcgtacgtcagaccttcaactatgagcttgaaggtaaaaaatacacctatgacgaagtcagtaatgaatccattctcactactcatattgagtatcagtataccgatgtaaaccttctggcggttcaccatgcacttcttaacagcgggctgaaacctcagcctgtctcactgactgtgaccttgcctatcagtgagttctacaccagggattgtcagaagaatgagctgaatattcagaggaaaatcgacaacctgatgcgtccggtcaaattgaataaaggcgaggtgtttaccatcgagcacgtcgaagtcatgcctgaatccttgcctgccgtatttgaacgccttgtgaaagacaatgtagggcagtacgaaaagtccctggtgattgatctcgggggtacaactctcgacgttggcgttatcgttggccagttcgattctgtaagcgcgatacacggaaactctgatatcggcgtatccttggtaacgaacgcagcactcacggctttaaagatggcatccagtaatacgagcgctatggtcgccgatgaacttatcaaacagcgtacaaacgctgacttcgtccgtcaggttatcaacgatgaaagcaagacagcactggtgttggataccatcgatagcgcgatcgctacactgggtgctcaggttgtcgatgacctggcaggattcaaggacgttaaccgggtttatattgttggtggcggtgcaccactgatcgaggatgctgttaaagctgcatggcatcatctgggctcgaaggttgtcatgatggattcgccgcaaacatcactcgtagaagccatcgctgcatttaaaggggaatag

SEQ ID NO: 94619 - DNA, 639 bp, Enterobacter aerogenes
atgattactgtcgtaggtggaaacaaaggcggttcaggtaaaactacaacggcgtcaaacttagcaattgctctagcccatgagggccacgacgtatgcctgttaaatggagacttacaacggacggccgctaaacatcatgctgaacgtgaagcatcgggaatagagccaacattcacgctcatcgaaaaattcgataatctgacacagacccttcgaggattagacgaaaaatatgatcatgtaatcgtggatgtagctggcaggaactcaagagaattcattactagtggcgtcgtcgcagatcagatcattgcaccattacaatgctcacagcccgaccttgatactttgacggaacttgctcagcaaattgaagctatgcgagacctcaaccctgagttgaaagtctattgcttacaaagcatggcgactacaaacccagtgctaagaggaaatgagcggaaggagtttctggagtatctggaagagtttccaactattgaaacgctgcaaacagtaatctgtttccgcaaggtctatcgagattgcatgagcaacggaactggtgtcgtagaaacgaataatgaagcggcgaaagcagaaataatgcaattaatgaaagaggtattcggataa

SEQ ID NO: 94620 - DNA, 279 bp, Enterobacter aerogenes
atggttaaaaagccgagccagcaagcgactagcagaacaggtgtcacggcagaacaagctgaagccctcgcgcagcgccttgcagataagccctacggagcaccagaaaaaccggaacctgaaaaacagtgccgcacgacaatctcgttaggggagtcaatgttagtgaaggtcgaagatattgcactgcggaacaaacgtaacgggaaggatcctaaaaacgtcagtgctatagtcagagaagcccttgagctgtactttcagaaaactggcggataa

SEQ ID NO: 94621 - DNA, 348 bp, Enterobacter aerogenes
gtgaaacccaattatctcaacgatccatatgcaaatgaagtcgctgatgacattatcggcctgctgaaactgtgccagcagctgcagtctgaaaaggacggcagggaacgtcctgcgcccgggacatattcccgcgatgaggatgaatttgccgatcgtatccgttccgcatgcggtcatgcccttcagctgcgccggctgcttcctgtaatgacgaccctgaacgccatcggcgccgggatggaacgccggggagaaatcagtgtgctcccgggcgaggattatgcgcagaaggcgctggaatgcctgaaggcggaatacctgccggaagagggagacgctccgtga

SEQ ID NO: 94622 - DNA, 660 bp, Enterobacter aerogenes
atggctgactggtttattgcgaccgaaggcgtaaaggtggtgaaggacagtattggcctggcaccacaaattatcacggctgttacgtcggttggggctgcatttggcggtgtagcgctgacgcattacttcacccgcaagcgtgaggaaagagcggcagaagagaaactggtccgcgagcgcctctttatcggcacagagctgatctgcctgctggagcactttgctgaccagtgcagtgatgtggcctgcgatactgagcccgacaaagaaaactggtcggtcaaagatctgcctcttctgagtctggaaggaatcgaaggtgactggcgttcgcttccatccgaactgcttttccgtatccgtaacctgccggcgctgaacagggaagcccggtacgttattgaaagcgtattccggtacgaatcacaacctgacgtcgcggaatccgcccggtaccattatgcccgtctggggctgaaagtgctgctgacagcctggcgtcttcgccggatctgcgatcttcctcccccgcgcgaaggggaactgtgcaggcggatcgggtccattctgtggcgcaaccgccgcgcactgtggcgccggcatgtggaacgccagcggcagatacagaatgacctgtcccctgatgagaaaggataa

SEQ ID NO: 94623 - DNA, 330 bp, Enterobacter aerogenes
atgtgctatttatgcagggcggacgggaattactttcactcggctgaatgcgtgtatgaccagctggtcagcgagtaccccgtgatgtggctacgggactcgacccggatcggcgcctgctacaccctccgagagctgctgtcgccggaagggatggtgctggccatacagaacgcgcctccgatgaagggatggcggctgcgcatgcggtataacgaggccactgacgaagagatagacccgcagtgcggggactgtatcgagctggcctccagggcggacgccctgctggcctttgagccgttccgtggaggcgctgcgtcagtatga

SEQ ID NO: 94624 - DNA, 294 bp, Enterobacter aerogenes
atgggatatgaagagttgctggataccctgattgctgatggacataaaagcgtgtgggtctattggggaaaaattgaaaccgatgacgacgactgccctttgtatgagaatcttattctgactgagcagggcgatgtagttgcacaaaagattaattccccagggagtagtggatggacgatgaaatactggtcgttacggaaacctttgcttcccattccagatagcgccattccggttcagctatctgagcccacagctttagattcactctgtttctttggaagcttatga

SEQ ID NO: 94625 - DNA, 255 bp, Enterobacter aerogenes
atggataaagaaatgacgttttcactcagctatgagctgctgacgcaaaaggcagaggaggaaatcaggaaatgcgaccttcgcctggacggcccgtactacgtccaggagctgaacagggcctcagacattctccggttctggtttatcctcgcaatgagcgggtacccgggcgtgccggacatggagcgcattgacgctgacaggctgcgccttgaggggctgatccatactctcagggagatccgggcgtga

SEQ ID NO: 94626 - DNA, 1221 bp, Enterobacter aerogenes
gtgacggagaaaaaaagccgccgcccgtcaccacttcagcggcgggtgctgattgtgctggccgccctcggtgcgaaacgtccgggaccggtggccacgcgggatattgagcgggtgctggagcagggcggggacgccccggtgtacgggccgaacctccgcgcctcctgccggcgcatggaagccgcgggctggctgcgcaccctgcgcgccccgaacctgcagctggccgtggagctgacggacgccggccgtgcgctggccgccccgcttctcgctgacgaacaggcgcgcgtcctggcggagcagcgcgcaacggcggtccgggttctgcccctgttcccgcgcagccagacagaggaagctgacgaccgcccggtggcgctcgacggtcgctggcacctggcgtgccggggcgactacgttatccgcctcgacgggaccacctgcctgcagctgtggagcgcggccgggcaggtgacgcgcctggaaggtgatcccctgcaggtcgccgcctggctgcaggcctgccacgatgcggggattgcggtgcgggtgcaggttaatgaaagcaccacgccggaggcgggtataccggacggtagcgcgccggcagaccagacgtcctcctggttacgccagctggaaggcgcgctgcaggcgcaggggatcagcggtctgaatgaggagatcaggatggcaatgatcatgcctggcggggcgctccgcgacctgccggcgccggcgcgcctgctgcacgtcctgcgcgaccgtccggaggcgttcccgctcacggctgccacatacgaggaagacacggaggacgcgctggccgacctgctggcccgcgcggggttcaccggtgaccaggcgcaggagctgcagcggcgccgcatccgctggccgctgatgagcgacgaagaatttgaccggcgcgaactgaacagcctgctggacgaactggagcagcgccagctgtactgcaaccgcgaacagctgacggcgattgtgttttcgccggcccgtaaacccggcgagcgctggacggaacgtctgcagtggctcctgatgacggacggattcgggttccggagtccgctctcccgtgacgcaggctccagggcgctggcgatcctggccggctacacggggcgggaggtggcggaccatctggccacggtgatcgtctggaacgaccacagcgcggggatgccgtcatga

SEQ ID NO: 94627 - DNA, 681 bp, Enterobacter aerogenes
atgagcacaggcaacgtccatctcatagtcacctgcacgcgccgcaaaaccgtgcctgcaggtgatgcggtctttccggatgaacgtgacgtggagagagcttacgggctctggctggaaaggctggcgcaggcccgtcgcggatcgccctccatgaccgccggcgagctgtatacgggccagcactggagcagggcagctgcggctgcaaaacgtaccggcgctgagctgtgggtaatttcagctggcctggggctgctgcacgtatcagacgctgtagtcccgtacgaagcaacattctcctcgatgccgttcagtcacagcagactgtgggaaagcctgacggcttgcccgcctgcggaacgacggtatgcctccctgagggcgctgatgcaggcgaggcctgacgatcggtttgtggtggccgcctctccggtgtacctgcgtgccgttgaagcagacctgctcgcggggagggacgcgttacgtacgcctgaacagctgcaggttgtcacctccaaaggctaccagggcggcctgaaggacagtgcccggtatacgagcgcagacatgatgaaagagctgaataccaacatgaccggactgaatgtcagttacgccctgcagatcattgataatgaaaaactgaacagcagtacagcaggtgaggtgtatgcatga

SEQ ID NO: 94628 - DNA, 498 bp, Enterobacter aerogenes
atgatccggcagctcagtgccatgctcctgctcgtggtgaccttcccggccagcgcagatatcagcggccggatcgttcgcgtgctggacggagataccgttgaggttcttgaaacggggaaccgcctgacgcgcgttcgtcttgccggcatcgatgcgccggaaaagaaccagccctttggccagcggtccaggcaggaactcacatcaatggtggcgcagcgtaacgtaaccatcacgggtgaagaaacggatcgctacgggcggcggctgggcaccgtgtggcttggcgcgacggatgtgaatgccgcgcagatccgcaaagggctggcctgggtataccggtaccacggaaaaccggcccggactgactacgctcagctggaagccgaagcccgccgacagggtatcgggctctggtcagttccgggtcagacagaaccctggcgctggcggagccagcatcaggagagaggttctgtcagagacgctccctga

SEQ ID NO: 94629 - DNA, 417 bp, Enterobacter aerogenes
atgtttcgtccgctgtgggaacgcggccgcgccgttgtgtttgctgacgggtggtacgagtgggtgcgccaggggaacaataaacagccgtattttatttaccgcagggacggtcagcccgtgttcatggctgccattggcgcgcggccgtttggactgagggatgacggagaagggtttgttattgtcacggcagcagcggacaaagggcttctcgatatccacgatcgtcgtcctctggtgctgacgccggatgccgcccgggactggctgcgcgagagtctcagtggtgacgaggcgggcaggacagccaaacagggggcggtgcctgctgaggcattcacctggcatccagtttccccggcggtcggcaacgtgcggaatcagggagcgtctctgacagaacctctctcctga

SEQ ID NO: 94630 - DNA, 2589 bp, Enterobacter aerogenes
atggacacgctgcgcgaaatttacggctacaagaccttcacgggccgtggtgcccgtgatctgcgggagtggactttcggccaggccgaagatgccagatcaaacgaggatcttgctcatcgttttattgtgcggtgtcgggaaacttccaccattctgcccgcagtatcgacaatcgagcgcttgtgcgcggatgctctggtcgccgctgagcggcggattgaaacgcggattgcggaaaatttaacagcggatgttcgcgatcacctggacaaacttctgagtgaaatgctcgccggcaatatcagtcgtttcatctggcttcgcaacttcgaggttggtaacaactcggctgctgctaaccgtttgctcgacaggctcgaatttctgcgtaccctgaatatcaatcatagtgctttggccagcatacctgcccatcgcattgcccggctgcgtcggcagggtgaacgctacttcaccgacggtttgcgtgacatcacttcggaccgccgctgggcgatccttgccgtctgtgttgtggagtgggaagcggcgattgctgatgccatagtcgaaacccatgacaggatcgtaggaaaaacctggcgggaagcgaagcgccagcatgacgaaacaatttccggctctaaagccacactcacggatacgatccgtaccttcaccgcgctgggagcttcgttgcttgaggcccgcagtgacggaaccccgctggagatggctgtcgccagttcggttgcatgggaccggctcgctcaactggtagcgacagggactcaactcagcaacacgctagccgatgagcctcttgcatatgtcgggcagggataccatcgctttcgtcgttatgcgccccgcatgttgcgctgtctgaagctcgaagccgcgccggtcgccggaccattggtagcagcagctttgtcgatcggagagatgaaaggtgttgcatcgccagaaaggcgtttcctgcggcccagctccaaatggaaccgtcatttacgagctcaggaaaaaggagatacccgtctttgggaagtggcggtactctttcacctccgggatgcttttcgttccggagatgtctggctcgctcattcgcgccgctatggtgacctcaagcaggtactggtgccgatgatcgcggcgcaggaaaatgcaaaactggccgtgccttccaacccacaggattggctggcagacagaaaggcgcgactcacgatcgctcttaagcggctggcccgggctgcccgtaacggcactattccgcacggtagcatagaagatggaacgttgcggatcgacaggttgacagcagacgtgccggatggtgccgaggcactcatactggatctgtatcgccgaatgccgtccgttcggattaccgacatgctgcttgaagttgatgcagcccttggtttcacagatgcgtttacccatctgagaaccggggctccatgtcgcgaccggatcggtctgctcaacgtcctgctcgctgaagggctcaatctgggcctgcgtaagatggcggaagctacaaacacgcatgattactggcagctctcacgccttgcccgctggcatgttgaaagcgaagccatgaaccaggcattggcaattgtggtggccgcgcagggtaaactgccgatgtcacgcgtctgggggatgggcacgtcagcatcgagcgatggtcagtttttcccgacagcgcggcatggcgaagccatgaacatggtcaatgccaaatatggttctgttcccggcctcaaagcgtatactcacgtaagcgaccagttcgcgccattcgcttgtcagtcgatcccggcgaccgtgagcgaggcaccgtatattctcgatggactactgatgaacgaggtcggtcgccatgttcgcgaacagtatgccgatacagcaggattcaccgaccatttgttcggagccagtagcctgctcggctacaatctcgttctgcgaatcagggatctgccatcgaagcggttgtacgtatttaatcccgatacgacccccagggagttacgcaagttggtaggtggaaaagcccgggaggatcttatcgttgcgaactggcctgatattttccgttgtgccgcgacgatgaccgctggcaaaatcaggcccagccaactcctgcgcaagctcgcttcttacccacgacaaaacaaccttgcagttgcgcttcgtgaagttggtcgtattgaacggacccttttcattattgagtggatcctggatacggacatgcagcggcgtgctcagatcggtcttaacaagggagaggcccaccatgcgctcaaaaatgcgctccgtatcgggaggcagggggaaattcgcgatcgcacgacagaggggcagcactaccgaatcgctgggctcaatttattgactgcggtgatcatttactggaataccgtccatcttggtcatgccgtcacggagcggcggaacgaagggttggatgttccccctgaatttcttccccacatatccccattgggctgggcgcacattctactgactggcgaatatctttggcccaaggaaccgaaagcttag

SEQ ID NO: 94631 - DNA, 705 bp, Enterobacter aerogenes; identical to SEQ ID NO: 8686

SEQ ID NO: 94632 - DNA, 906 bp, Enterobacter aerogenes
atgcttagcctgactcaactagccgcgtatgttgccatcatcgagacaggcacctttcagaaggcagccgaaagacttggtgtatcgcaacccacggtatcgcaaagtcttcgcaaccttgagtcctacctcggtgtggctttggtcctgcgaaacagaattcgctgcgaagctacgcctgctggcgcgaagctgctcaggcatgcacgcacgttgacccgactggccgctgatgccgagatggcgctgctgcaggagcgcgtggcgattggcgcaagtggaaacattggaacctacttgcttccgccctttgtgaagcgcttcgtcgacaccgggattgaccaagaaagcattggcgtaaccgttgcctccaatcccgaggtggctactgcgctcgatagcggcgaagttgatgtgggaatcatggagtggtgggacgatcgtccgggattcaccgccatgccgtggcgaaaagaggagatggtggtcatcacacctccaacgcatcgctgggcttctaggagccatgtctcgcgtgacgagcttctggaaacaccgctcatcggcggcgagccgggtactgggaccgcccgactgctcaggaccttgttcggcaccgcggagggtgacctcagagtctcctacgccatgggcagtactgaaggcgtcaagtcggccgtgaaagccggtcttggcgtgtccctcgtcctggctgcatctgttcaggatgaactggcggcaggcaccctacatgctgcgcgcatcgctgagctcccgatatcaaaggagctccagatcgggcactgttgcaaagttagcgatgaggcagccttttgtcttattcaaaggccttacatttcaaaaactctgcttaccaggcgcatttcgcccaggggatcaccataa

SEQ ID NO: 94633 - DNA, 1026 bp, Enterobacter aerogenes
atgaagcctctagtcaccgttacaaattgggtccaccaagccgtactcgatcgcctatctgctcacttcgaggtccttgcgaactcggatcgcgagccctggcccgaagacacactgcttcagaacctctcgcgttcagacggcgtgatcacgttcatgccggacatgattgacgagtcgctcctgaaccatgccaagaaactcaagatggtttcttgctgcctcaagggctatgacaacttcgacatcgacgcttgcacacgacacggcgtgttggtgtcaatccttccggacctcttaaccgtgccaggcgcggagctggcgatcggcctgatgattactgcaggccgcaatgtgatcgcgggtgacagctacatccggcgtggcgaattcaagggctggcgccctcgcttctacggcacaggactagagaagagtacggttggtatcgtcggtctgggagcggtagggcgcactatcgccgagcgactgaagccttttggaagcgacgtcaggtactgggacaaggcgcgccagcccgtcgaggttgaggagcggcttgacgcaacgtttgtatcgttcgacgagcttctccgggacagcgacttcctggtcgtcgctgtctcgctcaacgctcaaacccgccacatcatcaatgcagagcggcttgcaaagatgaagcctggcgcaatcctgatcaacttcgctcggggctcgttggtagatgaagcggccgtctccaaggcgcttgactctggaggtctcggttattacgccgcagacgtcttcgagttcgaagattggtccatcgctgaccgtcccaaacaggtccatcaaggcctgatcgagaaccggtcaaagaccctcctaacccctcacattggttctgctgtcacccgcgtccgagaagaaatggcaatgcaggccgcagagaatctcatcgagttcttcgatggaaagattccgcaaggagcactgaacgcagagcaagttggtcgccacaaggggattggcagcaatgcttag

SEQ ID NO: 94634 - DNA, 417 bp, Enterobacter aerogenes
gtgctagctttgcgtaccgtcacttattgcactgaaaacgaggagacccctacactgttcttcaccttcttcttcgggccgccgctgtggtgcgcggtggccctcacaagcgcctggcgcgcgcgcccgggctggtggtggttggcgactctggtcggactgggctatgcgctgggcatcgtggtctttacgcagcaggtgaacctgccgctgaaccagatcacagaatcgtggacgcccgccacgctgccggcggactgggtcgtcacgcgcgatgagtggaaccgcgcgaatgcatggcgtgcaggctggtgctcactgctcttcgccctcggcttggccacattgacttggcgcgccgccggctctcaatcgacaggcacggcggacttggctatgccgggagccttgcgatga

SEQ ID NO: 94635 - DNA, 2916 bp, Enterobacter aerogenes
atgcagggttggcacacaacgtttttggggatgcgtgggctcccccgcgatatcagcgacttcgagatgaaggcatttttcaccttcgatggtgccgagcgcgacgcaatcaatgcacgccgaggtgattcccacaagcttggtctggcgctccatattggtttcctgcgcatgagtgggcgtttgctcggtgcctttcgggtaattccagtagccttgtggcgccaccttggcaacgagcttggcattgcagcaccagaagtcgcctcgctgagagccatgtatgaacgcgggcgcacgctattcgatcaccaacaagtagcctgcacggtccttggattccagtggatgagcgagcaccagcgccgctcactggtacgtgaactgcgcgacgaagtggcgcgctgcgccgaccgcgatcagctactcgtgcgggcgcgtcaatggctgtacaagaacaagctggtgatcgtgcacgagcgggcaattcggacactgattgcggcggcacttgcccagcttgaagttgaaacaggcaccgccatcgccgccagcgttgatccagcaacacttgatcgctggcgagcctcagtttcagagctgcgcccagatggacaaacccagcagagttggctatgggctgcaccggcgaaacactcaacccgccaaatcagcgaggtactggagcgcatcgacctgctttacacgctggacgttcataagcacctggcagacatccccgatctcatcttgcgccgctacgcgcgccgacttgtctccaggccgccctcagccggagccaagatcaaagagccagcgcgcaccgtggaggtcgcatgctttcttcggtattgcctgttcaccaccacagaccagttgatccttatggtgcagcgccggatcgccgatctgtggcgtcaggctgccgccgatgtccccgctaccgtcaattgggccgcaatgtacaaaacgctgctcggcgaacttgttgccttgagcgcgcaaggtgcggtgccagatgctgagttgcgtgcccgtcttgaagccttgatcaccgaaacccagaaacgcaaaccaccgagcagggcctccctggtccgcgagggattgattgatggaattcgccccgtgcggtcgttgctcgtcgccattgcaaagctgccctggcaggccaccggcgagcatcctgccatcgagtaccttgccaagctgcaagctttatatctcaaaggatccagaaagctgccagttgaagtggtggcaccaagtctgggaatgatctggcaggtttcgatctccagcccagaccgggaacgggcgtttcaggcgttggaggtggccaccctgtttgccctgcgccgcgcggtgcgcaatggctcggtctggattgagcacagcctgagctttcggggtcgtgcgcgcttgttcttcacggacgagcgttggcaggcagagtccaagaaacactatgcccgtctatcgttacccagcaaggctgccactttcttgaagcctttgctggccagagtaactgccggtgtcgatgcggtggccgctgcagcccgcagtggcgtactgcgcgtggatgatgaactccatttgtcgccattgcccgcagaggacgaagacccagaagtgaccaagctgcgcgcggctttggatcaccgcatcggtgaggttcaattgccggaagtgattctggccgttgacgcccaggtgcgctttagctggatcatgctcggacgtgagccgcgctctaccgacgagctgctgatggtctatgccggcatcatggcccacggcaccagtctgactgcggtcgaatgcgcgcgcatgattccgcaattgtctgccaccagcattcgccaggccatgcgctgggcgcgggacgaacggcgtctgagccaggcctgccaggctgtgctggaattcatgcagcgacacccgattgccgccacctgggggcggtccgatttggcatcttctgacatgatgagcatggagaccaccaaacgggtgtggcaagcccggcttgatcctcggcgcaacacaccttccattggaatctactcccatgtaaaagaccggtggggcatcttccatgcgcagccctttgtgctcaatgagcgccaggcgggcgtggccattgaaggtgtcatccgccaagaaaagctggagaccagccagcttgctgtggatacccatggctacaccgactttgccatgtcacatgcccgtttgcttggttttgatctttgcccgcggttgaaggaactcaaacagcgccacctctttgtgccacgcggcaccaaagtgcccgcagaaatcgctgcggtgtgcgaagccaatgtcgacgtcgctttgatcgaaaagcattgggatagtctggtgcacctggcagcctcggtcatgagcggacatgccagtgcggtggcagctcttgcgcggttcggttctgccgcccagggcgatccaatctatgaggctggcgtgcaattggggcggttgctgcgtacggcgtttttggctgactactttgtcaaggacgctttcaggaacgagttgcgccgggtgctcaatcggggcgaggctgttaacgccctcaagcgcgccatttataccggccggatcagcccggcgcaggccaaacgtgtcgatgaaatgcaggctgtggccgatgcgttgagcctgatggccaacatcgtgatggcgtggaatacctcacagatgcaggcggtcctggatcgctggtcgaaccgccgccaggtcattccaccggaactgatcgggaagattgcgcccaccaggctggagagcatcaacttgcggggtgtgtttcgcttcccggttgaccgctatgctgaccaaatcctgccttcgcggccaaatgcatcgataactggcaccaatggatga

SEQ ID NO: 94636 - DNA, 483 bp, Enterobacter aerogenes
atgcgggtcagcaccgacgcgcaagacctcgaacggcaagagagccttattgatgctgcgaaggcggcgggcttctatgtcgccggcgtctatcgagagaaggcatcgggtgcgcgggccgatcgcgccgagctgctgcgcatgattgccgacctgcaaccgggtgaagtcgttgtcgccgagaggatcgaccgaatcagccgcttgccgttggccgaggccgaacgcctggtggcctcgatccgggccaagggggccaggctggccgtacctggtgtggtggacttgacggagctggccgccgaagcaaaaggcgtggccaaggttgtcctggaatccgtccaggacatgcttttgaagctggcgttgcagatcgcacgcgacgactacgaggatcggcgcgagcggcaacggcaaggcgtggagttggccaaggaggccggccgctacgcggggtctcctcgttttcagtgcaataagtga

SEQ ID NO: 94637 - DNA, 1005 bp, Enterobacter aerogenes; identical to SEQ ID NO: 31749

SEQ ID NO: 94638 - DNA, 462 bp, Enterobacter aerogenes; identical to SEQ ID NO: 49386

SEQ ID NO: 94639 - DNA, 1023 bp, Enterobacter aerogenes
atgaccatcaccactgtcggtatcgatcttgctaaaaatgtgtttgctgttcactgcattgaccaaaatggtaaagctgttctggttaaacccaaggtgtcgcgtgcagcactttctgaactcatcgcaggtttacctccctgtgtcattggaatggaagcctgctcgggtgcccactattgggcaagattattcaggcagtatggccatgatgtccggttgatggctccgaaatttgtctcaccctatcgcatggcgggtaagaccgggaaaaatgatgcagctgatgcaatagctatttgtgaggcagtgcagcggccgcatatgcgctttgtaccagtcaaagacgaaagccagcaggcaatgcaatgcttacatcggacaagacagggatttatccaggaaagaacagcaacgtataaccgtcttcggggcctgatatctgaattcggggttattgccccacaaagcactgatgctctgcgtcatgttgtttctgaccagaaggaaactctgccagtacaggttaggctgtgcattgatgatctattgacacatgtcactaatattgaagagaaaatcgccgaatatgacagggtattatctcgtgtggccaaaacagatcatcgcagccagcagttaatggaactgaaaggtgttgggcccaccacagcgagtgcgctggtcgccagtattggcaatgcccatgattttaagaacgggcgccaactggcagcctggttggggctaacgccatcacaatacagtagtggcggaaaatcaaagcttggcaggataacaaaagcgggtgatgcctatctgcgaaccctactggtccagggagcccgttctgtaatggtaggggcagagaatagaacggacccgtttagccgttgggtctgctcgttgattggtaggcggggatactggcgtgctgtcgttgcaatcgccgccaagaatgcgaggttgtgctgggcatcattacattacggcgatgacttcagactgtattcaacaacatga

SEQ ID NO: 94640 - DNA, 345 bp, Enterobacter aerogenes
atgaacccattcaaaggccggcattttcagcgtgacatcattctgtgggccgtacgctggtactgcaaatacggcatcagttaccgtgagctgcaggagatgctggctgaacgcggagtgaatgtcgatcactccacgatttaccgctgggttcagcgttatgcgcctgaaatggaaaaacggctgcgctggtactggcgtaacccttccgatctttgcccgtggcacatggatgaaacctactataagggcttccccgaacagtcaacgccggtttttaatttctgtctgttcatcaatgaaaggcaagggataagactgcgctactataaacggtcatgctga

SEQ ID NO: 94641 - DNA, 333 bp, Enterobacter aerogenes
atggatatcgcgctttttcccgggcagagccggcgtcagtgggctgatacaatgatcaatctggaagcccgaaagcttgttaataccgcaaataccgtcgcggccatgcacctcagtgattcactgacccgtctgaaattcgtggatgaaataagacaggttgtcatgcaacagtttgacgtggcgagaagagcaaggagcgatgaagaatgcattgcctgcctgaagaacctcagggctgagaatgagttcctgcttgaacagtcgcgcatgctgaaaacggcactgttgcaaatagtcggtggtgataaacttatcatccccttttgctga

SEQ ID NO: 94642 - DNA, 660 bp, Enterobacter aerogenes
gtgttctggaaagggaacaggaagtacagcaggctcaccacggctaagaataactttgaacatctgctgtcggttgcgtcttcgctgccggtccaggctttgccggatttgattcgcgctatggcccgccctttgcagagtgatttcctgctcgcggtggcagaagaaggaaccgatgcccgtccggatttgacacccggggaatttttctttaatgccatcacagaggttcaggactatagccttatgaaggcgggagaagttaatccagaagattacccgctttctctggccagtgatatggttcttccctggccgtggagtctttcccgttatatcgataatgtgtcccggattggtacggcaaaaggaagagtatggcagcaggatcgtactaaccattatgttgaactctggctgccctggcgcattggttttgttcggggaggtaatcactccatcacggccggtatactggcgggggaaggaacgttaatccctgaacacgtgtgggatatgtcttttctttttgagcgaataaataccgacgggctccactggtatgttgacggtaagaaaactgaagacgtgaagtcctggcgcgcagctgcaatatttgagacaggcaggctaatgtcttcttgtcctgacgacagataa

SEQ ID NO: 94643 - DNA, 612 bp, Enterobacter aerogenes
atgcagctttttcacggaacaagacagcgttttgataagtttgatgtggcatacaaaggaactggtgagtctggaaacatcgctgccagctggtttacggataattttaaaggggccagcaatcatgcgttattaaaaaacagaaatcccggactgccactggtttatcggtgtgaactgaaagccggggcgattatcgctaatcaccgccagccgctcacagagcaacccgaaattgtggatcgttttaaatcaggattacctgtggacatcgagttcggaaatggactaaaccgatttgtcctaaaaaaaccttgttatacaaagtacaaagggaagatggtttactccggacacactcctgtggaaactgatgaacttattcgtctttatcttacctgcggtattcagggggtttatgactgggagggggagtttacggacagctatctccacgggacaactacagtgatatttgatacggatgcagtgagtattattgaccgtatcgagtacggatctgacgactggcatcgctggctgagtgaataccgggagaagaattgtgttctggaaagggaacaggaagtacagcaggctcaccacggctaa

SEQ ID NO: 94644 - DNA, 606 bp, Enterobacter aerogenes
atgacagccaaaaaaatgacactaagagatgtttttgaactgattcaggtatgcattcagctcaaaccccaggtcactgacacagatatgcggggaatggttacgcacctgtttccccgcacactccacccctatacccggtttactggaatggtttccgaatcagctgcgcaagcactcgaaaatatgaaggggagctatcagggtcaccgcgttatccgggaacacccccacaggattcaggcacagctgactcagttggttaaaaggatgcgtgaaaccggtgagtggaattttgagttatttgaagagtccataaaaaattggtcagctatcaacattactacaacgaaagaaaacagcatgttacgcaagaagggggcgacttacgaaagtttgggaataacgctggttcactgggatacactcagtccggatgtccggcatttgattaaaaaatcaatcctgtgtaaaggtatcgtcaaccgccatgactggtcaatggacatgtcgatcgtaccggtagttaatgacgaaaaagaggaaagcctgcttaccgactcagtcggcatagaaattcacgagaatgaacaatgtcagagctga

SEQ ID NO: 94645 - DNA, 618 bp, Enterobacter aerogenes
atgacagaacccacctcactgacgaccctggccggcaacatggcctggtgtgccctggttgccctccatctcgctcgtatggacggcgtggttaaaggtgagtcacaggaaaacctgttcctgacacgctggcttgccactgcgatgaagcaaaaacgtttctcgcgtgaagtggcgccggatatagagtggctgctgaaacaggggcgcctctacggtgtcagggcgaagcttgccagtaaactggaatacctctggcacgcctgtacgggggaaatttcagcgcagagcgatctgttccggctgacctacgccattgagaccgcaaagagcatgcaatggacataccggctgctcagcgagcgcgaatggagtggccgccgtgccttgccgctgaatcacgttataaactgcctttatctgtctaaatcttctctcgatgcagcgtttgatgaagacggcagacaggaaggtgagcttctggccagaatcaccggtaatatcgccggtctttcaactctgctgttacgctttggctggaaagtggtacccacagagaccgcagggactgacttcctttttcatttccgtgccgaaacgcgctgcacgtttgaataa

SEQ ID NO: 94646 - DNA, 444 bp, Enterobacter aerogenes
atgagtattcccgggcaaccatcctcacctgaaaagatgacaaagaaagagcgaaaaaaacacgagctcagccagatgctgaaaaaagtgtgttcccgctggcccgggctgtggccagaatggaaaaaacggaagttccgtccagtagctcttggcgtgggtcaggagatgcatgaccagctgaaggcgaatcccgatcctgacctgacccatcaggatattgccagggttatgttttatgtcacgggaagtctgagttacctggagcaggttaaagcaggttcctaccgctataacctggacggccaccccgtccagcaagtgacggcagaggacgagaaatactctcttctgcgtatcaaggaaacgcatcagcgtataaaagcgcgcgccgccaggaaagctgctgatcagaggatttctgaaaggacaggttcaccatga

SEQ ID NO: 94647 - DNA, 1053 bp, Enterobacter aerogenes
gtggttaagcatacttcagacaaaactacattttatcgccaggtaaataattccggacagcactggagccagttagatccccaggaacaaattcgattctggcaggatgttgataacggcaacaacagctctttcctggttcccgcagaaaagaagcaaaccaggcgtcgccgtggcgagcatcccacaaaagcaaaatgcgagaaaccagtatggttccgaccggcacattataaagcgctgggagggcaactgggttatgcctacaatcgccttgttaaaaaagataaagagaccgggcagatcagccttcgcatgcatatttcacgacatcctttttatgtgaaggaacgtaaacgtgcaggccgtaagtatgcattccgtcctgagaagcgtcgtcttcttgatgctttctggcctcttgctgtcagtttctgtgatgcagggaaacatacttcagtgatatgtgtttccaggcttgcagcggaactcagcccgaaagacagtaaggggagggtgatccctgaaacggaagtcaccgtatcccgtttgtcccgtctcatcgacgagcaggtcaggtttggtacgctgggcgtttcagaagaaaaacaatgggaccgtgaaagcaaatcctggctgccaaaatatgtctatatcacgcttgttggttttcagatgctgggcgttgatctcgttaaactggaagaacagcagcagaagaaactcaaagaaagtgaggaacgccgcgcacttatccgggaggggttactgcgtgaggatgaagagctgtccgtacatgcggccagaaaacgctggtatgaacagaaaagtcttgaggccctgcgctaccgccggcagcaggctgcggcgcgcaagcgtgcaaaccgtctcgaaaggttgccgcgcgatcagcaaatagaagatatctcacagtggcttctgaagaccatgccggcagatgaagcctattactgttcaagtgaacgccttgaaaaactggctgttcagcatctttaccagctgagactggcgctggaggccccgcctccctga

SEQ ID NO: 94648 - DNA, 201 bp, Enterobacter aerogenes
atgtcgcgaacgattctttgtaaccgtgttgcaggtgtttctgagcttaaggctaatccagaaaaactagtgacatcgactgctggcgaggctctggcaattttgagctataacaaaccagtgttctactgtgtgccactagagctttttgagaagatgaaaaaagctctggaatcccaggattctcaggcacatggttaa

SEQ ID NO: 94649 - DNA, 261 bp, Enterobacter aerogenes
atgttacaaaatattatgcaaaatcaagcagttgaaatggtacacaaacattttcaaccactttcgagaaagcaacttgaaatctgtctccttcatacatttggagtagccaaaagtattattgccagtaattataatattactgttgaggcggttaagcagaatataaaaagaagcgtgcagaaactcgaactggataatagtgatgcactgagggttgctttactctctacaatatttgtaataatgctcaataaataa

SEQ ID NO: 94650 - DNA, 540 bp, Enterobacter aerogenes
atggatcaattctgcgcgaagcgttcaaaaatgaatattgagactgtatgtaaccaacaatggtatcttgctctctatattaccgggggcaaaaaccgcgagaacttattcgactggctacacgacaggagaataactccctggacacctttatccttaacgcaaatacggcgtgcggatgccccgcatgttttcagaaaaaggatctcggccgttttcccaggatatttcttccttaaggcagatttcgaatcacagaaaatagatatgattcgggcgcactctgcattctgcgactttgtgaaattcggcagtaaaattgcccctgtgaatacaagggtagtcgaagcgttaatgaagaaataccccgacccgactcatcaccctgctgcaagagctgaactcgaagcggcatcagatatctggctgacaaaaagccaatacaaacgccttacacagttagataaaacggatcatcccatatcccggactgcaatgctgttcgatatgatcacccatgctgatgcgtggggattttaa

SEQ ID NO: 94651 - DNA, 672 bp, Enterobacter aerogenes
atgcaatccacccaggaacaggtcagccatctcttgtggtgcattctcgtagccttacgtacggcagtcgaaaaccatcacataacctcagagcgtggcaaacgtagattcatcacagaatggctaagcggagcacgaagaataccaacattcaaagggatgggtagcgagtttatgactatccggcagttgctcgaaaccgaacggaatcgtcccattgatgacgtcctgactgcgctctggaccaacgctgtttcaaccgggaactgtgatctgtttcgttttcgggctgtccttaattcacttctcggccttggctggaagcactgcctttgcccctggcctgagcaggttgtaactgaaatcatggaacgccagcggaatcgtaagaaccacatcctacagttcacccgtatggaagaagcatttaccgcgacaggctcaatgacttcccccgtcacgcttcaactcctcctgaaaaaaaatgaagatgatgaggtagaaaagtctttctatctcgatcgtttctctgttgtccgtggccgcgatatctcactacccaaagccactcttcgcacactctatatcggacatcacacactgccggagtcagcatggggtgcacgtgaaggtgtccgctacggggatgtatggcgccctgaccttcattaa

SEQ ID NO: 94652 - DNA, 627 bp, Enterobacter aerogenes
atgaaaacgcatatattgggcgtgctatgttccctgctggcgttatatggctgcaacggagctactacttcaaaccaggctcctcaccgtaatgaaatcgggcagtatcagaaaaacggaactgcatacattcctgtcagagccagtatttacgagctttccactcccgtaacgcctgaactaaaggaattgctggaacagccaggtgcaaaaatatctttaagaccggtcagctcttcactggaagacgaactcacggagctggtcgctaaagggaacgtcagactgctctacgatatgtccggagtcacaaccaacaacaaggaattacttttctctgtttcaaattactccgctcaacaacacgcaacgacaggggtgaagaagaaagaaaatgtcgaggatgatctctcattagtgatcacgccggctctttccgcagactctgcactaatgcagatgaccgtagagctttcccggaccactggcagctcaaaaaatgaacactccagttacactatcaacttccgacaacttctcaggttaaaggggggacagaagctcagtgttgctcttcccctcaatgatgaaacgaaccgcctcattatcatcactcaaaaaacataa

SEQ ID NO: 94653 - DNA, 507 bp, Enterobacter aerogenes
atgaaacgtattacccttgccgtattgccgcttattctgagcgcctgctcgtcctcacagcccgatcagcgtattgacataactcacggcaaatcagcctctgtacaaaaagtggtttctctcaggatggatgcgccgctcagccaacctgttactttcgacaactcagacaatgtccgctatgtaaattcggtcactactgaagatggaaaaatcgtcagtaaggaataccgcactctctcttatgggaccacggtcagggctgtcgtcagcgatgcaggggatgacaaacaactcgtttcactggcggtacgacacgcctgccatcccgaattatcaaaactctcagctggctcagccgaggaagggatagacctgccctcgcaaaattacataactcaacagcaaaaaattctgatagcgcgcggagacgatgttctgatcagcggtaccggttttgacgcgaactgtgcttttccacgtattaccgttcaccccaccgaataa

SEQ ID NO: 94654 - DNA, 1098 bp, Enterobacter aerogenes
atgaaaaaacttgccctgcccctgttaataccgtcgctgttaagcagttgcgcgggatttaataaccgtaacattgctcctgacacacctgcgctcgtgtttgtcgacggccagatcagcgatagtgccgatatcattacacagacacagcggcgaattgcgcctccggcggccactcccgttcccgtacgccagccgacatctgtagcggtaacatcgcagacctccccgctgccgcaaccaacaatgatggcctcctccgcaaaacaagtcagctcagtgagccccatcatgaatccagcgctgccggcactcacatttaccggcacaccaggtcccgttgccgttctgtcattatcaccggtgcgtaacctcactttcgaacagtgggtcaggcgcatcattccgactggctggacgctgaactatgagaatgccctgcgacctgtactgaatacccgtatcgtctcggtcgacaccaatgaccagtggaccagggtgctcaaccgtctgctgacagagcaatccatccagggtcagctggactgggatcgtcatgccgtcacattgcagcgaaaggggcaaaccgctcagatgaccgtccctgcactgtccactggaaacctccctgctccaccacaggcgtctggcgcgccgagaaatccgttcagcggaccggaggtgacccaacccataccgccggcagcggttaaaaccagcacatcctctgtaacaacaaaaccggtgaaggcaccaacagcggtagttaaagcacaaccagccaccggggaaccagtcgcacctgtggttcagggtaaaacctggctggcgccatcgggaacgactcttcgggaaatgttgatgaaatgggctcaggatacccgctgtgaatcaggcgcatcatcgcactggacggttatctggccagtatccgtgacggattatcggcttgacgcaccactgaccttccgcggctcatttgaaaccatgctcggtcagatgttcgacctttaccgttcagcacagaaaccgctttatgctgaagcttcccgcatgcagtgcgtggtatctgtcacagacactccggcaggtcggtga

SEQ ID NO: 94655 - DNA, 438 bp, Enterobacter aerogenes
atgggttgggtcatactggcaatcagcatgatatttttcctgattgtcggtgatatagattcgcaacaaaatcagaccagccggactgcaatacagacgcagagcggccagctttatgccacccagatccttaccatcgccaaccgcgttaacgactggcgttacaaaactggccaaacgaacggcacagttccagttgaccagctgggtcttccctttactcccgacgctcggatccagtaccggttacttcagagtagattgtgggtctggatgccggaacaagctggactcgttgatgccttacgggcacagagtcgcggttcggcactcatcggcaccatgagaagcggccagttaatctggctttccggtctggccaccgggctcacggctccacagggcgttcctgaaggcgctgtggtttacctcaactaa

SEQ ID NO: 94656 - DNA, 1677 bp, Enterobacter aerogenes
atgaagaaaacccttttgcggcacctgctaatggcgtcctgctttgccatgctcgcaggctgtaccttctctgaaatcaacaaaatgcagactaaggcacaatctgacgccacggtagcccgcgcacaggcacagctcccgcggacacaacatcaacaaccactgacctggacggagcgtcagtggattaatccgagtcctatcccggtcgccgttcgtgaacggaaccaccaggctccgtcatgtaatatcacccaggcaaaaaatacaattacgctacaggaactggcacaacgcatcaccgcgctgtgtggaacccccgttatttttactcctgacgcccttgatatcagccagagcagcgtcagtaccggcgtcacacgccagataagtggcacactaccaccacctgatgacagcggtcggacgccactggccagtctggggggtgtaaattctttgccgactggaggaaccagccagcccctcaaccttaccggactgatgtggcagggagacctgggcgggcttctggatctgatggccagccgtagcggtctctactggcgaatggataatggaactatcgtgttctatctgatggaaacccggacctattcgctggccatgctgaacactaaaacgtccagcacgtcgagcgtcagctcagggacgaccagcagtatgggagccaccagtggtacagataactccgcctccggcgaatctacaacctcccaaagcacaaccacggggcaggaatacgatttgtatgctgatctgcgaaaagctgtggagtcgatgctgaccccgaacaaaggtcgctactggctgtcctcctccagctcatcactgattgtgacagacacgccgtcagtacaagccgctgtggcccgttatgtgaacgagcaaaatctcatcatgaacaggcaggtagccctgaatgttgaagtcctgagcgtcggtaactcacgaaacgaagatttccggattgactggaacctggtgtacaagtcactgcactctgctggcgccacgcttaacaacgcgacgggggatctcactggtggtatttctgccggcgcgtccattcttgataccgctactggtaatgccgcgaagtttgctggctccagccttctgctgaaagcgttgtcagaacagggcgatgtcagcgtcgtcacttctcagtccagtaccgtgactaacctgacgcccgtgcctattcagatggcagatcagacggtctatgtagcgcagtcggctacaacgacaaccaccgatgtcggcgccactacaacgctgactcctgggatgatcaccaccggtttcaacatgaccctgttaccgttgattcaggaaacaggtaacgttcagctacaggtaaacttcaacctgtcagatccaccgaccatccgtaacttcacgtcaaaagacgggaactcttacatcgagatgccatataccaaactgcgctctctgagccagaaggcaaatctccgggccgggcaatcgctgatccttactggttttgatcagaacaatacctccgtcaataaatccggcacctttacgccagggaacccgctcttgggcggaagtcagtcaggtaaaaacgaacggaccaccctggtcatcgtgatcacaccgacattcccgcaaagttccggaggctga

SEQ ID NO: 94657 - DNA, 1305 bp, Enterobacter aerogenes
atgaaggatgaggattacctgtttacaatccgggatggaaaatcccgcagccgttactggctggcggggatggactgggcgccaacggaaaaacagaaatttcggctgccgtcatttcaactaagaaaatcacgttccggaagaacagacggcgttggcgtccacacctcaaccggacaattcaatacacgggaaaaagggcaatcagtcgcagggagtggcagattgcccgtccgttatcgacgtcaccagctcttttcgctggcactcgcgttctgtgccagcacacgaaatggatacggcatttatcggctgagtagtaccgacttcgtgtttctggccagtattaatggtgtgcctgccgtcactgccgataaaacagggagtgcggacaaaatgcaggagctgctgacactgttcctgagcatgaacgaaccgcccccagaaggctgggactgtctggcatcagtggaacccccccttgatgctaacagtctctttgccggactatctgcacgcaggcgacagcaatgccgtgtgcatgtagatgggctccggagacagcgctggttactggcttgcgcgatactgctgctcggctcaggcgccattgcctggtggcagacgaccacaccaccggaggaaccggtactcaccgctgaagaaatacaggccagggcgcgcgcaatgttcgccagtcaggcaaaacctaaggttttgcctcatccctgggcacgcgaggtaacagcccaggctctgatcgaggattgtcagagaaagaccgatccggcgctacatgttctggggagctggaaactggcatccgggacctgctctcctgacgggataacccttttgtaccagattatgcccggtggcacagttgaagggtttctcgctcgcagtcaggaggtcttcggtgtcacgccattattcaatctcaaggagggggggcgggaagcccgaatttcattaccgcccccggacagaccactcagagatgaagcagtgcctgacagttcattgcagctcatccgcatcctctcctggttccagcgtcagcaaatcacactcaacatcatcgatgtagccatgcctccagtcctgccggggtcgaacggagaaccgcctcctgtgcaggactggcaggaatacgcgtttagtttttccgcgcccctccccgccatcatcttattcgacggtctggatgaaactggtatccgacttacccgtttaacattcgagctgaacggaagtgcgttcagctataccactgaaggtaaaatttatgcgtcagcaaagtaa

SEQ ID NO: 94658 - DNA, 516 bp, Enterobacter aerogenes
atgcgtcagcaaagtaaatttcttcggcaggcgacactctggctcctgctgtcaatattcgggcctttacccgttcaggcctctcagtcaacgaaccaacaggtatcacagccagcagggaatctgacacccggtgtgacaaaagggcagcttgaacagctgcatatacgaaacgttattcttcaggcagaagttcagggggcgcaactgcagcgccagcttgaggaaaatcaatccagcgccagcactcctgccaccgctcttcccggtgcctccttcggcgatacttcactgcccggtcagcctgcacgcccggttaccatgaataatcgccctgtcgttcttgagattaacggccgcgataaaaacctccgcgccacactgcaactccaatcaggacagtcattggttgtatcgccgggaagccgtattccagggatggagagcacagtcaagagcattacgctagccggcgtcacactcagcgatggcacactgcttgcctttggggactaa

SEQ ID NO: 94659 - DNA, 1560 bp, Enterobacter aerogenes
atgagcgctattactgcagaatctcttctgctgtttgatgacggtgacaggaaagaaatcctcatcgataccaaccagcgaggcgtcccaagtgtacaggccgcgctgatggacttaatgaacaaacacccggggatcaaacatcggtttgtcactctctcagacttacgagaggcacggaaaaagcaggaagctcaaccgcaggccagcgccaagacaggattaactctggcagacctggatggagacagcagccaaagtgagcaacggatcctgaactatttttcagtggccaaaaagctcggttcctcagatattcactttctgatttctgattcgctcttccaggtcaaaatgcgtgtccacggctatttacatgtggtggatgaacgtcggcgggaggaaggaatgtccctctgtgccacctgtattctctcgatgtcggatgtgtcagaaaccagcttctacccacaccgggaacaggatgcacgactctccccggccatgatgcggaaaataggactgtttggtgcccgctacagtcaccgtccaactggcgatgggctgattgcggttatgcgacttattccggatgacggtaacaacgtacctgacttcctgcaactgggttatctacccgaacaaatcaagctgcttaaacgcatgattgaccgacctgaagggaagatcatcctctcgggaccaactggttccggtaaatccaccacactccgtaccgcctgccgtgtatatctggataccaaccccgggcaacaccttctgaccatcgaagacccacttgaggggcaggtcgtgggagcagttcagacaccgatcatctgcgacaaatcagatgaggaagcagtacgtatcgcctggggaaaagctatctcgtcagcgctgcgactggatccggacgccattatggagggtgaaatgcgtgaccttgtctcgatgctggccaccatttatgccgcccagaccgggcacctggtgatgaccaccctgcacacaaactcagcacttggcatcccggagcgtatggttacgctcggtgttaacgaaaatctgttgtgtgatgcccaacttttaatcgggctaatcagtcagcgtctggtacccacgctatgtccagaatgtcgtatatcctggcaggataaggtcaacaccttaagtgaggaggaaaagaactggctggagaaatactgcaatattgaaggcgtctgctcgaccgacaggctctatttccataacccggacgggtgtgaagcatgcacacaggtggtggagatcaacggccaggtgcgtggcaaagtcggtcagggtatcaggggacgtaccgtcattgccgaggttatcgagaccaataaccgtctttttaaactgctgaaaactgacggcaaggtcgcggctcgccagttctggataaacaacatgcaggggatcagtcgtgtccggcacgttctgcataaaatcaacgaggggctggtcgacccgctgatggccaaccggatcattccactcgatgaagatgaacgtctggaggtggatgatgcgtga

SEQ ID NO: 94660 - DNA, 1095 bp, Enterobacter aerogenes
atgcgtgaaatgcacttcctgaaacgactccgatataacctggttcgtaagacgttcagcggtcagtatcgtgttcagttctatgatgcgctgcggtttctgattgaaaaccggcagaaactaaagccttcactggagaaaatgcgcaatgcatggacgaacttcggccagaactggcatccctacgttgagctgacggacgactgtattgatgcgttaagggaaaacagcggcgaaaaaacgctggagcgtacactcacccggtggctacctgccgcagaagcatccgttataagcgccggcatacgcagtgagtcacttccacgctcactaagatacgcctgtgccctgacccacgcgggtaagcgtattcgcgcagctgtatggcagatggccatctatccgattggttttgccatcatgttgtccagttccatctatgtactgaatgccgagctacttcccacgctgacagaaatcagcccgccagagaactggaccggggcgctagggtttctttacgggatctcagtgtatttcagtgagtatggagtgataaccggcatcgccgccaccgctttaattatctggacggtctggtcactcccgcgctggcatcgccctgacaggcttcgtcgtatattcgacgggctgatgccatggtcggtttataaggatattcagggcgcgaccttcctgttgaacatcggtgcactgctacagtccggcgtaagaaccaaagacgcgctggagatcctgctggaaacggcatccccctggcttgctgtgcgtattgatgcgattaccgaacatgtgcgtgaaggtaaacatttcggactggctctgaaggactgtggttacgattttccgtcgcaggaagcggccaacttcctctcccttttgcagggtgatggagacgatgaaatcatcattaactacggacagcgctggcttgaacaaaccctggagcgcgtagcaaagcgcgctgttgtaatccgcggactcatgttcctggcaatgatcctgatgcttctgcttctggtccttgtcgttatggatattaatgcccttaacagctcgtcgggctctttttaa

SEQ ID NO: 94661 - DNA, 615 bp, Enterobacter aerogenes
atgcaatttaattctgaaccaacttctcagccatacaaaccaactaaggcgctttcgcaacaccgcggctggggcttcctggagcagggcagcatcgcgctaatcgtactggtcgtcatcgggatcgtcctggcgggatacttcgccctcaaaaataacgtcaacgtaggtaaggagtcgtcgaacattcagtcgctcatcacaagcacccaaaacatgatgaaaggaggagatggatacacattcacttccggtgccaaaatgatgggctcgcttatccagatgaaacttcagcctaaaagtatgactgtacgtggtaccccctcttccgggactgccacgctttataatggatggggtggggccgtgacactgtcacctgtcacagtctccgggttctcaaatgggttctctttgacctacgaaatggttcctcagggcgcctgcgtctcgctagtcacacaactcagtcgcgccaaaattgctgatgcgatcaccgtcaactccacggcgcacagtgatggggtcgtgacaactgaagaagccagcgcgcaatgcacagctgacaatggcagcacaggtaccaacaagctgatcttcacgatgaacagctaa

SEQ ID NO: 94662 - DNA, 558 bp, Enterobacter aerogenes
atgcggagagaacgcattctctcctgccacctgttaatgacgctgctcattctgtccttttcctccggcccattgatggccagcacgaactccccgcctgcgacttttgatgcctgctttaacaatgccggtgcccgataccagatcgagccactgctgcttaaggctgtggccaaaggggagtcctcgttccgtccatgggtcacaaataccaaccgggataaaaagggtaatccggtcagcacggactatgggttgatgcagattaactcaacccatgtgccgaagctcgtccggatgggtgtcatccagggggcagaagacctgctgaagcgcccctgtctgaacattcagataggggcgtggatcctggccagccactttcaggtatgtggtgtgacctggaattgcctcgggtcttacaacgctggattccgtaaggatcggcacgaaactcgtgagcaatatgccaaccgtatctgggggttctatctggagctgaaaggtcttcgagtctgtcgacaggtgaaaggaaagcgaatatgcgaaccatcatag

SEQ ID NO: 94663 - DNA, 675 bp, Enterobacter aerogenes
atgcgaaccatcatagttacgagtctgacgacagcatggagtctgccgttactactggggttcgcactccttggcagaggcctgatgtgccgcgtgctcgaatttctggaagagcacccgataaacgttaagggacagaaaacaaccttgacggcagggatttggctcttcgctactttcagtatgatcgccgcccttgcaccggttcctgttgctgatcgggcagctgccatagtgatgatggccttccttcttcaggccgggagcacagacgcagtcagtggatatctgccacgaaccttcacagtacggcttttacttgggggattgctctggggagcagcatcagacgtttcagttgaaggtatatctacacaactggcggagatcgcagcaacagtcagtctgatggcgctactgagtgtcctggtaaaccggggcactcagcgtctgggtcagggagatttatggctgataactggcctgactgcctggatgggggggaaagatgctgccctggtcactctgtttggagcagcagcctttgttctctggctgttaacctggcatgtatcggggaaaaaagagggaccgctgggaccctggctttgtcttagcgggagtattttccagctcactcttctgtatcaacctgtatggatatcgattctatga

SEQ ID NO: 94664 - DNA, 1197 bp, Enterobacter aerogenes
atgaaaaagcatgatcgtggctgggcaaatcttgatgtcgctctgtcgctcctggttgtgatggcaatggccgtctttgggctcactaaatacaaggactggcaacaggagaaaaactggcaggttgaagcagcccatatcagtacctacgcagcagcagcgcgtggctacgtcgggcgaaactatgcgacgctgttaagtgcaaccagcactaccgcgccgacagtgatcaccacagccatgcttaaaaataccggttttctgccgtccggttttaccgaaacaaacagccagggccagcgtatgaacacgtacctggtcagaaacgggcaaaacacggaattgttgcagggaatggtggtatcaagcggtggaagtgtatatccggccaaagcattgaggctgatatcgcgggatatcaaaaccggattcggaggatacatcgatgacggtaaaactgccactggtgccttacggacgtggaaaatcccgctgagtagctacggagctagttccggaaacgggcatatcgtcgtgcttctctcaacagatgagttatctggtgcacaggaggataacgacaggttgtaccgttttcaggttaatggccgccccgacctgaacaagatgcacacagccatcgatatgggtggaaataacctgaacagcgttggcaccattaatggacagacaggagcattcagtggaaatgtaagtggttcaaacggaatattcaccagtaacgtcagcggagcgaacggtaatttcacccaaaatattacagcgggagcacaagtaaaaggagctacggtacgtgccgaaagcgacatcagcgcaggacgaaatattacggcaacaaacgaggtatctggtgccacagttaaagcgtcaggcaacctttcggctggcggtgttttgcaactgggtcaggtcaacgttgcaggcatggcctgttaccctaacgggctgataagccgtgatgccaatggcggcgtactttcctgtcaatccggtgcgtgggtatctccaggaattggacgtcccggatactactgccgcagaacatcctttgataaaggtcggtctgatgactatgtgggattcaccccacgaacggatgataggtgtcccgtcatccaacctggacaggaacccaatggttactgtagctgtatgaaaatcatactggattattaa

SEQ ID NO: 94665 - DNA, 477 bp, Enterobacter aerogenes
atgaaacccggcaagctattgctctgcgcctcactggcgctgttttctattaccgctcaggcgcaatgtccggatatgacgggaagttatcgttttaccggtgctgaacatcccttctacctggtgaaaatcccaggacaatcacgctataacgcttttttccccaacgaagcgggccagtttacccgggtgcaaacggtcgatatctccgcggaagagatgaagacgcagcagataccggagtgcgcattaattatccagcgtgttggtatgatgatgaaaaccaacaaaggggaaaaggtggatgtgatgacgcagtcacagaactacactaccgagaaaaccattaccaccgaatatggcttaatgatatatgctgggttcgcttccgattttattggcatcgataaaatcagcgctcaggtaccgaaagaagcgcaaaacgacaccttgccgttgattacagaggcgcaataa

SEQ ID NO: 94666 - DNA, 174 bp, Enterobacter aerogenes
atgaaaaataaaattatgatggtttttattataatcatttcaatcattatatgttcttgcgaaaaaaaagataacgattgctcatcgatgccggataataaatttgatgcaagtagatccgataagtgtgcattgcgtagtaataacaatccaagccctaaacgagaatggtaa

SEQ ID NO: 94667 - DNA, 1053 bp, Enterobacter aerogenes
atgaggcaacttgcagcaaacgctttaggaataagtactggtatttctccctcaagcatagttgatatggcgtttgcgatattaacaaaggtcagttcagccgcatcaatttggtcgccaatgatatccaccattatgataacagtcgcgataatcgttttggtagtgatgtcccttatagcgataaatatgctaatcatgttggtttctgcatgggtgttatgttatgcaggagttatattgcttggatttggtggttcgaaatggacctctgatatagcaattaattacttacgaactgttttatcgattggccttcaattattcacgatgacattaattattgggattggacaatcatttatagatcaatacttttctcttattaaagatgatgttcctgatcttaatagtcttatcgttttgcttctggcgtcaattatcctgttagtattaacgaataagctaccactgttgttatcaggtgttgtaggaggggcttctttacaagggattggtggatttggggcgggtatgattactggcgctgccgctactgccatcagcggtgctggagcaatggcaatgggggcatcagctcaagtcagcggcggagcctctgcattaaaggcagcgttcgagtctgcgcaagctgccatggccgaggaatctggttcaggcggtggaggcggttccggtggaggatttggcggcgaggaagataccggttctgtagatacttctggaggccaaccctcaggcagttccggtggttcgtcagcagggagcggttcagttagcgccagcggaggaagtcaggggtttgcttcattctcacgagctggccgcatggtaagccatatgggaagcagcgtggccaacggagctgctgagtaccagaaaatgaagcgaagtagcaattcttctcgtgtccaacaaactattggaggggagttggcgactcagatacgtaagcaaacagctactcatcgggataaccgtgaacatgatgattttgccgatgatagcttatcgggtaataataaatcttga

SEQ ID NO: 94668 - DNA, 435 bp, Enterobacter aerogenes
atgtccaggactccctatacacggttacgcattgagggcttccgcaaagcagaggcttccctgagacttgaaggaatggaccccagtggtacgccgctctatgagtccattaaggcacgtattatttcaggtgagctgacgtatgagcaggggcgttcagagattcttacatactacacaaaagcagataccgccgggcctgtgaaagtgggagagatgctggtagaggaatttttaaaaccgctgaacatgtctcatgatgaactggcggaagctatgggtatctgcaagcagtatattgacgatattatctgcggtttgcgtcgtcttacggatgatgaggctcgtgttcttgctgtcatatttggtactgatgaggatttttggagcaatctgcagatgttgcaagatcaacagaaggaacgacggaagtaa

SEQ ID NO: 94669 - DNA, 1749 bp, Enterobacter aerogenes
atgactcgacaacaagacgccgctgatagcgtgcgcagcaaggtcgctcctggagctatagcagtacctgtatgtcccgtcacatcagcgatagagttattggcgacagagggggggctcgaagccaggggggccattttcacgcgctctgaggtggcggatttcattctcgacttggctggttacacagaggatcaaccgctttataagaagagaattttagagccatcatttggtgctggggacttcctattacctatcatcgagcggttattggctgcatggcgggtggcgaggccaaacggttcagctttaggtgaattggccggtgcaatccgggctgtggaattgcaccacgagaccttttatagcaccaaggcagcagttgttgaactgctgaagcatcaaggcatctcctcgaatgatgctaatgccttggcttgttgttggttgtcgcaaggcgatttcctgcttactcctttggagggggaattcgatttcgtcattggcaacccaccatacgtccgtcaggagttaatccccgcaccattacttgctgaataccgctgtcgttacaagacaatgtttgatcgtgcagatatttacattccattcatcgagcgatctctgtcggttttgtcggatggtggcagcctaggtttcatttgcgcggatcgctggatgaagaatcgctatgggggaccgcttcgcagccttgttgctgagaggttccacctaaaagtttatgtcgatatggtggatactcaggcctttcactccgatgtgattgcctacccagcaattactatcatcagccgtgaaatgccggggccaactcgcatcgctcatcggccagctattgaccgggtaacactgactgaattgtctgatctgctcacagcccactctcttcctaaggaagtcggaccgacgcgtgagcttgctcaagtgaccaatggttcggagccgtggttgctggaatcattcgatcaaatggcgcttattcgccgtttggaaagagactttcccctgcttgaagaggtagggtgcaaggtcgggattggtgttgcgacaggtgcggacaaagcgtttattggggattttgaagcactcaatgttgagcaagaccggaaagtgccgctggtaacaaccaaagacatcgtgagcggtgaagttgagtggcgtggtctgggggtcatcaacccctttactgagcaaggcgggttggtcgaacttggtgaatatccactcttgcgaagctatcttgaagcaagacgtagtgtgattgctggacgtcattgtgcgcagaaaaacccgctcaagtggtatcgcacgattgatcgcattactccgaaattggctgcgaggccaaagcttttgatccctgatatcaagggacaggctcatatcgtttatgaaggtggcgaactatatcctcatcacaacctctattacgtcacctcagatgattgggacttgcgtgccctgcaggcagtactactgtctgccgtcagccgcttatttgtggcgacatattcaacgaaaatgcgggggggattcatgcgttttcaggcgcagtaccttcgcagaattcgtattccgtcttgggctgacgtgcctaaaatgctacgccatgagttggctgaggcggctatcaaacgggacattcaggcctgtaatcgggcggtgtttaagctttatggtctgaatcaggaagaacaatcatcccttgggggaaatggagaataa

SEQ ID NO: 94670 - DNA, 741 bp, Enterobacter aerogenes
atggcgctcgatctcgttgattatgaaaagaaagcccgcgaagccgtgaaggcattttggggcaaccgtgaagcagcaagacaaaagcaaattgagtcgggtaaggccgaccagggcgaacgtgcgggtgtcactgctggaaagaatatggatgggttcttggccctggtgttagacctcataaaggctaatgggctagcccatgctgagatttaccagaaccgggcgatgttgtcccttcccggatatttccgcccaactaagctgtgggatctattagttatctacaaaggagaattgattgcagcaattgagctgaaaagccaggtaggaccctcgttcggcaataactttaataaccgaactgaagaagccatcgggacggcccatgatttatggacagccttccgcgaagaagcttttgggaagcaaccgcgtccatttgtagggtggatgatgatggttgaagatgcaccggagtctcgcaagcccgttcgcgactcgtcgccacattttcctgtgtttgatgaattcaagggagcatcatatctcaagcggtacgacctgttgtgtcagaggctggttcaagagcagctttacacgacagcggctgtcatcgcagcggagcgcggcgcggtaaatactggtgatttcactgagctatcgtccatgaccagtctaagggcattcgtatctgcactggctggtcacatagcggcagaggctgctcggttgggctga

SEQ ID NO: 94671 - DNA, 1563 bp, Enterobacter aerogenes
atgccggcaataaaaaaaatcgtgatcaaaaatttcaaaagaattgccgacctgacccttgagttcgacccaggcaagaacatactgatcggcgacaacgaaacgggtaaaagcagcgtgctattggcattagatctgacacttagcgcaagccgcagtcgagttgaaaacataggctatgaagccctgctgaatcagggggcggtgcagaatttcttggcagggccagcaagactggatctgcttccagaagtcatcgtggacgtttttctggaagagggggacgatcaaggtttttacggtacccaaaacgttcttggaacgcagacagatggcctgcgcatggcgattgtccccttgatcgaagagttcggccagacaattgtcgatctgctcaaagcaaacaaggactgctttccttttgaatattacagtgtcaagttctcaacattcgccggggcacctcacgtcggctaccggcgtccggtcaaacacctgatgatcgacagttctcgtatcgacagtgaatacgctgctcgtgaatacacccgaacactgttcggatttcatgtcaatgcgccggatcgctaccgcctcgaaaatcgctatcggcaaggcaaagaagctttcagtcgagagagtctgaaggaattgaacaatgcgctcagtgattatcagttttccttgagaacaagttctcgcgccaaccttgaaaccgacttggtgatcactaaagacggcattcctattgagaatcgtggcaaaggtgaacagtgctttatcaagactaatttcgccctgaagaaatatgaggaaaaagggagcttgaacgcgctcctactggaggagcccgaaaaccatctaagccacacgaatatgaaacgcttggttgaaagactggctgatacgacgggcactcagttgttcattaccacgcacagtagccatatctgtgctcggctcgatctacgccacgcgttactgcttggagcagggtgtgcgggacgcttgaaagacctgtcggagcccaccgcaaacttctttatgaaagcgcccgataacaatgtccttgagctcgctctctccaagagagtcatattggtcgagggggatgcagaatttatcctcatggagcacttctacaagcagctggctggctctcctcctcaggctgataatgtgcacatcatctcgatcggtggcgcgagcttcaaacgctacctggagctcggaaagctcctgagcatcaggatcgccgcaattcgggataacgacggcgattaccaacagaactgtgtaatgaactacgaaggttacctgtacgagtcggcccagatctttgccgatacaaatcctgaccgaagcacctttgaaataggtctctacagagacaatcagcatctctgcgacgaccttttcgctgcaggtcgaaaaaaactgaccgttcaagagtacatgttaaaaaataaagcggatgccgctttcgagttgctaactaagaagtccgctgagctgatcgtcccgaaatatatacaggatgcgattgggtggataagagcgtaa

SEQ ID NO: 94672 - DNA, 267 bp, Enterobacter aerogenes
gtgttttttgccccgattggggaagcgaaaatcgctgaaaaccagacgggcgcggcgatggcgctggggagcttcattggctatgcgccagctatgttttgctatagcctgtacggctacattctcgatcttaatccgggtctggtggggtacaagatagtctttggcatcatggcctgcttcgcttgcgccggcgcgttcgtttcggtgatgttggttaaacgcatcaaccgcagaaagaatatgttggaaaccgcattggtctga

SEQ ID NO: 94673 - DNA, 756 bp, Enterobacter aerogenes
atgagtaatacaactgccgcaacgtcaggcaccaagaaaaagacgaagcagccagcgccgccggacctagttaaagccgtaggtgcgctctttgacattgcggcaaaggcgccgtctccccttcaattgcaagcaatgacccgagacaagctttacgaaatgctggtcctggctcgaattctgagagcctttaagcgtgcgcatcccaaaggttcaatcattcaccagccgccgtctaagggaggtaaaccgtcggaggtgatcgtggcaagcaagcccgccctggccgatcgcaagcggttctcgcactttgatctgttcgatgccgctggcaacaacttgggcgaagcatggacctcggtcgaatttgaatcattgagttgggatcgttgcggtggggcacccggtaaggcccctcgcgaagcacggcacgaactcgacgtttgtgttctagagccaaaatcaggtgaacgcccagcacattttcaggtctatgcaggaatcagttgcaaggacgttcgtctgtcatcaaaagagaatgtgcgagaagcgttggggttacgtcgagagactgcgctgcttcggaattcagtcccaagccacaccccatggctggtgcagtcggtccccgcaactccttgttcaccaatctttctggtgagctccgacttagggatcaggaaatacgcttcacctgttgacgaaatgggggtttacattagattcgtgcgtcggccttgggcagccgaatcgtga

SEQ ID NO: 94674 - DNA, 471 bp, Enterobacter aerogenes
atgcaaatccgatttcaaggtgaggatgatctggagcaggcgcttcatgaaattcatcgacgagcctgcgagtatgaggggcccttaatgcaccaatttatagagttggccaggatcagtgctccggtcgagccggatgagccccttagagaggcacccttggatggaacgcaacatgatggtgtcgcggcagaggccaagcttcgggagatcaaagagcgatttgaagaagccctgtcgttgttgatggtcctcgctttcccggtgcacagcggaaccgaacaagtcgtacgcgatgaactcaatcaggcactggggcatgagcagcagatcgactccctaaagatgcgcgtcgggaaccgaaaactcagcttacgaagtaagttgggacgacgcccgacgaaacagcaagtcgcactgcgaaatgcattgctcgaatttctcccccgacagaccctggaggaactatga

SEQ ID NO: 94675 - DNA, 1662 bp, Enterobacter aerogenes
atgacctcccgaccgaccctgcaagtggatccgctgctcaccgccaatctcgatgccctactcagttccgtggtcgatgctgaccagcgccaattacagaggcccgttggcgctcgctccgaacgcgagacactgaaggacaagcgcctacaagagttgcttaaccgctgccgcgaagaagcactgcaacaagtggtcggccctttcggattaacccctgcaatgttctcggatattaatggtggcaacgtcaccacccagcacaatgctaaccaagacatctatgccaaggcatccgagcactatgatcgtaaagccgactacgattactccgcagcgagaaagcagaaaatgaaggatgcggtgaaggacggcacgatgaactcacaaacattcatcgacacatacaccaatgaaaaggcaccgaccaagcgcaccgccaagtcaaatggcaagctggttatgaatgccgagctggatcacaccatccccctgaagcaggtacacaaaaaaggtgcctggatgcttactccggagcaacgcaaggcgttggcctcggaaaaagacaatctgcatttcaccacctttgaaaataaccgagcaaagagtgataccgccgcagagaccgcactctctgccgaaaacggttacgacgaatccattaccaagccgctgattgacaaggctcgcgccgccatcgatcagcatcagcctgacaccaaagaccgcttgatataccacggcaaggaactgggcattactggcgcgaaggaattcggcaagaccggcctgcgcagggcaataggagtgctgttattcgaggtggtcaacggcagcttcgtcgaagtgcacaaggtggtcagccagcgtgatcatcagcagcccctgctcgaccgcgtggtagcagcagttgagcgtgtgttgaagcgcgttcagagcaagtttaaggcagctttcgatgctttcttcgagggcggccttcaaggtcttgtgagcaacctgttgaccttcctaatcaacaacctcatcaccacatcggccaaggttgtaaccatcatccgagaaggcatgcaggaactgttcaaggccctcaagctactgctctggccccccaaggaaatgtccggcaccgaggttatgcgggcggtcagcaagagcttggccggcctgttcaccttgggtgccggcatgctcttggagcaatcggttaacaccttcatcgtaggtatcccggtcctcgcaccactcgccggaacgatcaccccggtgctaaccggcctgatgaccggcctcgccaacgctctgctgatgtacgccattgactcgcttatcgattggatgctggataagggcactgatttcatcaaggtgcagatcgataccctgcaagccaccgccgaactgggcgagcgcattattgaacaggtagagctacaatttcgactttcggctcgctaccggatgatggtccagctaaatcagcgcatctccgtgcgcttcgatcaggcaaccgaggccgcacaagcctcagtgcagcacgcgcaaggcgccataggagaacaggcggagactatcgcctcgttatcccaagccatcgatagcaagaaacagtttaacgaacgcctcggtttgttgcttcagcaggtcaggaaggaaacataa

SEQ ID NO: 94676 - DNA, 1053 bp, Enterobacter aerogenes
atgtccaagatcattgcccaacttgcaagcactgttcccagcgaagacctgctcgcccagatagacatcgctgaggtttacaagaagttccacagcacgttcaagcgcctcgatgatttcaagcaggtccgcgaccaacacgagcagcgtagctttctcggccgcctgttcaatcagggcgaactgaagaacgcccagctcgacgcccaagaagtgcaggcggaatttgccaaaactctcgcccaattgatggtgatcagctcgttgcaggcccagcaactgactgagcagcagggacaactggccgaccagcagaaggccttggatgccaaagccgaggaactggcccaacagaacatacttctcgaacagcaccaagccgagatcaagcaccaagcagcacacttgcgccaatacgtcaccgacctgttgaaagtccaggggctgaccgacgaacacggcgaaatactgatcagcatcgccaaagaagtaatggaaacccgggatagtctgctggcagacttcgacaatcgcatgcatcaggtgcaaggcgtactggatgaacagcagcagttgctccgagaagtcctcgatgagcaggcgagttccctagaacaacgcctcacgcagttgcagcaagtagtcgactcaacccaggaaaaacgtctccagactgttgagcaaggtctgctcactacattcaacgaacagagcagcgaagccacacgccagatagaacgactcgatgccgacttggtcctccaagcgcagcggcaggaagataagctccgcgacctagatcagcagctctcggaattgcgcgaagtgctgaccgaacaggcccaaacactgcttaacgaacgcaacgaacgacagctggagtgggccgagcaccaagcaggactgcatgccttacgcaatgaacagaacaatggggaattacgccttcgccgtgtgcagcgccgcctcctggtcggactgtatggcttggcgttagtgttcatcggcaccatcgccgggctcactttctggagtcatcaaagccttttttaa

SEQ ID NO: 94677 - DNA, 1005 bp, Enterobacter aerogenes
atgaacaagatattgtgggttaaatttgggtggtcagcatattatcaaggtggcgacattgctggtaactttgcttggctaaataaaaacagagggacggaaaatgaagggcgaggtcatgaagcctacaactttatgccagatatcgatgggacttactactgctatgtacccccacaaggaggtaactacgcaccttaccacgacgacgcagaaggatggacggttgtatgcttagcaaaaaatccgaccactccaggcatacacgtagttggttggtacgaaaacgcaacgcttcatggtgagtggataacccgccccaatagcaccgatccgcgacagcaaattctccctcatcctgcttatgattggtcatattgcataaccagtaattccgcttacttcatcccgcccgaggagcgaattctgccattctcggatccatccgtaaaacaggggaaatactcgtttcttgacggccctgacgtgacgaaaaccgagaataaattaagggttcaagctaggcttgagagtttaatgaatcgcttggcctcagtcgcaattcataaccctaatgaatgcagtgttgttgaccccgaactggatcaagtcgacccacttcggggatttggtacccctgaacatcgtaaagtcgtggagttagctgcagaagttgctgttatcgaatattatacagaacaaggctacagctaccagcgaacaacacaccttccctgcggatatgactttatcttcacgcgcggcgaatcagtgctgcatctcgaagttaagggtaccgtcggtactacaccacgttttttccttacgcgtaacgaacacaatgcaggattgatgcttaatccagactggaggttagccatagtgacatctgcgctatctgccttcccgcaagtcactgtgtacgattctcgtcagctaaaagaggcgtttaaccttgaaccttacgtttacattggggcattcgcaccaaaacccgaatcctaa

SEQ ID NO: 94678 - DNA, 828 bp, Enterobacter aerogenes
gtgaatgatttatcgaccaaacaaaaaaaactcatctataaactcagcgcaattttaattggttcgattttatttttttctggcttttattggctggcagggaactttgaaggacatggcgtaactaagaacaataaatctgctgatatttatgagttggtttattttagcgtggtttctattacgacgcttggttatggtgattttacaccgaacggtatatctaggctatttgcctctctcgaagcaatatttggcattgtgttcataggttattcaatttcacaagttttgtccctgcgccagtccacgctagtagaatactccgttaattatggcatccatgaggcatataatcaatgtattgaatatcttatcgacgccaaagaatccataggagataaaaggagggaaattcaaaatggcattatccctcaaactatctctttcatatacaacaggtccaaccctttttattcatctacaaaagcgttgcggattacaaatggatactcctctcatcttgttaatataggaaaaattgaagaactcgttaagcatgtggaacgcgcagcacatcatgttgaagaacttgcgggatttacgagaaaatatcttaacttgctacaaaataaaagcatagactggaagcaggatagaaccattttaattcttctaacactgtgtgatcagatcgattatttcgtagatcagtttatcgaaaaaaccagctatgcgattaaaccatataagggtggcggcatgtatagggacgtagttaaatccataacgaatgacattcggaaaaagtgcaaaaatcttaaatag

SEQ ID NO: 94679 - DNA, 813 bp, Enterobacter aerogenes
atgcaattgaagctagggaccagaggcataaatttcaggcgtccgcccaatagacatttccgcttggacgatctcaatcggtaccgcgatggcagcgggaggctctatcactgccgcctcgccaaactgctacaggtcgtaggggttataccggatgtgcgtgctcgcctggagcgcttttacgactacctctacgttgacgaggtacaggattttgcgggccacgacttcaacctgctgctggagatttcacaagcgaatattggtgtaacgttcgttggtgacttccaccaacatacctttgataccagtagagacggtgcgataaacaacaacctccacgacgatgttgtccgttacgagaaacgctttcgtgatgtcggcatcacggtagacaaggaaaccttgagctgtagctggcgatgcacaaaaatggtctgcgacttcattagtgcaaagttacaaatccctatgggtgctcatgagcaaagggtcagccggatcattacaattgatgaccaagagcaagcgaacttgttgcacgctgatccctccattgtgaagctgtttttgagcgaacactacaagtacggctgctactcggagaactggggagcgagcaagggcatggatcactttaatgatgtttgcgttgtgatgggaccgggtatctggaaagactatttggcagaaaggctacaccaagcaaatccgcaaacgcgcaacaaattgtacgttgcctgcactagagcgcgtggtgacctgtatttcatgcccgagaagctattgaaagcgtttaaacagaggaaatag

SEQ ID NO: 94680 - DNA, 531 bp, Enterobacter aerogenes
gtgctgtatggcgtacgcatccagaaggagacacagccgggtgtcatcgtgcataaattgggcggaagtggttctcatactaacaactgggtgaatgccgatgcaacccgctgggaaactgcctttacaaccctgaaagcgaatctggccaccatcatgttaggaaccaatgaccagggcatcaaacttgctccggagacgtttaaatcaaacctcctgacgatgattaaccgcatccgtacagcgtcgccgaccacggacattatgctaatttgtccggcagagaataaccgtccgggcggaaatgccattcctatgtccagttatgccaggaagatgtatgaactggcgcttgaacaggatgtggcgtttttgaacctgcaaagctcgtttggcgtaaacccggcagattatgcctatggctccgcacgtccgtggatggtgtctgatggattacatcctgacccggatactggaggatatgcgattgctgccgcattaatgcgggcgctgtcactccccatggcttag

SEQ ID NO: 94681 - DNA, 285 bp, Enterobacter aerogenes
atgcatcaactaatctacgaagcaactggcataagccagcatgcaatgtttgtcgatactcagcgcggagttgccgtggttgagcgttcatcagtcccattatcggcagcagttttacttatctcatattgcggggtacagcaatttgcgcgttccatggggggttcgctcattacggaagacggcgaagctattgaaggtgatgcgctcactgaggtagagctgataggcgtggttacccacatcatcagcaaagctggctttgatgactgcccggtgatgtga

SEQ ID NO: 94682 - DNA, 1266 bp, Enterobacter aerogenes
atgtttgctctggttgatgtgaatagcttctatgcaagctgcgaaaccatttttcgtcctgatctacgaggaaaacccgttgtcgtattgtccaataacgatgggtgcgtgatagcacgttctgccgaggccaagaaacttggcatcaaaatgggggatccgtacttcaaatgcaaagaccagttccgccggcatggagtggtttgcttcagttcgaactatgaactctacgcggatatgagcaaccgggtaatgacgacactggaggaaatgtgtccaagagttgaaatctacagtatcgatgaggccttttgcgatctcactggtgtacgtaattgccgtgtgctggaagagttcgggcatgagctgaaagatacggtctaccgcaataccagacttccggtcggggtggggattgcacaaacaaagacgctggcaaaactcgccaatcatgcggcgaaaacatggaaagctactggtggagttgtcgatctttcgaatgtggaacgccagcgcaaactgatggctttacttccggtggatgaggtgtggggtgttggccgccgtatcagcaaaaagcttgaggctatggggataaaaaccgtcctgcagttagctgatacggatatccgctttatccgcaaacacttcaacgttgtgcttgagagagctgtccgggagcttcgcggcgagccgtgtcttgagctggaagagtttgcgccagtgaaacaggaaatcgtctgcagccggtcgttcggggagcgaattaccacctatgaacaaatgcggcaggctatttgttcatatgcggccagaggcgcagagaaacttcgtggggagcatcaatactgccgacacatatcggcgttcgttaagacatcgccgtttgcgctgaacgaaaaatactacggtaacagcggatccattaagttgctgacgccaacgcaggatagccgggatatcatcaatgctgcggtaaagtgtctggatgcgatatgggtcgatgggcaccggtatcagaaggcggggatcatgctcggtgatttctatagccagggtgtcgctcagctgaacctgtttgatgacaatgcgccacggcagaacagcgagaaactgatggaagtcctcgaccacctcaacgcaaaagacggaaggggaactctttattttgctggacaggggatccagcaaccgtggcagatgaagcgggaaatgctttctcctcgctataccacccgtttttctgatttgccggtcgtcaggtga

SEQ ID NO: 94683 - DNA, 672 bp, Enterobacter aerogenes
atgtgtggacgttttgcacaagcccaaacccgtgaagaatatctggcttacctagccgatgaagcagatcgcgacatcgcatacgacccggaacccattggccggtacaacgtcgcacccggtaccaaagtcctgctgctgagcgaacgagacgagcagttgcatctcgatccggtggtctggggttacgcgcccggatggtgggataagccgcctctgattaacgcacgcgtcgaaacggcggccaccagcaggatgtttaagccgctctggcaacatggccgggcgatctgctttgctgatggttggttcgaatggaagaaggaaggcgacaagaagcagccctacttcatccatcgtgccgatggccaaccgatattcatggcggcaatcggaagcactccgtttgaacgtggagatgaagcagaaggctttctgatcgtcaccgcggctgcagataaagggctggtagatattcacgaccgccggccgttggtactttcaccagaagcagccagggaatggatgagacaggatataggagggaaagaagccgaagaaatagctgcggacggtacggtgcccgcagacaagtttatctggcacgcagtgacgcgcgccgtaggaaatgtgaagaatcagggcgccgaactaatcgaccccatcacctga

SEQ ID NO: 94684 - DNA, 129 bp, Enterobacter aerogenes
atgagaatgagtttttttgtggagatgcacccgcaaatagcgcaggttatcgggagcgtggttatgcagctactggttgagaagccagagccgtcaagagaggcgctgatagagatgattcaggtgtag

SEQ ID NO: 94685 - DNA, 837 bp, Enterobacter aerogenes
atgacggctcaagactcacaaagcatcgattcactatttgattacttttatgtagacaaagaaagggtaagtgccctaaccgcgcagttgtttccctctggcgtcttaaatactgtaaagcaaacctcatccgaatccgaaaaggacttgaaagaactaaaaggtggacttcctctagttggtgtgcgtagcaatgcttcagaaggctggtcgcgtgggcaggaaagaactttcgattcatcatggagtatcccattaaatcttctagataaattgtctgaaaccgagagaatgaaaacgagtcttcacgaagctaaactaggtgatctcgttttaatgaaagggatgatgaaaatttttgatgctcagatggttcatctttgcatgcccatattcaagaaaataaaactaaatgaattaaagagcgagaaaaatacccaagctaaaaacgcgcttaaacaggaaattgcaaacttcgagaatggtgaagagttggtgaaaatccttccacctactacacatattgatttcgctgattcctgtgggaacttaagctggatgtctgttgaaccatctaatttaacaactactcttagtgacgtatcattaaaatatggacctttcatacctggcgaatggtacatcttaggcattgtggatgcctacgctgatgatgctaaagttgataaccctgatgccccctatcctacgatttctaatgatttaaaacttggcatggaaccaatactgctgatgatgcgaagcttaatgggtcgaccaatgggttcatatggaattacgcctttgattattttccgtggtcttgcgaaccaataa

SEQ ID NO: 94686 - DNA, 180 bp, Enterobacter aerogenes
atgatttttaaactgctgaaacaattaaaaaatgagtcgccacaagttggcgttgatgagttacagctagttcatgacgagattgaagcgaaacaaaaaagaattgctgaggaaaaagcaaaaatccaagaggaacatcatgacggctcaagactcacaaagcatcgattcactatttga

SEQ ID NO: 94687 - DNA, 234 bp, Enterobacter aerogenes
atgaacgcattagaaaaagccatacagagcgctggtgacgcaacgaagctagcagaaaaactggacgtctcatctatgacaattagccattggaagcatcgccatgggggagccgttcctcagtctcgggtttttcaaatcttccgggtaaccggcgttaccccacatgaacttcgcccagacctttacccaaatccaaacgacggtttgtcttcacaagagctggtgggatga

SEQ ID NO: 94688 - DNA, 261 bp, Enterobacter aerogenes
gtgaaccatatcgaatttattgagaaaaacgtccgcgaagagcttatccggcagggatttacccagtcagtggctcaggggggggcatttcaggctgtcgatatgtacaagcggatgtcacaggccagtcgtaagggaggcatttttgatgatgttatgcgccacgccaggttgtgggctgagaagcaaaccagcgctgcagaaaagcgagaagcaaagaaatcaatccgtaaggggaataaccaggttgggttgttctga

SEQ ID NO: 94689 - DNA, 237 bp, Enterobacter aerogenes
atgagcaactcactgcaaattctatgtatcaaagataccgagggatactggactgagggggaaatataccccgctcgtgtagttgctggcggttttgttcaagttggtgacgatgacgatcctaatggcgacggatggagcgcagcaccaatggaatatcgggaagatggctcgatcgtttatcaggttggtgggattgagggggaagtgttattcaaggaaaccagccatgactga

SEQ ID NO: 94690 - DNA, 192 bp, Enterobacter aerogenes
atgactgatatcaaccgactgattaccagccacaagcgccgctcagcccacgcaaaagagtttggtcacgatgttctgtttgtaaagattgaagacattgatgcgctggcagaggcgttggagacaaaagaagattcaacttgcggaaaggctggccacggatgtacatcaaaacacagccagcgccggtaa

SEQ ID NO: 94691 - DNA, 519 bp, Enterobacter aerogenes
atggataacagatactcaagtcaggccttctttgatttcctgtatacccttccttctttgcgactgctaaaggatgcgacagctcgaaaccttaaaaactcagctttgctgttactttccgctgtggatctcaacagtgaagatgatattcgtgaatttgatgttgaacagttgatcgacagatatattgaaaatcaaaatccaaaaccaactgaatcaagcattcaaaactatcgaagccgctttaaaagtgcagttaaaaaattcgatgagtacgtgtcagttggaacagtgcttgacaggtctgaagacgataatgaattcgcggggttagatgctgtggaagaaaaaattgaaaagtctaaaccagtacctgacgagaaagtgaaaactttcaatttaccggtgctactccgcccagagactggggctttgattactatccaaaacttacctacgaattttactgaagaagaagctgaacggatcttgtccattctgaaagcttatattcggtga

SEQ ID NO: 94692 - DNA, 198 bp, Enterobacter aerogenes
atgatagcccacccgtgtgggcctagtttagttattctactgttcaaaatttggttaatcactaaaacgctgttgggtaaattcgaaactccgatccagaaccgtaccctatactatacgttagcactttcccttcagttactttcccagctagtacgctcatgtctcccccgcatatcctttttggtcacgcgctga

SEQ ID NO: 94693 - DNA, 381 bp, Enterobacter aerogenes
atgaaaggcgctagtctaattgcaccattcggtctacgtatgccggaagaattaaaggataaaattgcacaacgagccaaagacaacggacgatctataaatgctgaaattgttcaaacactcgaagattcgcttaaagataaaaatctaaataattcaatagcttcactaagcatggctcttgatactttcaaaaaggtggaaagtgcaatgaccgaagctttagaagcaaaagataaacacattaaatcaattacagatttggcccatgtgcaagctgattacattgcggcacttaaagagatcttgaagaccaaattcaattttgatgccgatgtatttgaaagttttgaagatttctcaaaaaaggtcggcaaatga

SEQ ID NO: 94694 - DNA, 918 bp, Enterobacter aerogenes
atgatggtctcatcaacttatagaaacagcgaagcccggaagtgcggcaacacttaccgggcctctatcgaagatcaccacgaaggaaaaatcgacatgtttaatttagcagtaaagcaatcaacttgcactatcaacgtccctttctacggttctgagctgtttgtcgttaaccacaatggtgagccatacaccccgatgaagcctatcgttgagggcatgggtatggactggaaaagccaattcattaagataaaacaacgattttctaaaggtatggtggaaatcaccatacccactattggtggcgcacaaaagatgatctgcctcgccctgcgcaaactagccgcctggctgaacactatcagtccgaacaaggttcgccccgaaattcgcgatcgggttatccgctaccaagaggagtgcgacgatgttctttacgaatactggactaagggggaggcaatcaatccgcgtaaggctgaaagaaccgctgacgatcgcactccactgcgcgggctggtaaaccgaatcatgggtaaaacaggcattcattatcagccgctttacaagatgatacaccgggagtttggcgttaaccatattgacgaattgacctcaaaacaggttacggaagcgatggaatatcttgcaggaaaagttctggagggcgagcttatgccgaaagagcggaatccgttttcggaatcactggcaatatcgctacatggaccaggtagggttttgctttatctggatgaaaaagggaaggttcaggactcttatccattaactgaagatcaggccgtcatgtcgtttgatgcttttgttggctatttcaggaaaaagggatggatagtagctccaaaagatgaagttatgaatagcctcgtcagtgcagtacaaaaaatccactga

SEQ ID NO: 94695 - DNA, 234 bp, Enterobacter aerogenes
atgaaagttgaattaaccattgatcgcacagagaaacttccagatggagccgtgccggcgctggagaaaaagttgcttaaacgactacataaccggtttgataattgcagcctggttatccgacgcgcaggtactgatgggttaagtgtttatggcggtgagaaggacgcaaagaagacgatagaggaaattctgcaggagactagggaaagcgcaggcgattggttttattga

SEQ ID NO: 94696 - DNA, 816 bp, Enterobacter aerogenes
atgaaattggaagcgtcacttaaacacttcagccctcagggtatgcacatcagcgacgacgtgaaaggaacctctccggatcgcatcacaggaacagacgtcatggccgcaatagggactaccagttcccgcgcacgattcggagttgctgcattctttggcaaggcgggtatcagtaagacagatgagcaactggcggtgcaggcgctggcgcgacacgccattgatacgatgcctaagaacgtgcgaaaggccgcgggtaaagcgctggggcgctgctgcctgattttggcgcaatttgcctttgcagagtattcccgctcggctgcaacaacgggagcctgcagagtatgcaatggcgccgggaaggtgcagacgaccaccacggagcgcaaggttacatacccgtggggtaaggcgccttattgggcgaaaagatcccgtgccgttcgtccgtctgactgggaaaaatggactgaagtaaccgccatcaccagcgcaaagtgtgaagcttgtgacgggaaagggaaagttaatgcccgctgtcgctgcggcggttctggtgaggtgctggaccgcaaagcgacaaaagagcagggcgcgccggtatataaaacctgtgagcgctgctcaggaaaagggttcaccagcgttaaatctgccaacgctcaccgagcgattcagatgcacattcccgatctgcaccagtcatcgtggtcgcgcaactggaaaccattctacgaagggctggtggatattcttcacaagggagagcgtcaggcttcagcagaatttgagaaggcaacgcgttattga

SEQ ID NO: 94697 - DNA, 396 bp, Enterobacter aerogenes
atgtccgatcctttaactggtaccggcctgatttttggcggcggtttaattggttccgtcgtatatggcgttatcactcataccgattttggtgtggtatttggggcttttggcggcgcggtattttatgtggcaacgaccgcaaacctgacacgtggaaggcaaatagcttacttcatgacgtcgtttattgtcggtgttctggctgccggattattaggctcaaaatttactacctggacaggctatacagatcgaccgctagacgcgctcggagcggtggtggcttcagctatcactattaaggtcctaactttcattagcagccaggacctgagcagcctgtttggattactttcccgattaaagggaggaggttcgagtggtaataaatga

SEQ ID NO: 94698 - DNA, 531 bp, Enterobacter aerogenes
gtgctgtatggcgtacgcatccagaaggagacgcagccgggtgtcattgtgcacaagcttggcggcagtggttctcatactaacaactgggtgaatgccgatgaaacacgctgggagacggcctttacaaccctgaaagcaaatctggctaccatcatgttgggcacaaacgaccagggcgtgaagattactccggagacgtttaaatcaaacctcctgacgatgattaaccgcatccgcacagcgtcgccgaccacggacattatgctgatttgtccggcagagaataaccgtccgggaggaaatactatcccaatgtctagctatgcccgaaaaatgtacgaactggcgcttgagcaggatgtagcattccttaatctgcaaagctctttcggagttcaccctgcagattatgcctatggatcagcgcgtccgtggatggtgggggatggattgcatccagacccggatactggagggtatgcgattgctgccgcactaatcagggctatgttgcttccacagttataa

SEQ ID NO: 94699 - DNA, 231 bp, Enterobacter aerogenes
atggatgtaagttataaggctctcggcatctcgcatttcgacagagaggaatataaccagaatgcatttcgcgcacttggcgaatgccttgtattgctaatatcaagcggaaaaacgataaataaagataacatattgaaaactataatttctgaaatggagaagcagcccgacgaatctcacaaagcctatcggcttgcccttgagatcgttggattacatggccgatag

SEQ ID NO: 94700 - DNA, 699 bp, Enterobacter aerogenes
atgattcttgtttgtgatggtgtggtgaatgccgacgatctggaactggccgagcctgaaatgattctcaacgatagcgccagtattgctacttacgggatgcaggaccagtatgattcaagtggcaacgggtatgatctggttaccggcaatgagtttactgagctggggatgcgtaccgtcgcagacagtgcgcatggtgctgatacggggatcattgaagccgatgaaatgacgtttgcgctgtgtatcaatatgagccagccgactgtgtcgggccgtctgttctccaacttatttcccggtatcgccccatttggtggtctgcagctgcgaattgaagccgcgggtacgctcattttacaggtggctacggggaatagtgttgagtcaactgttcaggtgagccacggtggcgcagtaggtggatggacccgcttcaccgtagcggtatcaaatacagaagcgtctatcacccgggcaagcggtgataaacatacttctgctatctctgtacgtaagaaatcgacactgcccctgatcctgaatggtggccagagcccggagcagaatatggggcttcccggcttaatggggatattcgccgtctacaatcgagtgttgtccgatgcagaacagacagatgtccgtgacaagatgaaaagcattatggctatgcgaggtgtagtggtgaactga

SEQ ID NO: 94701 - DNA, 1791 bp, Enterobacter aerogenes
atggcctatgttccacccgtcgggcagacagcagaccctgatattttcctggataacgtcaagcgggcagatcggttggtaaacggccctgtgggtaccgttcctgaccgcggcggagtagctcttgattcctggcgtcagatgatggcgaagaatgatgaaattcgccaaaacctgatacctctaagtcgtcagtacatgacacaagaagcggcacagggcgatatcgctaatattcctgtcgggagcacaacgtttatacgcagccaggataacgattatctggcctatgaagtgatgaacgttaacggcaccctacaaccgaccggacgtaaacaagcctctcaggaattcattgagatggtccataactttgcacgcacgaccaatatgcgaacgcgcggaataaacactgtcagtcgtaaaaaaaggccattggatattctgacccggcaaggcaggcggctattctcaatcaatgaaaatggtgagaaagagttgccaggcaaatcctttgctgattacctgaatatcctgcgatctcttctcatcggaacctcatcgatacgacgggccagagcaggctatttgtttaatctggtgattgggggcttcagggttctggcagttcgtgacgacggcaacgccacgctggaatatcgcggtatcccgctggaaacccaccaggggcttttgcaaaacacattcggcggatttggggattcattaacggcgaatgggctggatggtaatgcttataacgccaggtcatggcagatatgggcatcattgttcagcaatggacaactgcagtatgttggccagtgggctaccggcggctataccactgccgatatgatccgcgtccacttacagccagccattgaagccaggcccagattcattaccttcctgggtgggcgtaacgatgtcattcagaaagatagcgccgggaactttaaattcaccattgcaacggtcaccagcaatattcggtacatcctcacccagttccgcaagaatggcattatcccggtggtgtgtagcatggcggcccagaacaacagcgatccggctctgaaagccagagaaaatgcgataaacgcttttatccgcgcgtatgcaattgagcagggatttccgttcgttgatatgcggtcagtcactgttgatcctgaaaccgacggctggaaggcgggctataacggcaaacttcaggatggctctcctgacccatcacaccctgcgccactcggtgcttttcatatgggtaaagcactggcggaagcgctggcacctttcatgatgccggtttatccgcagatggccatctccaatccggtcacctcaggaggtccgaatgccattatcaacccactctttctcgatatcgtgaatggtctgccgtcaggatgggttgttgaaagcggaaccgtgtcattaaccactgatcctgatgtcgttggtaacgttctgatggtgactggcgacgggaataccagcgcgcgcgtgtcacagactatcccggttacgccaggtgagcgccggaaattcagtttcagagtgaaatttgatgtggatgaaaacgcggcaaccgcctgcttcctcgaagccaacggagccaatattgccggaattcgcccctggaaccattcgacgaacgaattcaggacgttcagttatgacgtggtgatcccggagggtatgaccgaaatgaaattgaccattgtcgcgaatggagccactaccagcgtgggacagatgggattattaaaactggaggaagtatga

SEQ ID NO: 94702 - DNA, 1266 bp, Enterobacter aerogenes
atgtttgctttggttgatgtgaacagcttctatgcaagctgcgaaaccattttcaggccggatctgcgagggaagccagttgtcgtattgtccaataacgatggttgcgtgatagcgcgttccgccgaagccaagaagcttggcatcaagatgggggatccgtacttcaaatgcaaagaccagttccgccggcatggcgtggtttgcttcagttcgaattatgaactctacgcggatatgagcaaccgcgtcatgacgacacttgaggaaatgtgtcctcgggtagaaatctacagcatcgacgaggctttttgcgacctcacaggtgtgcgtaattgccgtgtgctggaagagtttggacatgagttaaaagataccgtttaccgcaataccaggcttccggtcggggtggggattgcacaaacaaagacgctggcaaaactcgccaatcatgcggcaaaaacgtggaaagccactggcggggtagttgacctgtcgaatgtggagcggcagcgcaaattgatggctttacttcctgttgatgaggtgtggggtgttggtcgccgtatcagcaaaaagcttgaagctatggggataaaaaccgtcctgcagttggctgatacggatattcgcttcatccgcaaacacttcaacgtggtgcttgagagaactgtccgggagcttcgcggcgagccgtgtcttgagctggaagagtttgcgccagtgaaacaggaaattgtctgcagccggtcgttcggggagcgcattaccacctatgaacaaatgcgccaggctatctgttcatatgcggccagaggcgcagagaaacttcgtggtgaacatcaatattgtcgttatatctccacctttgtgaagacatctccctttgcgctgaacgaaaaatactacggcaacagcgggtccattaagttactgacgcccacgcaggatagccgggatatcatcaatgccgcggtaaagtgcctggatgcgatatgggtcgacgggcacaggtatcagaaagcggggatcatgctcggtgatttctatagccagggtgtcgcgcagctgagcctgttcgacgagaatgcgccaaggcagaacagtgagaaactgatggaagttctcgaccacctcaatgcaaaggacggtaggggaactctctattttgctggacaggggatccaggccacctggcagatgaagagagaaatgctttcgcctcgctatacaacaagatattcagacctgcttagggttcgatga

SEQ ID NO: 94703 - DNA, 1332 bp, Enterobacter aerogenes
atgcgctcaaatcatttcctgctcaataattcaatcagttctcttgcgcaatggcttggccttgctttcctgatcgcagtgctgaccggcacagcttctgcgttctttctgttttcccttgactgggctacggcgacccggctcagacacgattggcttatctggctgcttcccgttgcaggatttgccgtgggatgggtttatctgcgctacggaagttcagtagaaggcgggaataacctggtgctcgatgaaattcatgatccccaaaaaattatccgtatgcgcatggccccgctggtatttatcggcactgttgtttcgcatctctttggtgcttctgttgggcgcgaagggaccgcagtacagatgggtgcctccatagccgatcagtttactcgcatgtttggcctgacgcctgatacccgacgcattgtcctgatggccggtatcagtgccggtttctcatcagtattcggcacccctctcgcgggcgccatttttggacttgaggttctggccgtagggcggatgaattacaacgcattaataccgtgtattttcgctgccattgtggccgatcaaactggattatcatggggagtacatcatactcattacaccgtctcgtttattcctcatatgtctgcctgggcactgattgctgtaatcatcgccggcgggctctttggtctgactgccagggcttttgccagcgcaacacatgccatcggcagtttcatgaagaagactatccattatgcgccactgagaccgttcattggcggactggtagtggctgtgtcggtcttttacctgggtgctgatcgctatatcggtctgggtattcccgttatcgttgacgcctttcatcagcatctggccccatgggatttcctgggaaaactggtatttacggtcacttctctgggcgcaggttttaaaggtggagaagtcacaccgctcttttatattggggccacactgggtaacgcgctggctccagtgctgcatttaccggtcagttttctggccgggattggctttgtggccgtctttgccggagctgcgaatacccctgtggcttcaacactgatggcgattgaattatttggctctgagatgggcgtttatgctgcactggcctgtgctgttgcctggttgatatcgggttataccggcatttatcggtcccagcgcgtagcctgcctgaaacatggcttcgtgccagagtatattaaacttgctgatgtccctgactggttggcaaacaatctaaagtcccggaaaccgaaaagcagcgaaacctgttcggcagaggtgaataagtga

SEQ ID NO: 94704 - DNA, 369 bp, Enterobacter aerogenes
gtgaagatggaaacgctatcgactctacgaatctatatcccgtcaggcaccagggtaaaagcatcgggatttatgaaaaaacttaccgctcctccattgagccattatctgctgcgtcaggccaaggcagagggagtacctcaggctatcatccacaacgtaagtgcagggtatcttatcgggatgaaaataagctattcccaccatgaaattaaagcaggtgttcacccagaatgccttgaactgattgggtatgtagctgaattaaaaaaattcatcgctgattatgacgagcatctcgaaggattgcgctgcatcatctcaatgtctgaggaacacaccatcatttctgaagaagtattaccatga

SEQ ID NO: 94705 - DNA, 891 bp, Enterobacter aerogenes
atgaaagagaatcttaacgacctgatcactttcctgacggttattcaggagggaagtttcacgcgggcggcagtgaaatcagggacatcccagtcggcggtaagtcagactatcgggaaccttgaagcgcgcctgcaactaaaattactaaaccgcacgacgcggagcctgactctgacggaggcgggagagcgtctggcacagttgattggcccggctatcgaagaaatttctagcggtcttgatcagcttgctgaattgcgggataaacccgcgggcaaagtacgtatatccgccgatgaatacgctatccagcaggttctgtggccgaaactggcgccggttttgaagaactaccctgatattcacctggaactgattacggattatggcctggttgatatcgccaaagagcgttttgatgccggcgtacggcgaggtggcctgatagctcaggatatggtggccattccgattagcgcggaacaccgtatggtggtcgtagcctcgcctcagtgtctgcaggaacaggatttcccgacaactcccgcgcaactgctgacgctgccgtgtatcaatttacagttacccactcatggccagaatttgccgtggacgtttttaattaatgggcaagagcaaaagttgcgcgttcaggggcaggttatcgttaatggcatcaatcaggttcatcaggcatctcttgacggttacgggctggcctatgttccgcaggcattagtgcaggatgatatcgactcaggccgactgatctccgttctggacgacttcactatcactttcccgggatattatctgtattacaccagtcggctgaaatcctcaactgcgtttaatatcattgttgaagcgctgagaatgcccgcatga

SEQ ID NO: 94706 - DNA, 906 bp, Enterobacter aerogenes
atgaaatccattcgctttaccaatgccgaaatcaccatggcggggaatctgttcctgcccgagaatttcaacgaatccgcatgctatccagctattgtggtcgttcatccgagcggcggcgttaaagaacaaacgtcgggcctgtatgctgaaaaactggcgcgtcatggctacattaccctggcgtttgatgccgcttatcagggtgaaagtagcggggagcctcgtcagcttgaaaacccatacgaccgggtggaagatatcagcgcggctatagactatctggtggctcagcactgcgtcgatgagcagcgaatcggcgtcgttggcatctgcgctggcggcggctatgccattcacgccaccatgatggatcgccgaattaaagcacttggcaccgtcagcgccgttaactatggcgacatgtatcgccagggatgggaaggcaatcagcagcctgcatcatcccttgaacttctgcaaatggcagcggaacaacgtactgcggaggcaaaaggcgcagccactggctatctgcccaccaccccaaactccatggcggaggcgccaaacagagattttgcagaagcttatgaatactatcgcacgccacgggcaatgcatcgcaatgcgccgagtcggctcaccacccgcagccttgcgcaactggttacctacgatgccttcaaccacgccgatatttttctgactcagcccatgctggtaattgcgggcagcgaggcgggaacgcgctggatgacggaagagatttatcagcgagccgcaagccagaataaaaacctgcatatcgttaatggtgctacccatatcgccatgtatgaccagcctgaatatgtgtcggaagcgacaggcaaatttgtctctttcttcgcagaaaacctgtag

SEQ ID NO: 94707 - DNA, 756 bp, Enterobacter aerogenes
atgaaatatacccttatcaccggcgccagttcaggcatcggcaaagcccttagctatcagttcgcttcccgcggctacaacctgattatcaccgcccgacgcgaggacgaattgcagaaacttaaacaggatattgaaagccggtatgcggtgcaggtcatcgcaaaaccgtgcgatctggcgcaggaaggccaggcagaacacctgtatcgccagttggctgatttcgagcttgtcatgcttatcaataatgcagggtttggcgatttctccatgccctgggatatcgatttagcgaaagcgacccggatgctggatttaaatgttaaggccctgaccatgctctcccttctgtatacccgggattatgccgatcgggaggcgacgttgattaatgtgtcatccgtcggcggttattcactctttgatatcgccgttacctactgcgcgactaagttctttgtcgccgcatttaccgaggggttggcgcagaatctgcgtgaccagggcaaaaaaatgcgggcaaaagtgatcgcgccaggtccaacacagagtgaattcgttgctcattcttcagaccatggtggcatcagtggcgatggattgtttgccgaggactcatttattaccgcggaaaagctggcggaatacacatggcaactgtttgacagcgacagtacggtaggcatcgtcaatgccgaccgccagttgatgcttaagtcacccgtttatccttacattaacgtcccgcattaa

SEQ ID NO: 94708 - DNA, 939 bp, Enterobacter aerogenes
atgtctcatgaacaagccgtttcattccggcacaacagctggcaagttgccgccactctccgcttacctgagggatttgatgccagccagaaatacccggcgattgtttgcgcccatcctattagcagttgtaaagaacagacatccggcgcagtctacggccagaaactgactgaagcggggtttattactcttgctttcgatgcatctacccagggtgaaagcgggggtgaaccacgttttagcgaaaacccatccacccgcgtggaagactttcgctgcgcgatagactatctggtgactttagcctacgtggatgaagatcgtattggggttttaggcgtgtgtggtggtggtggatatgccgtcagcgccgctaccattgatcaccgtttcaaagccgttgccaccgtggttgccgccaattatgggcgcattatgcgtgagggggattccagtccggatgccgcgctcagaacgattgacgcgctgggtaaacagcgcactgctgaagctcggggggccgctgctcttgttgtcggttatattcctgacaatgcagaagcactggcgaatgcgcacatcaacgatatcgacatcattgaggcagttgattactacacgaccccgcgtgggcaaaagccaggctcgcctaacaaattgcgacttaccagcaccgcaccggccttaaactgggatgcttttgcctttacggaaaagctactgatacagccattacatattgttattggcgatgttcctggcggtttcggttcttatcgcgacggttatgaactttatcagcgtgcacgctccgttgagaagacactgcaggttgtgaaaggggtatctcactatgatctgtatgatcgtccggaagcgacggcacaagcgctgtcggagattattccattctttaataaacatttaggcacataa

SEQ ID NO: 94709 - DNA, 732 bp, Enterobacter aerogenes
atgagaggctttaggaaagggcggctgagcaacaacattctggacgattatattgcggtgccaggaaatgagaataatggctggaaggatgaattctataccaccctggcttctgacgacagggaccgtctgaaaaatgagataattaccgatcaggctggtctctgtgcctattgtgaaaaagcactcagagatgaaggtgacaacaaaccactaggatttaaagttgaacactttattcctgaaaacagcaaaactattaaagaaaagattgcagccgggcagcccgcacccaccactaactactcgctgttgtggactaatctgttggggtgttgctttggcggggaacacccgcgctcagcaagctatgataagtccctgacagatcgaactaatctgagctgtgatgtaccaaaatctaatcataactggtcggaattgatcctcgatccttctcaacagcctcctgacgatggtacatggtttgaattcgatgaagatggattgatgtatgtctccgcagattgcccgacccagtatgtgaataaagcccggcaatcaatagaaatgttgaatttaaattgtgtcagattaacccgtttacggctggcagcactggagtcacttagtactattagtgatgaagcggatatcgctgcattactcagcaaggatgctgcaggtatctacggtgagtttatctcgctgagaaagtggtatctggcttaa

SEQ ID NO: 94710 - DNA, 1626 bp, Enterobacter aerogenes
atgaatcggacggttagaaaaataaaaaacggtgctgatcatggtaattctctcaaagaccagtacaaaatgtttaagtattataaagaggggatgtttgttgaggtcgactctgaagagtcttcacgttatcgtcagatgtgtcttaataacctgaacgaatcacagtttcgtttaaaaagggtaaggctggtaaactataaaggctttaacgaactatcgattaatctggataacgatgttatcctgatcgccgcaaataatggctatggtaagacggggattctggaagcgatttatctctctctttcatggttttatcgactggtttatggttctaaccagggatggaagttcggtgataaatacatcaaccgccgagtcagtaatgccgggatgctagttaatctggaagtttcggtggggaataacaaaaattcctccgactatcagatcgacattgcccgctcccttggtgctttttcggttaaaagtgactatgctgattttaaagacttggctgaaatgtatatcgaatttcagaacagtggcattgtggcaccgatgtttgcttactactcagtagagcgaggtaagaattacccagatggtggattcgcatctgtgattgaaggcggttccagcaaactgttggacaaactttacccggactcttcactgacgctttcttctaacatttttgccaactttattaaatgggctgccgaaataaagattaaaaaaagcgtttctagcgaagatgaacaaagtgaaaaaatcaaaagtctcaaagagttcatctatcacatcagtcattctgatcttgacgaagaaataaaaaacacgctaattagccagaaagagaaggaagtcgaaatcatcttgagcagccaaccggcggataaattgaccaatcttgaccggatggaaaagattgtggatatgattttcgcactgggatgtgatttcattgatgatatttcttctatccagttaaaatacgatgaaaagctggatgcattagatcttgtatgtataaagcgagattgtgaaattagtgcttcctatctctctcatggtgagaagagcacgctttcattgttattcgatatcgctctgaagctgatctatacctgtggcaccgaagacccattcaacggtcacggaatcgtttttatagatgaggttgaattacacctgcatccctcatggcagcagtccctgctcagtaaattgaaaaaaaccttccctaatgtcaaaattattgccaccacccatagccctaatatcctgaatactgttgaagaacaggcgatcaggaaaattaaaatcaaggataatcgattttatattgaggttccgaccttttcatatggtgcaaaatcttctcaggtgcagagtgatatccaggatgttgcagcacggcccgatgtcgagccagtacaaaatcttacacgtttccgtgagatgatgaaaaacaatcagtacgacacaccagaagctcaggcgcttcttgagaaaattctgcaatggggtgatgatcatgacccggatgttaccaaactgaaaattgatctggaactcagaataaagcgtaatgccaaaaaggttagcaaggagcaataa

SEQ ID NO: 94711 - DNA, 933 bp, Enterobacter aerogenes
atgaaaatagagatcccatatcaggacatcggcattagcagaattaagcttgcatctagtgcacggcgaagtccgctaaagtataaagtctataaaatacccaagcgtcactctggagtcagagtaattgctcagcctaccccagaagtgaaagatctgcaacgcagactcgttgggtttcttcgtactcaactcacggtccatccatgcgccaccgcttacgagccggggaaaggcatcagggaaaacgcacagcagcatgtaaacaatcgttatctgttgaagatggatttttccaatttctttaacagcatcaagcctgagatgtttaaaaatgcgctgttgcatgattcagtggaaattgatgacagtactttaatgctgttgatcaacatctttttttggtgtccgggtaagaaactctcgggcaaactggtattaagtgtcggcgcaccatcatcaccgtttatttctaattatgtgatgaaaaaatttgaccagttgttgtcggaaatatgcgctaaggcgggtataacctacacccgttatgcggatgacatgaccttttcaactcagcgtgagaatgtgctgtttatgctcaaagagcaaattgccacactgctcgcacaatccggttatgaaaatatcaccatcaatgaaagcaaaactgtattttcatcgaaagcgcataatcgtcatgttactggtgtgactctgacgaatgacaaccaactgtcggttggccgaaaaaataaacgttatgcctcatcattgatcttcagatttaaactgggggaactcagtactgatgaaactctaacgttaaaaggcttacttgcacattatttccatattgagccgggatttaagctctcaatgaaaaaaaaatacggcatagcaattattaatgacatcgtcaattatcaggaataa

SEQ ID NO: 94712 - DNA, 561 bp, Enterobacter aerogenes
atgcctgtaaacgagaggattaacgcgacatccgggacacgtattaaacccggaggaatgaggcttataaccactggtgagattgggttagcaagaacgctattcagctacggtctccggtacaatacagtgtggattcatcgggaaagttatttgccattcaatctacagcctactgatattgctatgagccctaatggcgaaatgtggtttagggaagacacctactcccatgatttttcaatggaagttgatgtgcagaaaaaacatagattcatgcatgagttaatgcatgtatggcaagcgcagcacggaatgtttgtcagaaccagagggttgttctcccgatttgctgattacagttatagtttagacaaggaaaacatacgacattatagcttagaacagcaggcttcattagttagtgattactggttgttgcaagcttacggttttaaaaattatctgtatctgcctgcattacgagattatgatcataaagaatctgactatacattgcttcaaaaatataaattagttatgaagggatttccacaatga

SEQ ID NO: 94713 - DNA, 672 bp, Enterobacter aerogenes
atgctccgcccttcacaaccagtgcaaatctacagcatggaaatgtcggcggaacagctactgctgcggctggtttctctgattggccgcgtctcgcaaacccggctgcgcagcggcgatctcggtgatgacgactggcaacagataggtgtcagcgccagtatcctgatgaacgaatggaaagatcgtctgctgctcgacgattccgggatcctcaccccatctattttacgcagtcgggccaggagatcgctgcgccagtatgggcttccctcgctgatcgtggttgattacctgcaactgatgcgcagcggcggagcggagaatcgcaatcaggagatctcgacgatctcccgagcgctgaaagcgctggcgaaggaactcaactgcccggtactggcgctgtcgcagcttaaccgggcgctggaatcgcgccttaataaacgcccctgcaatgccgatctgcgcgattccggctctatagagcaggatgccgacgtgatcttattcctctatcgcgacgaactgtacgatcccaccacgctggatcgaggtatcgctgaagtcattgtcagcaaacagcgcaacggcccgattggcacagtacgaacccgctttatcagcgatcaaacccgcttcgaatcgctcagccagcagggagtcgggtcatga

SEQ ID NO: 94714 - DNA, 279 bp, Enterobacter aerogenes
atgcagaatctgccgtctccgctgcgccaggacgtgcttgatgacgcagctcaacgcgttgcccgtggcggcatacaaaacccactcgcctatctgctggcgacgctgcgcaaggctcagggcggtgagtttaatcagtatcgacgcggcaaagcagcggtgccggagtttgtaccgcctgtggtttcagagccggaaataccggcaaggccgcgccaaaagcgggatatcagtaagttagttgcggagattcgggcgcagtgtctggggagtggctga

SEQ ID NO: 94715 - DNA, 1806 bp, Enterobacter aerogenes
atggaacttattgattttttacgtcaaacccagaatgagattcgcaaggaatatcaggatcaaatggctcagccaggggttgagtcgccttttccggagctgatttttaccgatattgttatgcgtcatatggccgatatcggcatgacattcgatgatgccgagacgtgtcactttatggcgaaagtcagtggacacaatgtgcgtctcagcggttatgccttctcagaagatggcgatcaacttgacctttttgtcagtatttatcacggtagcgacgagctctgtcacgtcccggatgctgagacaaaagcgattgccggccactgcattcaatttttgcagaagtgcgttgacggtaaattatcatccacgctcgatcagtccaatgatgcctggcaactggtgacgaccatcgaacagtcctatgcggaactggagcaaatcagaatttatgtactgaccgatggtcaggtgaaaacccgctggtatcagtcacgggacgtggccggtaaaaccattaaattagaggttatggacattgtccgtttgtttaaccactggcaggaaggtaagccacgcgatgaactgcaggttaattttgatgaggtggctgggggggcgcttccctgtgtctggatcccggatgaaatgggtgagtacgattatgcgctgacggtggttccgggagagacactgcgatttatctatgaaaaatatggcaaccggattctggaagcgaacgttcgctcgtttctgagtcagacggggaaagtcaacaaggggattcgtgacactttacgtgagcagcctgagcgttttatggcttataacaacggcattgtgattgttgccgatcaggtcaggcttggtgaagcaccgggaggtggccctggtattgcgtggatgcaggggatgcagatcgtcaacggtgggcagacgacggcttccatgtttttcaccaaaaagaaatttccggcaaccaatctgcgtaacgtgcgtgtacccgcaaaagtaattgtgctgaaacagacgaataatgcacaagaagagatgttaattgcggatatttcgcgcttctcaaatagccagaataaagtcaatatttccgatctgtcagccaatcgaccagtacatgtacagctggaaaaaatggcaaacacggtgtattgcccggacggatacagtcgttggttttacgagcgagcaaatggcagttataaggttatgctggaacgagaaggtaaaacaccggcgggcattaaacggttaaaagacgcaattcctccatcccgtcggataacgaaaacggatttcgcaaaatatcactgtgcctggctccagcgtccggatttagtcagcctcggtgggcagaaaaactttgccgcattaatgacgatgattgacaaggatactgagcgttatggggatgaactgaacattgaaacttttaaaaattacatcgcacaggctattatttataaaaaagcctataagttgattaattcacttttccccgcatttaaggcgaatatcgccgcctatactgttgccgcctattcacatctttatggtaacaaaacggatctggcagagatctggaatcaacagggtatcgaggaaactatggggaatcgtcttgtcagcttggctcaccgagtaaatagccttctgactgaatcggcaaatggcaggatgatttctgaatgggcgaaaaagccggaatgctgggactacgtgcgcagtaaaatctatttctccgcacagggaaaaaaggatgacttctcgcatggtgaaattgcatga

SEQ ID NO: 94716 - DNA, 1029 bp, Enterobacter aerogenes
atggtgcggctgagtaaagacgatctgctggcggcctggaaagccttagatcgatctcagatagacgaactgcctggcgctcagggctggcgcgggattcggctttttacgcaccagggctgtagctttcatgccgggcgtcgtcagcctgataatgaagaaatgctgattgccgtgtttcctcatcctctttcgcctgggtcggcggcgctgccatcttgtaaaggattccgcgttgagatggccggaacagaggagggggggcagaacggtttgatgatccgtcgccagcaaacagggaatgtggatgtctttacgacgatgattctggatattctccattcgctcctgaacgtttcgaaaccgcgcctgtttgaaactctgcttcgtcggattcgtttatggcaggcgtttatggagcgcgatacccgtccactcagtcaagaagaagaagttgggttaatcggcgaattgacgtgtctggagcggttgctcgagagcggtcttgctccgtcaacggcagtcgaagcatggataggaccgcagcatgggctacaggattttgcactcgatgaacgcgccattgagataaaaagcactacggcagcgaagggtttttgcgtaactatccactctcttgaacaactggactggcagcgggcaggatcgcttgtattgtgtggtttgcgcttcagcgagcatcccaccggtgcaaccctgaatgacatcattagccgtcttcgtcaacggtttgaggaaaatgctacggcggcttgtatttttgagggatcactttgtcacgtcggatatttcactgaacatgccgaattctatacacgtcatttcttgctgacagaggcgttcgcactccccattgaagcggattttccctctttgacgcatgccaatgtcccgttgccggtggtgagtgcgcgctatcaactcgaactccagacacttattcctcaggcccaagattttaaccattgcttgtcagactttgcaggattaccgcatggaacttattga

SEQ ID NO: 94717 - DNA, 2859 bp, Enterobacter aerogenes
atgagtcttaatcccttggatgacacgcaactgagtgtattgcagattgtgcaaacgttcctgcaaagtcaggataaaagcacgatcacgcccggtattctgcgccaacatattgatatggtttgtcagatgaaacctgagtggagccgccttgatagtcgggagatcctggtcgaagagttgatccgccgttacagcatctggatgggagaagattcttctctgagtaatgacgaagggcatcaaccctggctgaccgctgatgcgaaacgcgagtggcgctactggcatcgatatcgccagtggcttggcaaaacgatgccttggggagtcctggatacccttgaccgttcaacggatcgtgttctgggattacttgagcaaccggggcgggaagggcgttgggaccgacgtgggctggtggtcggccatgttcagtcggggaagaccagccactataccggtctaatctgtaaagccgcggatgcgggatataagataatcattgtgctcgctggtttgcataacaacctccgctcgcagacccaaatgcgtcttgatgaaggatttcttggttacgagacgagcccactcagagaaaaagtgaccatcattggggtgggcgctattgatagcgatcctgtcattcgtcccaactacgtcactaaccgatctgaaaagggcgacttcagcgccggagtggctaagaatctggggatcagccccgagcaacggccctggctgttcgtagtaaagaaaaataagtctattttgaagcgcctgcatacctggattgagaaccatgttgccaccagcgttgaccccatcaccggaaagcgttttgtttcggaattaccgctgctgatgattgatgatgaagcggataacgcctcagttgatacgggggaaatcgtctacgatgacgatggaaaaccggatgctgaacatcagccaacggcaataaatagtctgattcgtaagctgttgatgcagtttagccgtaaggcgtatgtcggatataccgctacgccctttgccaatatttttattcacgagagcaatgaaacacgtgacgaaggtccggatttgttcccttccgcctttatcattaatctcggcgcaccctctaactacatcggccctgcgagggtatttgggcgggccaccgcggaaggccggagcggagagttgcctttgattaggcgagtgagtgatcactgtagcgatgacggaaaaagggggtggatgccggtttctcataagagttcgcactatcccacactggatacgttaactcatttcccggactcgttaaaacacgctatcgacagttttttactagcatgctgtgtcagagaattacgcggtcagggagagaaacacagttcgatgctggtccatgtgactcgcttcaataaggtgcaatcggttgtttatgaaaatattgatgcctacattcaggacgtgaggcagcgactgacgcgaaggattggacacgaaccttttttacatcagcttgagtcactctggcaggccgattttttgccgacgaatcaggcgatccgcgaagttatgccgcagcaggttccggacgacgccttcgaatggcaggagatcgtcgacaagctgtataccgtgatagaaaacgtgtcggtacgaatgataaacggaacggcgaaggatgcgcttgattattcggacagtgcgacaggcttaaaagtcattgcgattggcggagacaaactggctcgagggctaacgcttgagggattatgcactagttattttttacgcgcctcccgcatgtatgacacgttaatgcagatggggcgttggtttggttatcgccagggatatctggatgtatgccggctttataccaccgatgagctgattgaatggtttgagcacattgcggatgcgtcagaagagctgcgggaagagtttgacaatatggtcgccagcggcggcaccccacgtgatttcgggctaaaagtgaaatcacaccctgtgttaatggtgacctcgcccttaaaaatgcgtagcgcgcgttcactatggctctctttcagcggcacggtggtcgaaacgatttcgttgtttaaagaacaggagtatcacaagcataactacgtggctttccagcgtctaaccgggcgcgtcggtgctggcgcgccgatacctgagagacgacgcggagataagattgaaaaatggaatggggtcatttggcaaaatatctcccctgagccgatcatcgatttcttaacggaatatgagacccatgctcaggccagaaaagctaacagcaaactactggcggattttgttacgcggatgaatcgcgttgatgaactcacccaatggacggtggcggtgatagggggtggcatcgatcgccatcacgatgtttgcggcttttccgtaccgcttatgatgcgtaaagcgtctgaaggggtcactgatcgttattccattggccgtttactttccccacgcgatgaagggattgactgtgatgaatcaacttggcttgctgcgctggaagaaacgcagtgtatttttcatgccgatcccggacgcaatgaagggcgagaggagcccgtcgttccaggtggcgtggtactgcgtcggattaaaggatttggcattaacgacattccagcacagcgtcaaaaaggtttattgctcatttacttactggacccgcagcaggcattgtcggcagcggaatatcaggaagatgccttacctgtggtggcttttggcatcagttttccgggaagccgcagtggggtaacggtggagtacaaagtgaacaacgtactatgggagcaagagtatggtgcggctgagtaa

SEQ ID NO: 94718 - DNA, 1503 bp, Enterobacter aerogenes
atgacgaccatgcgccatgcgccaccgaatgcagccattatgatcgaagcgctgcgagggctcggttacaacactgccaccgcactggctgacatcatcgacaacagcattagtgccggtgcccgtaaggtcgatctgacctttcactggcgtgagtcggatagctatatcgtggttcgggataatggttgcggcatgtcggccgctgaactggatgttgcgatgcggctgggggtcaaaaacccgctgacaaagcgttcaggacacgatctgggccgcttcggtctgggactcaaaaccgcctccttttcgcaatgtcgccgtctgacggtcgcctccaaaaaagaggagataacgaccatcctgcggtgggatctggacattctcgccgccagtacggacgacggttggtatttgcttgaaggcgctgacccaggaagtcaggaggcgttagcaaatgaggaacctgactcccacggtacggtggtgctgtgggacgttttagaccgaattgtcacccccggctacggggagaaagatttcctcaatatgatggatggcgttgaacaacatctggcgatggtatttcaccgattccttgaggggaacgctccccgactcactctcaccctcaatggtcgcaaaattaaagcttgggatccctttctcagcgggcatccttccaagccctggcattcgccttcggcaatggcgccaggcgcacctgccgtgaaggtggagtgtcatgttctgccgcatcaggatcacctgacgacgcaggagtatcaacaggctcaaggaccggcaggctggacggcccagcaaggattttatgtataccggaatgagcgattgctggtggcgggcaactggcttggactcggaagtccccgggcctggacgaaagatgaaacccaccgccttgcgcgaatccgtctggatatccctaatgatgccgacatagactggaagattgatattcgtaagtcgatggcccgcccaccggtttcgctgcggccttggttaacccaactggcgcaatcaacgcgtgatcgtgcggtacggacatttgcaaaacgcgggaaaatgaataagcgcaagcccggcgaggaacttgttcagctctggcaagcacagaagacgccatccggtgttcgttatcagatttcgttacaacatcctgttatcagcaatgtcctttcgcaggccggtgagttatctccacaaattcaggccatgctaagactgattgaggaaaccgttccagttcagcaaatctggcttgatacggctgagacaaaagagacgccgcggacaggttttgaaactgcaccgcccgcagaggtgttgtccgtattgcaggtgatgtaccagactatggttggacagcaggcgatgtcaccggcgctggcgaaacagcacctgcaaaatatggaacccttcgataattatcccgaattaattgcactactccccgacgatcaacatgagaaatcgctatga

SEQ ID NO: 94719 - DNA, 2034 bp, Enterobacter aerogenes
atgcatcgcactatttctgagttttatcgcattccccctttacttattcgggcgctaaaaagcggaatttcctccgtggtggagtttcatctcaacaggggattacccaaagattcacgagattctctgggaaacagcccattgatgattgcggcccagtatggacatttcgctatttgcgaaatgttgttgagtgcgggtgttgatgttgaacatcaaaacaacctcgggcttcgcgctagtgaccttgcgcaggagcaaaaattgcgtgatctgttggcccgttatcgtcagcctctttcacttgccgaactggaacgctctgtggtttcagtcgaggactcagaaacagaggcagaattacccagcgctgaaatcccgatggattttatgctgtgggatgcagaagttgaattgaagcccgccgaagataatctgacgttaagacatgcttccgctgaagcccagcaattattatcacgctatcgcccgaaagataactctgctgagtggagcgatatcgaactcacgctccctgaaccactgacgccagtttctcactctccgcaaaattaccctcatctctcaacgttgctcattggcgcactggatacggggcgtatctctttgcgtgacatctggcatgccggggaagaggatttcggtatgcagtggcctgaattccggctcagcgtagaggcattgatcagggacttaccgctgattgtggatgacgatgatattattccgcctgacgctgctccggcgacattatcggtgagtgaacctcttgaaccctggtttgatgctttcaatgcattgcggcagttcggcatcgttgaaaactatctcgtggatatccgccagtgggatgtcgtggataaaacaaaagaagaacgactcggccagcgcatggatacggcgctaatcaatctgataagaatcctggcgggtttatccgaagcggaatatatgcagttgctgcagcccaattaccttccggagccagcgcctgagatttctgaagaggaagacgtcgcagaagaagcggatgaggaaatgcctcccgtatccgatgacgataacgatgacactatcagctttatcgagctgctcgttctgctgagaagtgggaaagcaggcgagtatcaggataatcatatcccccgcccggagtatgccgacctgcaacagatagttgagcgcgcccgaacgctcatccctgatgaaggtcataaaataagtctgtatgtcagcagttacagagaggcttgggaggggctgatccacgccaacttgcgtctggtcgtcaccatcgcgaataaatatcgcgggcggggattagatgtcgaggacctgatccaggaaggtaatctgggtttgatcaaggccgttgaaaaattcgactatcgacgcggatttaaattctccacgtatgccacctggtggatccgccagaagatcagccgcgcgattgccgatcaggcgcagctcatccgtttacccgttcacttctatgagcaattcaggcgctggcgaaacagtcgggatcaattgctgtatcgccaggggataacgcccacgatcaaacggctgcaagcattgtctgaccttccagaaaatcaactcaagcggatggcaaaatatgaagaacagacggtgttgattggcgattttcatgatgacgcccaggacagcgaagcggcgctgtcgggagacgcgatcctgaccggaaaggatttcaccagtgctcccgttcagtctctcgagctaagagagtgtgtttcattggtgctggaaacgttgttgccacgcgaaaaacagatcataaaaatgcgttttggcatcggtatgacgcaagatttcacgctggaagaggtgggtaaacagtttgatgtcacgcgagaaaggatacgtcagatagaagccaaagcgctccgtaagctccgctatcacagccgggcgtcgaaattaggcggcttcgtcgaacagtgggaaaccgcgttgagcgagatgcaggaagaagaagaatga

SEQ ID NO: 94720 - DNA, 231 bp, Enterobacter aerogenes
atgatgaataaccccataccggataccgcgcgcgatccgctgatgccggaaaacatcgcgcaaatcgcatgttatatggaaaaacaatacgacagcgcgtccgtctggtggaaccgcccggagacagttgtaacggcgaaaaatgaccctattttatggctgaatgacagcgaaaccacggagaaactgaccgatgacatcccggacacaccgccagctcgtgagcgttga

SEQ ID NO: 94721 - DNA, 684 bp, Enterobacter aerogenes
atgtccgagcatgtgccgccaggaccagtacgccgccccggagtactcggttggatagcattacttcccggcgtgctggtcggtttttgcctcggcgcgtggatgctggcgatagcgctggagtggctgggcgatgcgtttttctggaggaatatctgcgccagccacagtgagcaggtattgcaggcaacatggcagtggtggaaaggctctgctggcgcaccaatgtggttaataaaagatctggcgattgtcagcggtaaattgcaacaagggatcacgacgctgattgcttcgttcaacggtcaaagcgggttgttctggacagagatggtcactacggtgatccgctgcgtgttactgtctgcaggtaacgtcaccctcacctttttgctgcggctggcgattctgttgcaggcactgccgctatttgtgctgaccattaccattggccttgttgacgggctggcacgtcgcgacttacggcgattcggcgcaggccatgagtccggttttgtttatcaccacgccaagcgtatgatcggctctagtctggcgggaacgggattggtgtggttgacggtgccagtttttctggaaccaagatatattgtaatacctggggtgatgctgattggtttcgcgggttcagtagcgacgggagcattcaaaaagcatttgtaa

SEQ ID NO: 94722 - DNA, 312 bp, Enterobacter aerogenes
atgcaaaccatcacgacaattgtcatcagcctgtttataacaagctccgctctcgcctcccccctcatcgaacgcgaaaagctaactctgactctcaaccagcttaaccaaatcgaagcctcgctccaccgtgcccaacaaagcgccagagccggtatcaacgagcgctactacttcgactacccacgcatccacggcgatatcaccacgctgcgtagtgggattgaacattacctcacccccgctcgtgctcagccgcgagatacggcgacgctggtcgggcaataccgtgaggagaaaaccatgccatga

SEQ ID NO: 94723 - DNA, 1203 bp, Enterobacter aerogenes
atgatgtcggggctacattcatggcttttagataagtcaaccagtgacacctatatgttcatcaagcgcctgtcagccaacgatactggtgcgacgggcgggcatcaggttggcatttacataccttctggcattgttgagcatcttttcccttccattaatcatacaagggatcttaacccgtctgtgacgctgaatgcgcatacctcctcgcacagttgcccggacaccgaggccagggccgtttattacaatggtcgtttctttggtaagactcgaaatgaaaagcgtatcacccgatggggcggaggaaaaaatcctctgcaaaaccctgagaacacgggggcactagcgttactggcgtttgaccatcggcagggggcagatagtcagtttgtcgatatctgggtgtgctatgacgctgaagaagaagatattgttgagtcatcactcggagagattgttcccggttcgctagtctatggccccgcaaatgagattctgggcggcctggctttaaaagaacctgtctccagtgagtatcgtcttccggaagagtggagaacgcatttcccttctggtaaggagattatcgagtatgcagcagctcactattctccaaatgttgttggcccggataagcaactgattgaacgtcgtcgtgttgagtatgaaattttcctgctggtggaggaaatgcatgttctgggtataattcagtctgggtttggttcagtaaatgaatttattgcactggcgaattctgtgagcaacagacgaaaatcacgagccggaaaatcactggagctgcatcttgaacagctttttaatgagcatggactgacaacctttgagactcaggccgttacggaaggaaataagaagccagattttttattcccctctgcacaagcttatcatgatgaaatgtttcctgagcagaagcttcgtatgttggcagtaaaaacgacctgtaaagatcgctggcggcagatattaaatgaagccgacagaattcaggacatttacctctttactcttcaggaaggtgtttccgttgcgcaatttcaggagatgcagcaggaaagggtcaggttggttgtgcccagtagtcttcatgataagtacccgaaaactatccgggaatatcttatttcgttagaaacgtttatcgatgaaactaaagcattgtatgtcgattaa

SEQ ID NO: 94724 - DNA, 1425 bp, Enterobacter aerogenes
atgtctgaattcgatttatttgcgcaggagctgctcgaaaaagcagaagctgaagaaaaacaacaacaagagcgcgacaggaagctgattgatcgggtacttgaaatttacgaccagaagtatgtcgcagaactgctaagaaaaataggtaaaaatgagtggagccgcgaaacccttaaccgctggataaatggcaagtgtgagccaaaatcgcttaccatggctgaagaagcgctgttacggaaaatgctgccagagcaacccgctcatcatcctgactatgatttccgctttattgacctgtttgccggtattggtggtatccgtaaaggattcgaggccatcggcgggcaatgcgtttttaccagcgaatggaataaagaagcggtacgtacctacaaagcaaactggtacaacgatgaagaagcgcacacattcaatctggatatccgggaagttacattgagtggagaagaaggcatctctgaagagaaggcctacgctcatattgatcaacacatcccggatcatgacgtactgctggccggttttccctgccagccattcagtctggcaggtgtaagtaagaaaaactcgctcggacgcgcacatggatttgaatgtgaagcgcaagggactctgtttttcgatgtcgcccgtataatcaaggcgaagcaaccagccatttttgtgctggagaacgtgaaaaaccttaagagccatgacaaaggcaaaacgtttaaagtcattatggatacccttgatgaattaggctatgaagtcgctgatgccagtatcacagggaaagatgatcctaaaattattgatggtaaaaatttcctgccacaacatcgcgagcgtattgttctggtcggattccgccgtgaccttaatatccatcagggattcacattaaagaatattcataaattctacccagagaaaagacccacatttggtcagcttctggaccctgcggttgacagtaaatatattctgagccctaagttatgggaatatctctataactatgctaaaaagcatgctgccaaaggtaatggattcggttttggtctggttgatccaaataatgaaaacagcgtcgcgagaacattatccgctcgttaccataaagatggctctgaaattctcatcgacagaggatgggataaagaactcggcgaaatcgatttctctaatccagagaatcaggaacaaaggccaagaagactgacgcctcatgaatgcgccagactgatgggttttgagcaacccggtggcaaaccattccggatccccgtttccgacacccaggcctatcgccagttcgggaactcagtggtcgtacccgtttttgaagccgtggcgaaactgcttcaaccttatattatgaaagccgcagcaaacaaggcgaccaaaaaataa

SEQ ID NO: 94725 - DNA, 984 bp, Enterobacter aerogenes
atgactaaacaagactggcacccagccgacatcatcgccgccctgcataagtatggcagcagtctcgcgggaagcggggctggcctcttccacgctggcgaatgcgctttcacgtccctggccgaaaggcgaatggctgattgctcgcgcactcaacgttcaccctgcggaaatctggcccagccgttacgaggaagaaggcgaacagcggcaaccaaaaaatccgctccccgtcaggtgcaggctatgattattccagacaccaacctccacagtatctctacgccagttcaggttcagcaggccgccataccaccgccagcggagatgccgtttctcgcagctccagtgcgcaaccgctccaccttccactacgcccacttttcccgtcatgcccttctacgccctatagctcgtgaaacaggaagcaaaatctatctacaggaagaacccatctgcggtttttggtatctgaaccatggcgtcgtcggtttacatcacacgctggaaaacggcaaagaaatgctggtccgcgcctgccaacagggcgactggtttggctatctggggttgtttggttcggagttctaccactgccacgcctgtgttttgcagactgcatctctgtgccacgtcatttcgcattccaacagcgagttcctgcatcatttcccgcagtttgcccaatttctgttaaatcaggtggtggcaagtctgtctgatgcagagcatcgcatggcttggatagctcgttaccgaacccgtcatcgggtcctgagcagcctctggtatctgacgcggtattttcccagctatgactggacgtggcgtgaagtagccgagtctgcgggatgtgagacagaaaccgctttacggttcagtaaggaattgagactggcaagcatactggatgactcacagcgtcgcctgcacgtatgtcacccagaacaactggcaacactattggctggctctcataattag

SEQ ID NO: 94726 - DNA, 174 bp, Enterobacter aerogenes
atggcctggctggtttttccgggggatttttctaccttgccactcttcaaatcaggcaaagcaggtaccgccggtgcagttcctttcgccagcgccttccagtatccggcgagcggtctcggaattagtaattcagcgcatcgttttatcagttgttctttgctgatgctatag

SEQ ID NO: 94727 - DNA, 396 bp, Enterobacter aerogenes
atgtccgatcctttaactggtaccggcctgatttttggcggcggtttaattggttccgtcgtatatggcgttatcactcatacagattttggtgtggtgtttggtgcattcggcggggcggtgttttatgtggcaacgactgcaaacctgacgcgagggaagcaagtagcttacttcatgacatcgtttattgtcggtgtcctagccgctggactattaggatcaaaatttactacctggacaggctatacagaccgaccgttagatgcgctcggagcggtggtggcatctgctgtcaccatcaaggtcctgactttcattaacagccaggacctgagcagcctgttcggattactttcccgattaaaggggggaggttcgagtggtaataaatga

SEQ ID NO: 94728 - DNA, 405 bp, Enterobacter aerogenes
atgcagcgtgatattcaactggtattagaacgatggggaacctgggctattagtgaaggctctcaggttgactggtcaccaatcggggcaggatttaaaggtcttctgttaaatacgtcgaaatctcgtgaatcatgttgtgacaatgacgggctgatcgtcgatgcggcagtaggaatgcttaagcgagcagggcgggaagacgaattaaatctggtgatgttgcattacatgcataacgtttctaaatcgactattgcccggtgggaaaaatgttcagagggaaaaatacgcaaccgcttaatgattgccgaaacgtttattgatgcctgcatcattatgacgggggccagattagaaatggatgactggacccataaaagagaagtagagaaagttgcataa

SEQ ID NO: 94729 - DNA, 642 bp, Enterobacter aerogenes
atgtatgaccttatttattgtgatccgccgtgggaatacggcaaccgaatcagcaacggtgcagcctgtaatcattacagcacaatgggaattgatgagctgaagtgtctccctattcgtaagctggctgctgataacgctgtgttagcgatgtggtacaccggcacccataaccgagaggctgtagaactggctgaatcatggggtttccgggtcagaacgatgaaaggcttcacctgggtaaaactgaaccagaacgccgctgaccgcttcaataaagcactcagcggcggcgagctggtggacttcaatgatctgcttgaaatgcttgatcgtgaaacccgcatgaatggcggaaaccatacgagaagcaatacagaggatgtactgatagccaccaggggaaccgggttaattcgcgccagcgcttcggtaaaacaggttgttcatacctgccttggtgagcacagcgctaaaccgtgggaagtaaggaaccgactggagcaattatacggcgatgtgaaacggatagaactattcgctcgggaagaatggaaaggatgggaccgctggggaaatgaatgcaacaacagcgtcgaaattattaccggacaaattaaagaggtgaaccatgcagcgtga

SEQ ID NO: 94730 - DNA, 159 bp, Enterobacter aerogenes
atgattacatcgctactaatcatctatgcgtttatggctgggatgactgccgaatatacgcacaccaggttagaaaaaatatcctcatcaagaaacttctatttcacggccttcatctgcgggatttgctggccttatgtaatctggagagccaaataa

SEQ ID NO: 94731 - DNA, 645 bp, Enterobacter aerogenes
atgggtatttcaccgggggatgaagcagtgaagaaaccagccaggcaaaaagtgaaagtgtacaaacctaaaaaatgccctcagtgcggcgagactttcacaccagtacgcaacctgcaaaaagtatgcggtcctctttgtgctatcgcccacaaccgggcgctgaaagccaaaaaagcagaggcagaaagaaaggacaatctgaagatgcgcaaaaaggcgcttcagtctcgtggtgactttatcaagaaagcccagaccgctttcaatgcgtttattcgtgaacgtgatgaggggaagccgtgcccgtcctgcggaacgtatcaccccccgatgatcttcggtggtcagtgggattgcggtcacttcatgggggttggtgcccgccctgaactgcgctttgaagagaagaacgcatatcggcagtgcaaagcctgcaatggtggttcaggccgttttgcagcgaagaatgcgaccgttcacgctcgttaccgtgaaaccctgatccagtggttcgggttgtcgctggtggaatggctggaaggcccacacgaggcgaagcattacacaaaagaagacctggaagaaatagcggctaaataccgccgtaaaacccgcgaactgaaaaagcagagggcagcatga

SEQ ID NO: 94732 - DNA, 972 bp, Enterobacter aerogenes
atgaataccaaacaagctgctattggtcgctgggcggaaatatttaaacactatggtctccctggtatcaccgggaaaaaccatctcaagggggaatgtcctctgtgtgggcgtaccggaaaattccgctgcgacaataaaaacggcaccggctcatacatctgcgtgtgtggttcgggtgatggctgggccttgttgaccgctaagactggcaaagagtttaaggttctggcctcagaaatagaccgcctgatcggcaacgagtacacctcagaccgcaccagagtaaatccggtacgtacatcgctggcgcaacagcgtgaaaaggtcagtcgtaagtttgcaaagctcaccccgctacgcggaaccggggcagatagttacctgaaaggaaggggaattaattctctgccttctgagagcatccgattctgcgataagcagccagtagacgggaaaaacctgcaggctatttatgcactggcaactgatgaccgtggcgaactgtgttacctgcatcgcaccctcctggatggcgataaaaaggcgcaaacaggtggcgcagccaagaagatgatgaagctgcaggaagatagctatctggaatttgctaagtccgtcgctattcgaatgttccctacgtcctccacgctgggtattgcagaaggtatcgaaacggcgctggcctgccatcagatcactaagtgcaatacctgggcgacgatgaacacggcatttatgaagaagttccgtgttcctgctggcgtaaagaacctcattatttttgcagactcagattcaaacggcgctggtcatgccgccgcttttgaatgtgcagccgcgaatctccatgcaaagaacgatctggaaagcgtctctgttcgctggcctgcacagggggactttaacgatctgcttcttaacggttcagaagttttcgaatgggtatttcaccgggggatgaagcagtga

SEQ ID NO: 94733 - DNA, 1530 bp, Enterobacter aerogenes
atgcttaatatccaacctcgcgagaaacagatcgtagcgctcaacatgctgcgcagtgcatggaagcagaacaattcgttcatgctttatgctccggtaggttttggtaaaacagcaattgcagcactgatcactgacgggtttgttagccgcgagatgcgcgtaatgtttgtcgcgccttacaccgttctactagaccagaccgccgcacgattcatggaatatggtcttcctggtgaagagatcagttatgtatggcgcgatcacccgtcatataacccgaccgcactcattcagattgccagtgctgatacgcttattcgtcgtgaattcccggacaatatcgaccttctgatcgttgatgaagcccacctgaaacgcaaaaaactgctggaagttatcgacaaccttacccgcaatactgctacgaaggtgatcggtctgtccggtactccgttcgctaagttcctgggtaattattatcagcgcctaatcaaaccgacgacgatgaaagaactgatcgccatcggtgctttgagcaaatatgaattctatgcgccgtcgcatcctgatctttcgcaggtggaaacatcttacgtagctggctatggcagcgactacaaagaaggccagctcagcaaagtgatgagcgaagccaagctggttggcgatatcgtgaaaaactggcttgagaacggtgaagaccgcccgacgatttgtttctgcgttgatgtcgctcacgccaactatgtaacggttgaatttgccagtgccggggtgacggttgaagtcatgacggcaagcacaccccatgacgaacgccagctaacgatccgccgctttgagcagggcatcaccaaaatcatcattaacgtcggcgtattggtagctgggttcgatagtgatgttcgctgcatcatctttgcccgcccaaccaaaagcgaaatgcgctggattcagattctagggcgtggcctacgtgctgcccctggtaaagatcactgtctcatcttcgaccacacagggaccgttaataagctgggctatcccgacgatattgaatacgactatctcccttcatcctctgatggcatggaagacgcgccgcaaagagcagccaaaagcgaagaagccgaaaagttgccgaaagaatgcagccagtgccactacgtcaaacccgctggaatttacatctgcccgaaatgcggcttcaagccactggccggggaagatgttgaaactgacaaatcccgtgggctgaaaaaggtaagcaaagcggaagttaaatacaccgccgaacagaagcaatcctggtggtctcagattctattttaccagcgcacccgcgcagcgcagggacgcccggtcagtgatggctggtgtgcgcatacctacaaacaaaaattctctgtatggccacgggggctacatcacaccccgcagcaaatcacacctgaagtaacgaatttcatcaaatcaaagctgatcgcctttgcgaagagaaaagagaaacaaggagaagccgcatga

SEQ ID NO: 94734 - DNA, 276 bp, Enterobacter aerogenes
atgatttattcagacgctaacgaaaaatgggccccggtgccgattgagctttattcaaaagcctacgaagtaagcaatcttggacgggttcgcagcatcccacgtctggctaactctgaatattttattcgtcaaattcacggcggttttctgaaaggccgtatccgcaaagacggtaccaaaaccgttacgttgtcggttcagcgccagcgcgcgaagtttgtgattgccgaactggtggctatggctttcggggaggcaaatgctaatgcttaa

SEQ ID NO: 94735 - DNA, 471 bp, Enterobacter aerogenes
atggtagagcaaagtctcaaagaagttgtgaaagcaatgtgtaaggcatatccagggggacgcgaagcaatggctggcgctcttgggatgacagttactcagttcaataacaacctgtacgaaaaaaacgggtgccgcttctttgaggtcgcagaattggaagcgatggaagacatttccggtacgtcagaacttgccgactattttgcaaaaagacgcggtgcattgctggtggatgtacccaagctggaagagcttgatcaggtcgagcttttcaataaagccatgaaaacagctgctatgcgtggtcatgttgatcaggtcatcaatattgctttggaagacggggtcattgatgagtcagaggcagcagaaatccgtcattaccaccgaaaacacctctctgctcgtgaagaagaagtgaaatccatcctggctgtttttgggcggcgaaaaccgaagcgagagtag

SEQ ID NO: 94736 - DNA, 198 bp, Enterobacter aerogenes
atgaggaaatccgaagttattaattatttcggaggtgtctgtaaaaccgcattagctcttgggattaagcatccgtcagtatccgaatggccggaaataattcccgaagttagagcttatcaggttgaaaaaatcaccaacgggcgtttgaagtttgaccagtcgctttatcaaaattctactgattcagccgcgtaa

SEQ ID NO: 94737 - DNA, 654 bp, Enterobacter aerogenes
atgatgaacatgagcgaccgtatccgccaaaggcggaaagaacttaagttgacgcagcaggcactagcggagatggctggtgtgaatcgtgtcacggttacgggatgggaaaaggacgactatcaaccgaacggtgcaaaccttcagtcattagctaaggcgcttcaatgcgacccgctctggcttgtatcaggtaaaggcgatccaaaacctaagctcaacctgaagcctgaaatatttaatgtaaaagaagttccgctaatatcgtgggtgcaagccggttcgtggacaagaactgatccaggcattcgagctgacgatgcaaaggaatgggtttataccactgcattagtttctgatggtgcctttgctttgcgggtacgtggcgattcaatgacaaacccatcaggtgctccatcaataccagaggattcggtgatcatcgtagagccagatatcatggatattgaggctctgaatggaaaaatagttgtcgcgtatcttgatggtggtcatgaagcaactttgaaaaaatttgtcgaagactggcctcatagatatttggtaccactaaacccaaactacaaagccatagaatgtggtgaaaattgcacaatcgtaggtttggttaaacaagtcataatggatttctaa

SEQ ID NO: 94738 - DNA, 276 bp, Enterobacter aerogenes
atggaaaagtgggaaatgacagccttctgcccactctgtaagcaggtttttgttgctaaaaaatttcgatcccatctaaaccagcatcacgctgaagcatcagatgctgacaaatccaaagtagagaaaatggcgctaatagctcttaactcagtgaagagaaacctaaacgataagagtaaggagttaaaaagcgccacagacttggtaacctctcaccgaaacggatataccggaacggtaagtggtggtgctttcgggcaaggaaaaaagtaa

SEQ ID NO: 94739 - DNA, 204 bp, Enterobacter aerogenes
atgcatcagctcagcgaagtttttggacgagttaacagcgatggcaacgtagatctgcttgatattgagacgggcgaagcggtaacccgtttagatgccaatctctaccctgtaaatagtcagcttagtacccgttacgaacatgctgcaggtatcgtcatcactctcgaagacgccgaaaaaacaggaatcaacatcgagtag

SEQ ID NO: 94740 - DNA, 360 bp, Enterobacter aerogenes
atgtccgataccaaaaacaccacgccgtttagccagcagttggcgtacatcaacaaaggcactctcgatgccgagctgaccgaagcgctggcagaagtcatcaaagctgtacgtgaaacaggtaaaaaaggcgctgttacgctaacgctgaattgttccatgctgaatacgcgcgacgaaaacaccatgaaggtgacgccgaaagtctctcgcaccattccagaactggaccgcgctgataccatcatgttctctaccgctgacggcgatctgctgcgtgatgaccctgcgcaagttcagatggatttaaaagttatcgaccaagcaccacaagctgcgccaattaagctggcccagtaa

SEQ ID NO: 94741 - DNA, 813 bp, Enterobacter aerogenes
atgtctcaaattgaaggctctgccgtgcacgacattcgcgatctggttgctgcaactttgaaaacgaatactgatatcccatcagttgttgtgccggatggttttaaagttcaatcgctggaaacgcttcaggcatctccttcgcgtatccgccaggtcaccaacctgatttctcctggctctctgatcgcctatatccagcgcttccgggatgaacgttctgtagtttttgcggataaaaccaaaacgcgcatcgttgctgtactggactttcaccacgattcgcattacgccagttggggtgagcataaagcgatttatgactgcccttactctgatgactggaaagcgtggtctgggtcagacggtaataaaatgaatcagatcgacttcgccgaatttctggaaaataacatccagaacgtcgcgcctgttggcgataactactccggtccgtcaggtaccgagctattagagatggttctcgcattccaggaaacccggaaagttgagttcaagtcggttaagcgcctgcaggacggtacctgtcagttccagtacagcgatgacaaatccggctccggtaataccaaaatcccggaaaaaatcagcctggctatcgcgcctttccacaacggctcaccataccaagtcgatgcccgtattcgctaccgcctccgcgacggtcagttggttctttggtatgaactgattgagccgaaaaaggttatcgagcacgcattccaggagatcgttaccgatatggaaaaccagctcggtgaagacctgcctatttacgaaggttctatttaa

SEQ ID NO: 94742 - DNA, 861 bp, Enterobacter aerogenes
atgccaagcttaggccagctctataacgataaagacgccgggttaactacccgcaaaacctataacgtccctgtcgcttctatttatgcggaagaaggctacaacgtccgcgaacttaaccaggcgcatgttgaagaatttcgcgacgcattcattgccggggaatatatcccgccgctggcagtagaagttaccgagcgcggcgtgaaagtgatcgacggtcaccaccgttatcacggtgccctggccgctatcgcgctgggtcacgatattgtgcggcttgagtgcaaagattttgtcggtagtgaagcggataaaatcgccttcatggtgaccagctcgcaagggctggcgctgacgcctcttgaacgtggcgcggcatatcatcggctgcaaaatcaggggtggagcccttcagagattgcgacaaaggtgaagcgctcagagtccgatattctgcaacatctacagcttcatgaatgcaccccttacatcaaaaagctggtccgtgatggctcaatgaactatgccattgcgatcagcatctcccgtgagcatggcgtatacgcagaccgggaagcatcgcggttaatgaagaaagccgaagcggcgggtaagaaaaaagttaccaagagcattgctaaccctcagttcaatgcagggaaagcacgtaaattccttgagcttatcgcctcctgcgctgacagcaccggcgataacctgatcattgaagttccaccagcaatgcgagcagagctgatttctattcttcaggaattccaacacggtaatgctccagtcccaaccgagcatgagtcagaagatcagaatgatgcatcagaaagaagtgatgccgcatga

SEQ ID NO: 94743 - DNA, 129 bp, Enterobacter aerogenes
atggagtttgaaaattatagtcgccgcgctcttctctggttcgcggcatttgttgatttggtgggctggttactggtcatcgcagccagttgggccatctgtttactaattgagtggtggacggcatga

SEQ ID NO: 94744 - DNA, 486 bp, Enterobacter aerogenes
atgaacgtatacgaaatggaaggttttctgcgcggcaaatgcttaccaggtgatatcagggttaatgaatcaaacgctgaatacctggtgagaaaactcagcgcagtaagcgagctacaaggtgaagtaacggcgttagtagcgactctggaaaaaagccgcgaggtgtcatggtgtccagaaggggttgatctgcaggattgggttaagcggttggttaaagagagcctagcgctaagagatgccattactacgcatagtcaatcaatccacttctgtgagctttgtggaaaggatgacccgtgcagcaatgacgatgtttgttatgcgctgaatgaaacccccgccaccgaacgcattgtagccgaagctgaggcgcgtggagttgagaaagctatcaattgcattgtgcaaaccattacgcctaatcatgaaacgatactcaaagagttagcccagcagctgcgcgagggggccggcaaatga

SEQ ID NO: 94745 - DNA, 207 bp, Enterobacter aerogenes
atgatcaccggcaccacaaactacgacgatgttccaggtgttcgctgcactttatgcggaggctattacaaagccgatgatccgggaagtcacgaatgcgctgaagaagcgcaactccattacgaaattgaatgtgatatctgcggcttcaaaagtacagacgccgacggtgctcactactgctgcgaggataactctgatgactga

SEQ ID NO: 94746 - DNA, 294 bp, Enterobacter aerogenes
atgaccaaatcaaccataacggatgaacgtattacctcagtaatcgagcgtctggagcattttgccagtaatctcaagtggacagatgtacgtggagctcaagacctgctgactgccgctgatggcttacgtgagctacaggaacgccgcaaggtaaacgcagatttaacaatgtgggttaagcgattgggttattcactcaaaagagcgaaaccagatagcaagttacctggcgaagcaatgtcgtatttaagcgctaaagggattatcagcgtgggggatattttgcgatga

SEQ ID NO: 94747 - DNA, 654 bp, Enterobacter aerogenes
atgaccaagtcaaccataaccagagagcgcttgcaggaaatcgccgaagatggattcctgaagcatggtgaaagcaaagagttggcacgtatggcgctggccgcaatggacagcgagccggtggaggaaagtgtaacgtgctggtcttgcagaaatgaggttgagatttctgccattggtgatcgtgatgggtactgcccgatatgcgacgccccgattgatctcgatgaagaaccatataactcaccgcagccagcgccggtagcgccggaggaaatgccatgcggtggtgctgctaacgattatcacgacggatatcaggacggatggaacgcctgccgcgccgccatgctccaggctgaacctgtctgcacatgccccagcggcgatggctcgctgcgctggccatgcccggtgcatccaggcaactctccggtaattccggatggttacgtgatagtgccgaaggagccgactgagaaaatggttgttgaagggttcgagtcctggccagatgagttcttcagcgatgcagaggtgtgggaagcctatcaggaaatgagcggctgcgaacaagcagcgcaccgggcgaaattatgctgggcggccatgctcgctgccgttccaccagcgccgacacaggagaatatttaa

SEQ ID NO: 94748 - DNA, 558 bp, Enterobacter aerogenes
gtgaaccatttaatgattgaccttgaaacaatgggcaataaaccaaacgccccaatcgtctctatcggtgcggtattttttagcccctcaactggagaactcggggaagaattttaccgagtagtcagccttaaaagcgcggtagatggcggtgccgttcctgaccctgaaacaattatttggtggatgcagcaaagcgaagaggccagaaaggccatttgcgataaagaagcggctatgaaacttgttactgcattgtgcgatctaaattgcttcattcgtgataataccgatccagataaagtacaagtatgggggaatggtgcaacgtttgacaacgtcattctgcgttccagctatgaccgtgaatttatcccctgcatctggaaattttggaatgatcgcgatgtgcgaacaatcgtcgaattaggtcgggctattggcatcaatccacgtcgcgatattccatttgaaggtgatatgcataacgcgcttgctgatgccaaacaccaggctaaatatgtttcagcaatctggcagcgtttaattcctgcgtaa

SEQ ID NO: 94749 - DNA, 186 bp, Enterobacter aerogenes
atgactacgaatgattttatggcagagcaggaagtattcgacctgctcaaaaagaaaaaatctgccgtctggcgtctacgaaaagagcatggattccccgaccctgtcctcacctatccatctcgatatagtcgcaaagcagttatgaaatggatcgaaaacggcggcgttaacccagttgtttaa

SEQ ID NO: 94750 - DNA, 1170 bp, Enterobacter aerogenes
gtggccctcagtgataccaaacttcgcagcatcaatgccaagccttacagcggagctcccgaagtcacagacggtgacgggctgagtgtacgcataactcctaccggaacgattacattccagttccgctaccgttggaatggtaagcctgttcgtctatcaattggccgttacccagccatgtcgcttaaggatgctcgcgttgtcgtcggcgagatgcgcgaattgtacctcaagggactaaaccctaaaaattattttgccaaagaagatggggagttaacactcaaagagtgcctggatcagtggtggaagaagtatgtagaaaccctgaagccgaatactcagacgctgtacaaatctgttgtgtacaacactatgtacacagaattccccgacgctcctgtagtcaacatacctgtttccgcatgggtacggttcttcgataaacaggagaagaagaacggtaaaaaggcgagggtgctgcttctccagttacgatccgtgatgaactggtgtatcagccgacagttgatcccttcctgtgaagtcctgaagcttagtgttaagactatcggcaagaaacctgatgttggtagccgggttctcacttataccgagttggcaaaaatctggttggccctggagaacaacaagatcgttacctccaacaaggtgcttcatcagttgctattgctatggggggcgcggctgtcagaacttcgcctggctaccgccagtgagttcaacatggatgatctgatttggacaactccatcggagcattccaaaatggggaatgtgattcgcagacctattttcgaacaggtaaagcctttcattgataggctactaaattccgggaatgatgttctcttccccggccaggagctggacaaggcaatagatcgttcgtcagcaaatctctacatgaaaaagttaagggataaaattgatataccagagtggcgaacgcacgacttccggcggtcgctggtaacgaatttgtcaggggaaggggtcatgccccatgtcaccgaaaagatgctggggcatgagctgggaggggtgatggcggtgtataacaaacacgattggctggtggaacagaaagaagcgtatgagctttatgccgataaaatcttttggcatgttaaacaactgggttaa

SEQ ID NO: 94751 - DNA, 1752 bp, Enterobacter aerogenes
atgagattattggttcaggatattatagttcctagcattgggttgtgtactgatgagtcgttatattaccatgcaggagagcgggtttttgctgacttaaacagtaaagaaattcacgttcctaaaaatgcggtgattagttttgattccttctttaactctcttagtgtgaagaaatggaaagaaaacacaaccattgataatcttttagtgacatataaagttcgtgggaaaggttgcctttacatcaatcactttaacgatagtaaagatgaagttttagagcaaattattatcgataatgatgaaggggaagtgcaattttcactgagtggattacatactggctatatctacttaagatggcgagcatttgaagaaagcgtaattgaatccttttcattttatacctcttcaccttgtaaagacgtcaaactcgggttagttataacaacgtttaatcgtgaagaacaagttgttaagtcggtcaaacgtattcgtgatgaattgttaactgatccacgttatgtaaataaaatacaactatatttaattaacaatggtaatgatgttgatggtatcgattatcctgaagtaaatatagtcaaaaataaaaaccttggcggtgccggtgggttttctcgaggcttgtgtgagttgacggacgaaggcacttttacacattgtatatttatggatgatgatgcagcatgtgaaatcgattcaattcgacgtacatttgcacttctttctctgtctaatgatgataatctggctgtatcggctgctatgctctatgaagaaaggccaagaattgtgcatgaagccggtgctgtagttttctgcgatggtatttttcatcgcccggcaaagataggcttaaatgtctctgagcgctcaggtattattagttttgatgaagaagaggctttgggatatggagcctggtggttttatgcgtttaatataaagaatactaaatactatccattccctttctttgtccggggtgatgatatgctatttgggctaatgaacgataatcataagattatcactctcaatggcattgcatcctggcagatggatttcaatagaaaactgaacccgctagtcttttatcttagcttccgagctatgtttatgagttcctgccgaaaagttacctggcgtaatagaataatgctctcagcatttttcatgcgtgaagttataattctatcgatggctaatcgctatgaaagtgcgcaggctgttgtacaagcttataaagactgcatgagtgggatagatttttgggaaaacaatgtagattgcgctgaagtacgaaaaaagataaatcagcttactattaatgagagatttaatataccttcaagtgatttattaaaaattgaaacagattcttttttgtatataaaagaaaataagatacataaggccttaagatacttgacattaaatggccatcttattcctaaatatttctttaataaaagagctcgtttaatacctgaaacacacaaaaacccgactaatatggtgtttatgcgaaatgatgtttactatgtttcgcaaatgaatggttcagcaatgaaattgtcgcattcaaaagagaaatttttccgtgttgttttaaatgcaagtttacttagctttaacacgttattttccttaaagaaacgacttgagtcttatcagtctgaaattacccggttgacgactaaagatttttggaaaactaagttttaa

SEQ ID NO: 94752 - DNA, 549 bp, Enterobacter aerogenes
atgaaagagttcggtattactgctccactcgatcaggcaatgttcattgcccagatggggcatgagtccggaggctttacccggctggtggagaatctgaactatgcagcagagagccttgttcctacgttcggtaaacaccgcatcactgcccagcaggccgcagcactcggcagaacggcaacacaatcagctaatcagcgagcaatcgcaaatctggtctatggtggcgagtgggggaaaaagaaccttgggaatcaggttgctggtgacgggtggaaatatcgcgggcgcgggctgaagcaaatcacagggttaagcaactatcgaaaatgcggcctggcactaaaacgggatctggttacgcggccggaattgctggaacaggacgaaaatgcagcgcgttccgcagcgtggttctttgccgccagcggctgccttgtgtattccggcgatgtggaacgtatcacgatcatcattaacggcggtaaaaacggtcttgatgaccgccgtcgccgttttaatatggcaaaagccgtgctggtatga

SEQ ID NO: 94753 - DNA, 276 bp, Enterobacter aerogenes
atgggaattgaaatgattatcggcctggtggcagcggtgattgcagctatcgctggcgcttttggtttcggccatgcgcgtggcaccaataaagcggaagccaaagcagacaagaagcggaccgaagagaacgccgctgctaccgtcgccgcggcagaacggaaagaggaagccaccagagaggccagcgatgtacagcagactgttagccatatgcctgatgacgatgttgatcgtgagctgcgcgaaaagtttacccgccccggtggtggttga

SEQ ID NO: 94754 - DNA, 285 bp, Enterobacter aerogenes
atgaatgaccaattctatgaaactcatgcgcagatacttgcactaagaaacgcaatcgcttttatcgttcaaactttgcctgaggaacaaaaggaagttgttcttcgagcactatccatactttcaagtgtgaagttaatgcaaggcattgaactttcttcagcgagcgatatcacagagaaaactgctgataaaatgaacgatgcatatgaaggtatctttaaggtgattatcagtctttctactcaaaatgaagagcccgagcagaagcaatatttgcaatag

SEQ ID NO: 94755 - DNA, 213 bp, Enterobacter aerogenes
atggccggattaactaaagagcagcgtgccgaacgtgctgcagcaaaacttgcgaccgtgcaggttgacgccaatactcctgcacagcaggaacagcagctggtggcgatgattaccgatttcccggcattccccggcgctcctaataccgccaacgttcaccctgatgaagttgagaactggaaggcgcacggctggaaagaaatggagtga

SEQ ID NO: 94756 - DNA, 399 bp, Enterobacter aerogenes
atgcctacaggcatggccgattcagcaaatgttcagaaagctgcgttggctgacatgtggcaggcattaatggttaaagatggcaccaaaacactctgtgtgattactgtcttctcagtatcaacatgtgaagacaacatgcctattgaaaaaactaacctgaacattagttcttctaataattttcagcagacactgctgtataacgggcgtgttggtaacaaaattaacataggctaccgtgagtcgtcatctgatatggctagaccagctttcaacaacgatgttgaatatgacttatctgaatcgaaagttataggttataaaggtgccaaaattgaagttcttgaagctaccaaccagagcatccgatacaaagtaattagtaactttagataa

SEQ ID NO: 94757 - DNA, 474 bp, Enterobacter aerogenes
atggcagatatcctctacccacacgactatctcccaatgccactgcaggaaggctatgggttccagccagtcagtcctttgaaacgaactcaactcactactggccgcgcgcgacaacgcagggcgtatacctcgactcctacggaagcgactgtatcctggtttatggagagcgatgttcaggggctcacgtttgaatcgtggtaccgcgatgcgctctctgatggtgcagcctggttcatgatgaagttgcaaacccccgcaggcataaaattctacaaatgtcgttttacggatatctttcagggaccagtgctggtggctcctatctactggcggtattcggcgacgctggagttatgggagcgcccactattgcctccgccgtggggtaactaccccgagtggatcgccggtagttcactgcttgatatcgcattaaacagggagtggccaaagcatgacggtgcttaa

SEQ ID NO: 94758 - DNA, 549 bp, Enterobacter aerogenes
atgaaagagttcggtattactgctccactcgaccaggcaatgttcattgctcaatgcggtcatgaaagcctcggatttaacagggtggtggagaatttcaactacagcattgcggggcttgctgattttgtgcgttatggaaggttaacgcaggagcaggccaattccctcgggcgcccccaatcggaaaccgtgttgcctcttgaacgacaacgggcaatcgccaaccttgtgtatagcaagcgcttgggcaacaacggaccaaatgacggctggctataccgcggacgtggactcatccagattaccggtctgttgaattatcgggactgcggtggcggtcttaaagtcgatctggtggttcagccgcaactactggagcaggcgtcttatgcggctcgcagcgctgcctggttctattcgtcaaaaggttgtctgcgctatccgggcgatctggttcgggtcacgcagattatcaacggcggacagaatggcatcaacgatcgacgggttcgcttccttaaagccaaatcagtactggtggtgtaa

SEQ ID NO: 94759 - DNA, 225 bp, Enterobacter aerogenes
atgtacagcagactgttagccatatgcctgatgacgatgttgatcgggagctgcgcgaaaagtttacccgccccggtggtggttgatacggcctgcaactgggtacgaatcatctacctgaccgaccacgatattgacgtactggatatgcagaccaagcgcgacattctggcgcacaacaaatcagtgctggccaactgccagagcattacccctactcagtga

SEQ ID NO: 94760 - DNA, 267 bp, Enterobacter aerogenes
atggaggtttttgtgggattatctaaaaaagttaaagcattctttgaaggtgatgaggtgctggttaacgaaggtctgggcttcgaatcatcacttgaaaacatcaagttacttgcaaaagcatgcgagccgctcaaggcgatcatctcagattatgagaatggatcactcagccaggatcagttcattgcaaagagcatttcatgcatagcaaaggacttcatccagctccgtgagtataaagactcaatggacatgcagtggtga

SEQ ID NO: 94761 - DNA, 246 bp, Enterobacter aerogenes
atgtcagaaattacacctgcagaacagattcgactaaatctgctttccaccctgaactacgacactgcggccgctgctaaggcgattgagttcgttaaggatagtcagctcaaatatcagctattcatccagcagtacaaccgcgtgcatactgaatctgaagtggtggcacggaccatcaaagcgattcaggaagcaaccgaagcgatggcgctgtttgataccgccgctgagcagtcgagttaa

SEQ ID NO: 94762 - DNA, 1458 bp, Enterobacter aerogenes
atgcgggtaattattgatggcgttgagtatatacccgcagagaatcgaaacttaaaggttggaattgccataagcacccaccagcgctcagaggtattgaagcgagctattgagcagcacatgaagtatctgcccgccggcgcgctggtggttgtcatcgatgatggctccaaacctgctgcagtagttcccgatggcgtgcagctgctccggcatgaaacttctctgggtattgttgcctcgaagaacgccagcttatctgcgctgatggatgccgggtgtgaacatcttttcctgtgggatgatgatgcctggcctatcgctgatggctggcatcttccctacatcgaatcaccagagccgcacctggcataccagtttctcgatctggctggtcgaaataagctgaacgatgttgcggtgttgttccgtgatgataagcacatagcctataccgggcagcgtggagtcatgctttattaccaccgcagcgctgtcgagaaggttggtggattcgatccggtatacggccgcggtatgtacgaacacagcgacctcgccttgcggattcataatgctggcctcacgacgtgggcttacgctgatgtcgtcggttcagaaaagctgattcattctctcgatgaacatgaggccgtggagcgttcggtaccgcgtccagaccgacaggtgctggtggaacgtaacgtgaggatccacaacgaacggcgtgatgccgggtttaccgggtacgttgagtatcgacagcagcacgacgtcgttatcacaacgctgctcaccagccagccagacccgcagcgcggtaccaaactgacagcctcgcctgacatgttggctaaatgggcctcatcacttctgaattgtggccgtatcgcgctggtggatgaactgcattcggcaccggcagaagttgagttgtgctctgttgctgacgtgcagatgaatgtctacttccgacgctggctgcacatctggcagcatctgcgagatcaccctgaataccggttcgtctggtgtaccgatggtaccgatgtcgaaatgcttcgctcgccgtgggatgaaatggaacccggtaaggtttatgtcggttcagaaccgaaaacatacgctgacgcctgggcaaaacagaatcatcctgagcgcatctatcaggaattcatcgaacagcaccgcaacgatgtgatgcttaacgccgggctacttggcggcacgcgcgctgatgtgatggcgttcgctcacggcatcatccgtctttactaccggaccgagagttatcgtttctggaagaaagaacaggctggcgccgcggtgggtgacatgctggcgttcggtatcgtggcgaaatatttcggtgaccggatagtaaccggcccgcgcatccacaccgtgttcaagtctgaaggtatcggtaaggagtacgcctggtggaaacacaagtga

SEQ ID NO: 94763 - DNA, 588 bp, Enterobacter aerogenes
gtggaaacacaagtgaagtttgttgtggttggccaccacacccggataggacatgcgcaacgtcttgctgcgatgctggatgctcatctgcttattgatggcagaaaccacggcgcgaactggaatcaccgccgtgcacttgaatgggcttcctgccaaccctgccgggttgtagtgctggaagacgatgcgatgcctgttgctggtttcattgatctggtagtcgactggctcaaccgcttccccgaatccctggtgagcttctatctgggtactgggcgcccgccgcagtaccagatgcagattgccgaacggtttatagtggctgacaggatacgggcccaccacattacgctaccacgcctgattcatggtgtgtgctacagcgtaccgcatcagcatattgagcgcgtgttgtatcgatgggacagcagtaagcctgccgattatgccgtgggtgatgcttatggcggcgcggtggtctatccgtgttactcgctggtggatcatgccgacggtgaaccggtagagcatcaccccgactcagcgccacgcacagaacggcgcagagcatggaggttagcctga

SEQ ID NO: 94764 - DNA, 474 bp, Enterobacter aerogenes
atgtctggaccaccgaaaaccccgacacatctacgtttggtgaggggtaacccatcaaaacgcccgatcaatgagaacgaaccaaaacccgctgcaggggtacccccaacgccgaagcatttcgacaaacaggggaagtactggtttaagcggatggctgaagagctagatgcgattggtgtgatgtctcaactggatgccagagctcttgagttgctggttgaggcatataccgaatacagacaccactgcgacacgctcgaaattgagggatacacctaccggaccgaaacgcagagcggtgatgtgatgatcaaagctcacccggcggccatcatgaaagctgatgcctggaaacgtctgcgcgccatgctcggtgagttcggcatgacgccagcaagccgctctaaagtgaatgcaaaaggtcctgatgcggttgacccgctggccgagtttatgaaagcgagggattaa

SEQ ID NO: 94765 - DNA, 1737 bp, Enterobacter aerogenes
atggctaaggttgcagatggcatccgctacgccgagagggtggtggcgggggaaattattgcctgtgaatatgtgcgccttgcctgccagcgctttcttgacgatctggcacgcggcgaagagcgcggtattttcttcagtgagccgcgcgcgcagcacattctgaatttctataattttgtgcctcacgtcaaaggcgcactggctggccagcctattgaactgatggactggcatgttttcatcctgattaatatttttggttttgttatcccactggttaacgaagagacgggggaaaccgtcctgcgtaacgacggcagcggtcggccggtgatggttcggcgtttccgtacagcagatgttgaggtggcccgtaaaaatgccaaatcaacactttgctccggtgtgggtctctatatggctggcgctgacggagagggcggggcggaggtttattccgctgccaccacccgtgaccaggcgcgaattgtttttgaagacgcgaagaatatggttaagaaggcgaaagccactcttggccggatcttcgaattcaacaagctcgctatctaccaggagcaaacggcctccaaattcgagcctttatcatcagatgcgaacaacctcgacggcctgaacatccactgcgccatcgtcgacgagctgcatgctcataaaacccgtgacgtctgggacgttctggagacggccaccggcgctcgcctgcaatcactgctttttggtatcaccaccgccggctttaacaaagaaggcatctgctatgaactgcgcgattacgccatcaaggtgctgcgcggcctggttaaagacgatacgttttttgccatcatctacaccttagacgaaggtgacgatccctttgatgaaaaagtctggcagaaggcgaatccggggctgggtatctgtaagcgctgggatgacctgcgccgcctggctaaaaaggcgaaagagcaggtttcggccaggattaactttttcaccaaacacatgaatatctgggttactgctgagtcggcctggatggacatgatgaaatgggagaaatgcgagtttatcgctccgcagcatgaacttaaaacctatccctcctgggtgggcgttgacctttcaaacaaaattgatatctgtgcggccgctaaagtctggcgcgcgccaggtggccatgttcatgcagattttaaattctggctcccggaagggcgccttgagaaatgttcgcgtcagatggcagagctctatcgtaaatgggctgagatggacaagctgatccttaccgacggggatgtaatcgaccatgctcagattaaggaagagctacaagtttgggttgctggcgagagcctgaaagaaattggtttcgatccgtggagtgcgacgcagttcagccttgcgctggcagaagaagggctgccgctggtggaagtaccgcagacggttcgcaatttctctgaggcgatgaaagaggtcgaagcgctggtatacggtggccgcttccatcacagcgatcacccggtaatgaactggatgatgtccaacgtaaccgtaaaacctgaccggaacgagaacattttcccgaataaatccacaccagaggccaagattgatggcccggcggcattgttcacagcaatgagccgcgttctggttaacggtggcaatgaccagcaggatctttccggattcttcaataatcccatcatggtaggtttctga

SEQ ID NO: 94766 - DNA, 1305 bp, Enterobacter aerogenes
atgaaaaaaaacaaacagccaggcagggtgaaaagcgctctgcttaactggctcggtgtgcctatcagcctcactaccggcacgttctgggaggagtggtttggtaccagcagcagcggaaaggtggtaacggccgataaagccatccagctatcagctgtgtgggcatgcgtaaggctgttaagcgagtctatttcaacccttccgctgaagatatacgttaggcagcctgatggttcacggaaaccagcaaccgatcaccctgcctattcgatactgtgccgccgacccaattcagaaatgacaccgtcacgctttatgttgatggtggtcgccagtatttgcctgcgcgggaacgccttcattgagaagaaattcatcgcaaaccgcctggtttcgctggtgcctttgctgccgcagaacatggtggttaaacgtctcacgaccggggcgctggaatacaaatacactgaaaacggtaacgagagagtcattcccgtcaaaaacatcatgcacattcgcgggttcggtcttgacggtgtttgcggcatgatgccgatgaaaacaggccgggatgtgatcggttctgcaatggcggttgaagagtccgcggcgaagatattcgaacagggcctgcaaagttcagggtttctctcttctgataaagccctggatgatactcaacgtgaaaaacttcgcggttacatggcggcgtttacaggctcaaaaaacgccgggaaaatcatggtgcttgagggaggcttgacgtaccagggcgtaaccatgaacccggaagatgctcagatgctcgaaagccgcgcctttagcattgaggagatctgccgctggtttcgcgttccgcctttcatggtcggtcacaccacgaagcaaagtagctgggcatccagtctggagggcatgaacctccagttcctgacgcacaccctgcgccccctgctggtgaacatagagcaggaaataggacggtgcctgctggacagcgatgatgaggtgttcgcggagttctctgtagaaggactgctgcgcgccgacagcgcgggccgtgctgcgtactataccagcgcgctccagaatgggtggatgtcccgcaatgacgtgcgccgtcttgagaatatgccaccgattgaagggggtgatatttacaccgttcagctcaacctgacgcaactgaaaaatctcgaaagcagcaatcctgctgttcaggctctggctctgagagaactgcataaccacatattccctgatatttcctttgaacaatctccgctgaaacaggccgcttag

SEQ ID NO: 94767 - DNA, 849 bp, Enterobacter aerogenes
atgagcaaaaaacaacttccggcagcaccggcgggtcgcccctgcgcgcgagtcacctgtgagactttaccctcagccttggatcgctgggatggcgggatcaaagccgcgtccaccgacgacaacagtatttctgtttttgatgtgatcgggcaggactactggggtgaaggcgtaacagccaaacgtatcgccggtgcgctacgggcgatgaatggcgccgacgtcacggtcaatatcaactcccctggcggtgacatgttcgaaggcctggcaatctacaaccttttgcgagaatacgaaggccgtgtgacggtgaaggtgctcggtattgccgccagcgccgcctcagtcattgcgatggccggggatgatattcagatcggtcgtggtgccttcctgatgatccacaattgctgggtctacgcgatgggtaaccgccatgactttgcggaactggcacagtctctggagcccttcgataacgctatggcagacatctacgcggcgcgttccggccttgatatggcatctgttcagaaactgatggatgccgagagttatatcggtggcagtgacgctgtggcgaagggactggcagacagcctgctttctgctgatgcggtcagtgatggcgatgaatcacccgcggccgcgcttcgcaaacttgatgcgctgctggctaaaaccaacaccccgcgctctgagcgcagaaaactcattaaagccttatccggtggcatgcctggcgctgtcaccaccaacgacggtacgccgggcgctgccgaagatatcaaacctgaaaccattaattcacttgaaaacgcccttgcagcgttcgtcaaataa

SEQ ID NO: 94768 - DNA, 1209 bp, Enterobacter aerogenes
atgtctgaagtaaacgatattttgaaaaaagtcactgccagcattgaagaagcaactggcaagttcaatgcgaaagcagaagatgcactcaaagaagcgcagaaagccgggtcgctgtctgaagaaaccaaagcatccgtcgataaaatggcgtcagagttcaatgcactgcgtgaagcggaaaaaacgctgaaagcggctgttggtgatctggagcagcatgttgcgcaaatgccgctggctaacgcgaagaaggtggtcgagtcagtaggccaacaggtgatctctgctgaagcattgaaaacattcgcttccagcattgatggtggaaagcgtgtcagcatcccggttaaagcagcaaccatttccactgatattcctgatggtgtggttgaaccacagcgactgcctggcattgataccgcgccgaaacagcgactgtttatccgcgatctcattgcgccaggccgcacttcatccccggcaattttctgggtgcagcagaccggatttaccaacaatgccgcggtggtgcctgagaacacgcagaaaccgtacagcgacattcagtttgcaacgaagatcacaccagtgaccaccgtcgcgcatctgtttaaggcatccaagcagatcctggacgatttcgcacagttgcagtccaccattgacgctgaaatgcgttatggactgaagttcgttgaagagcaggaaattctctttggcgatggcactggcgcccatcttgacgggattgtcccgcaggcttctgcattcaatccggctttccaggttgagcagcagaacggcattgacgatctccgtcttgcaatgctgcaggcgcaactggcacgtttccctgcatctggtcacgtcctgcactttattgactgggcgaaaatcgaacttaccaaagacagccttggtcgctacattctggcgaacccggcggcgctgactggccctactctgtgggggctgccggtggtagcgaccgaggccgctcagttcctgggtaaattcctgaccggggcattcaatgcaggtgcgcaaatcttcgatcgtgaagaaacgaatgtggtcatctctacagaaaacgccgatgacttcgagaaaaacatgatcaccattcgctgtgaagaacgtctggcactggcagttaaacgtcctgaagcattcgtcttcggttccttctccggtgccggtagctaa

SEQ ID NO: 94769 - DNA, 327 bp, Enterobacter aerogenes
atgttagatatcggaattgttaaagagcactgtcgcgttgattccgattttaccggcgatgatgctctgctgaatttatatacgggcgcggcagcgcgatatgtcgagacctggacccggcgaaagttgtatgagtcggaagaaagtcctggctacgcagaggatgaagattcaattctgcctggtgatgatgtgaaggcggcaatgctgctgcttatcggacactggtatgcaaatcgcgaaacggtttccgttggccagactgtggcagaagttcctttcgccgttgaggcattgcttcagccatatcgaatttacggggtgtaa

SEQ ID NO: 94770 - DNA, 198 bp, Enterobacter aerogenes
atgaacgagcaactggtaaacgcgctgatagcagcgctgagagaacaaacagcagcacagcgagagcagacggaagcgataaaccgcctggctgagtctaacgtcgccctgtccgatgtgattatccagtcgcttgctggcgatctcgatgaggcatcagagcagcaaacctatctgagcgggaaacccagggggtga

SEQ ID NO: 94771 - DNA, 333 bp, Enterobacter aerogenes
atgcaggccggaaaattacgtcacaggatcaccctgcaggagccggtaaaagaacagaacccgacaacgggagccgtaattaatacctggcgcgatgtcgcaaccctttgggccgaagtcgctgctttatccgcacgtgagtttattgcggcccaggcctctcagggcgaggttaccacccggataacgattcgttaccgtgatggcgtcacccggaaacatcggatcctgtttcgtggccgaatctacaacattgagggcgttttacctgacccccggagcggcagggaatacctgacactgccttgttcagagggggctaatgatggctga

SEQ ID NO: 94772 - DNA, 543 bp, Enterobacter aerogenes
atgatggctgatggtgtagaagtaaacctgaccggcctcgattccgtcctcggaaaactggatgccgtctcacaggccactcgcgataaatccggtcgtgcagcgctacgtaaagcggcgaacgtcatcagggacagagcgcgcaataatgccgcgcgggttgatgaccctctcaccaaagaggccatctacaaaaacattgtggtcagcttcagcagcaaggcgtttcgcagaaccggcgatccaacgtttcgtgtcggggtgatgggcggcgccaggcaatacgccaatacaaaggctaacgtccgaaaaggcagggcgggtaaaagttataaaactgccggagataaaggtaatcccggcggggatacctggtactggcggttcctggagttcggcacagagcatgcagcagcaaagcctattttgcggccggcaatcaatggtgttgataccgacgtaattaatattttcgcagcggagctggaaaagtccattgatcgcgctgtgagacgggctgctaaaaaaggaactccggtatga

SEQ ID NO: 94773 - DNA, 366 bp, Enterobacter aerogenes
atgattgctccaatatttgcagtttgcgcagccagccaggcagtcagggatttgttaggttctaatcccgtgcggctttatccgttcggtatgcaggacgatattatcgtttacccctatgcagtctggcaaaacataggcggcaaccctgaaaattaccttaaccagcgtcctgatgctgatcgctattcactccaggttgatgtttatggcgataccgatattgacgtgatcgcagtttcccgcgctttgcgtgatgccattgagggtaatgctcacatcaccagatggggggggcaaagtcgcgagcctgaaaccggaaaataccgatattccttcgatattgactggatagtccaacgttaa

SEQ ID NO: 94774 - DNA, 354 bp, Enterobacter aerogenes
atgcaacttacactcgacaccttgaaaaaaacaggtgcctttaccgggcgcccagtagaaaaagaaattgattggaaaggccgtgacgggaaagagcacaaagctaccgtttatgtgcgaccgatgggttaccattcgactaaagccgatcttctggcaataaagggaaaatcagatccggtcgccgggcgtattgctgcacatatctgcgacgagcttggcaaaccgatatttacagaagaggatattcttggcaccgccgctgaagatcgtggtgctcttgacggaccgatagtgattgctcttttagcagtcattcaggaagtcaatgaactgggaaagactacgagctaa

SEQ ID NO: 94775 - DNA, 468 bp, Enterobacter aerogenes
atgaagacttcagggcaactgttatcacttattggcattgttttagctatatactcactattctttatggatgtaagtgttgatgttggtgatggtacgcgagtaaataatattggcttaatggcccagcaacaaaactatcttttagttgcagtggtactattcattgctggtatttttatatcttttacgagaaaaaataaaaaattaccagaggctgatttttctaagattgaatacttatcatcagaagatttcatttctgaaaaaaatggtaagattgttcttaatgtaatggctatagataatttttcgctgatgcttttgaaaaagcatggttcaagtagcattaatgatattctattcatgaatatgcctttgattgataggctagagaaaggtcttcctgaagtaattaggaaagattttaggtcgaccttgaaaaataggttaaaggaaaatgtttaa

SEQ ID NO: 94776 - DNA, 2436 bp, Enterobacter aerogenes
atggctggcaggtcattaggaactcttaccattgacttgattgcaaaagttggcggatttgtttctggaatggataaggctgagcgtgcatctgccaaatggagtaaacaagtccaggaggatgccgcggcttctagcgcagctcttgcaggagttggtgccgcagccataaccgcaggtcttgcagtcggtacagctgggtttcaattgttgaaaactacagctaagcaaattaccgaaaccgaccgttgggctaagtcattaaatatatccacccaggaacttttatcttggcaatttgcagcagaaaaggccggtgtttcaggtgaccagattgctgatattttcaaagatattggtgataagattggggacgcagtcttaaataaatctggggaggctgttgatgcattgaattcactaggtctttcagcagaaaaactatcaaaggtaagtgctgataaacagctttttgcaattggtgatgcacttagtaaaatcggcactaatgcagaaaagaccactatccttgaaagtctaggtaatgacctatcaaagttattaccattatttgataataacaatgaaaaactaaagcagtttattgagctagctaaagattatggtgtagctcctgacccttcatcgattgacgacttggtgaaagttaatcaattatttgaggatatggaagcccaagtagcgggtcttaaaatggagatagcttctgggttggcaaatgttgacctttcaccactgcagaactctctcgataagcttcatgatgtgctaactgatcctgttgttctacagggaatctcagacctcgtgtccgaagtggctcaattggccgggtggctcgttaaggctgctgctggtgctggccaactagcggcaagtactggtaaccggtttgctgcactgagtggcaaaattgatttgtctaatattgatcagataaatgagagaattaattatctgcaaaaaaaccttgagggtaggaaaagtatttactctcaggataaatccatgttcggttggatcactggcgttgatgatagcgttaaggctcttaatgatgaattgaatacgcttattgcggctagagataagttatctaaatcttctaccggaacacttcctcttggccatgctagtgttggtgttgttaatccgtatgctctacctcccggaggtaccaatgggaaacctcagtcggtatcttcaccaagagcaccagtagataaaattctaagtgcttacaaaagtgtagaacaaagttatcttcgccagattgcacttaccgatcaacttagcggtaaaactaaagacgttactgaacttgagaaactacgctttgatgtttcatcaggaaaactagctggtataaatcaggaacaacgaattaggttagaaagtcttgcatctgaaattgataaatttaagttattggaaaaatatcggggccttcagcaagagttgctcactccggaagaaaggcttcttgaattaaccaaggggcgcatcaagcttttagaggatgcaaaaaaatctgggctaaccaatgacgatgaatatacaaaagctgccaaggctatttctaataatgcttttgaaaatgctcctgagttttcaggtatcgatcctctatttggtggacaaagtggagaactgcgcaaagtagacaaggctcagaaagagttagaggaatggtattctaaccaactcagtctacttgatgagtataggcagtcacagtctgaccttaatgaggaatgggacgcaaaagagcttgaaattaagaaaaagcatgatgaaagtctccaggaacttaatgaacagcgcaatcagttaatgcttagcagcatcagcgatggcttggggtcaatggttgatttaacaaaacaggcttttggagaacaatcagcagtttataaagctgcatttgtggcacaaaaagctgttgcgattgctcaatctatgatcgctattcagcaaggtattgctatggcatcagctaatccattcccatataacctagccgcgatggcatctgttgctgctgctacagcaggtattgtttcaaatatatctgcaataggcatggcccacgatggaatagattcagtaccccaaaccggtacttggattcttcaaaaaggagagcgtgtaaccaccgcgaaaacgagcgcgaaactggatgccactctggaccgggtaagcaaagactctacaggcgggaaattgcccgatgtacatatcagtacaacagtaaatggcgatcctgaccagagaactctggctttgttgaaggaaacgcagaagcaagcggtacaggaagctctgaatgtgagcgcaaatcagatagctacaggaaccgggaaaatcggcaaggccatgggctatggttggaatgccgggaggaagttaacctga

SEQ ID NO: 94777 - DNA, 483 bp, Enterobacter aerogenes
atgacggtgcttaaccggctttatgccagtagcggatcggaagtcatcattgaaacgctacaaatcaatatcggttcgacggtgcattatttctgcaagggctacgacgatattacagccacgacagaaaatggcgacgttattaccttttctgctgcggctatcgatatcgccatcccggccagaaacagcgacggtacacaggatttgcagttcgctgttagtaacataaaaggggaggcgagtacggcgattcgcgatgccctggcagcgagacaagatggctctatgacctacaggcaatatatctcaacagatttgaatgcgccggcttctgtaccctacacgctggctatcaaatcgggctcctggacggcgttgcaggcgcaaatcaccgcgggctatatgaatattctcgatactgcatggccgagattccgttacacccttaacgaatatcccggcctccgttacatgagttga

SEQ ID NO: 94778 - DNA, 381 bp, Enterobacter aerogenes
atgttcaatcctgataaataccgttcagtcacctggctgaagggcggaagagtgtatccgcagctcgactgctttggcatcgtgaatgagatacgacgcgaccttggattacccgaatggccagattttgccggagtgaccaaggatgataacgggcttgaccgcgaggcgagaaaactaatgcttcgcctcgaacgctgcgagccttgcgaaggtgcaggggtggcttgttactctggttcgacggtgacgcacgttgctgttgtagtgaaaataaatggcgagttgatggttgcagagtgcggaagtgccactaatgtgacatttctaccactgacccgttttaagcgtcgttatgtccgagtggagttttggaagtga

SEQ ID NO: 94779 - DNA, 891 bp, Enterobacter aerogenes
atgaatgttgttgctctaatcgtcacttataatcggttagataagttaaaaacaacaattgaggcaacgctggcgttgccttttcaatatatagttgtggttaacaatgcgtcaactgatgatacacaatcctatcttgattctttttgtgatgaacggataaaagttttacatcgcgaggtaaacagtggtggggctggcggttttaaatacggagcgcgatggataaccgaaaacctgagcagtgattgggttcttttttacgatgatgatgcttacccacatactgatttttatgataatttaattagatggcaagtgcagcaaggaacggtgtactgctgtaaggtattagatacagaaaataatctttgcaagatgaatatgccatggaaaaaatatccacatgggattcttgagaacattgcctatctacgacagcctgaaaaattcattccgaatggtcaatccaaagaaaacgtatcgagtgtatcatttgtaggaatgctaatcgatattaaactgctaagctcgtcaattgattatatttatgatgatttatttatctattttgacgatgtttattttagctataacttaaggctcaatgctataccaataatatatgttcctgagttgatcataatacatgatgttgataccaggactatgcctatgtcctattggaaattgtattatttagtaagaaatctaattctttcgagagtactgttcccaaaaaaagcgccattctcggggattgatattttattaagagtgttaaagtatttcttgataggaatcaaaaatccagaccctaaaaaagccattggtggtataataaaagggattagtgatggagttaaaggacgcagaggtcaaggtatttaa

SEQ ID NO: 94780 - DNA, 249 bp, Enterobacter aerogenes
  misc_feature (211)..(220): n is a, c, g, or t
atgacaaccgttattgaattttgcaatgtaaccaaagagtaccccctttatcatcatattggctctggcattaaagatttattttttcaccctcgtcgggcctttaacttacttaaagggcgtaaatatctggcgattgaaaacgtatcattcagtgtgaataaaggtgagtctgtcgcattgattggtaggaatggagccggtaaaagtnnnnnnnnnnggttttcatccggaacttactggccgtga

SEQ ID NO: 94781 - DNA, 573 bp, Enterobacter aerogenes
atgatagtgccagctctccttcctgcccgcttcctgcgtcagcagagccagcggctgaaaacttcccggatagtacacgtactcgcgcatactgccgaacagcgcggcctgcgctttctgccgctgcagccggctgccggtatcaaaaatgctctgtgccgccagcggttcgcgggtgacggttaccgtttcccccgccagcgcgtcgccctgccagtagaaccagcgcgtctcttccgccgtctgcttgaacaccaggcgctcgcccttgcgcaccgccaccagctggcggttatcgccccagctaaaatcctctttctctccgttatgccggacatcgcgccgctgtcgcagctcgcccgcgcgatcgaatacataacgcaccccgcgctgcagcccctcgcggaaccagcccccgacgctctcattcaccgcccgggtctgcgtctgcaggtggctgcccgccgcatcctacacaaactgccgcagcgtaccgtccggcgcggtatgggccgtcaaacgccccaccggatcgtaagcgtaacgattgctgccccacaggctgttatttaa

SEQ ID NO: 94782 - DNA, 612 bp, Enterobacter aerogenes; identical to SEQ ID NO: 94343

SEQ ID NO: 94783 - DNA, 570 bp, Enterobacter aerogenes
atgactattgatagctcattacaaaatttcattgagacatttcagaagagcaaaagaagtatgggtgtaatgtcctactctgaagaaaatttaggctgctcgaaccatgatattcctttacatggggatatgttgtatttttatgaacatactatccttgaagataaacccacctttggtggcgattttttcattcagataattgaaatgtatgacttaggcaatatacagtcaggctggcttataccaaatggaacaaatgattgggataagaactatgtaatctttgcagaacgtaatggcgacgttctgttttgtgatgtattagacgataattcagccgtatatggaagtgtgcaaaaaaaagtatataaattaactaacacactaggggactttttggatacatattccgctctgattgaattagaagagagcgaatttgaatgtgataccacggatgatgattttaattataaaaatgaatatttgcttagggtgaaggaagttctaagtaataatcttccaactgaattggtagataattatatgtgttttttctttggctag

SEQ ID NO: 94784 - DNA, 1536 bp, Enterobacter aerogenes
atgattaacggaggcattgatcctacctggccggggttctcacccaggacgatgattgattaccaagcgaccgggattaacgacaacaatagctggatgggcccgtttctcgcctgcccggataatgaggtggtaaatgcatttgaagtgaatttttcattcccttccggcatttgcggtttcggaaaatccggtggcaagaattaccgtaacgttgattatgaaattcagtaccgcgtatatggttctggttcgggctgggtgagcaaaaccggacggtaccggatgaagaacattaatgccctggggtttacggaaagagtggagctcagctcgcctggactggttgaggttcgttgccgacggcgtaatgaacagggaagtaaaaactccagggactctatgtactggcaggggctgcgcggcaggttactgacacgccctgcatcatatgccggtgtatcgttaatggccgtgacggtggaatctggcggcaaactggcggcgcagtctgatcggcgcgttaacgttgtggccacgcgtatttatgataacggcgctccgcggcgaatctccagcgcgctgtttcatgtcggtaattctcttggcctggcgatggacaccgaagccattaacaccctcgaggcaacctactggaccccgcggggagagtattttgatttcgctactggcgacagtatctcggcactggaaatgctgcagaagatcaccacggcggggaaatcgtacttcctgctgagtgacgggctcgcatctgtaggcagggaagggattaaaaactggtccggcattatcagcccgcatgaaatgaccgaagagttacagaccactttctcggcgccgtccgccgatgattacgatggtgtggatgtcacttatattaatggcacgacgtggtcagaagaaacggtgcaatgccggactccggataaccccacaccgaggaaaattgagagttataccctcgatggggtgcttgacccgaaccgcgcctatcaaatcggcatgcgccgcctgatgaaatacctctatcagcggcttggccataacacgacgacagagctggatgcgctggtctatcagtatggcgatcgcattctgctaacggatgatattccgggaaataaaacggtaagtagcctggttatggatatggccataattggcggtcaaacggtatttaccgtctccgaaccgctggactggtcatttgaaaacccgcgcgcaattctgcgttaccaggatggttcggcctccgggctgctggaagctacctacgttggggattatcagttgtccgttccgtggcaggctgcttttgatgaaattctgctggacgatccgagcattgagccaccgcggctggtgttctgcagcacaacgcgcagtgtttatgacgccatttttgaggagattgccccgcaggcggacggaacctgccaggtgacgacaagacaatacagcgacattttctaccagtacgacgacgccccataccccggcagcgtctcttaa

SEQ ID NO: 94785 - DNA, 495 bp, Enterobacter aerogenes
atgaaaatggataaaaaacaattaattgtctctttaatgaaaagagaaattgatatctcaaaattttataatgatttcaatgcattttacggtgaacttaacatatgctatgaacttgaattagctcgtcaaaatagagatgctgaattagttgatgtttttttatatttgtcagctcttattaattatgattttaagtgtatagatttattgaatgaattgataatagctgattggcataaaaaacatgaggatttagcaacgattctaaattactatcatagtgagactagtgttgaatacttatatcaagcggcgttgttagaactaaattatagagactatgatgaggattatgttctggcagataaatgtattagggcgctagccaaaataaacaataaaaactcaatcgaaaaattggaaaaattggctatggtagaaaatgaaaaaataaaaaaaagcgcaatgaaacaattaagtaaaattagttga

SEQ ID NO: 94786 - DNA, 600 bp, Enterobacter aerogenes
atggaaaagcatttaccaaagtactcaatcccagaacggcaaattagagccttcttcacaaaagattttatccgtgtctatcaggcatattccgatgaaatagctgatagtgcgattaaaaacaatacgttcgtttctcccccatttagcctgactagaatgacatggattaagccatcatttttatggatgatgtatcgctctggctgggggaaaaaagacagcaatcagacgagaatattagctatagacttgagtcatgacgcattccaaaaaattcttcatttaggggtgccaagtgattatcattcagcatcaacctttcaaaataaagaagaatggcaagataaaataaagaattcagatattatatttcagtgggatcctgagagagatattcatctaaataaacttaattaccgtacaatacaaattggaattcgaaaccaagcagtcattaatttttgtaatgaatggattgttaatctacatgatatcacccatcaggtacaggagattcacaacctcgtctctttaggcgatttttgcaaggcgaaaacgcttatccctacagaaaaaacatatcatttccaactttaa

SEQ ID NO: 94787 - DNA, 825 bp, Enterobacter aerogenes
atgtttatgttccgcgcaaaaaaatatttatcagaattagagaagttccgacctgatattcttgcggcttgcacatccgcggtcaacgctgctgatataagtaatgatttcatcagtgtaccgtatgataaattttgcgaatgtcctgatgaatcagttgactatgcagtgatggaaaagactgccgatgcggtagttataggtttagatgctgaatggaacgatggaggttcctggtcggctttatgggatgtcagtcttaaagatgcacaggggaatgtgcttaatggcgatacatggattcatgatagtgaaaattgttacataaatagtgatgaacgattggttgcagcaatcggtgtagacaatttggtgatagtcagtactaaagatgctgtgttagttatggacaaagatcgctctcaggacgtgaagaaggcggtggaatatctcaagcagaaccagcgtagcgaatacaaacggcatcgagaaatatatcgaccatgggggagaagtgatgtagttgtacagactcctcgttttaacgtgaaccgtattaccgtcaaacctggcggagctttatctatgcagatgcatcatcatcgagcagagcattgggttattctaaccggtacgggccaagtgaccgtaaatgggaaacggtttctcctgacagaaaatcagtcaacatttatacctattggagcagagcactgtttggaaaaccctggtcgtattccactggaagtgctcgaaattcagtcgggttcttatcttggtgaggatgatattatccggattaaagatcagtatggtcgttgctaa

SEQ ID NO: 94788 - DNA, 840 bp, Enterobacter aerogenes
gtggtcacactctgccacgtgttcggggttcatcgcagcagctacaaatactgggtgaaaagcctcgaaaagccagacggcaagcgggctgtattacgtagtcaggttctggagctgcataacattagccatggctctgctggcgcgagaagtatcgccattatggcaaccctgagaggcttcagaatgggacgctggcttgccggcaggctcatgaaagaactgggactggtgagttgtcagcaacccacccaccggtataaacggggtggtcatgaacacatcgctatcccaaatcaccttgagcgacagttcgcagtgacagagcctaatcaggtatggtgcggcgatgtgacgtatatctggacaggcaggcgctgggcttacctcgccgtcgttctcgatttgttcgccaggaaaccggtaggctgggcaatgtcattctcaccggacagcaagctaaccatcaaagcgctggaaatggcgtgggaaacccgaggtaaaccagcgggagtgatgttccacagtgaccagggtagccactacacaagcaggcagttccggcagttactgtggcgttaccggattaggcaaagtatgagccgacgcggaaactgttgggataacagcccgatggaacgcttcttcagaagtctgaaaaacgagtgggtgccagtgacaggctatataaactttagcgaagcagctcatgcgatcacaaactatatcgtcgggtattacagctcgctaaggccgcatgactataacggtggattacctccaaacgaatcggaaaaccgatactggaaaaactctaaagccgtggccagttttagttga

SEQ ID NO: 94789 - DNA, 303 bp, Enterobacter aerogenes
atgaaaaaaagaaatttcagcgcagagtttaaacgcgaatccgctcaactggtccttgatcagaactacacagttgcagctgcggccagtgctatggacgtggggctttctaccatgacgcgatgggtaaagcagttacgggatgaacgacagggcaaaatacctaaagcctctcctataaccccagaacagattgaaatacgtgagctaaagaaaaagctacaacgcattgaaatggaaaacgacatattaaaaaaggctaccgcgctcttgatgtcagactccctgaacagttctcgttaa

SEQ ID NO: 94790 - DNA, 198 bp, Enterobacter aerogenes
atgacggaatacacgtatacaaactacaactcgtcacacaactattacggtatcggagttcacgatttctgtacttctcagtacggtaatgaaaacgaccgcgatgacagttggagaggtgttgagagattgtctgacgggtcttggcgaatcaacgttaaggacggcagtgagactgcaatgtgtctggattggtaa

SEQ ID NO: 94791 - DNA, 198 bp, Enterobacter aerogenes; identical to SEQ ID NO: 94790

SEQ ID NO: 94792 - DNA, 198 bp, Enterobacter aerogenes; identical to SEQ ID NO: 94790

SEQ ID NO: 94793 - DNA, 198 bp, Enterobacter aerogenes; identical to SEQ ID NO: 94790

SEQ ID NO: 94794 - DNA, 198 bp, Enterobacter aerogenes; identical to SEQ ID NO: 94790

SEQ ID NO: 94795 - DNA, 198 bp, Enterobacter aerogenes; identical to SEQ ID NO: 94790

SEQ ID NO: 94796 - DNA, 198 bp, Enterobacter aerogenes; identical to SEQ ID NO: 94790

SEQ ID NO: 94797 - DNA, 198 bp, Enterobacter aerogenes
atgtttatttttgcattaactagcaggcgcggcagaaagggcattttgctacctttgtctggcggcgaattcccctgtgcggaggagcgttcagttcaaatctctatgcagtttgtcatacgcacgcgagttagcgcgaactggctaatttaccgggaggcacccggcgccgcagataaatatacaggcattccttga

SEQ ID NO: 94798 - DNA, 1311 bp, Enterobacter aerogenes
atgccgcaacttcatgaattggtaagccaattggcgccggaaatgacgcaatggcgtcgtgattttcacctacacgcggagtccggctggctggaatttcgtaccgccagcaaggttgccgagatcttagacggactcggttatcaactggcgctggggcgcgacgttattgatgccgacagccgaatggggctgccagacgacgccaccctggcacaggcattccagcgcgcccgcgaacagggagcgccggaacgttggctaacggcttttgaaggcggattcgccggcgtagtcgccaccctggacaccggccgccccggcccgacgcttgcgtttcgcgtcgatatggacgcgctcgatcttaacgaacaacacgacgattgccatcgcccgcatcgcgcgggtttcgcctcctgcaacgccggaatgatgcacgcctgcggccatgacggccataccgccattgggctgggtttagcgcatgtgctacagcagtatgccgatcggctcaacgggatcatcaagctgattttccagcctgccgaagaaggcactcgcggcgcacgcgcgatggtggcagcgggagttctcgataacgtggattatttcaccgccattcatatcggcaccggcgtccccaacggtaccgtggtctgcggtggtgacaactttatggcgaccaccaaattcgacgtgcaattcgagggcgtcgccgctcacgccggcggcaaaccggaagatggccgtaacgcgctactggccgccgcacaggccgccatcgcactgcacgccatcgcgccgcacagcgccggcgcctcgcgggttaacgtcggtgttatgcaggccggcaccggccgtaacgtggtcccttcttccgcgctgataaaagtggaaacccgcggcgagacggaagctatcaaccagtatgtgtttgagcgggcgcaaaatgtgattgccggcgccgcagcgatgtatgaagcccgctatgaacttcggctcatgggcgcggcaacctccagcgcaccttctccggcgtgggtgcaatacctgcgtgagcaggcagcacaggtgccgggggtagtagaagcagtggatcatattgccgcgccggcgggatccgaagatgccaccttgatgatggcgcgggtacaggatcgcggcgggctggcttcatacatgattttcggtactgaactgagcgccggacatcacaatgagaaatttgatttcgacgaaggggtcatgaccatcgcggtcgagacgctggcgcgcatcgcgctcaactttccctggcagcgaggtgtgtga

SEQ ID NO: 94799 - DNA, 909 bp, Enterobacter aerogenes
atgtcatttcagattaaatttcatcaaattcgcgccttcgttgaggtcgctcgcgaggggagtattcgcggcgccagccgggcgctggcgatctcgcagcccgcgttgactaaagcgattaaagagctggaagaagggctttccgcccaactgtttgtacgccgcagccagggggtggcgctgacggaaaacggcgaaagtttttaccaacatgcgagtctgatccttgaagagctgcgggcggcgcaggatgaactgctacagcgtcagggcgagcaggccgggcagattaatatcggcctcggcgccagcgtcgcgcgctcgctgatgccatcggtgatctgccgctttcatcagcagcatccgctggtgaaggtgcggatcatggaagggcaactcctggcgatgattaatgaactgcgtcagggtgagcttgatttcactatcaacacctactatcccggcccgtacgatcatgaattcagctttgaaaaactgttcgagaaaccgttcgcggtattcgcccgcgccggacatccggcggcgcgcgccacttctctcgctgaattgctcgatcaccactggacgatgccaacgccgcgcggcagctactttaaacaactgcaggagatgtttaaccaggccgggctggcgcccaaggtcgatatcgtgtgtgaaaccttctcttcgtgcatcagtctggtggtgaagagcgatttcctcagcattctgccggtcgaactcggaaacgatccgatgatggcggataaactggtgatgatcccgatacgtgaaacgttgcccagggcaacctactacctgatccagcggcgcgacacgcgacagacgccgttaacggcttcgttaatcaccttgtttcgtcgtcaaagccgtcaattgtttccttaa

SEQ ID NO: 94800 - DNA, 618 bp, Enterobacter aerogenes
atgagcactcaatacggattttttatcgattccgcccgttgcaccggctgcaaaacctgcgagctggcctgtaaagactacaagaacctgacgccggatgtcagcttccgtcgtatctacgagtatgccggcggcgactggcaggaagacaacggcgtctggaatcagaacgtttttgcctactacctttccatcgcctgtaaccactgtgaagacccggcgtgcaccaaggtctgtccgagcggggcgatgcacaagcgcgaagacggttttgtggtggtcaatgaagaggtgtgcatcggctgtcgctactgccatatggcctgcccgtatggcgcgccgcagtacaacgccgctaaagggcatatgaccaaatgcgatggctgtcacgagcgtgtggcacaaggcaagaaaccgatttgcgtcgagtcctgcccgctgcgggcgctggacttcgggccgattaccgaactgcgtgaaaaacatggtcagctggccgccgtagcgccgttgccgtcagcgcacttcaccaggccgagcattgtgataaaaccaaacgccaacagccgtccgtgcggcgataccacaggctatctggccaatccgaaggaggtctga

SEQ ID NO: 94801 - DNA, 1212 bp, Enterobacter aerogenes
atgaaacaactctctcgtgtgctttttatgctcaccgcacttgtcgttacgaccacggttcccgcccaacaagtcaaccccgcgctttggcagcaagcgaaaaaaggcgacgtttcggcacaatattcgctcagcgcgatcctggcccgcggcaaatcttacatacaatctaattactggctaacccaagccgcgcagcgcggcgatccgcgcgcacagatggacctggcgctgcgttatcgtaacggcttgggtaccgaccgtaccggacggttaagggctgacgacacccaactgttctactgggcgcaaaaagcagcgatggcggatgtcggcggcgcgcagttcatcgtgagtaatctgtacgagcatggtcaaggcattcctcaaaatagcgtttatgcggcagcatggttattgttagccgccgataaagagcaaccgggttctctggtcgcgatacgcgttagcgctttgattgccgggcttgatgatcggcaaaccaaggaggcctggcggctgtatcgtcatctttcgaatcgcataaaagtttctgtcaaaacgcgcgagcgccagttggcgcggaatattccggtcagcgagcctgagcccgaagtcaattttcacaaccagctcgctctcgccgaaaagggcgacgcctcagcgatggttaaactggggttgatctacggcaatggtgtggccgttaagcagaactatgccgaagcgttgaagtggtttagcaaagcggcggataaaggtaatgccgaggcacagtattatctggctttcgcgtgggagagaggcgttggcgttgaaccagatgaaagcaaggccgagcgttattaccaactggcggcgagagggggggagaaatttgcccttaattatatgggaatgcagtatcgcgagggtaaacgcgtagcgaaggatctgcctcgcgcctgtggttattttaagcgggctgcatataaaggggtcgcgatagctcaaaagcgcctggctgagtgctatcttaaaggcattcacggtcgtgaggatcggcgtaaggcgtatctatggtattcgctggctagcgcatttggcgagtacggcgcgctcagccagcgatcgatgctcgcgcagacgctttcggcaacggagttggtgcaggcacaaaacgaagctcagaggctattcgaacagatctttaaaatacgagcgaaaaagtaa

SEQ ID NO: 94802 - DNA, 1167 bp, Enterobacter aerogenes
atgaccaccaccccaacttttgacggcgtaattcgccaacaccaacaggatcctcatctggcatgggcaatgttgccctccggctgcccgcaaaaccatgccgccaatcttttgccgctgcccgatggcacgctgctgtgcgtgtggtttggcggttcgcaggaaggaaaagcggatatttcagtctggggggcgcgtttagcgccgggcgccgcaacgtggagtgaagcgacaaagttgtccgacgatccgcagcgttcggaacaaaacccggtactgtttcaggctccagatggcgtgctgtggctgttatggaccgcgcagcacgccggcaatcaggacaccgctattgtgcgttatcgccagtcgcgcgatggaggaaagcactggggcgcgatcgccaccctgctcgatgaacccggcacctttatccggcaacccatcagcgtgatgcccaacggcaactggttgctgccggttttttattgtcgtacccggccgggggagaaatgggtcggtaacgatgatgtgagcgcggtaaaaatctcagccgatggcggcaagagctggcgcgacgtggcggtaccgcagagcctcggctgcgtgcatatgaatatcaccccgctggccgatggctcgctggccgccttcttccgcagccgctgggccgatcatatctggtacagccggtcgacagattttggcgaaagctggtcagcgccgatccccaccacgctgccaaacaataactcgtccattcaggttaccacgttgagcaacggcgatctggcgctggtgttcaataacatgagcgcagcaggcgccagcgagcgtcgggcgtcgttatacgatgaaatagaagatgatgacggtcgtaaagagcctgaacgcaccggcaaaaccgccttctggggcgcgccgcgtgcgccaatgaccgtggcgatttccgctgacggcggtaaaagctggccatggatgcgcaaccttgatgagggcgacggctactgtatgaccaacaattccgaacaaaaactgaaccgcgaattctcctaccccagtattaaacagggtgaagacggtaatttacacattgcctatacctggtaccggcaggccatcaagtatgtccgcgtgtcgccgcagtgggttaaaggagaaatcgcatga

SEQ ID NO: 94803 - DNA, 531 bp, Enterobacter aerogenes
atggataaccactggagaataaaaatgaacgccagaccttcttttgttgccgcatgggcggcggcaacgcgcatttacgacgctaacgatcctattggtaaagttaagcgagtcatcggtggaaaagtgaaacacaactttgaaataccggaacagcagggtggctggtcaaatagctgtgccgtacgcatgagctatgtgttgaactataccgggcatccagtgccgcgtattgccggactgacagtatctggcacagataacaaatggtatttcttccgggttaaagatgttatcgcctggctgacccgccagtggggtaaccccgatatgatcgttagttatccttctttacccgttcagcagttggctaatacaaaaggcgtgattttgttcgaagtacagggctggagcgatgccgctggccatgccactttttggaatggcttaacctgttcggatcactgttatttcaatgcccaggacactaattacacgacgaccaaagccaatttttgggagttgccatga

SEQ ID NO: 94804 - DNA, 2112 bp, Enterobacter aerogenes
atgaagattattgccatgcgcacggtcgcgctccccgctttattactccctctcgtcgccaacgtgcacgccagcacgaacgacgaacaaaccatggtcgtcacggcgacgcctaccgcggtttccgagctggatacccctgccgccgtcagcgtagtgaatggcgatgatatgcgtcaggccgccccgcgaattaacctctcagaatcgctcggcgcggtacccggtttacaggtgcagaaccggcaaaactacgctcaggatttgcagttgtcgattcgcggtttcggttcccgttccacctacggcgtccgcggcctgcggctatacgttgacggtatccctgctaccatgcccgatggccaggggcagacatcgaatatcgatatcggcagcatcgatagcctggaagtgttacgcggacctttttccgcgctctatggcaactcttccggcggcgtcattaacgtcaatacccaaaccggcagccagccgccgaccatcgaggccagcagctactacggcagcttcggtacctggcattacggactgaaggccaccggcgccgtcggcgacggcacccaggcaggtgatgtcgattacacggtgtcgaccaaccgttttactacccacggttcacgcgaccatagcggggcgcgtaaaaatctcgccaacgccaaattaggcgtgcgtataaacgacgtcagtaaattaacgctgctgttcaatagcgtagatatcaaagcgaacgacccgggcggattgacatatgatgaatggcgtaataatcctcagcaatcgccgcgcggcgatcaatacaacacgcgtaaaacggtgaaacagacccaggccggtttacgctatgagcgccagcttagccagcaggacgatctgagcgtgatgatgtacgccggcgagcgcgaaaccactcagtaccaatcaatcccgatggcgccgcagctgaagctctcgcattccgggggagtcatcgatttaactcgccattatcaggggatcgacacccgctggacccaccgcggcgaattactggtgccggtgacctttaccaccggtcttgattacgaaaatatgagcgaacggcgtaaaggttatgaaaactacgttctggtgcacggcgcgccgcaatatggcgaacagggcaacctacgccgtaatgaacgtaatctgatgtggaacctggatccctacctgcagactcagtggcagctgacggacaagctcacattcgatgctggcgtccgctacagctccgtttggtttgactctaacgactattacgtcactccgggtaacagcgatgatagcggcgatgccagctaccacaaatggctaccagctggttcattgaagtatgccgtcacggatgcctggaatatctatctttccgccggacgcggttttgaaacgccgacgatcaatgaactctcgtatcgttccggcaatcagagcggattaaatttcgatcttaaaccctccacaaatgaaaccgtggaaatcggcagcaaaacgcggataggcaacggactgttcaccgccgcgctgttccagaccgatactgacaatgagattgtggtcgactccagcagcggtggccgcaccagctataaaaacgccggtaaaacccgtcgccagggagtggaactcggtctcgaccagcagtttggcgacagctggaaattaaaagcagcatggacctggctcgacgccacctatcgcacgaacgtttgcggctcctcagactgcaacggcaatcgtattccgggtattgcccgcaatatgggctatgcctctttcggctaccaaccggaacagggctggtacgcgggtagcgatatccgttatatgggcgacattatggccaacgacgctaacaccgccaaagcgccatcgtggaccgtggttggcctgaccaccggctataagtggagctacgggaaaatggatatggatctgttcggccgcgtcgataacctgttcgatcgcacctacgttggctcggtgattgttaatgaatccaatggtcgttattacgaaccggcgccgggccgtaacttcggcatcggtatgaatctcgcctggcgtttcgaatga

SEQ ID NO: 94805 - DNA, 270 bp, Enterobacter aerogenes
atgtctataatgaagggcgcaagtgcgttgatttttgccttgctactacagggctgtatccacgacgaacctaagcaactttatcgccatgactatgtgctgaaggatcctgacaccggcaagcctatgccctatttcccttatcaaatcactacgccagacggcaaagtgtttaagggtataaccgataaagacggcgtaaccgtcgaagcattttccaccgagccaggggaattcatgctgagcatgatcccgccatttgaactgtaa

SEQ ID NO: 94806 - DNA, 279 bp, Enterobacter aerogenes
atgaaaggagcctcccgccgcctgatgtttggcgcttttttactgatagcgacagcctcggcccaggcgctgaaagcgccagaagtggatttacgcgacccaacgttgtgggaagagaaaaaggtcaatccgttaaacgatatctcggtaccctgcgaagtggcaaacggcccggattgtccaatctgggaagatcaaaagtccgatattcagcgtgagagagaacggcgggagcagaaacgatggcaatccggcaatgaacactggcgcaagtattaa

SEQ ID NO: 94807 - DNA, 612 bp, Enterobacter aerogenes
gtgaaaatcatgcatacattgacactgagcccgatactaatgaaaagaatcattgatttaatctggcgcgtagcgcctggggtgcaaacagaatggcttcaatgttccaccatagatgatgcgcttgatgccttgaaaagaaaccgctcggatatcatcattgcgcaactcgaacctcattctcatgattatgttgagtatctgcactggtttgatgattatcaactggtcacaggaataaatgatatgcccgaggctataaaaaagggcgatacggggaggtatctggcctacacccatgctggacagtctttattgcaaactcattctatcaaccagactctacccgcccatactaccttcatgagcgacgtatcggccatcatagaactcgttaccgctggtggttgctgttcaatattgccgagcagtgttttgccgctgcaggagcgtaaactcagatctacacctctcaaaccaccttgttccagacgtatcgcggttattgcacattccagttccctattgtcaggcgccacccgcaccacaatagagtgtttgaagaaatgccatcttcaaccgtttttttatacaactaacagcgttggctaa

SEQ ID NO: 94808 - DNA, 261 bp, Enterobacter aerogenes
atgaaaatattttttctggaagtcgtccgtgctatagcagagttacactctttttccgaaacggctgcagtacttaactgtagccagtcgaatattagttacgcggtcagcgaggtggaaaaatattttggtaagaaaatatttttgcgtaaccgtcgtggctgccagcttacaatagaaggagagagcgtggttaaaaaaatatctaatataatcgacattattgaaactataaaaaaaatgaggtcgtgggctgtgtga

SEQ ID NO: 94809 - DNA, 603 bp, Enterobacter aerogenes
atgactatgcagattgggatttatatttttgataatgtagaagtactcgattttgcaggcccgtatgaagtttttacctgtgcctccagagttaatcgggatgaaactcctctatttgaagtttttacagtaggtgacacattacgtcctgtccacgcccgggctggacttaagattgaccctgatttttccctggagaatcaccctgatattgattgtttgattattcccggtggcgtcgttaatgctgaactcgataagccaaacgtgattgaatggattgctaagcaggcattaacaacgaagattacggcatcggtatgtacgggggcattcttactggcggcggccggggtattagaggggaaatcagcaactacgcactgggaagatattgccgatctgcgcgctatgttccctgagctttcggtgaaagaagggttgcgctgggtggatgaaggggcaattgtctcctcggcggggatttccgcaggtatcgatatgagtctacatttagttgaacggcttaaagacagagatcttgcgctaagaaccgcgaagcaactggaatttgactggacggaaaaccgaccctcagcgtag

SEQ ID NO: 94810 - DNA, 1149 bp, Enterobacter aerogenes
atggcgctgaacactacgcgagcggtatctcctcaggcaatcaatcggctggagcgtgtctggcaagaggcggtacagcaaggactacccgtaggaggggaaattctgctctcacagcatggaaaacgcctcttccatgctgcgtcaggctggatggatcgcgaacaatcacggccgatgaccaaaggcgtcccgttccgtttagcctcgttaacgaagctgttgacctcggtggtggtaatgaaattcatcgagaaggggaaattatcactcgatacgccggtcaattcggtgctgccattttttaaacctgcgttagcaaacgggatagtaccgttggtgacgatccggcatttgctcacccatacctctggtttgagctatggatttgaacagcccgcgggcaatatctatgagcgttcgggaatttcagatggtttagatctgcctgcacatgaccttgaggagaatctccacaagcttggcgcggtaccgttactgttcgaacccggcagtcgctggcaatattccctggcgactgatgtgttgggctgggtgataagccagattgaaaacgatactttcgcaaatattgtcaaacgggaggtgacggatccgttgcggatgcataataccgcttttcatattaccgatgaatcactgctggcaaccccctatctgcaatctgggcgacggatgacggacaatgaaattcttccggtgggagagggcgtcgcccgcttatcgcccaaacgtgcgacgacctccaacgcctggtattccgcaggagcgggtttgattggaaccgcggaagattatcaccgtttgcttgaatgtctacgtcaaggcggagcaccaatactcagcgctgattcgacagcacgcttattggcaaatgcgactggcgaaatggctatcggcgaaaggaatgctggatggggccatgggttgggttgcatggtactgttcgaccctgaaagagcgcaacggcgtgaaggagcgggtagctggagctggtttggcctctatggtagttattattgggtagatcctcgcgccggattatcattggtcatgttaacaaatacggcgggtgaaaaaatatggcgaacgcttgctgaaaaaattcaaacaacgctatgctcatag

SEQ ID NO: 94811 - DNA, 1158 bp, Enterobacter aerogenes
atgacgttaagtaactgggattatccgactaaagttcgggccggaataggtcgtattaaagagctccctgagatttgccgtgaggcaggtatcaataatcctctactcattactgattcaggtatcagcggcactgatatggttaagcacgcgctgaatcattgtcgggataaattagggcagtgcggattgttcgacaatgtgaaaagtaaccccacaggtgaaaatgtcgcccagggggtggcagtttatcactctggccaccatgatggagtgatcgcgttgggcggcggttccgttctggatgccggtaaagctgtagcgttgatgtccgggcagcaatatcctctgtggatgtttgaagacattaaagggaactctgattgcgttaacgttgcgggaattgcgccgtttatcgctattccaactacggcggggacgggttctgaggtaggacgcgccgcggtgatcaccgacagttccgtaccggtaaaacgaaccattttccatcccgcgatgatgccgcgtgtcgcaattctcgacggcgagctgacggtgggaatgtctccgcaattaaccgcagccaccggcgcggatgccttaacccactgcctggaatcctggtgttctcctgtctatcatccgatgtcggaggccgttgcggtgaaaggcatgcagatgattaaagcaaacctgcttcgggcgtttcagaatggacaggatctgcaagcgcgtcaggagatgctggtggcatcggcactcggcgcggtttcttttcagcggggattgggcggtgtacatgcgatagcacaaagcctgggggctctttacgatggccatcatggtttgctgaatgccattgtcttaccttatgtactggtggcgaatcggccaaaaatagatgcctcgatggactatctggcacgggcgcttgatctggaaagacccggttttacgggcgttatggcatggatccttgagttgcgtcagtcgctggggattcctcatacccttttagaggtggggattgatgatcagcaagccacgttagtgggagagatggcttttgctgacggctgctccttaaccaatcctgtgcgccactccgcggcggattacagcaaaatcttctgtcaggccgtgaaaggagagctgtga

SEQ ID NO: 94812 - DNA, 654 bp, Enterobacter aerogenes
atgaacgaagcttcgttattattgacgctggctggcgcctttctggtacttattattagtccggggcctaattttgtcgtaattactcaaatatcagttagcatgtctcgattatatggtttgttcaccgggataggtgtagccagcggtagcataatatgggcacttttagccgctacaggtttaggactaattttccagaccgtgccgtggttacaacctgcattacaacttattggcgggctttatttatgctggattggctttaaaacccttaagagtgcgggtaatcaacctaaatcacgggatattgcgtcattaggtgttgaaagtgtcgggcgtgcatatcgctttggcttgttaactaacttaacgaatccaaaagcgttggcattttataccagtgtctttacgaccgtgaccgctccggggttggctgaatgggtacgtgttgccggcgtactaattattgcagttttggcgatgagttggttcaccttacttgcaactttattttcaattcgctggatccaggaacgttatcgcgcggcaaaaaaaggtgtcgatctgtttaccggcaccgtcatgatgatattcggtggcaaattgttgttgatgttggcgccgtttcttcattcaacctttggtcactaa

SEQ ID NO: 94813 - DNA, 1821 bp, Enterobacter aerogenes
atgcaaaaaccttcacgaatcgctattgttggtctggggccgagaggattagcccttcttgaaagcatgatctttgcccttcgggaatctccagacaaggttgtggaactgcatttatttgacgatggcgcgccaggatgcggcatccacgatgaatggcagccagattatctcatgcttaatacggttgcagggcagttatccgccttctcctggcatgaggatgataatggtcgattagggccaacatttctggaatggtgccatgcgcagacggttcgactggatgaacgaggctatcccgctcgttcgggacgggtggtttcgccaggtgattttctcccgcgccggctattaggtcgctatctgcgggattgttaccagcaattaatgacgatggctcccgtcggattacgcctgtattaccataaaacccgggtaatggcgtgtacaaccgagcggaccagggagacatatttgctgcgctgccagtctggagaaagtgtagaagtcgaggcaatgtttttagcgctggggcacacggggcacgaaagtgtcattcccgcctcgtttatttctccggttcatgccggcatatggcctggtacggttgtcgaggataaaccggtgcagaaagtggcaatatcgggtttggggctcacggcgctggattccctttctcgcttaaccgaaggccgcggcggagaatatcagcttcaggatggcgagttgatttatcacccatccggcaaagagccgcaaatattcatgttctcaacttcgggattaccttttcatgcgcggccgcactggcagtcgggtgacgaaagagaggcgttacctcttatctttttgacctcggcgacaatccgcaagctacgtgaaaaaaatgccttcttacctctggattttatcgaacatattttaccgataattaaaatggagatgaaggctgcctattacctggcatgtgcgcgcaatcgttcgatggcaatcgccaaggatattcacgataagctctccgggcataatggtgaatattttatggcggcgttagtaaaagagtacggcccgttcgacccggatcgttatctcagttgggtaccatggccagtggccatacaggaatatgaagaggcattttgttgttggatccgggatgatattagagaaagtttacgtggcgtgaattacagtccgttaaaggcggctctggaaatatggcgccgcggacgcaatgttttacgtgaagttgtcaatcatcacggtttaaacgcggcctcaacgcaactcttttatcagcgatatgcgccgattgctaaccggctggtgggggggccacatattgagcgctataatgaacttcttgccttaataaaggctgggattgtgcgtatattgcccccaatgtttgtggctgacgagggtaaacggttatacagcgtgaacaatccacaggaaatctgtgaggatgtagatgctgtaatttcggcgagagtatggccgagtggattaagccgtacacggtctccgctgttaatttcactgcgtgaacagaatcttattctgcccgcagggcaatatccatacgatggaatcgaaaccgataaatcaggaagagtcataaatggggataatgctaaacaaccgacaatatgggcttttgggccaatagtcgagggggcaaccttttataatcattatgtgccaacaccagataaagcgtgccaggccattctggagtctcgtctggcagttaagtcatgccttgaaactattatgaaagccaaagaggaggttaccccttcaacaatgaaatag

SEQ ID NO: 94814 - DNA, 2001 bp, Enterobacter aerogenes
atgcacaaccatatttcagatatcgtccacgatcaggttttcctttccgtaaaagacgttggcccagatttttatttaaagatggagtcgctgaatcctgcaggctctatcaaactaaaaacggctattgggctggtcgatgacctacaacagcgaggcttgattaacgccgagaccattttgattgaatcttcttccggcaatctgggggtcgcattagccatgatttgtgcggaaagagggctgaaattcacctgcgttgtggacccgaatattgccgatcacaatttgcaggtgatgaagtgctacggggcggaggtggtaatgatccgccagcctgacaaaaatggcggctttcttggctcacgaattaactatattcgaagcaaactggcggaagatcctcgctatatctggcttaatcagtatgaaaaccaagccaacccgcaggtacatgccgcccgaaccgcacattccgtcggtcgtcagtttgcgcatgttgactatctgtttgtgggggcgggtaccaccggcaccctgatgggatgcgtggatcattttcagaaataccaccctgaaaccaaaattatagccgtggatagcgtcggttctgtgaccttcggaacgcctgccggtcggcgttatatccctggactcgggaccagccagattccgccaatctttcagcagaaaggcattcatgccctggaaatggttgatgagagcgctacggtggcaatgtgtcgttacctggcccgtcaccacggtatgctggtagggggctcaaccggtacggtaatcgctggcctctatcactggcgtgagcgcatcccgcaaggggccgttgtggtcgccctctctccggattggggcgaacgttatcttgacacggtatatgatgatggctgggtggcggagcgctatccgcaggaaacgctaagcggtgggctggagtgggttgacgccatggcgcaaccgacggtgtatctggaagaggcgtcttctatgccttttcacgtcgttgatggccggacggtggcatcagtccttaatgaagatcccctggcttgcattgatgacgtcgaaaaagcctatttggcgcactgcaacggcgataccgttaacccggacagctattttctacgttttcctgaaaaccaggctaatcgaattatcgccttgcccgccagtatagcgggggagaatggcagtaacggaataaagtggatttccagctatccggataatatcaaacaaggattacagcgcgcctctgccgtgcttcttttgaataaccctcagaccggttatgcctatgcatgcctggaagcgtcacgtattagcgcaatgcgtacggccgcgtcggccgtactggccgctcgtaaacttgtcgcgtcgcggaacattacccggttggggtttgttggcgcaggctttattgcgcgaaacattctcgatctttttcgccatgatggttggaatattgaaaaaaccgttttgcatgataaggatcaaccttccgtagaggcctttgccgaatatgcgcagacgcgccatcaacttatcgcctccgtcggctcacttgaagaggttttagcagccgatgtagttgtgctggccacgactgcaggaacgccgtatatccatgattattccttcaagccacaccaactggtgttgaatatttctctgcgtgacttatctcccgagattataacccgctgtaataatctgcttgatgatgtagaccactgcctgaaagcaaacacttcgccacatctggcagaacaattatgtggccatcgccagtttattaacggaacgctggctgaatttatgttaggccgggtggcattggatccgcgtaaagccacgctcttttctccctttggcttaggcattctcgacctggccgttggacagcgagtctatcagcgagcctgtcagcagggacgagccagggaaatacccaatttcttctttgagtcagagagatggtaa

SEQ ID NO: 94815 - DNA, 1317 bp, Enterobacter aerogenes
atggatcatacatatctgcatgaccgggattttctttggcgtaatcaaaataattatgatgtggtgaatattggttttggtcccgcaggaattgcccttgcctgtgtgcaggaagatgcaaaggagtgtaacgcatcttacaaagatattaagatgctgcatctggaaaaagccgccgatactgtctggcatggagaactgttattaacaggcacggatattaatcatagcgtatttcgggatttagtaacgccacgcaatccgcgcagtcgcttttcattcgcaatgtatttaaaagagaagaaccggatgttcgacttcggtctgcttggcagacctgccagtcgacatgaatggtccgattatattcgttgggtgtccagccaggtcgatgaccatacgcttttttcaacaccagccaaagagatccaaccgattgtcaaaggcgatgagttacatggttttagggtagtaactgaacatgatgtctatacaacaaaaaatatcgtactgtcttcggggagtcagcccaatatcccggatcaatttctcccgtttcttggcgaaagggtatttcatacctcccagtttctgagtcgtttgaaatattttggcggaacgttgcctgcgcgttggttggtgctggggtccggacaaagcgccagtgaatcggtcattgaactgcttaaacgacgcgatgatatcactctgtactccgtgcatcgttcgtctggctttcgtctgactcagcttggccaattccctaatagagtgttctcacctgagcacgttgattatttccatcggttggataacgcctcacgccgacaatttctggagtggagcaaagcgaccaattatgcgggcatcgatcctgacgagagtcaaatgctgttttcatttgtgtatgaggatcgtatttgtggacgcgagagattacacatcaaaccgtggtgtgaaatcgtcgatgtttcccagtcagaaaacggttatcaaatcaccctcgccgatatttttagcggcgaagaagagattgtcgaggtagatgtcattgtgctggcgacgggatatcagcaaccacgtattccagcgttattgacgcaacttcaaccgtggctggtgcaggaccaggatggtggattacttattgaccgcgattatcgggtcgcgctgcgtgagacgaaaggggtgagtatttatgttaacgggctttctgagagaagccacggtattagcgacagccagtcattttcactcatggcgctacgcgctgagcggatcatgaacgcattacctgtctcaggagaggataattaa

SEQ ID NO: 94816 - DNA, 948 bp, Enterobacter aerogenes
atgaaaacgctaaaagtcggtattaccgcgctatttgatccgcaggtgacacgccatgccagaaccttcatgcgtgcgcttgccgtggcgcgcagtcgcattccgggcttatcaagggtcgagtttatctttcgggacgacggggcgtcgaaggaaacggcgctggtggtagggcgatattttattcaacaggaagttgatgttgtagttgggcatttttcatcggatgcggcgcttagcgcagcgcggcattatcagcgggcaggtatcccgttacttaccccagccgctacgatggatagtttgtgtgaacctgcacacggcgcgtttcgtttgtgtccgccggacaagcagttggcggtgaaactgattgatttcgccatcagccgttcatggatgaagcttgaggtaggcgctgacgaaagcgctcatgggatagctcttgccagcgcgatttctgccgaagcggtaaaacgcggacttaccgtggttgcgtcgggagggagtccggatgctgaggtttttgccgggcgactgggaaatagcagggaaaggatgttaacacgcgcgcagtcggactctaatcggcctctgattctgacagatgatgcggcttctcccggtttaggaaataagcctgataacggccatgaggtttacattgtcggtattccggcaattgcgacgccgttatcagatttattcagcgaatattgccgccagcattatggtgatgagccagaaacctattacatggagtgcattgctgcctttcaaattatttctcaattagctgaaggcggtgttaataattacttgtctacgctcgctgaaaatgaatttgaaacggtgttaggtaaaatttatttcacccatggggaatgccgtcattcagcgcatacagtgtgggaacttacggagaatggctttaacgctattactttataa

SEQ ID NO: 94817 - DNA, 1149 bp, Enterobacter aerogenes
atgaccatcggctgtgaagtttgcgtcattggaggcggggtgatgggggccaccctcgccgcatctctgtgcgaacgtaatgtggaaacggtgttgctggaagctggaactgttgcaggacagggcgcttccgcgttctcgggagggctggtccgctgctacgatcctgacccgacgattatggcgttgtcttcccatgcgctggccattcagcaaaaaacgcattttgctgaggtgtttagccgtgcaatccggcgcacgggcatgttgtaccgtgccgcgtccgcgcaggccgaccagattgcacatcgactggcgagctattccagcgctgaataccctctgcgtaagctgtcggcaggggatgtggacgatatgtcgttaaatgtcgcgcgtcgaacggaccgggtgaacctctatgaaccaaatgctggtatcggcgatgtgcgattggcgacccggctaatggcaaatctggttatgcatcagggattgctgctggaacaggctcgcgtggaagagattgatatggataaacgcggtgagtgccgggttcataccaccaatgccactctttcttgccgggtagtggtgattgcggccggcgcctggagtcatcactggtgtccgcagcagatggtggtccggacgataccgctggcgcggctgtatggtgcggatttaccccgcattccagtgatcgatgccccggcaactgcctacgcgatcccgtcgggcagagatattgttcaggttggctgccaaccgcgctcgcaggtgccgcatgtcggcgcgttaccaactcccgatcaggagcataaacaggatgcgttgcggcgtttgcaggatatcaccggcgaaagtggtgggacgcgggttctggatgtgttaggggggtatgacagctatacccgtgatgggcggccaatgctgggatttacctcaaacagcggcgcgtgctacctggccacaggattgaacggaattggttttaagcttgcccctgcgctcgccgatattgcttctgctgaaatcagccgttttttacaacgcaagcggaaaatcccacgggatcggtggcctgaattatctccggagcgtgaaggcgcgttaccggcattatcaacgctaaccctggtgaatcgctga

SEQ ID NO: 94818 - DNA, 1500 bp, Enterobacter aerogenes
atgtctaaatatattgtcactattacaccacctacaccaaatggtgatttgcatattggccatatcgccgggccgtttttatctgcggatgtttttacccgtattcagcgtcaacgtggacatgagtgtgttttactttcgtactcagatgattaccagtcctacatgcaacgtaaagggattgaaactggtatcgagccgaccgtgcttgcacaaagcaataccgagaaaataaagcgttcattagcggcgatgaagatctccgttgataactggatgtcaccttataacaaccccttttttaaggatgcggtacaggaactgttcgattccgcgcatgaacggggggcgattgcgtttcacgactcttcggaaccatattgcgccagttgtaatgtctggggttacgaggcgtttggccgggggttgtgcaactattgcggcgttgattccgacgccagccagtgtgaaggctgcgccaatgctccagatgccgacaaaatgcaggagtttcactgcaaactttgtcgtaaagcacccgagttcaccagcgtaaaccgcgcatttctgcaccttgaacgttttgccccgttattgcagaacgtacacgcaaagtacgtaaaacgtcgtccgttagaaagctggctggacacggccatcaaccaactcaaaccctggggcgtcacgcgtcctgaagaggcggggttggacctcgcggaagatggtagtcgtcgcgtccatacctggtttatgggtatggcgggttatatcgccgcttttcgtgaatacgcagcgcaacgccaggatgcggatctattctcacgtttctggtgttctggcgaaggcgaagttgtccattttctcgggtttgattgtgtattcagccatgccattgcttatccagtgctactcgatcaacgtcccgatattcatgtccgccagcgttttattccgaatcaattcctcatgctggatggcctgaatctgtcaaccagccgaaaccacgcgatctgggcgcgggaattggtggagaaagcggggagcgatagtgcgcgtctgtaccttgccagtattgcgccggaagaggaagaaggggattttcgtcaaaacgaatttgaacgctggcatcaggctctctttgacgatttgctcccgcgcattttccatgcaatggaaacggaaaagatgagctggagccggcagctcaccggaccagatgccgggctcctcgatggattacgccagaagtggctcgcggcgggagatgccagccatttttcgatgaaagcactggcggccacccttcttgacgcgttcgctctgtgtcgcgtcaggttggatcagcatcagccggttgcgcacctggcggcgtttattgcggttgccggacaggcgttaatcccggagctgagccagcgtttaattacccaatttcgtttacctgaaaacgccattctttgttggttagtggatggcgcgctagctgattacaacatctaa

SEQ ID NO: 94819 - DNA, 393 bp, Enterobacter aerogenes
atgaataagttcgaaatctttcgtaaatctaattttgatgggttggttcatgaatatggacttgatggcagacgattacttccatgggataattatcccatgccatttgctggcggatggtgcgtagtgaggccgggaacccaaagtgaaccacatacacaaattgatcaggagatcttcatcgctataaaaggacaagccacattaattgtcggtgaggaacaatatgaattcaccactggcgatattgctgcgattccgaaacacactaatcattatattattaatgactctactgaagattttcatttctatgtggtgtggtgggatatgaattacgtaaacgactttattaatcaacataacgacacgacggggtgtttggatgtctaa

SEQ ID NO: 94820 - DNA, 336 bp, Enterobacter aerogenes
atgacgctacccgattttcatgtttcagcgccttttacgcttggtattgagctggagttacaggtcgtcaacccaccggggtacgatctcagccaggatgcctccacgctgattgccgatgtccaacgtgaactgacggcgggagaggccaaacacgacatcaccgaaagcatgctggagatagcgaccggcatctgtcgcgatatcagccacgccaccgcacagctcggcgccatccatcaggcggtacagcgccgctctccgtcaccacctgcaaatctgcggcggcggttcgcatcctttccacgcctggcagcgtcaacaaatcagcgataa

SEQ ID NO: 94821 - DNA, 915 bp, Enterobacter aerogenes
atgcttattcagaaaaagcgaattagaaacatcaacaactacatcactgtttttgatggcagagatgtatttatcgctcatgcactgccaagccaacaaaaggggcaatcaattgggttcactgctaaccaatctcttggagaggaagttcttcctcaaatcgttggtgcaataactcgcttcaacgccaacgggaaatcagtgccagacaaaacgttgcctaaagaaaccgcttatcggcaggtatcatggacctggaaaaaatgggttggtagaggcgagactgaagaggtcactgagactcgagaaatggagtatcaacgttaccaaaggattttcactccaccaccaagtatcgagttgaaaattgttgagaacttgaatggtcaaaagctagtgatttcacctaagttgactttgacagaagaaaacaaagaccttgtaacacattgcgttaacttgtttttagagttatttggtctttgcgaagttgttgacgaagatctcaacactatcgttactactcaatctataaaactaaactggagtctcctccctcaaggacaatatccttggaccaccattggttcgcaaattatgtcagctatcaaaccgagaggaaaaggaaatgctgctgttgtagagggtagacttgaactcattaacagtaagcaacctgattttgtcgctgtcggaagagctggcttccagggatatgtaatttttgggttccccaatcacaatacctacgtattggaaagctcgcaatgtaacaatgcaacctatatttttaacaacgattggcaacaattatcccagctaactaaagctgagatattagatggaaatttgcaccgcgccagagtaattcatcgaagaaactgggctgctgaaatcctcagatacttaccttaa

SEQ ID NO: 94822 - DNA, 207 bp, Enterobacter aerogenes
atgaagaagcttttaatatgtgcgctggcacttctgccggtggcggctcatgcaggtaaaatcacaatgagcaaccccgacgaacaagagttaaagggcgggaagcggctttgcacctatgagaacagcatttacctgtttacctatgttactaaaggagagtgtaaatatacgaaaacgttcaacaccgaggacaacgaaaagtag

SEQ ID NO: 94823 - DNA, 150 bp, Enterobacter aerogenes
atgtcgtatgcctcagaatgtctcgccagccaaaatttcgggagctatgtcgaggctgagttatacgcaagaacactgtccgggatgcctgccaatgaggatttaccttgggaacatctcgttacatccacctcaactgagcttaagtaa

SEQ ID NO: 94824 - DNA, 198 bp, Enterobacter aerogenes
atgactgccatcctaaccccccccctgatggtgcggggcggatatttttcgggcagaacatcagaagagggggtgcttgtttacatttttctcgtggggggacaggtgggtttcaggatgtggcgtgagccacacgccgaaacctacacttcatcaagatttcagctatcacaggagcgcaactatatacactcctga

SEQ ID NO: 94825 - DNA, 1140 bp, Enterobacter aerogenes
atggcaaacattagcgacgaattagcggccagcatccaaaaatgtttcgaccgcacttatgtggatttagcaaatcaacagcagtttttatttggagccgggaacgtaacggtcacgaagccggacggtacaacggggacggtaaaatcgtgggcgcagttcttgagcgagtacgccacacggcagcagaacatcgacacggcgctaacagcggcgaacaaggatcaggcgaagactacggccgccaacacgtggacgaagtcacagacatggaacgcggtgaacacgtttaaagatcttgtgacattcgagaaacaggtgaatatcggaggcaagacgacaatcagaaatggcctagagctgttttttgatactccttacattgattttcatcatgggaatagtgaggcagattttacacacagaatcatcaccgaggacggagcgctgactatctcccccggattgaggatcaggaatggcggaattggcgtctattcagggacaatcacaaactatcacggcaactattcgcgatcgtatgttgcaatgttacaaaatgacccccccacggctaacacgggggatattattgcatcccccgcgtctgaatggaggtttagaaatcgcggggcagatagtaacggggattctggtgggtgcgctatctggtatgaggaacaggtaggaacggcacacaaattagttatgcaggtgcgcggatttaatgcgcctgttcagtatacagcgttcctacctgacggcaggatccagaacagcacgaaaggatttgttcaattccaggggacgtccgacgcgaggctgaagcacgacatcaagccaacagacggccagcagtcagtcgaacgtatccgggcgcttgagatggtgacgttcgtctataacgacgacgagcagaacaggacgcgccggggtatcatcgcgcagcaggcgcgggaggttgatccgcagtacgtcaagaacagcaaaatggcgtacatgaaggacggagagaaggtggaaaccgaatttcttcaactggacaacaacgtgataatgatggacacactggctgcggtacaagtattgattaagcgagtagacgaactggaggatagattgaataaaatttcagattaa

SEQ ID NO: 94826 - DNA, 1200 bp, Enterobacter aerogenes
gtgaccgacgcacaggaggcgcaggacaccgcctccggcgcagcgaacgccgttacccagcttactgcgaccgttacccagcaagggaaggatatcaccgcacaggcagggcaaatcaccagcctcggctcgcgtgtgggcgatgcagagtcgcgtatcacgaagcaggacgaaaccatcgcatctaacggcctggcgatggcgagcggctttaaccaaatgcgcagcatgattggtgacaacagcgcggcaattaccacgacgaacaaaaccgttgccgacctggaaaaatcaaccacggagcaaatcaccacgctgacctcgcaggtcggggatatgtctgcgaccgttcagcagacggcatccaccgtggcggatttaaacgggaaattgggagcgcagtggggcgttaaggtcaacacgtcttccggcggcaagaactacgtggcgggtatccagttggggattaacggcagcggccagtcacagttcctggtccaggctgaccagttcggcgtttatgttcctaacggcgataaaagcaatctggtctttggtatcgatgggaacggcgcgtacatgcagcaggcgatggcccgtaacctggtcatcgactttgcgcagatctcaaataacatccagtcaacgaactatgtagagggggtatccgggtgggcgattaataagaacggcggtgcgcagttcaataacgctattttccggggacacgtcgaagcgtccagtggctccttccaggggaacattaacgcgaccagcggatcatttcgaggcaccattgatgcgaccgatgggatctttcgcgggactgtacaagcaagccgattcattggtgatatttgctcggcaggggtcttcccggaaggcaagcgccctgacatcactcactacgattcaggtaataacggcgtccctaaaacttacgcggtttccgctgtcgtggcttgcggggttagcttcgtgggtaaaatccgcgtctggataaagggtattaaagtttcagagattggtgtgtctggcgcagcagataacgcgtcaacgcgctacatacctgttttcggtgcgttgtctggggttactgatacgaatgtacgctgtgaagtcaccattgatggtagcggaattgctaactataacggcggctttgtaattatgactcgatctacgggttcatgggcttaa

SEQ ID NO: 94827 - DNA, 348 bp, Enterobacter aerogenes
atgctgataactctgatgactgatatcacccgactgctatccagcctcaagcgccgctcagcccacgtaaaagaattcggcgacgatattacgtttgtaaagctagaagatcttgatgcgctggtagaggagctggagaaggcgcagcagcgcatcgccgagctggagtcccgcaccgtgaagcttccgaaacgctctgttggcgaagttatgcatatgagcgcattcagccgggattatgccgagggttggtgtgccggtaatgacaacgccattcatgaaattcagcaagtgggcatagctgttgaaaataacggatgttggcataccaccagcaccaaagaatga

SEQ ID NO: 94828 - DNA, 1128 bp, Enterobacter aerogenes
atggctgcaagaccacgtaaaaatagtgtcaacattcctaatctctaccctctctttagccgaaagactaaaaaagtttactggcgatataagcatccagtaacagggaaattccacagtttaggtacagacgaaatcgaagcgaccgcaatcgctatagaagctaataaacgactcgctgaacagaatacccgccaaattttggcactcagtgacaaaatagccaccagcaaaggaaaagccatcacagcaataacttggcttgatcgctactggaagatacaagaagaacggcttgcaacaggcgatattaaaacaaatacatacaaacaaaaggccaaaccagttgcattattgaaagagcgtgtcggtatgaagcttatatcagctgttgatgttcgtgatattgctcaaatacttgatgaatatatatcagaaggacaaccaagaatggctcaggtgatacgttcggttttgatcgatgtctttaaagaggctcagcacgctggtgaagttcccccaggacataacccggcacttgcgacgaaacagccgcggcgtcgtattacccgtcagcgcttaaatctggatgaatggcagaaaattttcgacattgctgatgcaaaccataagtacatgggaaatgcgatgttattggccatcgttactggccagcgattgggggatatatcacgaatgaaattcactgatgtatgggatgatcacctccatattgagcaggagaaaaccggaagcaagatagcaatcccgctggccctcaggtgcgatgctattaactggagcttaagggaagtcatcgcacgttgccgggattatgcggtaagcccatatctagtacatttcctccactcaacttcgcaggcagaacgcggttcacaagttaaagcgagaacgctcaccatgaatttcagtaaagccagagataaagcgaatattgattggggctccggtacaccagcaacttttcatgagcaacgatcgttatctgaacgtctgtacaaagcacagggtatcaatacaaaagaactgctaggacataaatctcaacagcagacagatcgctaccatgatgatcgcggaaaggactggaccactgtcgccatttag

SEQ ID NO: 94829 - DNA, 906 bp, Enterobacter aerogenes
atgcaggatctcaacgacctggcctggtttgttcaggtggtcgaccatggcggttttgccgctgccggtcgggcgctcgaccagcccaaatccaaactcagccgccgcattgcgcaactggaagagcgcctgggcgtgcgtctgattcaacgaaccacccgacagttcgccgtcacggaagtcggccaaactttctatcaacactgcaaggcgatgttgatagaagccgaagcggcgcatcaggcggtagaaacgctgcagtctgaaccgcgcggcagcgtcaagctcacctgtccggtaaccctgttgcatgcccatgttggcccgatgctggcgcgctttatggtgcgatatcctggggtgacgctacatctggaagccaccaatcggcgggtggatgtggtgggcgagggggttgatgtggccattcgcgtgcgaccaaggccatttgaagatagcgacctggtcatgcgggtgttggccgatcgtggccatcgcctggtggcgagcccggcgctgatcgccagacttgggtgcccgcaggcgccggcggaattgagcacctggccggggctaagtattggcgccggaaaacatcagcataaatggcaattgaccgggccagaaggggcgcgggccgaggtttatttcacgccgcggatggtgaccagcgatatgctggcgctgcgcgaggcggctatggcgggcgttggcgtggttcagcttcctttattaatggtgcgcgaacagttggcatcaggggagttggaaatcgtgcttgatgagtggcagccgcggcgggaagtcattcatgcggtgtttgcttcgcggcgcggtttattaccttctgtcagagcgctggtggattatctcagcgaagagtatcaacggatggaagaggattag

SEQ ID NO: 94830 - DNA, 834 bp, Enterobacter aerogenes
atggaaaacaaaaataatagcatgctgataaatcagacgctgactgaacaaatacttgagaagttagggttcactaattcaccgcctctcaataaaaatggactggaaataatttataaggcctggtgtcggtctgtaccctttgataatattcgtaaacgtatacttatcaggaccggtggcgattatattctccccggatccacccctacagatttcttcgtcaattggttaagacatggaaccgggggaacctgctgggcgggacatggggctttatattcgctattaaaacagttaggtttctcagtacaatttggcatttcaacaatgctatcaaatccgccaccagcggctgaatcgccaggacatggaacccttgctgtgaaatttgataatgatttgttcatcgttgatgcgactatattccatgatacaccattaccacttgccgactggacgtcagaccatcctgtatggggaacacgcgtccatcacgatcggggtttctggcatattaactggaaacctcttggccgacccagagttgattgccgactatttaatctcaatgcgcttcctgaagaatatccgcacagacatgagttgagtagatccaatagcaggtttgatggcgcacttcttatacgtatggccaacatggaaagtattaccggaatagtcaaaggtgaaaaagttatcagagactcatccggcaaggagtcgtttcagacattgacccataacgatcagaaaaagttattggttgagcactttaagatttcagaagaattagtggatagggtgccggaaaacgatctgctgaaaatttaa

SEQ ID NO: 94831 - DNA, 1281 bp, Enterobacter aerogenes
atgattaacaaactgcaaaccccacctttagctaaaaaggtggggctgtttcggccaatgcgccataaaacatatcgttatctttgtatcgctaattttatggcaaacattggctcttggatgcaaatatttgcgacgggctggctcgtcacctcgcaaacgaatgattcttccgtggcagctttagcacaaacgctgacacaaattccggtgtttctgtttgccgtgatggggggcgtactcgccgatcgttttaatatctatcgttacctcggcggaattaatattgggatggtattatcatctacgctcctggcaatcatatgcgttttttcaatacccaagattagtatcatattcatcttcacgtttttaacagcaacgggtacggcattaaaggcatcagcatggcaagccacgatgtcgtctttggtctctcctgatgaaatagaatcctcagcaacattgaatggccttagctataatttatcgtcaatcattggccccgttctgggttcatttttattcacccacaccggcccatcgacactatattttactaatgctatttgtttgatggcattggctacaatctatatgcttatgccgcacaggtcattaaaacctaaacagaaaaaaagttacttcttgcttttgaacgagggtgtaaaaacaagtatcagtaataaatgcttcaaggaaatactaacaactacggttttactgtttttttccatctccacatttcaagcccttctgccaacatatgttaatctcgttcttaaagccgatagcaatatgttaggtaccttgatgggagggttcggtaccggcgccgtattgtccgcatttactcttccgacgctcagaagcctttatcaaaggcataaaattttggcttcagctacattaatttacggtatttttttgttgttatttactcgttttcaatatgaattaattcttttgcccattaccattgttggcgggtactcatgggcggcaatcgtttctacgatgaattcagcagcgcaagcggtattctcaccggcgatcagagccagggccctttctgtatatagcatgtgcttttacggagcattgactttgggcagtttaacatggggcaagattgctgctttaattaatataaaaatagcatttatcattgccggttctttcatggtgataaatgcactttatatattaatccgccgcaaggtcgccgaaaaagaacaaagatccgtagaacatacatcttctgatattgcaagggagtag

SEQ ID NO: 94832 - DNA, 1230 bp, Enterobacter aerogenes
atgaaaataattttcgtcggcaccaagaatttttcattcttctcgaaatctattttaaatgattttgagaaaatcatcatcaccaataaaagttataaaatagatgacgaactagaaaaagcgtcgacggtaatccgtgtgagtgaagtttatgatgtgaattcaaaaacgttaaagcttgattatcaagagtgtatcgaaaagctgagtgaaatcgttcaaaacgctaaattataccgggtattttgcaaccaggaatcgaacctcgaagttgcggaaaagatccgctcattcttttccatttatgaccatatgggtggccgcgttgagctttttcgcgataaattgctaatgaagcaagccgttattgataatggtttacgtgcccctgtttacacggaattagcgcattcttctacgccagcatcgtatacagatctttacagcaaacttaaaggtaaatttattatcaaaccaagtaactctgttggcagcagaggtgtttacaagatattcaattcaaatgactacgacgatttcttgaaagataccgcaaatgatgactgtcaatttgaagccgaagagttcatttctggtgagctttatgagtttgattctgcactgcaaaatggcgaaatactctatagcaacgtcagcaaatacagttgcccgatggccgatctccaggaaggaaaaaccctgggctcgatcatgattgagagagagcaaccgattcatcagcgaattactcaatttggcataaaatgtctgaaggcgcttaaagcctcagacggttgcttccatatggagttattccataatgataatgatgaattagtattccttgaggtcgccgcgcgctctcccggccttatgaccgtaccggcttatcactgctgggagggggtcaacatgtatgatatagaactttatatacaaagtggcctgccagcatcggacctgattgtacatgatgccaacagagtttcttacccttctttctttattgtctatccgaaaatatccggaacggtaagcaagataaatacgccgaatattgatgccaatattgatattgactggagcgttcatccaggacaggtggtgactgatacaacgacaaatattgattatgcagcaaggttttttgttacatgtaagaacgttgagtcagcgaattcaatatttaactttctggtcaacgagtataaagccgttaattatgattaa

SEQ ID NO: 94833 - DNA, 1434 bp, Enterobacter aerogenes
atggaaagcatcgacaaactttcttataatttaaaaaaaattgccattgtaggagccggggcatctgcggctttattaatggaggcattaagtaaacgcatattaaatcaggggcataatttttcgataacaatatttgaaaaaaggttaagtctgggaaaaggtctggcatattctggtcagtctgacaatctaataataaataccccaatcaatacaatgagcgtttgcgaatatgataacgatgattttcgcaaatggctgtcagttaattatgagctaacacaagataccaatatctcccgaaaaatatatggacaataccttgaagataaaataaatcaatgcataacattatttgaaaaaaatggctgtattgtgaacattaaccattgtaaagtcgatagtgtcagcatcgatgaaaactatgtattgaattttcatggaagaagtgagttttttgatatatgtatcatcaccaccggcgggggtgtctcaaatttagcattacagcctaaagataaagcatcccgagttttgtctatttttgatgaaaaagagttatcattaatcaacaaaagccatatcgcaatagttggctccggacagagcgccgttgatgcctgcattatgcttgaagaattaaattcaggaaaccattacacccttgtttcccggagcggtgtgttgccgagggtaaaatccaatttatataaaaaacaattaactagtacgcttgcccataccgatctaaaaaacaaacctatgattaatttatgcagtgatgttattgaatccattaaatggaaaatggatgatgttcacgtgatgcaaccatcgcctgcttcgtttagatcgatggatactgacctcaggcgagcagctaaacactacccatcatggcaagatagcatgactaaaataacgccatacattaatgatgtatggctcaatttcacttccgaagagaaaaaatatttccaggataaatggcaaaaaaatctttattttttacgcagcgcgattatgcctgaaagtgcaaaaagattcctcgacatatacaaatccggccgcattggcattgtttggggagagtacaaattaacagccgtagatagtgcttttttgttaacaactaacaactgtcattttaaaattgattatgttatcaacgcgacagggattagtccgaccgctcattgtcaaataatgaaagatgaaatcgataatggccacattatccttaacgataaaaatggcttttgtatcgatggtaacagcatgaggttgctaaataaaaatgaacgcccgcatcgcggcctttattctatgggataccccactcagggggcagtaatgatagcaaactctatcgaacttttacgtcaatgcgcagtaaaaatcgctacacatatttctcaaacacaaatttaa

SEQ ID NO: 94834 - DNA, 786 bp, Enterobacter aerogenes
atggatgtattcttcgggaaaacgcgtttttccaattactttatgaccatggcgcaagctgaaactaacggattaatgaataccgcgcaggctgtttctgcttatcaccttcatgatcccctgacccgaatcaggtttcaggaaagtgttaaaagatttgccctttcaaagattaacattatccgtaatagcagtgatgataagcagtgccagcagtgcattcaagcaatcaggcaagagcgggaaaatctgcttattcaggacagaatgttgcgaaccggtgaagccatgctcactgcctccgtgcggttctaccgggaaaatgaaaaagtcatcggctatatcatcgatggaatcggtgttgttcttggcggtatgcaggttatcggaggttttggaataacggctagctcattaatgacaggaaacgttattggcgttattgctggtgcaacattgatgtttcatggttttggaacaatggctgaaaagttagatggtgttaattttgcagaaaaatattatgaagatgcatctcaatttttaggatttagtagagagttgggaaagctttcatatcaggtagtcgatctttcaacctctttttatggccttgccaaacttaccttaaaaccagaagcgtggcgcttgttttatttcactggcccagatttttaccgaaaagtaacaaccatgagtaagccagccatggcgttaaaagggatatcctcaacggtaaaagggatacagataggaaacacgatgtatgaagttaaagataaatga

SEQ ID NO: 94835 - DNA, 183 bp, Enterobacter aerogenes
atgaataattttttaaaacgatggttgtctactcaattgaagtactttgccagcaccctgatcccggtactacttattcttggattcgggatgctcgcagtaacattctggccttcttttgcctggggatcgacagcgatattcgcaattgtcgtgatcgccattaccttttggttggtttga

SEQ ID NO: 94836 - DNA, 432 bp, Enterobacter aerogenes
atgtttgaaatctatgttaaacagctattgcaaggactgacatctgagcacattggccatatccaaaagattctgattggcaagggagcgacaattgcttcaggggcaatgacgaaccaagcgctagcgtataccatcgtggcgtcagtgagctacaaatttgggcttaggattggggtcaatacaaaactggcaaaaataagcgttgctgcggttaccatagtcagttattacggatacgtacaagaggccgctgaagcggcaaataggctccgattaggacatcaaggttattacaacgcgttgtatgcagaaaaactggaaatgctttatttcattattgaacccgttatcggtttaaacaatcaccactttctcccaccaacatcagacaatgacattgctgacgcaattatgcgggttatcagatga

SEQ ID NO: 94837 - DNA, 252 bp, Enterobacter aerogenes
atgtttagcaactcagacctgatcaccaaaatgcaggccgataatttattagccgtgcgtcttgagaaagctttaggcggtgtgaaagattctgtacttgaccaagcgcgccgtatgcggctcggggcaagacgcctcgcgtactacacttcatgttttacggataactatcaggacgtgtgtgcagctcagaaaactgaagacattcgttttctggaaggactcacgcaattggtaaaacatgaagtgtag

SEQ ID NO: 94838 - DNA, 147 bp, Enterobacter aerogenes
atgctgccaagtcaattcgctcagcttgcccttgttatcgaccggagaagtaaaaacttgagtaaatctgcctgcaaaattccgcagctgcttttaggccggatggcgctaccgcttaccgggctacagcactgtgcgatttggtag

SEQ ID NO: 94839 - DNA, 732 bp, Enterobacter aerogenes
atgaaagcatcggcacagtcaacgaagtaccaggtgattaaaacggccctgttagacgaaattagagacggtacctttaagcccggcgaaaaattttacagcgagtcggaattaaaagaacgctactctgtgagttctgccacggtaattcgtgccattcatgaattagtgaatgatggttatttgatccgctaccagggaaaaggtacttttgtttcgaaagccaaacgcaatgagagtattattttttcagagtcagataacgatttaaaaggtatgcagtcagttaaagttatccaatgcgaattagaaaacgtttctgacattaaagaaaagcttggtttaaaagatgatgaaagatattaccgcattgcgcgcttgaaatttgacaacaacaaaccttacgcactgcaaatttcccatatcccggctcactatttttccagtaaattgacggttaaaaactcggctctcagttccatttacgaggcatttaaagtcaacaatggtcttgatatgtataccatgccgtaccgacaaactatctgcgcccaaaccgatgtcgagcctgaagtactgcagcaccttggtctcggcgccaatcagcccgttatcatgatgaagcgttttaccaataacgagcagggccagatcattgaatatattgaaacctggaaacggttagaatcattttatattgaaatcagaacaccagataagggggcaggatga

SEQ ID NO: 94840 - DNA, 438 bp, Enterobacter aerogenes
atgaatcaaatattattaatctctcatggaggtttcgccagcggcgccagacaggctacagaattgattctcggcgcacagcctaacctccatgtagttgaactggatggtgagaaaggtatagcagtatttaaacagaaacttcgcgataaaataaccgccctcagtacagtagaatcaaacattattattctttctgatttaaaaagcggttcgccgtataactccgcaatggaggttattgtcagcaacaacctgtgggataatatcaccctactctctgggatgaatttaaacttaattctcgaaataacgatggcgattgatgaaaatcatactcccgcctcgctgaatgaaataataacaacggcgcgtgatggtatttaccatttacagcaggcagcgcttgccgcgcaaacaaatgacggagacgagtaa

SEQ ID NO: 94841 - DNA, 783 bp, Enterobacter aerogenes
atggagcacattgcggtctggcagatagcgttactaacgctctattcagggctggcgatatatgacggcaacaacacgacgcttgggctggtgaaaccgagcatggcgggcttctttgccgggatgattatgggtgacatgaacaccggtcttatcgttggcggcaccctgaacctgctggtgctgggcgtgggtaacttcggcggcgcatcgattccggactacatgaccggcgcggtgctgggaaccacctttgccatcatcagcggccagggcgcagcgttcggtgccaccattgccgtaccgattgggctcttaatggtgcagctggatatcctcgcccgcttcaccaacacctttattcatcataaggccgataagctgattgaagacggtcaggtgaaggcggcggcaagaatgaacctgctgggccaggtgcctatctcgctctcgcggatgctgccggtgctgttagcgctgctcctcggggcaaccttcgttaatgacgtcgtgacctggatccctgtttccatcatgaacggtctgaaagtcgccggcggcgtactgcctgcattgggtatcgccatcctgcttcgttatttaccgattaagaagaacatctcatttctgattctgggcttctttctgtcggcctatctgaaagtgccggtgctgggtgccgcactgctgggactggcgattgcgctttacgtcttcaactcagaaaaacaggcaacgcaaaccaccgagtccccggcaaatggagcaatgggcgatgaataa

SEQ ID NO: 94842 - DNA, 780 bp, Enterobacter aerogenes
atgaataaagtactaacacgcgtattctggcgctggtttctcttcggtcagtctggctggaactacgaaaaaatgcagggtctcggctatctgtacagcatctacccgttccttgagaagaaatacaccagacctgaagagcagaaggatgcagctaaagtacacagccagttctttaacaccaacaacaccatggcgcctgggatcctcggggtaaatatcgccctggaagagcagaccgggcttgcgggtaaagatgccgttgccgggatcaaaaccggtctgatgggaccgctggcgggcatcggagatacgttgttcttcgttatcccgaccaccattatcggttccgtcgcgtcatacctcgcgctacagggcaacccggtagggcttatcctctggctgctattcgctctggttcgcatgttgtttatgcgctttagcatcagtaaagggtatcaggaaggggtgaacctgctgggatcgttgaccaacagcctcaacaaaattacccgtgcggccaacattctcgggctgacggtcatcggggcgcttattccctcggtggtgaaggcaaatcttaactttgagttcagctacggcgaagtgtcgctgaagctgcagagcattgccgaccagataatgccggggcttattccactgctggttgtggggttcacttactggctgctggggctcaaaaagatgaactcaactcgcgtcattttcgttctgattattttaggtatcgttggctacaacctgaatattctcggttaa

SEQ ID NO: 94843 - DNA, 492 bp, Enterobacter aerogenes
atgaaaggtattgttcacatccgcgtcgatgaccgactgatccacggccaggtggctacccgctgggtaagccatttcaacgccaaccgcattatggtgattgacgacaccgttgctgcaaacgacgtcgaaaagatgctgctgcgcagtgcggcaccggaaggctgcaacacctctattctctcttttgagaaagcgagcgccaatatcctcgccgggaactacgacggtcagcgagtgctgatcctgctgaagacgccggagctggcgctgaagctgatgaactgcggcgctgccctcacccagctcaatatcggcaatatgtccaacaaagacgatcgtcgccagattaaacgttcggtaagcgttaacgatgcagagattgctgccatcaacgcgttgctggaaaaaggcgtagcggtcacagcacagatgaccccggaagaaccaaacgcctgtatcactacgtttttaaaagccgataagggataa

SEQ ID NO: 94844 - DNA, 705 bp, Enterobacter aerogenes
atgtcaccacatcagcagcagtattatcagcatgtattagcaacgctggatcaggtgtttcttactcagagtgctgaagttgagcaggcggcggcgctgtttgccgagtgcgtcaaagccaacggcattattcacggttttggctccggccattcgtttgccgcggcggtcgagctggccggtcgtgcgggtggcctggtcaacaccaaagccatcgaccagttctatggaccaaccggctggtttgattcgctcaaagggattggcgatatcttttccggactgctggatctgcgcgaggcagactgctttgtgattatctccaactccggcaccaagccgctgcacgttgagctggcacgcaaggttaaagagatgggactgaagctggttgttatcacccgctacaccggagagtcggtatcaacgagcgagagcatttgcgactatgccgacgtcattctcgataacggctgtccggccggtgactgcacgctgagtatggataacggcaacatcatgaccggcccggtgtcctcgctttctgcggccttcatcatcaataacgtagtaatccgctgcatcgagatgctgctggaacagggtatcgcgccgccggtgatgcgcagcatcaatctggccggtggcaaagaatacaacgatgcgctgatgactcagtacaaagagcgcgtgtttacgctgtag

SEQ ID NO: 94845 - DNA, 1167 bp, Enterobacter aerogenes
atgaaagagactctgtctaatcgccttgcaccgctgccctttcctgctatcactcccgacgactgtcgggatgcgctggcggcatgtgtgcagcgcatcacgcgcaacatgggcctgtatggcgagaaattcccctctgcctgcactcacaacaatcgctatgtcctgaaagagaataacgactggaccaatggtttttggaccgggatgcaggccatggcctgggagttcagcggcgatacggcatacctggacggcgttgaacgtaacgtcgccagttttaaagcgcgcctggtggcacaccatgtccttgaccatcacgatatcggcttcctttatagcctgtcggcggtcgcgcactggaaactgacggagcgcgacgagttaaccccgcttatcgtggcggcggccgatctgctggcgaatcgttttcacgacagcgccggttttatccaggcctggggaacgcttaatgacccgcaggagtaccggcttattatcgattcactgattaaccttcctctgctccacgtggcggcgaagatcagcggtgagtcgcgttatagaatcgttgctgaacgtcactatgcggcggttatcaaaaacatttttcgcgcagatggctctactttccataccttctattttgacccgaaaagcggtgcgccctcacacgggaaaaccttccaggggtacagcgacaactcctgttgggcgcgcggacaggcgtgggccattctcgggatcccacttcactggtctgccaccggggaaaccgactactacgagcgctggcagcaggcctgcgagtacttcttccgctacctgccggaggacggtgttccggcctgggatctgctgcttgccactgatccggcggcgccaaaagacagctccgcgctggccattgccgtgtgcggcctgctcgaagcgcacaaacacttcccggaggccgggtacgagaaactggcgcgtcagcttctgcaggcattaatgcgcggcgcttctgcccgcgatgacgacgcctgcgaaggcttacttaaacacggtgtttacgcctatgcccttggcaaaggcatcgatgaatgtaatctctggggggattacttctacatggaagcgttataccgaatctaccaaccgcaatggtcaggatactggttatga

SEQ ID NO: 94846 - DNA, 759 bp, Enterobacter aerogenes
atgacaatgattcaaagttatttaaatattgtccagaagaaacttaacgacattacccaacagcaaagccataaaatcacctccgccgccgggcaactggcaaaggtcattaatcagggtggtgtggtttatattttcggctgtggtcactcacatattttcgctgaagatatgttttatcgcgccggcggtattgccccagtccggccgatatttatcgagcctttaatgctacatgaaggtgcggcagcttcatcgtattatgaaaagcaaaatgattatatcgccgggcatctggagaagttcgcgataaccaatagagatgcattaattgttatttcaacttccgggatcaaccccgcgccggtggatgcggcattgtgggcaagacagcacggggcattgactttggcgctgaccagtttcctgtatgccgagacccagccgtcgaagcacaaggctggcctcaaactgcgcgactgcgcagatatcgcgatagataaccaggtgcccatcggtgatgcggtgctgtcgcttgcggatcatgccacgccgtttgcgccagtctcctcgatgaccgggctctttattatgcactgcctgtttgcagaaatcatcgcaaagctggggcgtgataataaatatctaccggtgtttttgagcggtaatattgctaattcggcgcaacataatgaatatctcctggaaaaatatggcccccagatcccggagctgataaataacaataattttaaataa

SEQ ID NO: 94847 - DNA, 1413 bp, Enterobacter aerogenes
atgacaagtcataaactcagagtttctctgtgtgcatcgctgttgctttttattgccccaaatgcctttgcggaagaagaaacggattatgaagcgccttcgcagtttgagaaagcgttttatgatgaaggcaaattaaacttcaatacctcgttatacattcgtcatcgtgcagtcaaagatcctactaccggtaaatacggactgggtccggccgggatccagaaccagaccggtaacgtggcgattagctatatttctggctattacaaagatgtcattggctttgatttctggggcaacgccaatatcaaactcgggcatactgtcggtcagtcggagatcctttactacgactacgaatgtggccagccaggcaagttcagcccgtgcgagaagtcctacatgagcgtgtcggttgccgcactaaagctcaatcttggcgatgcaggtaccaacttcaagctggcggcgggttatacccccatcaactccggtaccgttaaaagcagttggggtctcaacccccacgctttccgcgggttcgacagtgccctgaccctcgataaactgcggctaacctacgcctgggccgaccgcttcaagaacgactggagccgtgattttaaaccgatgactacggcctggcaccagaacaacgccgccgggcttgatgacaacggcaaaattattaaagccggagaaataatcgattacattcacacggtgggtgcggtctataacttcggaagtaccgttctcgacgttggttacggcgaaggtaaaggctatcgtcgcaactggcaggcgctggtcgaacggaacgatactttgaccaatgctttctccctgcaaagtaagctcttctatcagggcgcgcgctacatcgaagatctgtcgaagattaaagatccatcaacggaatactatgttgggataggttttaacctgagtcacaacaataccgtgtggtcgctcggctacagtcagaactacgcgcccaacaccggggattacaacttccgcttaaccccgtgggcgaactccgataagcgtgattatcagccaacgctgtcacagctggaagactttaacgtttccggtgcccatgctgttcgttttggcgtgagttataacttcgcagattttaatctaccggagctaaccctgggaggggccggaacctacggctggcatgtggtgagcgatgtcagcaaaaccggttcagtgagaaagtacgacggtagtatggtgtctttcgatctatccgctcgctactcggtagccgagggtatggcgaaaggcctctccttcaccctgctccctgcactgttcaggtcgacggacagcaactataaaaccgatcgtaacgacgtgaagtttatcgtcggctacagcttcaatatcttctaa

SEQ ID NO: 94848 - DNA, 183 bp, Enterobacter aerogenes
atgcagactgaacctgaagtattaatcgaccataccgacgtgattcgcttcaccagcattgaacgtatcatcaccgggcgtaacactgcaccggcacagattgaaacgctcattcagcaacttgccgatatctcggcactgacccgcagtatcaggggaaaacggtcctcgactaggctatga

SEQ ID NO: 94849 - DNA, 1479 bp, Enterobacter aerogenes
atgttgctgtcctcgacacgtaaggactggctgggtaacgtccgtggtgacgttcttgccggtattgttgtcgcgctcgcgctcattccagaagcgatcgcattttccattattgccggtgtggatccccaggtaggtctctattcggcgttctgtatccctctcgttatggccttctttggtggacgcccagcaatgatttcctcctccactggggcaatggcgctgctgatggtgactctggtgaaagatcatggcctggagtatttactggccgcgtccatccttacagggggattccagctgatagccggatatctgaagctaggtgggctgatgcgttttgtttcacgctcagtggtgacggggttcgttaacgcgctggcaatcctgattttcatggctcagttgcctgagctgacaaacgttacatggcatgtttatgccatgactgcggcaggcctgggaatcatctatctcttcccctatatcaacaaaaccattccatcaccgcttgtgtgcatcgtggtgctgaccggcattgccatgtggctgcaactggatgtgcgaaccgtcggcgatatggggaaacttcccgacagcctgccggtcttcctgcttcctgacgtgcctttaaatctccagacgctgctcatcatcctgccttattctgccgggcttgcggtagttggcctgcttgagtcgatgatgaccgccacgattgtggatgacatgaccgacacgccaagcgataaaaaccgggagtgtaaagctcagggtatcgcgaatatctgcacatcctttatcggaggaatggcaggctgcgcgatgattgggcaatccgttatcaacgtaaaatccggtggccgcggacggctttcaaccctcacggcgggcgtggtgctgctttacctgattgtgttcctgcgcgactgggtatcccaaatcccgatggcagcgctggtcgcagtgatgatcatggtttccatcggaacattctcctggcgctccattaccaacctgcgtacacaccccctttcaaccagcgtggtcatgcttgccaccgtcgcggttgtggtggcaacacataatctggctttcggcgtgctgaccggtgtactgattgcttcgctcaactttgccactaaagtatcccggttcatgcgtgtaacctcagctctggagggggcgacccggacatataccgtcaccggccaggtattctttgcatcagcagacagctttaccagccacttcgatttccgtgaagcgattgagaatgtggtgatagatgtttcacatgcccatttctgggacatcacatcggtaagtgccctggacaaagtggttgttaagttccgcagagagggcaccgaggttgagatacgcgggatgaatgatgcaacccgcaccatcgttgaccggtttggtgtacatgataaacccgaagaagttgataaattaatggggggtcattaa

SEQ ID NO: 94850 - DNA, 240 bp, Enterobacter aerogenes
atgtccgtaagtcaagaaatgaacaataccgttgttgcctgcgtggacggttcgtcatcaacacaggccgtctgtaaatatgcggcctgggcggcctccgcgctgaagatatgggccgaggaacacaacaggttggcgttctgcctgtgcgaccgtggtcgcatggctatcatctgtagccatttccccctgctctacgggcttatctttcttcacagccatagcgttcaccttaaatag

SEQ ID NO: 94851 - DNA, 1287 bp, Enterobacter aerogenes
atgccacagattgaagaattgcgtcgtcagcgtgcgggtatcaacgaacaagttcaggccctggcaaccattgaagcgaacggcggtactctgacagcagagcagctgacagagtttgctaacctgcagcagcagttcactgatatcagcgccaaaatggatcgtatggaggcggcagaacgcgccgctgcagtggtcgcgaagccagtcaaagctacccaacacggcccggcagtcattgtcaaagcggagccgaagcaatacaccggcgctggcatgacgcgcatggtgatgtcgatcgccgctgcgaagggcgatctgcgtgatgcagctgtctttgctgctgaagaactgaatgaccagtctgtatcgatggccatttccacagctgcgggctccggtggtgcacttatcccggagaacatgcaaaacgaggtcattgagctgctgagtgctcgtactatcgtccgtaagctgggcgcccgttctatcccactgccaaacggtaacctgtcgttaccgcgctccgctggcggtgcaagtgccagctacactggcgaaggaaaggatgcgacggcatctgaatcaaaattcgacgacgtaaaactgaatgcaaaaaccatgatcgcgctggtcccaatttctaaccagctgattggccgtgccggttttaacgttgagcaactggtcctgcaggatattctgaccgctatctctgtccgtgaagataaagcgtttatgcgtgatgacggtaccgaagatacgccaattggtatgaaagcgcgcgcgacacagtggaatcgtctgctgccgtgggaagctgccgcagagatcaacctgaataccgtggaccagtatctgaacagcatcattcagatggcaatggatgggaatagcctgatgattaaatgcggttggggtatgtctaaccgtacttatatgcggctgcttgggctgcgtgacggcaatggtaataccgtctacccggaaatggcgaatggtatgctgaaagggtatcggattgaacgtaccagtgcgatcccggctaacctgggagaaggcggtaaagaatcggaaatttattttgccgactttaacgatgtagttatcggtgaagatggcaccatgaaggtcgatttctcaaaagaggccacttacaaagatgcccaaggtaatctggtttccgcctttgcccgtaaccagtcgttgattcgtgttgttgttgagcacgatattggtttccgtcacccggaaggtttggtgctgggtaccggcgtcctgttctaa

SEQ ID NO: 94852 - DNA, 921 bp, Enterobacter aerogenes
atgacaacgaaattaattaaccttccgcacctcgcggagatggtctttggcgtgccgcattacgtatcacgacaaacgatggactcagtaaaggcggtactaatcccccgcatccagggaacggtagagaatagcggcatccagttagcgctggacccggagaaagcaccggcatcggagcaggtacagccagccggtggcgtggctgttattcctgttcacggattgctggtagcgcgtcgcggacaaatcacgcaggcctgcacggagctgactagctatgagcgaatccgcagccagctgaacgcggcattaaacgatccatcaatcagcgaaatcgttctggatattaactctggcggcggtgcggcagtgggctgtaaagagctggctgattacatttatcagtctcgcgagacgaagcccatcacggcaattgtgaattacaacgctttttcagccgcgtatttcatcgcatcggcctgcagcaaaatcatcgtaagccagaccagtggtgtaggttccatcggtgtgattatggagcacctggacacatcaaagctggaagagaaaatggggctgacgtttaccacgatcttccggggtgataacaaaaataacggtactcaacatgagccactgagcgaagaagcacaggccatgttccaggggatgattgacgaaatgtacgagacgtttaccgggtcagtagcggaatatcgcggcctcgaccgtcaggtcgtcgttgatacgcaagctgggctgtattttggtccaggcgctgtttcagcaggccttgctgatgaaatctcagacccacagtcggcgattaatgcgatcgccgcgaagtataagcaaccccgtcaaaaaacctccattcagatgcaggcagccgcgatggacctgcaaaccaaaatgtaa

SEQ ID NO: 94853 - DNA, 666 bp, Enterobacter aerogenes
gtgttccgtcgtggcaccacaatgagcggcgtgattgaacggccaaaagaagcgggagcaattaaaagtcaggacgcgattgaccgcctgttggcgaaatggacagaccgctattccgggatacacaacatgttctctgtggcgctgctgcaggaggggatgagttacaaatcgctctcgcaggacaacgagaaagcgcagctgctgcagtcgcgtcagtggggcgtggaagaggtttgccgcctctacaaaatcccgccacatatggtgcaaatgctggcgaaagcgaccaacaacaacatcgagcaccagggcctgcagttcgtgatgtatacgctgctggcatggttgaagcgccatgaaggcgcgctgcagcgcgatttgttgctgcccagcgaacgccgcgacttgtatatcgagttcaacgtctccggcttactgcgtggtgaccagaaatcgcgttatgaatcatatgcgcttggccgccagtggggctggttgtcggttaacgatatccgccgtatggagaacctgccgccgatagccggcggtgaaaaatatctgacgccgctgaatatggtcgacagcgcacaaatcatccctggcgataagaagccgaccgcgcagcagatggcagaaatcaacaccatcctgtcccgatcctga

SEQ ID NO: 94854 - DNA, 618 bp, Enterobacter aerogenes
atgacaactcagtatggattttttatcgattccgcccgttgcaccggttgcaaaacctgcgagctggcctgtaaagactacaagaacctgacgccggacgtcagcttccgtcgtatctatgaatatgccggcggcgactggcaggaggacaacggcgtctggaatcagaacgtttttgcctactacctttccatcgcctgtaaccactgcgaagacccggcgtgcaccaaggtctgcccaagtggggcgatgcacaagcgcgaagatggttttgtggtggtcaatgaagaggtgtgcattggctgtcgctactgccatatggcctgcccgtatggcgcgccgcagtacaacgccgctaaagggcatatgaccaaatgcgacggctgtcacgagcgtgtggcacaaggcaagaaaccgatttgcgtcgagtcctgcccgctgcgggcgctggacttcgggccgattgccgaactgcgtgaaaagcacggccaactggccgccgtggcgccgctgccgtcggcgcacttcaccaggccgagcattgtgataaaaccaaacgccaacagccgtccgtgcggcgataccaccggctatctggccaatccgaaggaggtctaa

SEQ ID NO: 94855 - DNA, 2364 bp, Enterobacter aerogenes
atgaagacgttgaaacactggagtttgcaccaacagctggcgcatcacgttgaattgaccgttgatggccagcacactttgtgtctgtatgtgctggaagagaatttattccgcgtcctgctgaagcgccagggccaactggcgctggatcgcacctggagtatcgccccgcagcaggatgtgccgtgggaaggccgcgcgcgggatgacctcagcggttttagcctcccggcctggcagatgaccaaagaagatgacgcgctgaccatcgccacccgccagctgcgcgttaccgtccatcagccgctttggctggagtggagctatcgcgacgaggccggtgagtggcagacgctcgccaatgaccgcccgaccagcgcctatctggcgaatgcccacggggatggcgtcgcccattatcttagccgccgtaaagatgaacgtttctacgggctgggtgaaaaagccggcgacctgcagcgtaacggcaaacgctacgaaatgcgtaacctcgatgccatgggctacaacgccgtcagcaccgatccattgtataaacatattccctttaccattacgcagcgcagcgatatcagctacggcctgttctatgacaacctgagcagctgctggctggatctgggcaatgaaatcgacaactaccacaccgcctatcgccgctggcaggcggaagccggcgacatcgattattacctgtttaccggtaagcaggtgctggatgtgaccaaagcgtttgtccgtctgaccggtaaaacgctgtttgggccaaaatggagcctcggctatagcggctcgacgatgcactacaccgacgcgccggatgcgcaaaatcagctgatgaattttatccgcctgtgcgagcagcatgcgatcccctgtgattcgttccagctctcttccggctatacctcaatcaacggcaaacgctacgtctttaactggaactacgacaaggtgccgcagccaaaattgatgagtcagtcgttccacgatgccgggctgaaactggctgccaatatcaaaccgtgcctgctgcaggatcacccacgctatggcgaagtggcggaacgcggcctcttcattcgcgattcgcaaaccgatgcgccggagcgttccagcttctgggacgatgaaggttcgcatctcgacttcaccaacccgcacaccgtgacctggtggcaggaaggcgtgaccacccagctactggagatgggtatcgattcgacctggaacgataataacgagtatgaggtgtgggacggcgaggcgcgctgctacggctttggccgcgaaatcgccattaagcatattcgtccggtgatgccgctgttaatgatgcgcgcctcgctggaagcccagcagcgctttgcgccgcaaaagcgcccgtatctgatctcccgctccggctgcgccgggatgcagcgctacgtacaaacctggagcggcgacaaccgcactaactgggatacgctgcgctataacacccgtatgggattagggatgagtctttccggcttgtttaacgtcggccatgacgtcggcggtttctccggcgataaacccgagccagaactgttcgttcgctgggtacaaaacggcgtgatgcatccgcgctttaccattcactcgtggaatgacgaccagacggtcaatgaaccctggatgtacccggaaatcaccccggcgatccgctctgccatcgagctgcgctaccgtctgctgccctatttgtacaccctgttatggcaggcgcatgccgatgacgaacccatgctgcgcccgaccttcctcgatcaccagcacgatacccagaccttcgccgagtgtgatgactttatgctggggcgcgatctgctggtggcaagcgtggtcgagcctggcgcccgtcagcgccagctgtggctgcccgataatcaggacggctggtacgatttttacaaccaccagtggttcgccggtggtcagtgggtgacgctggacgcaccgctggaaaaactgccgctgctggtccgcgccggcgccggtctgccgctcagtgaacgtatcagccacgtcgatgcgcaaaaagacgatcgtcgcgaactgcagttgttcccactgaaaggtaccggctcaacccgcggtttgctgtttgaagacgacggcgaaagctggggctataaagagggtgatgcgctatggctggagtgggaaatgacctgcagcgccagcagcataaacctgaagctctacgctcgcggcaactatcgcccagcgtggaaagcgctgaagctgtcattaccggcgggagaaaaacgcaaactgctggtgaatggcgtcgaagagaccgagtggaggctctga

SEQ ID NO: 94856 - DNA, 531 bp, Enterobacter aerogenes
atgttaggggaaaaggacatttggtctggtaagcatagatataacctatccttaagagattcaggtattgatgaaaatattgatcgtgcttcacaatatttttgtgaaggtaaaagcttagacgaacttacagatgatagtatagatattaattttgcgactcattatggtaatatagggagatgttatttcctaaaaaatgaaatggccatggcgttaaaattaatatgtaaatcatatgcttcttttaaaaaaggaggtttaagttatcataacactcataatattggatatgctgcaaaatggatatctgaaatatcatccaaatcagatgtaacgaatttaaacagtatttattttttagtatacgctaagaatatatggaagaatgatatgccaggggaggctaataaaatagagctaaccatttcaagcataccccatactactgcaattcagtcagttctaagcctagagtcatggcagattgaaaaatattgcaatgaatgggtagaaaacatacttcaatag

SEQ ID NO: 94857 - DNA, 729 bp, Enterobacter aerogenes
atgaaaaaattctttgactgtgtaattaatactaatcacaattcgagatttattttcacatgcaggccatttatccatcttgcgatggttggcacatatcaaataagacttgagggactccgagaacatgaaatacaggaccttataaccaaataccatcataatataaaggataatgatttaaggaatcttgcagaaagattatacagaaatacccaaggacatccattatggatgggcttaattttagcacaatcaagagtcaaatttgaaaatatagacaaagttttaaaaaaaatagagcgcagggatatttcgcaagacgactctaatttctcaactatagtttcggcaactgtgcttgagaatttatgggacggattaaaggaaaaagagaaaataattttaagaactctatcaatttgtaatattgctgaatcacatgacgaactttcaaaaatagtttcaaagaaacttaattataatcaattttccaaagtcataagatcactgaaatctttaaacttactagtcgagaaaggaagtaatggatacttagagttacatcctttagttagagagtttataaaagggaaatatgacgaaagagaacaggaaagttacattgcattatatgttaattatttaaacggaataatcgtacttataaaaaataaatttggaaaagttctcccccaagacgaaatagagtttttattgaaaaaatag

SEQ ID NO: 94858 - DNA, 1200 bp, Enterobacter aerogenes
atgtcttatataattccaaatcaactaaaaacagcaattaaagagaaaaggttaattctcttcataggtgcaggattatcatctaatgcaggtttaccattatggaaagacattgttagtctcacgctagatcatcccaatattgagaaaggagaaggatataaagccgcattaaatcaaggattatttacaccgcttgaaatactagataagataaaaaatcacaataagcgagaaatatatacaacatttgaaaaagaaacatctttaaaaaaagaatcagatatacataaaaacctttcaaaaatcagcagaaaaattataacaacaaattatgattgcctaattgaagacaatacaaacatagaaaaaatagatactaatagtgtttataagttacaaaaactagatgatgcagatgaattcgttctcaaaatacatggatgtacaagcgctattgataatgcagtaatattcacagcagattacaaaaatctttatgaggaaaatggattagcaaaatttcagttgaccaagatattatcaacacatcattgtctttttataggatatagtttaagtgatcattacttagttgaattatttgactcacttaatgatatttatgaaggattaggaaaagaacactatattatatctacagaaaatattagtcataatttcatcgataccattaagataagtagctatgatgatatagaaaaaatagttgatattttaactgagtatagtaacccagagacttccgacacaccttcttcaattgaagtaagtacatctgaaaatatagaaaaagatgagcatggtgaagagtcatatcaaattaccatttcccatgacaagccaccaattatagaacattgggccgggcgtattgccgagatggatgctttaaaattattacataaagcctgttttataacaggcattggaggacaaggtaagtcagccttggcatcaaaatatctaacggaaatagcacctaatgattttgatattcttgagtggtgtgactttaaggaagaagaattaaactttcaaacaaaactataccaacttatagaagttgtttctaataatacagttaaaaccaatgaattaattggtttagaaacagatactcttgttgatatattttttaaagaacttaatgaacagaaaggttttttttgtatttga

SEQ ID NO: 94859 - DNA, 1701 bp, Enterobacter aerogenes
atggacgctatgttggacagagttattagagagtttttccctaatacaaatgttccatcctggaaaaaatggattttcagagtcgcatttggcagtaaggcattttctcgtttaactgatgacgatcagttagttaataaacatggagtgccttgggtcaattctatcattgagttttttaaagtacgatgtgaaacggaactctctgattttaataatataccccggcacggtgctacggttattatttcaaatcatcctacggttttggatggtcttgccttaatacaaactgtctctcgggtcaggaaagatattaaaatagtggctaaccacattttgccaatgatattcccacagatatcagaacttaccattggtattaagaatatggctggtaaaatgagccataagaaattcagggagatgaacgatcacctgaggaatggcggtgtattgattatttgtcctgcaggtaagttggctaactggtctatttctggattacaggaacataagtggaatcccgggtttttacagctggctatgagaaataatgcagcgctggtgcctgttcatattacaggatcaaatagcaaaacttattattttactgcaacagtctggcggcaactgtcaaatataatgattattcgtgaagctttacgccatcatgataagaccatgaaaatcaacgtagggcagcaaatatccttatcttcgtttaaacgatataataaagatctttctgccgcggcaagtgtatgcttgatgcatctccagagtatggggaaaaatggacccgcgcttgttgatacaatttcaccacaagaattaatagaaagcagagagagtttaaaaggtaccatagaagagtgcgaagttttaagacagtttaatgatggtaaaaaattattgatatatcgccaaaatactggcggtacctcacccattattgatgagttagggcgcttacgcgagagttgttatcgtgatattggcgcaggatccggtaaagatagagataacgatatttttgatgaaagctattaccatatcattttgtgggatccttctgatattgaaatattgggcgcgtatcgtctaatacccgttggtgagcagctagcgcgacatggggttacaggcctctacagcaacagcctgtttaaatatcatgatagtgcatattgctgtttagaaaagtgtgtggaaataggccgtggctttatccagaagccctatcaaaaaagtaatgtactcgattatttatggcgagggatatttgattttataaaaagatatccagactataaatatttgttaggtgtattgaccattcccgggtcttttcctgaagatgtgcaaaaactcattgtgtcattttataatatgtacttttccacctcaattgacttttgtacgccaatagaattattcactgcagaagatacacgaagtgatagtcctttttccggaaaagattttagagaagactggtgtgtgcttaaccatctactgagagaaaaaggttatgagctaccatggccttttaaacagagtgctaaatggttttctccgggtggatcgtcgattatgtcattcacaaaagataacacttttaactcgatagcaggattaaacctgagtgctattgataaactgaatgaaatatactttaagcactatttaaaggattga

SEQ ID NO: 94860 - DNA, 768 bp, Enterobacter aerogenes
atggagtcctttgatactcaaaacaatcttctgcgggctgaggaaaaactttcagcagagagcgcattattacgaaatttagagtcgggagaacggcccgaagagctagatattatacgtgcccagattaaaaaagcacgatcggcagaatcccaggtaaaacgccagcttgggcggtatcgtaatctttatgccagtcatgccatatcgctagcggaatgggaggatatcagggacgagttaacgcaaaaaggcgcgcaggtcgaagagttaattaatcaactcaaggcacggcaattgcctgctcgtcaggatgaaattagccaacagctctcgctggtggctgtggcaaaacacgaacttgataaggctctttgggatgttcagcaagcgacgattatttctccggtaaatgccaaagtctttgatatcatttatcgtgccggggagcgaccctccacgggtaaaccaataatcagtctgttacctcctgataatataaaagtacgcttctttatacccgaagtgatgctcggtaaattaaaagtcggagataaggtaagacttatatgtgatggttgcgcagagcctatccctggtgttattaactatatcagtcctgaagcagaatttacgccaccggttatttatagtacgaaacgccgtgagaagctcatttttatggctgaggcggttcccgccccaaaccaggctgagcggatgaaaatcggccagccgtttgatgtggagattattttggatgaataa

SEQ ID NO: 94861 - DNA, 918 bp, Enterobacter aerogenes
atgaataatctttgtattgatgtgcggaatcttaataaacattttggcgagcatcatgtcgtaaaggatttctccctacaggttgaaaaaggcgagatttatggtttccttggcccgaacggtagcggaaaaacgacatcgattcgtatgatgtgtggtttgattacgccagattccggagaaggcacttgtctggggatggacatctttactcagcgggaaaaaataaaaaagaatataggttacatgacccagtatttctcaatgtggggaaatttaaccatccgggaaaacttactttttatttcccggttatatagcctcgaccagcgtaaagcccgagttgaacgcgcgctttcagagttaggtctcactacccgacagcaccagctggctaaggagctttctggcggctggaagcaaagaatggccctcgccgcttgcatgttgcatgaacctgttttgctgtttttggatgaaccaaccgctggcgtggatccaaaggcgcggcgggagttctggcaaatgttgcaccagctatctgacagggggatctcaatactggttagcacccattatatggatgaggccgagcgctgtcataaggttgcctatctgtcttatggccgcctactggcaaatggcactattgcgtctattatcgcgtcccagaatcttatcaccatgcgaacgggcggcgctggtctgacggtgcttgaaagccagttacagcgcttgccggatattgagcaaacggtcatttttggcaatcagctttatattacttccagagatgaagcgaagttaaaatccactctttttgcatttacacaacagggctatgagttctgccgggttgataccaatctggaagatgcatttacctacttgatgaaaaatgattgtgaaaaaaattaa

SEQ ID NO: 94862 - DNA, 1146 bp, Enterobacter aerogenes
atgattgtgaaaaaaattaatttaagcttctcattaactcgtttggttggggtggttattaaggaaatccacgaattacgtcgtgataaggtcagcatcagtatggtgctcctgacacctatttttcagctgatcatacttggctatgccatcaacatggatccacataatcttcctaccgcattgttaaattacgataccgaaaggatgagtcagatttttgtgacggaggcacaaaatacggggtatttttcgatgatttccgtcgattctgaagaggcggcgcagaaagcatttgttcggggggatgttacctttattgtgactattcctgagggatttacacgcaagatgcttcgtggagaaaagcctcaactgctcattcaaggggatgctgtcgatccgataaccacggggaatgcgctaagcgcacttgtgcaggttgcgaaatcgatgttccaggaagatttgccgggtaatatgcgtatagcgcaaaaagaggatgatttcgagcttattatccatcgaatgtttaacccggaggggattactcagtttaatactataccaggtattatggggtcgatactcagcacaacattgattctgatgactgccctgtctattacccgtgaacgagaaaatggtgcgttagaaaatttactcgtttccccgttgtccgggcttgaggtcattattgggaagataacaccttttgttatcattggcctgtttcaggcgacgttaatccttattgccgccgttctgttgttcgatattccccttcacggtagcgttttcctgctgttttttgtgttgttaatttatgtctttctttgcctttcaattggcattggtatttctggaatggcacaaaaccaactgcaggcgctgcaaatgtcgtcattttattttatcccttcaattatgctttccggttttatcagtccctttattagtatgccagactgggcgaaagccattggctcttgtttaccgctgacctacttcatccgactggttaagggcatcatgctgaaaggatattctgcgacggcattattacccgatcttttaccgctgatcggtctggcagtgattgtgattggcgtggggttgaaatcttaccgtaaaacgctggactaa

SEQ ID NO: 94863 - DNA, 1059 bp, Enterobacter aerogenes
atgaaaatattggtgataggcccctcatgggttggcgacatgatgatgtcgcaaagtctttatcgtacgctcagggcgcgctatccccaggcgattatcgacgtgatggcgccggcatggtgccgtccgttgttatcgcgcatgccggaagtcaatgaagcgatcgccatgccgctgggccacggcgctctggctatcggcgaacgccgcaaactcggccacagcctgcgcgatcgtcgttacgatcgcgcttatgtgctgccgaactcgtttaagtcggcattggtgcctttctttgccaacatcccgctgcgcaccggctggcgcggcgagatgcgctacggcctgcttaacgacgcccgcgtgctggacaaagacgcctggccgctgatggtggaacgctacgtggcgctagcctacgacaacggcgtcatgcgctgcgctaaagaccttccacagccgctgctgtggccgcagctgcaggtcaacgacggcgaaaagtcacaggcctgcaacgcttttaatctctcaaacgagcggccaattatcggcttctgccccggcgcagaattcggcccagccaaacgctggccgcattatcactacgccgcgctggcgaaaaagctcattgacgatggttatcagatagcgctcttcggctcagcaaaagataacgatgccggcaaagagatcatcgccgcgctcagcagcgagcagcaggcctggtgccgtaatctggccggcgaaacgcagctggaacaggccgtgattctgattgccgcctgtcaggccgtggtcagcaacgattcggggctgatgcacgttgccgccgccctggaccgcccgctggtggcgctgtacggcccgagcagcccggactttaccccgccgctgtcgcataaagcgcgcgttattcgcctgattagcggctaccacaaagtgcgcaaaggggatgccgctgagggctatcatcaaagccttatcgacatcactccagagcgcgtcctgcaggagctgaacgaactgttgacggaaaaaaccgagcacgaggaagcgtaa

SEQ ID NO: 94864 - DNA, 438 bp, Enterobacter aerogenes
atgcggttagcgattgaacacctgctggcgctgcgtggatggtcgctagcgttactcttcggcgcagtgttggctgcggcaatgtgtctggcgttttcgcttgctgctgtcagcgtttcacagcccgcgccagcgccgctaaaggcgcaatggcggcgagtattgccgctgcgcgccacgctacagcagcgcgtggtccgtagttggacggcccggcgtttttcgccgctggagccgcctgtcgccggcgtcactttacagacctggcaaccgcgagggcgcggcggcgaaatgcgtgctgcggttgactggcaggcggtgccgccgctgtttgcctggcttgccgattgcggggtacatcctggcgctttttcattgaatgccgaaaaaggagcgttgcagttgtcgctgcagctggagagggacgatgaaacataa

SEQ ID NO: 94865 - DNA, 201 bp, Enterobacter aerogenes
atggcggtacgtaaacgttttattgccggcgcaaaatgcccggcgtgccaggcgcaggattcactggcgatgtggcgcgagaataatgtcgatattgttgagtgcgttaagtgcggacatcagatgcgcgaggccgatagagaggtccgcgagcacgttcgtaaagaagagcaagtgatcggcatttttcatccggactag

SEQ ID NO: 94866 - DNA, 867 bp, Enterobacter aerogenes
atgcaaacggcaatgcagtcactgggcgacttcctgcgggcgctacgtttgcgtctcgatcccaccgcgtttggctttgttgcgggcagacggcgtacgtccggattgcgccgcgaagaggtggcccaactcgcctgtatcagcccaacctggtacacctggcttgaacaggggcgcggcggcgcgccgtcgcgggaagtgcttaatcgcattgccagcgggttgcgtctgacttctctggaacgcgaacacctgtttattctggcgtttggtcatccgcccgacgcgaaatttaccatttctgccgatgttacgccgcgtttgcagggggttctggatacgctcaccatcccggcgatcgtcaaaaccgtgacctgggatgtgattgcctggaatccccccgctgcatgcgtattaacggattacggacaactaccgcgggaggaacgtaatgttctacgccgaatgtttaccgatcctgttgtacgccgcgcgcagagtgactggcaggcgatggcgcggctggtggttaacgcttttcgcgccgacgtagcgcgggcaggacaatctgcggagatcgacagtctggtgacggagctttcgcaacgaagccctgaatttgacgcctggtggcgcagcaacgacgttaccagccacggtgaaggggcaaaacgtatttatcacccgcaagctggggcgatcgatcttgaattttcgacgtttatggtagagggccgacaggatctgaatatgatcgtttttaacccggccaatgaagagagccgccggaaaattgatgaacaggtaagacaattcctctcttacggcggcgagtcagtccgccatgataccgccatccacaaataa

SEQ ID NO: 94867 - DNA, 906 bp, Enterobacter aerogenes
atgcgagtattacttaccggagccagcggctttatcggctcccgcatcctgacagaactgctgacagccggacaccaggtgaccggccttgcccgctcggagaacagcgcacaggtgctcaaaaaagcgggtgccgatgttcatcgcggtacgctggaagcgccggattcgattgtgacagcagtacagtatgccgatgccgtcatccataccgcgtttgaccatgattttcaccattttgtcgatagttgtgaaaaagaccaacgggttattcacgccatcggccaggcgctgaaaggcagcgatcggccctttatcatcacgtcaggcaccggtatcggcgacgacggcgacacggccctggcgcgggaagatcagtttaaacctgacaacatgaatccccgggttgcctccgaaattgagggtaacgccctgctcgctgaaggggttaatgtgcgggtggtacgcctgccccaggtccatgacaccacccgtcaagggctcatcaccggatacattcagaacgctgttgaaaaaggcgcagttgcctgcatcggtgagggcgacaaccgctggtcggcggcccacgtcagcgacgtcgcaagattgtaccggctggtgctggagcatggtgaaaacggaaaacgctaccatggcgttgcagaagaaggcgtatctctccggcagattgcggaagtggttgcggggaagctcaggctgccgctgatatcaatcacgccttctgaggcacaaacacattttggctggttcgcgatgtttgccgccatgaatctacgcgcttcatcggcctggacgcgtcaacagttgggctggcatcccaccggccccagcctgaccgacgatttgcagaatatggattacacgtcgtttttatcgtctcaataa

SEQ ID NO: 94868 - DNA, 492 bp, Enterobacter aerogenes
atgccaggtttcgggcttgatgaggggcaattccacttctttatgcagcctgatggtgcgatgcaggttctcgcggtagaagacatcggcaaaattgtcgccgcgatttacgctcagccggagcgattcaaaggcaaaacatttgaaattgccagcgatgttgtcaccggcctgcagctacaggagctgttctcagcagcggcaggacggctgattacttattctcgtttttccgatgatgtgctgaccgcgaatcccttcctgcaaaagttgactgcgctggcggatgatggacggctggtagggcatgcctccctggaggagatgcggcaactgaatccgcaacgcaatcctttgagtcctggctggcgggaaatgggcgtgatgctttcaaacgggcgctggcattctctgccagctgggagtttaaccggtaaatccttcacccggctccagccatgcggagccgggaaggggttattgagacgataa

SEQ ID NO: 94869 - DNA, 183 bp, Enterobacter aerogenes
atggtcgaaactattggcagcgtatggatatgccgttcaatctccgcttttgtgtcgaaatgcacaacgccggtgaattacccctcgtttacgctgtgtattttgcgtcacaagcgccgggcgcaggatgccgcacttaactggctaatggcgcagttaaaaacagccatgcagcggttttaa

SEQ ID NO: 94870 - DNA, 900 bp, Enterobacter aerogenes
atggataagctggcgtcaatgcaggtctatgtttgtgtagtcgatacccatagtttcgccagggcggcagaagtccttgggctgccacgttcaacggtatcgcgggtcattaaggagctggagtcctggcttgggattcagcttttacagcgcaccacccgcaaactcagcgtaaccgcagatggacggcgttattacgacgagagcaaaagacttctggcggatatcgcaacgatggaatcttcattccccggccgttccgcacagcccaaaggccgttttaaagtgggaatgccgcagtcacttgcccggcattgtattatcccaaggcttccggcgtttctgcgtcagtatcccgaactggagttgctgctctgctcaagtgataacgtcgaagacatcattcaggaagggtatgactgcgtgattcgtaccggcaggatcgaggactcaacgacgctggtcgcgcgccctctcgcaaactttaggtgggctgttctggcctcgccagattatattgccgcccatggtaagccggataacgtcgacagcctggaaagacatcacgccgttggctacctgaaccaccgcaccgggcgtaccaccgactggttttttacgctggatgatggcgacgtcgcgatccgtatgaaagagacgttgatcgttgatgatactgacgcttatatccaggccggaatacaaggggtcgggttgattcgtgtcgccagctatcttgttgcgccctatctgaaaagcggagcgctcgttctctgtatggagaacctctcttttgatttaccgctttcgctggtctatccgcaaaaccgctatcttcctccgtcggtacgcgccttttatgactggagcagagcggtgctgcaccaacacggcgactga

SEQ ID NO: 94871 - DNA, 930 bp, Enterobacter aerogenes
atgaaagaacgtgatgttaaaacgggtgaaaaagtattagtgcttggcgcaggacaactgggggctgccgtgttgaagtgtctgattccagcggtcaccaaacacaatggcgccgtttcggttatcgtgtcgcccgactcccgggataagcaaggcaacctgcagtctgatactcatcaaaaactggctgatacaggggccaaatttatctctgtcgatgtcgctgccagcacgattgacgcgttaaaaaaccacttcgcggattttgataccgttatcaactgcatggggtttgtcgctggagcgggaacacagataaagattacccgcgcggtactggaggctggcgttagccgatattttccctggcagtttggcgtgaattacgatgtggtaggcaaaggtagcggtcagcccgtttgggacgagcagtatgatgtcaggactctactacgggaacagaccgcgacagaatgggtaattatttcaaccggtatgtttaccagttttctcttcgaaccgacatttgatgtggtgaatttagccgaaaaaaccattaatgcgctcggagattgggaaacacagatcaccgtgacatcacctgcggatattggtcgactcaccaccgaaatttatttgcaccagccgcgtatagcgaacgaggtggtctttgtcgcgggtgaaacgacctcttttggaaaactggcagaaacggttgaacgcgtgacaaaacagacctttgccaaaaacgtattgacgctgccagacctacgggatgcactgcatttaaatccggatgaccaaatgcttcgctatcgcgcagccttcgcccgaggagacggcatgtggtggccgatgagtaacacctggaatgtacagaataatatgccgactcaagatattgaatcctggcttaaaaccgttatttaa

SEQ ID NO: 94872 - DNA, 1314 bp, Enterobacter aerogenes
atgtcaggactcaaaattgttgtgattggcggcggttccagctataccccggagctcattgaaggtttgcttaaacgccaccatgagatgccggtcgcttcgctgtggctggtcgacattgaagaaggcaaagaaaaggtcgagattattgccgggctggcgcggcgtatgattgccaaagccggactggccattgaggtggtcgcgacccttgaccgtgagcgagcgctacgcgatgccgattttgtttgctcccagtttcgcgccggttgcctggatgctcgcattagcgatgaacgtatctcgctgaaatacggccttattggccaggaaaccaatggtctcggtggtttcgcgaacgcctgccggacgattcccgtcgcgctggagattgccgccgatatggaacggctgtgtccggatgcctggctgctgaattttaccaacccatcggggatggtgactgaggctattttgcgccatagcaaaatcaaaaccgtcggcctgtgcaacgtgccggtgattatgcaaaaaggggtggcggaactgctggaatgcgccgatgaaaacgacttcattatgcaggtcgccgggctcaaccactttatctttgtgcgccagattctgcataaaggtaaagagtggctgccgcaggtaattgcgcagattaacgccgggcgggatccgctggtccctcgtaatatcccgccattccgctggccgccgcatttgctgcagggattagggatgatcccctgcgcctatctgcgctactactacatgaaagacgatttactgcgccaggaactggcggaggcggatggcgaaggcacccgcggcgaagtggtcaaaatgctggagaagcagttgttcgcgcagtatagcgatcccaatctggcggtgaaaccgaaagcgctggagggaagaggcgggcaatattattccgaagcggcctgcgaattaatgaacgctatccataacgataagcgcattatcatgcacgtcaatacccgcaataacggcgcgattaacggtctccctgatgactgtgccgtcgaagtgagttcactgatcaccgcttccgggccgcagccgctcaacgtcgcgccgttcccggaagatacgctgcgcctgctgcaactgatgaaatcctttgaacagttgactattgaggcggcaataaccggaaatcggcataccgcctggcgcgcgttggtgcttaatccgctgatcgtcagtggcgagaagctggagctggcgttgaatgaagtgattgcacataaccgcgcgttgatgccggccttccatcgctaa

SEQ ID NO: 94873 - DNA, 900 bp, Enterobacter aerogenes
atgcttgaacagcaaagcattctcgccctgctgcaaacctttgaggtcacggcgcgccatctgagttttaccctcgccgctcatgaaatgaacctgacccagggtgccgtcagccaccggatccgcaagctggaaatgcatattggttttcgtttgtttattcgcctgacgcgtaaactggcgctgacggaagaaggtaaacgactgctggcgacgctaagccactcgctgcgggcgattaacgatgaaattgaagatattcgcgaacaggatctgcgcggcacgctgcatatcggtattgcgccgacgctggcgcatctctggttaatgccgcgcctgccccgctttcaagcccagtggccggctttaaacctgcagtttcgcgtgcgcgcgggggtgatggattttaacgaggagcgggtggatctggcgatttactacggcgcgagccgctatcccgacctgtaccagcagcggttaatgggcgaaagcctgttaccggtctgctcgccgacatatcgccagcagcaccaaccgcttagccccagcgcctctgcggcgatcgtctggatccatgcctctgaatccaccgatgtacaggatcagttcgccgaatggcggttatggtgccagcaaagcggatactctctaccctttgacgggcgttattatgcggtgaacaatcattccatcgccattgaaatggcaataaatgggttaggcgtggtgatggggcgcaaaacgttgatccagccgctgcttgccgccggcaaactggtggcgctaagcgatcaagaggtggtgtcgccatttggctatgatctgatttgcccgcaagaaaaccgttctcgcccgcgttttcgcgccttcagtgagtggctggcaatggagtgcggttag

SEQ ID NO: 94874 - DNA, 525 bp, Enterobacter aerogenes
atgtgcggacgctttgctcaatcacaaacccgcgaagagtacctggcttatttggctgaagaggctgagcgggatatcgcttatgaccccgaaccaatcggccggtacaacgtgtcgccagggacaaaggttttgctcctgagcgaacgcgacgaacaactgcatatcgatcctgtcttctggggttatgcgcccgggtggtgggataaggctccactgattgacgcgcgtgttgaaactgtggccaccagcaggatgtttaaggcgctatggcaacatggccgggcgatctgctttgctgatgggggcttcgaacggaagaaagaaggtgacaagaagcaacccactctactttatccatcgcgccgatggccagccgatattcatgcggcaatcggaagcacaccatttgaacgtggagacgaaacagaaggctttctgatcgtcaccgcagcaacagaaaaaagtctaatagataccctcgaccaccagcctctggtactgtcgccagaagcagcaagataa

SEQ ID NO: 94875 - DNA, 219 bp, Enterobacter aerogenes
atgtccactagaattaaaggtttggtaaaatggtttaacgaagataaaggttttggtttcatttcacctcttgacggaagcaaggatgtcttcgtccatttttccgcactccatggtgagaatttcaataccttatttgaagggcagaaagttgagttcgctatgcagagtggtgaaaaagggcctgctgctacaaacgtaatactttgcgataaatga

SEQ ID NO: 94876 - DNA, 8583 bp, Enterobacter aerogenes
atgaaaatgaaccccagagcgtggtttaaccgctcccgtattccggtgaatgctgccgaaaacgtaacgttttcggcgaacgatcctgcaagcgaaagcactccgcggtcagaactcttttcgactgcacagatggaacgctatggtcagaagctggcgcggacccataaagtatcaccggataaacatccctattatcttctgaaacggcttggcgacaatgaggtcgttatcacccaaaactgctatgagcttaatgcaggtaaaaagaccagtatcatgcccgccggggagtggttactggacaattattatctgattgaggaacaaatccgtaccgtccgccagcacttgccgaaaagttttggtaaaggtctcccgtcgctgatgtcgccgttgaattgcccacgaatttatcatatcgcatcagaggccattgctcacggtgatggccgctgggatgccaccagtctgaccagctatctcgctgcctatcaacaggtgacgccgctgacactaggtgaaatctgggcattaccgggaatgcttcgactggcgctgattgaaaatcttcgtcgtatcagtatggaagtgataaaagcgcaacaggacagaaacctggcagatacgtggataaccaggattttcgaatgtgcagagagtgcgcctggtgatttaattatggtggttgccgatttggcgcgctcccgtcctccgttatccagcgcgtttgtcgcagaactggtgcggcgtctgcaggggcacggcaacgcgctgtcgttacctcttacctggattgatcagtgccttcgggaacagggagtcaccactgacattctcataaataacttcaatcaacagcttgccgccagtcagctgtctgtcagtaacagcatcgcaggtctgcgattactgggtgaaacggactgggctgatttcgccgaaacgataagcgtcgtcgaacaggcattaagcaatgatcctgccggtatctatccccggatgcacttcaatacccgggatcattaccgacacgtagttgaggtcctggccagagacagtgggctcagcgagcctgaggttgctgacaaggtgctggcgctttcagaggaaaaagcccccaatacaccggaacatcatattggttattatctcgccggcgaaggtcgacaggcactggatatacatctcctggcagacacctcaagactcatacgcttgcggcacagtttcaacagaataaccctgctgtcatggcttggtagcctggcgttgttaacaaccgcagcgaccgcggcaatattgcacgaaactgccatgcagggcgcaggttggttgttaatcgcggtgatattacctctggttatcgctttaactcagttaatgagtgatttactcagtgacgcaaccacccgttttcgcgttcctcgccccttgccggggatggatttttcaaccggcattcctgctgacagtgccaccatgatcgtcatcccctgcatgctgaccagccacgaaagtttcagccagctcctctccagtcttgaagtctgttggttggggaatgaaaacgaaaatctcaggttcgcgctgctcactgattttgcagattctgaaaataaaccctcgccggaaagtcacgcgctgctcagacaggctatcgctgatacgcaggtgctgaatcgccgctacccctccggccgaccacgtttttatctgttacatcgtcagcctgaatggaacccctcggaaggagcgtggatgggctatgaacgcaagcggggaaaactggcgttactgaacagctggttgcgccatcccggaacgcaattcgtcagcgttgcagacatgcctgcccaccttttaccgggtcacataaaatacgtcattaccctggacagtgatacggtgttgccgcgcgatacggctcacaaactggtcgcggcgatggcccatccgttgaatacgccagagtatgatccggtacgccagagggtggtcaaaggatttggtattttacaacccggtcttgcggaggagataccacgtaacggtcaggggcgttacgccgccctgcgcagcagcataccgggtaataactcctattctatgatgtcttcggatatctatcaggatctctttggggaaggatcgttcgtgggcaaagggatttacgatgttgacatttttatgcaggccactgccaatacctgcccggaaaatctggttctcagccatgatctcctcgaagggtgctatgcgcgctcgggtctgctgagtgaggtgttactctacgaacagtaccctaataattatctgtcggacgttgcacgccgttcacgctggatccggggtgactggcaactgcttaactggctgaaaccacacgtcagaaaagccgatggaacccgtacccggaatccactgaccgcgctttcttactggaaattactcgacaatctgcgtcgcagcctggtcgccccctctttagtggtattgctctacttcaccctgctttgggttcccaatccggtttactggctgtgcatactgtcagtgatttggctgttgccagccctcctctgcatcacccatgaccttctcaataaacctctgcgccgccgcctgaagccgcatctgttacttgtaggggcgggcgcgctgaagcgtctgtcaggtatcagccttaattttgcgatactgccgcacgaagccggatattcgctgaaagcgatcgccgtgacgctatggcgactggggataagcaggcgtcacctcagccagtgggtaagccacagccaggacagcagtcaggccagatccactgttgcacgtttttatcaggcgatgtggctgaatgttgccggtggcgtgacgctgataattctgaccggaaaattggctccccagctgcaggggattgtgttaccgatcggtttggtatggtgtgtggccccgctgctgatgagctggctgagtcgtcagcccgtgcgtaaggttttttcgccaactcaggaacaaaaacagctgttacgccagacaagccgtgaaatctgggcattttttgaaacctttgccacagcaaaagagaactggcttccgcctgataattatcaggaaataccacaaccgacggtggcacaccgaacttctcctaccaatattggtctttcccttatggctaacctgacggcatgggactttggctacctgcctggtggagaggtgctccggcgcgtgtcgctcacgctcgacacgctggataaaatggagcactaccgtggccatctctacaactggtatgacaccagtacgctggtccccctcagtccacgctatatctccagcgtcgacagcggcaacatggccgggcatttgttgacgctgcgtgcagggctgtccgccatgcgtcatcagcctgttttaagcagccaacagatactggcaggactgaacgatacgctcgatattctggaaaaacagtggggtaagaacccacctgacaacctgagactgctgcgcaagcattgcctgaatgcggtgtcgctctctccgcaggcgtttatcagcgaactgaaaagcatgcgcacccagtgcaaccatctgaccagcgcatgtcatcagggatctcctcttcagatgcgctgggctggacatctggagcatcaactggttcagctttgccatgagtggtctctgttgcttggctggttacctgtatcctggaatgaacagacgctgccgacgctgagcgagcttgcccgtccgacattaaccggtacagaaacgcctccggcgtcagtggcggagcaggcccgaatgcgactcaatattgtcaccgagctggaacagcggctggatgagcatgcccggatggatttcacctttctgtacagtgaagcaaccagtctgctcagcgtcggttataactgtgacacgaatacgcctgacaagagccactacgatctcctgccgtctgaaatccgcctgaccagttttcttgccattgcgactaatcagctgcctcttaaaagctggtacgcgctgggtcgattgtttaccacgattgataatgaaacggccctgatgtcatggagcggatccatgtttgaatatctgatgccgaatctggtgatgcccacctggcccggcagcctgctcgatgaaatgagtcagtcggcggttatgcgccagattcactgggggaaagaacgcggggtaccatggggtgtttcagagtctggctatcatgcttttgatgttcagtataattatcagtatcaggcatttggcgtaccggggctcggtctgcgcagggggcttgccgatgacatggttgttgctccttacgctacgctgctggcgctgatggtttccccgcagaaagcctgtgagaacctgttcaggctgcaaaaaaatggtgcacgtggagaatacggtttttatgaagcgctggactataccccctcacgtcttgcaaccggtcagctctatgcggtggtacagtcctggatggcacatcaccagggtatggcatttcaggcgctggctcatgtgctgcttgacgcccccatgactgaacgctttatgtccagtacggtattccggtccgcgagtctgctgttacaggagcgcgtgccggatgcggtcgatctgtacagtccgcgccgtcattttgaatctcatgagggcagggtcaaacccatccgctatgaaccccgtattttctatagcgtggatacccctgccccggatattcaacttctgtccaacggccattatcatctgatgctgaccgcagccggcggcggttacagtcgctggaacgatattgcaataacacgctggcgcagtgataccacccgtgataactggggagcattctgctatatccgcgatacccagacgggagatgtgtggagcaatacctggcaaccgacaggctacatcagcggacaagacgaggaagtgttattcaccgatgcgggggcagaattcagacgcagcttcgggggactcagcgtcaaaactcaggtggtgatctctccggaggaggatgttgaattgcgacgtctcacactgattcatcgtggtcgcaagcctcgctctctggagctgacaacctatgctgaagtggtcctggcagcggctgccagcgatctggcacacccggcattcagcaatctgtttattcagactgagctggctcctgagcgtgacgctattctttgccaccggcgcccgcgctcaccggatgaaccggggccttgcctgtttcacatgatggtggtgcacggcgataaccgaaataacgtgtcgtttgaaacggacagggcaaggtttattggacgtggcagaaaccctgcgaatgcccaggcaatagaggcgggagggacgctcagcaacacgtcggggtcagtgctggatccgatactggctatacgtcactccatcactctacagccggggcatccggttacgattgatatcgtttatggtatcagcgagaaccgccagcagagcctagccctgctggaaaaatatcgcgattaccctattgccgatcgcatctttgaactggcctggtctcacagtctggtggtattacgccagatgaatgccagtgaagatgatgcaactttgtttaatcgtctcgccagtgctgtgctttaccctgtccaggagctacgcgctgaaggccaggtgatcagccgcaaccggcatggtcagtccggtctgtggggctgggcaatttcaggcgatctgccgatagtactgctcagtataaccggcgaagaaagtatcgcctcagtgaccacactgattcaggcacaccgttactggcgacagaaaggactggatgttgatttggttatcctgaataacagccccggtggctacctgcagggattgcaaaatcaaattatggagttaatttatgcggggtctgaagccagtcagctggacaaaacgggcggtgtttttgtccgtaatggcgagcatctctccgcagaagataagttgcttctgatgagcgtggcctgtctttatcttgatgaccgcgcagggagtattaatgagcagcttaaccagcgtatccatacccagaaatcgccggtcatagcattcatgccgcgtgcagtgcgcgagcgtaatcaacatacggactggccccccgatatcagtcagttatgctatttcaatgggttcggtggattttctcaggatggacgggaatatcaaattgttatgcgggaaaatgcgcagacaccggctccctggtcaaacgtactggcaaatccccgttttggcagcgtgatctcagaggcaggacaggcctatacctggtatgagaatgcccatgaataccggttaacaccctgggaaaacgatcctgtgagcgatcgctctggcgaggcgttttatctgcgtgatgaagagaccggggaaaactggtcaccgacagcgttgcctgttcgcggacacggtgattacctgacccggcatggttttggctacagcgtttttgcccatcgagagagtggaatagacagcgagctgacggtcctgattgccgaagaggcgccagttaaactggtgctcctgacgctcagtaactcttcgggacggacacgtcaactctccgtcacaggttatgtagagtggacgctcggaggatcacgaactcgctcagctcctcacattgtgacacatgcggccagaacgtctggcggttgcggggtgctggcgaacaacttttatggtgataatggtggaggccgaactgcattttttgccgtcagcggtaatgactgttcgctgaccggggaccgtcgggagtttattggccgtaatggttcccttcacgcgccgtcagccatgaaactgcgcaggctttcaggtaacacgggcgccggtctggatccctgcggggcggtacaatcgacggtaacattaattgatggggatcagaggacgtttatttttatcctcggcgcagaagagaatgatgtttgtgctaatgagacgctggcccattacatgaacgaggatacggtccgccaggagctgaaccgaattcataaccactggcacaatgtgctcgataaaatcgtggttaacacccccgacacgtcagtaaatttactggtcaatggctggctgttgtatcagacagtcgcctgtcgccttatggcccgcagtggttactatcagtctggcggtgcatttggttttcgcgatcagttgcaggattcactggcactgagccattctgatccgaaccggttgcgtgaacagataatactctgtgcctcccggcagtttatcgagggggatgtgcagcactggtggcacccaccacacggtaacggtgtccgtacccgttgttcagatgactacctgtggctgccgcttgccgtttgccactatgttgaaacgacgggggatatggaggctctgggaatacacattacttatctggaggggcgcccgcttccgcctggtgaagagtctgtctatgacacgccggtcatcagcggcatcgaagagactctctggttacactgtgtcaaagctattcgccatggacttcggttcggggagcatggcctgccgctgatgggggctggtgactggaatgacgggatgaaccgggtgggtatcgaaggcaaaggtgaaagcgtctggctgggcttcttcctgtacgacattttgcagcggtttgcagcgctggcggagcgaagggtggatgaaagcgtcgccgcgatgtgccattcacaggctctgcgcctgcaaagcaatctcgaagcccacgcctgggatggggaatggtaccggcgcgggtattttgacgatggtactcccctgggatcgaaaacctcacaggactgccggattgatgcgattgcgcagagctggtctgtattgtccggtgccgcgagcccgggacggtgcgcaaaggccatgcaggcgttggataagcaccttgtggataacaaaggcgggctgatcaaactgttaacgcctcctttcgacggacacggttcaaatccgggctacatacaggggtacctgcccggtgtgcgggaaaacggagggcagtatactcatggcgccatctgggccgtgatggcatttgcccggatggggaatgccaaacgtgcctggcagctctggtcaatgctcaaccctgtaaatcatactctcaatgcgggctctgtcgggatttataaagctgaaccttatgtcatgagtgctgatgtctacagcgtcgctccccatactggtcgtgcaggctggagctggtacaccggttctgcaggctgggcctggcgtttacttaccgaggaattactggggataaaacgcgccggtactgactttagtgttcatgccctattaccggatgcgtggccgtctttttctattgcttatcagtatggtgaaagccactatcagattagtgtctcacgcggcgatgcagaatattccgtgacgctggatggtgttctcctccctgatgacagaataccgctgaaggatgatggacaaaaccatacggtagagatcattcagaactga

SEQ ID NO: 94877 - DNA, 288 bp, Enterobacter aerogenes
ttgaaaattgaacgtctgatttatgatacactatccttccgtgagaaatttatgatgaaatcagaagacacccttgactggtatccggcacaactaccgcctgtgaaaattattcttggcgaagccgtgctggctgtgggtaaacagggccgaccgattaatacccgcaccttgctggaataccttcaggtcatgcaggacaaacaaaaaaggcgggatgacaaaatcgccatgcagactgcgattgatgttctcagggataatcagcgcattaacggcagacgttaa

SEQ ID NO: 94878 - DNA, 273 bp, Enterobacter aerogenes
atgaaatctaaaaaatcgctttttattgaaggacatatcctgtcgaacagctgtcacgggcaggctggccaatctttctgtattcaccgggtcaggtttagtaatggtaaatatgcgattatccgggaggcatccgggatatgtttcaaaccaggcgaaattattcaacgaaacgattgcaaatggttttataaccttaccccaattcgcctgctatcttttgagtaccttgaggatgatgaatcaagaagacaatttcttgaatatcgatga

SEQ ID NO: 94879 - DNA, 909 bp, Enterobacter aerogenes
atgtcacagacttttactcataatttactccatccccgctactggcttacctggactggtttgggtctgctgtggcttctcgttcagtttccttacccggttttacatattctgggctctggtcttggaaaaatatccagaccctttctgaaacgtcgggaaggaattgcgattagaaatatcgaactctgctttcccgagatgacaccgtttgcccggagccagatggtcaataaaaactttgtttctctcggactgggactgatggaaacaggaatggcctggttctggagtgatgcgagagtcaaaaaatggtttgatgtcgaagggcttgaaaacctgaccggtgcgaccagaggggtaatggttgtcgggattcattttatgtcccttgagttgtgtggaagagtaatgggtttatgccatcctatgatggctacgtatcgcccacacaataatctattaatggaatgggtacagacaaaaggtcgtatgcgttcaaataaggcgatgattaatcggcgtaatttatctggttttgttcatgcattgaaagctggtgaagccgtgtggtttgcaccagatcaggattatgggcctaagggaagcgtttttgcaccttttttctcggtaaaaaaagcagcctcaacgaacggaacatatgctctgtcaaaactcgcaggtgcacaactgatcacacttagcatgattcgacgtagcgataaaaaaggttatcgcatgtatatcagcaatccgttgtcaggctatccaggggaagacaaggtcgccgcagcgggttatatgaataagatcatcgagcatgaaattctccgagcccctgagcaatacctgtggatgcatcgcagattcaaaacgcgtcctgaaggcgaagcctctttatataaatga

SEQ ID NO: 94880 - DNA, 573 bp, Enterobacter aerogenes
gtgctgattggctatgcgagggtctcaacggtagaccaaaacctcgatttacagaaaaatgcactaattcgtgcagaatgtgagcttgtttttgaagatatggccagcgggaaaaatgccaggcgacctggtttaaagcgtgcgttgcgcagactcaagcctggtgatgtgctggtggtctggaagctggatcggcttgggcgcagcgtgcgcgacttaataaccatggtatcggagctacagcagcgcggcgtaaactttcgcagcctgactgactcgatcgacacgtcgacccctgcaggccgtttcttctttcatgtcatgagtgcgctggcagaaatggaacgagagttgatcgtcgaacgtactcgcgctggtttagccgcagcaagggagcaggggagaattggagggcggcgtcgggtaatgacgactgatatcgtggaacattgccgccggatgctcgcaaatggagctacccgacagcaggctgcagatgttattggggttggggtaaagacgatttacaaatatttccctgtagctggcgtagggaattttgagaatcagtaa

SEQ ID NO: 94881 - DNA, 2292 bp, Enterobacter aerogenes
atggcctttaatccgccgctgggaactaccaacgccgatgtttttatgggcaacgttcaacgtctggatgaactgattaatggtcctgctgccgacgttcctgatcgcgcaggtgacccgttatattcctggcgtctaatccgtcagagcctaatccctcttagccgtcagtacatgacacttgcagacgcacaggcggatgttgccaacattcctgatggctcagcgacttatgtgcgcagtgctgacgggagttcacttgcggatgaatatatcaacaacggcggaacgctggaggcaaccgggcgtaggatgccttcacaggcattcgttgcagatatcgatcaatttaccgcagagctttctgcacaaatcgcttctcttcagctaaaaacagcaatgctgtcacaatacagctcagatgagtggcaatggattttaaccgggttgcaggggccatcggcaacagcgcttgcactggataacgatttcgggctatggctcgcaggtcttaaatcatcattacaggattatgtagagcagctaatccccaaacaacaggcaaatctttatcagggattacaacatgtcattgtggctcaaaacggcgttgatggtcttctgactattaatgacaatggtgatatacgtattgtcggtactgatgatgttcttcaggacaggcttaacgcgctatgttccactaacttttcccgcaccattattggcttccagcatgtcgtttttgcagccgatttaaaaaccgccatttttgcaatagatgatgatggcggggtccatattcccggtatcgatggcccgttacaggacaatcttggcgaatcactggcgaccatcacaaccgtgggcggtgtaccggcagcagcatggcgcggagaggtggtctggtcagaacgtcccgtactgactacgcaaaaactgacgccttccggtttcgttttcagttatctacctggcggagaggcagtatctggttccggggtgatgtatgtaccgtcaatacgtgaaatgccgcttgatgcacctgaaattcaggggggcggttcaagtggacagtctctgaacatggaagcggatcatgtcggacagaatattgttaatcgtaatcccatttatcgcgggcggttattggccgggatgaacggacggcctgaaggtaaaaatatacaggcggtgaatgaggatgacgtatccacattgaacgatatgaattatccatcgtaccggcagggtaatattttaccgatgtacgatgtcctgatgaataaaggggtaggaaataccatatttattcatgcgccttttgcagcaggtggtcgttcatttaaacaaatcagcaaagggacaatcccatatcagaacgggcagaaatttgttcagatgggtaaagatgccgctgatggtgttggtaagccgtatacattccggtttctgacgtttgagcacggtgaaacagactccgataatggcgacaatcttttacctggtgattaccttaccaaagcaaactcctatttctccggtctccagtctgatttcaaggctatttccggacagacgactgatttcgctgtcatcatcggtcaggtgggaagccgcttttatacaaggtcacagccagtggatgaagccggtaatgcccagggtgacccggtaatcgttcagccttactctatccccgcggtggatcagctgacttatgtccgccagaatccgaatacggcaatcatgtacgggccaaaatacccgcttaactggctatatagcgacgggtcactcagccacatcaatgcaaaaggcaaggtgttacagggggaatataccgcgcaggcaatccactggcatctgtacgataccgaaaagaaaggaacatggacgggatgtaaaatcagggatattacattaacaggaaaccttttagagctttcctgtgatgttccctttccgccactgatcatcgatacagattttattgccaactgtccgaactacgggataagcctggagaaaaactcagccacggtacaggctgtttctgttatcaatgggaacacaattcgcgttgaactgaaccagcctcccgcacctgatgacgtcctgttaatcggatttaccaataccacaccacataccaatggaaatctttatccgctgacctgtttcagggattcttcacagaccgtgtcacgctgggtgacgctcaatggcgcacctttccctctgtataactggttatgtctggatcgtcttcccctcactggagaaatataa

SEQ ID NO: 94882 - DNA, 897 bp, Enterobacter aerogenes
atggttgctgcaattaatacaggtaaagtctattccggcgcgcgagtcgctcttgacctttcttcctcaatccttgatcccgtcgttctttttcagaactataaagcacgcgtaactgctgatggtggtcatattcctgacgaggctggctgtcttgagcgttttcgttttttattgctgaatggcatgtatgagcgaactgccgtttctgtcactcccgcttttggtatcaaaaccgatggaagtggaaacgtgcagacaatctataacctgaccggggaaaatggcgatcttcttgcggctgctaatggcgtaccgcctgaacagatgttatacgacccgacatcacgctcggttaacgttcgtatctcctctgccggtgggaacaggctactgagccgcgggcaaatcacggtacaaaaatcatcaagctaccttatcgctggatgtatgagcgataccaacagaacggacggcaatggtttaacgcttggttatgctgtaaatggtctggcaatggcttatatgcggacaatgataatcaacaatgaaacgactgcagaatcctggcgttttggtacccgtgattcaggctggcctgcaggaaatggcggtgctgtactggttaattcaaatcactatgaggattacgtacccgcagccgggttatttaaagttgctgccggcaaagttgaaggttacgagagaggtaaactttccatgactgccagttccgtcacgggatcgcttgcggacctgagaggacgtcagttccagcttgttataggtatcgtagggagcggaagtgtcggatgtgaaggaacgttcagagacgtacttcaactgcatacggcttctgaagctgatggggtactgacgtcaagaattggaatgtaa

SEQ ID NO: 94883 - DNA, 495 bp, Enterobacter aerogenes
atgacagaacaaacctcccgccttgccattgttattgatagctccggagcagagaaacaggccgataatctcgcaactgcactggtaaaaatgactcaggctggagaccgtgctgcttcgagcgctggcaaggtgacaaaggctacggacgaagaaaagcaggctctatctgaacttctcgatcgtattgacccggtgaatgctgccctgaataagttggacaaacaacaacaggatttggcgaagttcaaatcgaaagggatggtagatacagatacatttgagctttattcaaagcgaattgaagagactcgtaacaaattaaccggctttcgtgacgacttgaaaaaaactgggcagtctgctgcccagacagcttttgcaatgcgcatgattcccgctcagatgacggataactaccctgagtggctcgcaggtagttcactgcttgatatcgcattaaacagggagtggcctaagcatgacggtgcttaa

SEQ ID NO: 94884 - DNA, 333 bp, Enterobacter aerogenes
atgaagaaactaatgatggtaatagctgggatgtttgttatttctggatgcgctaccaagcagtatccgcaagctccatccgttacgagcgaagagtctgctgcgttagattgcgcagcaattaagcaggagatagctaaaactcacagtattcagaacgaaatcgaaactacaggtcagtttgatgggcgtaccgtattgggagctttgggagatttcggtatcggtaatggtatggccaaaagtgaagcgcgtaaaaaggcgcaggcacgtcttcagcagcttgaatctcttaaaacagttaagtgttcagatagcaaagtctcaggttaa

SEQ ID NO: 94885 - DNA, 168 bp, Enterobacter aerogenes
atgcgtccggtcggcatactgaccaacctgaattatgaatccctgacggatacccttggcgcgcggatcattgaccgactgcagatggacggcggtatcctggcgctcgacgatgcgtggcgtgatgagtgggccgaagagcagaaaagacaagaaaaagtgaagtag

SEQ ID NO: 94886 - DNA, 174 bp, Enterobacter aerogenes
atgaagaagcgtttttccgacgccacctattatacctggcgtaagaagtatggcggtatggaggttaagcgcctgaagtcgcttgaggaagagaacgccagactcaagaagctgcttgccgaagccatgctggataaggaggcacttcaggtggctctggggcgaaagtactga

SEQ ID NO: 94887 - DNA, 621 bp, Enterobacter aerogenes
atgtctgtcactgattcacttcttacttatactcttgctgcaacacttctaacgttaacccctggtcttgatactgccctcattctacgtactgccactgtcgaaggtggtcgaaaagcctttcatgctgctttaggtattgatacaggatgctttatctggggtgcactggtggcctttggtttgggggcgctattggcggtttctgaggtcgcctacatgctgctgaaatggtgtggggcggcttatctttgctggttaggtattcaattgctattgcgcccacggcagcaattttgcttgaagcaagggggtaacgatccagcgaataactggttcctgcgtggtatgttggggaatgtactcaatcccaagatgggtattttttatgtttcgttcctacctcaatttatccctgtggggcattctccctttatctggacattcctcctggtctcgattcatgtgttgattggtacgctatggtcactaattcttatttcagccacacattatgcctctgggattttgaaaaaacctgatgttgtgaaatggatggatcgcagcactgggggcttgtttctattgtttgcagcaaaactggcaatgagtagaagataa

SEQ ID NO: 94888 - DNA, 2583 bp, Enterobacter aerogenes
atgcagatattaaaaaaacagctttcggtcaatagctacccgttcaccctaacgcaggccatcatatttaccttagccacgacaattatcgttgtgctgctggcgacatatgcttttctctactacgaaggttatgctttttttgatgaggtgagtgaggatattctgcgcgcgcaaagagtcaatatcgaggaagttatccacgattatattgatgttcccgcgcaatcgaacgcaatactggtccatgctatcgggcgccaaaccagttctgcgatcccggttcgcagcctgatcggtgaaatggtcaataccaccaataacgtcttcagtaataaacattatctgaatctggttgaatttggcgcggtgaatggtgattttattcaggcggcgcgtggccaggccgcgtcgaatgattatcttgcggtaaaagatgcgcaaacaggtcatcatttgacggcgtatagccacctgacggtgaactcattggtaaaagcggtgctagcggattatcaaataacgcagcgcgaatggtatgcggcggttgccaaagaccagcgtccgcactggacaaaaccatttcgcgattatgaatatgataatgaaattggcgtcgcgttcagctcaccggcatttaatcgcctggggcagtttgttggcgtcgtcgccagcgagttgcatcttaacgaactaaacaaaagcctggaaaaatttaaaccccatcctgaaagtattctgctgattgttaatgaaaaaaatgaactaatttcctcatcagtgccttcattgacacgaagtatgttggccggtggaaaacactcgccgctgaatttgcaaacgctggaaaatactcagttaccggttgttgtcgcagccagtcgtacattaaaagcgcataaccatacgggattgcagtttttcagttccggcaaagaagaatattatgttgatgctttccctatcaccgaccgtgatgacatactgcactggacggggattgtgattagcccggcgagaatgattactcgtactatcgttaaatatatagccatcaccatgggcatgctgtttgtcatttttgcccttggcctgctggtggttttctgtggcctggcgagggtggtaaaaccgctacgagatattgtccgtaaagcggatcagcttgcgacacaccgctggacgccaccagataataagcgtcatttcccggaaattgcctctctggaaactacatttatggcgctatcgcataagctggcggaaagcttcgacgcgcagcggcgcgaaatagaagaggacaaaaccaccggcttattcacacgcacaggactactgcgtcagacatctctatatcaaggtagaaacctgcttgcgctactgcatatcagcaatatgagcaccataatcaattccttaagtacagagtatggtgaaaaattccttagcgattatattcttcgtctgcgtaattttttgccgacgaatacgctgatcgcccgtgataatgtggataagcttatcgtggtttttccaggtcaaactcagccaaaagagcgtcagcgctacagagaactgctttcctcactctttatcgacgtcaaaaatgaagcatcttctgcggtaagcaaatacgtttataccggaaatattggtctggttgcggctaatattagcgagaagaatattgaacaaacgttgcgtgaggcctggattgccctacgtcatgcacagaaacagggaaatggaatcgcgacgtttttcagcggtaagatgcatgaggccgagctttataatatccaacttcatgagtctcttcatgacgcgatccagcatcatgaatttcatctggtgctgcagccgattgtggatttacaggatcagagcgcttttcaggaaggagagtgcttgcttcgctggcgctctgaggcggcaggggaaattccacccgatcgtttcattcccctggcggaagagagtgggctgataatcccgctggggcgctggattattgaagaggcctgtcgggagctcgccgggatgattaatcgtggggcgccggcgaactttattctgcatatcaatgtatcggcgattcagctgctgcaacaggattttgcctggcatttaatggatgctatctatcgtcatggtctggtcacgggcaatatttgtcttgagataaccgaacggttactgatggattctgctgccagaattagtcgaatgattgcttatctccgccgccatggtattgccgtagcgctggatgattttggcgtcaatttatccagtctgccttatttacacacgctgtcatttgatagcatcaaaattgaccgccgtttgatttgccaatttgccgatgatgataaagcagaatcgatgattgcatcgctgattgttttggctcagggctttaaggtgcccgtcgttgctgagggtattgaagatgaggctataaaaaaccagttacgcgacctcggttgccagaaagcgcaaggttatctgtttggtcacccggcgccatttgcccactttcccttccaggcaagtgcattgacggtgagcgataatctatag

SEQ ID NO: 94889 - DNA, 1575 bp, Enterobacter aerogenes
atgcttttcgcgggtggcgtttcacgcgcccccgcgactaaaatttattttaaaatcccttccgcattgagtcgctcctttcttatttatattattagtccgcttacgatatcactcactgatatcgcttccagaaagaaattcaacattatgcataagctgactattcaaccctctgacgcatttaagagggagaaagtgctgttaaattttttcatactttccagtgttaccgttaccttatatcttgtgggtaaagccatacgccatagcgatattgctctgttctggccactgaatgcggtgattgtcgggttgtttattcggcataagaccttgcgccatatcaaatatgcagcggttgttgtagtcgcaatgctgttaacaagtcttactacgggcgaccgaggtgtctatagcattgtgctggatttctctaatgtattatttatgttaataatgtattggctgataataagagaagaaaagtcagatgaagacaatttaaaaataaccatctttcgaatttacagctactgttttatcaccgcgctattttgttcagccctggggagttatgtgtttgccggcggtattcacgctgatttctggaaaatatatcctgtttggtttagcgaggagtttacgaccagcgtgctcattctgccgtttacgctgttgtgccagaaaaaagaaatttttagcgcatttaccctgcggcagttagtaccttttggtatgttaatggcttcgctcctggtctccgttcttagtggcgtgacaggaagtatggggaccttgtcgatgattctcccggcgttaatttggtgcgcgttaaactattcattatcaaccacctgcttgctgaccttactcgccggaatggtggaaatgttgatggttgatcagcatgccattgagtcgaaactggacgcgtatctgcctatggttatctccacccgtcttggtatcgcttctattgctattagccccgttatcgtggcggttagcgttgaggcgattaataagctggtgaaacaactttctcggcaggtacgctacgattatctgactcgcgtacattctcgttttggactttatgaacatctacgggaactaaaagcgacggaaaatgagacgtcgctaaacgtgctggtgcttgatatcgaccattttaaaaatattaatgacacctggggccatgactgtggcgataatgttttaacgactttcgccaggcgggtcaaaaatattgttgccgatcgtggggtgattgcccgactgggcggtgaagagtttgctgtggtgatgacgggaaaaccaggtgaggagggctatcgtttagctgaagatattcgtcaggcgattgaagagatggatatcgcctggcaaagtgccaatttatcgctaaccgtcagtattggtcttagctatggtcgggtgatgcgctggaatattatagatagcttcgaccgtttattatctgaggcggatagctatctttatcggtctaaaaaagcgggacgtaatcgaattagtgcatctcctgcaataaccaatattgttaccgggtga

SEQ ID NO: 94890 - DNA, 123 bp, Enterobacter aerogenes
atgaaaaaaccgatggtgttaccgttgattattgcgctgtgcacgctgttatcgggatgtatcgtagatgatggctaccatcaccgacaccaccaccatcatcatcatgatcgtgactggtga

SEQ ID NO: 94891 - DNA, 1035 bp, Enterobacter aerogenes
atgaccgtccgtaaaaatccggctggcggttggatttgtgaactctacccaaacggcgcaaaaggcaaacgtatcagaaagaaattcgctactaagggcgaggctctggcgtttgagcagtacaccgttcaaaacccgtggcaggaagaaaaggaagacaggcgcacgttaaaagagctggttgattcatggtatagcgctcatggcattaccctgaaagacggcttgaaacgccagttagccatgcaccatgcttttgagtgtatgggcgaaccactcgcacgcgatttcgatgcgcagatgttttcccgctaccgagaaaaacggctaaaaggtgagtatgctcgttcaaacagagtgaaagaggtatcgcctcgcacacttaatcttgagctggcctacttccgggcggtgttcaatgagctaaaccgtctcggagaatggaagggtgaaaacccactgaaaaatatgcgcccattccgcacagaagaaatggaaatggcctggctaactcacgaccaaatttcgcaactgctcggtgagtgtaaacggcatgaccaccctgatttagaaaccgtggtaagaatctgtctcgccactggcgcacggtggtctgaggctgagagtctgagaaaaagccaactcgcgaaatacaaaatcacatacaccaacactaaaggcagaaaaaaccgcaccgtcccaatcagcaaagagctctatgagtctctacctgatgataaaaaaggccggttgtttagtgattgttatggcgcgttccgttcagccctggaaagaacaggtatcgagctaccggcaggacagctaacccacgttttgcgccacaccttcgccagccactttatgatgaatggtggtaatattctggtcttgcagcgcgtgctcggccataccgatatcaaaatgacgatgcgatatgcgcactttgcccctgaccatttagaggacgccgttaagctcaatccactggcggtgagtggcgataaagtggcggtagaaatggcgaataatgggtaa

SEQ ID NO: 94892 - DNA, 579 bp, Enterobacter aerogenes
atgagaatagattctttaggatggagcaacgtagatgtacttgaccgcatctgcgaggcgtatggattttcacagaaaattcaattagctaaccacttcgatatcgcatccagttcattgtcaaataggtacacccgaggcgctatctcctatgactttgcggctcactgcgcccttgaaacaggtgctaatcttcggtggttacttaccggagaaggggaagcgtttgtaaataacagagaatctagcgacgctaaaagaattgatggattcacattaagtgaagaaatcctcaaatccgataagcaactgagcattgatgcccaatttttcacaaaaccactcacagatgggatggctatccgttccgaggggaaaatttattttgtggacaagcaagcgtcattgtctgacggcctatggctagtcgacattgagggagcaataagcattcgagagttaacaaaactaccgggcagaaaactacatgttgcaggcgggaaggttcctttcgaatgcggcattgatgatattaaagcgttggggcgtgtggtgggtgtatacagcgaggttaactga

SEQ ID NO: 94893 - DNA, 1170 bp, Enterobacter aerogenes
atgatgacgggcatgaccattgatgccggtaccagtctcgcaccggcatttatgttgacgctgaacagtcaggacattaccagcaattttagcgaccgactgatatctctcaccatgacagacaatcggggatttgaggctgaccagctcgacatcgagctcgacgatactgacggcaaagtcgagttacccctgcgcggggcggtgctgacgctgtggcttggctgggagggctcggcattgctgaataaaggcgatttcacggtcgatgagattgagcaccgaggggcgccagataccctgaccatccgggcgcgtagcgcagactttcgcggaacgctcaattcacggcgtgaggaatcctggcacgataccaccctcggcgaactggtcagcaccatcgcaaagcgtaacaaactgacggccagtgtcgcggagccgctgaaaaaaatcccggtaccgcatatcgaccagtcgcaggaatccgacgcggtattcctgaccagactggccgaccgcaacggggcggcagtgtcagtgaaagccgggaaattgctgtttctgaaagccggtagcgcggtgacggccagtggtaagcccgtcccacaaatgacgctgacccgcagcgatggtgaccgtcatcagtttgccattgccgaccggggggcatacaccggcgtaaccgcgaaatggttgcacaccaaagacccgaagccgcaaaagcaaaaagtgacattgaagcgcaagccaaaagagaagcacctgcgtgcgctggagcacccgaaagcaaagccggtcagcaaaaagacaaaggccaaaaaagagcaggaagcccgcgagggtgagtatatggccggtgaggccgataacgtgctggcgctgacgacggtctacgcatcaaaagcgcaggcgatgcgcgccgctcaggctaagtgggataagctgcagcgaggcgttgctgagttttcaattacgctggcgctcggtcgggctgatttattccctgagacgccggtgcgcgtgtcaggctttaagcgcgtcatagacgagcagtcatggctaatcagtaaggtaactcacaatctgaataatagtggctacacgacaggcttagagcttgaggttaagctctctgatgtggagtacagctccgagtcggatgatgagtaa

SEQ ID NO: 94894 - DNA, 1281 bp, Enterobacter aerogenes
atgagcacatcatcgtccgtacgcgccgcgcagtacaaaatgagtacctttatttttctctacttcttcacctggtcatccagctttggcctgtacgcgctgtggctgagccagaaggtgggcctcgatagcattaccatcggcagcgtgttcgccattaatggcgttttcgctgtggtcctgaaaccggtgtatggctacatcatggacaaaatcggcatgagcaagtggctgctctattttgtctgcgccatttccgcactgatggcgccgttcttcgcgctggtctaccagccgctgctgcaaagccacgcgacgctggggattatcatcggcgcgctgtatctgagcctcggctggtacgccggggtagcggcttctgaatcttacgccgaccgctttagccgcctgtacgggctggagtttggccgcatcagaatgtggggttcgctgggctgggcgatggcggcttcggtctccggtctgctgtttaacttcacgccgctggctaactttttgctcagcagcggcacctcggtactgatgctgctggtgctgattagcctcaaaattggtgatgaacagctgcgcaataacaacgtcatttccgcgaataagatcgtctttgccgatgtgctgatgctgctgaaaaatcgcaaattctggatgttcagcctctacgtcgccggagtcgcgtggatgatgttcatcgccgagcagcagttcccgcgctatttcgtctcgttctttgccaccaaagagcagggcaacgcctggtacggctatctcagtaccgtccagtcggggatggagttcgtgatgatgatgtttatcccgtggctggtgaaccattatggcgccaagcgcggcctgctgttctgcggctgcgtggtgggggcgcggctgattgcctccggcttgaccaacgacccgattgtcatctccattatcaaaccgttttacggcgtcgagatcgcgctgctgctgatttcagttttcaaatacatcgccgaacacttccatcgtcgggttaacgccacgatgtacctgctgggttaccaggcaatgatttacgtcggatcgattgtggtcgcgccgccggcgggttacctgtacgacaaaatcggctttgagcatacctatctgctgatgggctgctgcgccctgacgtttacgctgatttccgcttttacgctatcgcgctgccagtcgaagcgcgatgcctcacgaccctttactccggctttagataccgcctcggttgaaccggccaaacattaa

SEQ ID NO: 94895 - DNA, 933 bp, Enterobacter aerogenes
atgtatgcccgcgagtctcgacccacgcgcccgcgcaggacgctttttaccattttttcttgccttccccttatctacagcgcgcaaggttttgccaggccggatatgcaaccgctggggccgaatatcgccgataagggttctactttttatcacttcagcgtccatcagttcgactccgccgacggcgcccgccactatcgagtgtggacggcagtgccgaacaaagctgcgccgccctcgggctacccggtgttatacatgcttgacggcaatgcggtaatggaccgtctgtctgatgagctattcaagcagttggcagagcaatcgccgccgctgatcgtcgcagtcggttatcagaccaacctgcctttcgatttaaacggccgatcctacgactatacgccggcagtcagaaagaataatgaaacctatgctggccgcaaaagcggcggcagtgaggatttccgtcaattgctggaaacgcgtatcgctgttattgcggaacaaggactgcatattaacccacagcgccgcgccttgtggggccactcctacggcggcctgttcgtgcttgactcctggctgtcgtctgcttacttccagtcgtattacagcgccagcccatcgcttggccgggacaacttttctctgctgaaccgcatcactgcagttacacctgcgtcgtactgcgccaaaaaactggtgatcatggaagggtcagcgacgccgggcgataagcgggattcgaacgctaatcacgtgctaactaaagtgaataccgcgatgactacgctaaaagagaaaggcgtggatgccgctgtttgggatttcccgggccaggggcatggaccgatgtttaatgcctcctttcgcagcgcgctgttagatatcagtcgcgaaaaggctgaacgcaaacaaggctgccactaa

SEQ ID NO: 94896 - DNA, 357 bp, Enterobacter aerogenes
atgaccagatcggcgtccaaaaatgccgtttttttcacttctcaattccatatcaagttgatatttatcaatgagttagtgcgttttgataagataagtaaagataactttagaggtggggtggatgttgataagaataatgaagctaacttcattttaaattacgcgcaaagcttactatcttggcatttaattcaatctattactttctttactctcaagaggaaagaggttgtagacgctggtggtttattcatcggcgcagtgataacgcgttttgagtcggtagtaacattcccgggtacggggataaacacattgtttttttcggaggaagagagggcggtcttctcctga

SEQ ID NO: 94897 - DNA, 459 bp, Enterobacter aerogenes
atggaaactaaagagtttgttttgaacgaaaaaaaattcatgttggtaaagttacaagcgtggaatcgcctgatgtttgttgcggatttacagaaagatattcttacaccgcttctggataacttgggtgaaaaatctcttgagggtgttttttcagctgtatccgaacagggtactaagccagatgtgatgaagctattaaagtcactctcgggtgttattgatagtcgtaatttagaaaaatgggtaaaaagagtactctctgagggaatgattgtttctatcaaagatgatgaacaaaaagtaaaactatcttttcacgaactcacaaaactattctcggctccgcaagatattatcatgctgatgaaggaagccattgtatttaatctcgatggtattctcgacattattaaaggtatgggagggaaaaaggctgatacaccgcaaataagctaa

SEQ ID NO: 94898 - DNA, 345 bp, Enterobacter aerogenes
atgaatggaacaatagattttttctcgccaacaggcgaaaaactcgcgagtacggcagaaatgactggggctgccccggttgaaagtggagcgatccgcttacctgtatctgcgagagatgtcacgggcgtacaaaaggataagaacgcccttaatatcttaatgaaagataatcaaaaaatcgtcatcaaagatttttttggcgacaccaaaaagaagctggtttttgacgacggtaaggagatttttgaggctgattatctcgacaaagaacaattcaacggtctgcaatttaaaccattacagagctttgaagaggtgtttgccggggctgaaagccattga

SEQ ID NO: 94899 - DNA, 2889 bp, Enterobacter aerogenes
ttgccggggctgaaagccattgataatgcgaccaccgtagacgaggtgcagaaagcgctggccgatgccgtggcgaaaaacctcgaggaaggcaaagccgacgccaacgaggcgatcgacaacatggcgtacctgagcaacgagcagaaggtcgatgcgcacaaagcgatcaacgacgcgactgacattgcggaggtggagaacaccgaggccgatgccgcggtaacaaaccttgaggcaggcaaagccgacgccaccaaggcgatcgacgacatggcctacctgagcaacgagcagaaagccgaggcgcagcaggcggtgagcgacgcgaccgacattgcgggcgtggaaaaagcgatggccgataccgcggcgaaaaaccttgaggaaggcaaagccgacgcctatcaggcgatagacgatatggcctatctgagcgatgagcagaaagaagcggcccgccaggcggtgaaagacgcgacggacccggcaggtgtggagaaagcgctggctgatgccgtggtgacaaaccttgaggaaggcaaagccgacgctcaccaggcgatcgacgacatgagctacctgagcgatgagcagaaagaggcggctcaccaggcggtgaacgacgcgacaggcttagagggcctggagcaagcgctggctgatgctaccagcgataaccttgatggcgcgaaagacagcgctaacaaggcgatcgacgctatggataacctgagccaggatgaaaaggacgcggcccatcaggcggtgaacgacgcgaccgatattgcgggtgtggagaaagcacaagccgacgccgcaagcctcaatgccgagaacgaaccgtcaatcctggaagatattatcagtggtatttggaatgcgattatagccattccgaaaggattgctggaagcacttaaatcggtcattccgatgttaagtgattaccactttttgcttgaaaccgcgcctgcggcactgaccggcgcagctctgatcgcctgggaagcatttgttgaagtcattcacgtgccattaagctttatttccaatatggttcagtgggttacaggatttatcaccggtattctgggagggatttggggaccattaggaaccattccgcaaatctttaatggtatactgattctcgtagatggccttgctaacggctttaaaattattgtagagagtatcggtgttggtcttattagcctgcctgcgatcattaccggcgccatcggctgggtgataaccctggttaaaggatttaccgctttactaaacggtgattcctctgcgatggaggatttcgtctctgatttctcacaatcgctgttacaaaacccgcttattccattagctctgggtgatttgttcgtcgctattatggctattcctaagctaggcgtcgaagctataagcgtcattgccgaatggatcctggggattattacaggcgtcatgcagtttattccaggattaatacctgttgtcagtgtgctttcggatttcacactggccattgacggtgttcttattgctattcattatggcttaagtaatgttgtcaacctgatcacgaaactgggtatggcgttgatcatgggtctccctatcgccatgagtactgggacatcggcgataaacctaatcgaagcctttataaagggcatgctgggtttaaacacagattctgatacgccagatacgccgattaatagttttattgactctcttattgactttatttcttcgcctattgagggcgttaaaaatattttctcatctatttccaatagcattcaggatttctttaaggatccagccggttttattgggaatatgattcaaagtgctattgatgttatccttgcgccatgtaagtttattattgatgcagttggttccattattgattttattgtctcgccgtttgaggctatcggcaaagttattggtaatcttatagaatgcattggtgacttcctcagcgatccgtttggcgctattggcaatgtgttccaggatatcatggatattattcttgcgccgtgtaagttctttattgatacggttagctccatctttaactttattaccaatccgattgattcgatagtaaaactgctcggcgatcctcttacattgatggtcaaatttatcagtgacccagttggaacggtcacggatctgtttaactcggttattgatggcatcttgagtccatttaagggaattattgattttatttccgaagtgatttatgggatcactcatccactggaaacgatttctaatctcattaacgatattgtcgcgaaaatttttggtggttcctccaacgacaatgtggccgccagttcgctcaataccttagctgaaacagttgaaagcgcagctgaggcggcgaagccagcagctgaatcccttgataaactgctcgttagcgcagaaaaagcggttgataatcttctggaacaatctgtgggagaaggcagcgagagaagcttgtctactgatgatttgtccaacattacttctacgctgaatgagttagccacttactctgatagcaacgtaacttcgctgaacgaaatggttgattcgcaagcttcgcaggcttcgcaggattcgcaggcttctaaggaggctgtaaacgaagagctgactgatgaacagctcgcttctctgacggaggaaaataatgccaacgagatcaatttggattctctggttggtgaagaaaataattctgttgtggcagaaaacaaagtatctgaacagcaacaaaatgttgaagattctggagaatataacgccctaaatcaagtcgtcaatcagctgcagctaaatgaagaacattatcaatttgctgctgcttaa

SEQ ID NO: 94900 - DNA, 1458 bp, Enterobacter aerogenes
atgattgcaagtgcttcctgtgagcttatcacttttcccgtttcatttgttaatgaggataaatcatcggtaccatcagaaactccgaaacctaataagccactgtccaatgatgcccctgttgtatatgctaaaccggttgaaaaaaatcgtttctcaaaagaaaaactgtctgctgcacctgcacctgcacctgcacctgctgctacaaaaagtattatttcttcaaaagataaatataatcttcacagcgcaatgctgatggccgttagctggcacccggaaattaaacgggcaatatctgaatcggaaagactaaaatctatgatcgatgaggttaaatctgcctattatccgaatgtgcaaatgggccttaattccggtatcgccaaagacgattatagtgatgataataataaaacgaatcaactaaatttatcagttgaacagatgatttatgattttggtagtaccagtgaccgggttgaactctctcaactgaatgtcgctaatgcgggctacgaaatagaaaaagagattaatgatattctttatcagacgattagcgcctatttgcaaatcgtccgctatcatcaactcagtgctggtgcaaaggaacgtattgacggttttactaaaatcaaagacttaacaaaaaaacgtgtcgccctgggggccagcgctgaatctgactactctcaggcaaaccttagagtagccgaggcactctcaaactataatgattatatttcgcaatataaaaaatggctggcaactctggatcatctcttaaataaaaaaatttcagccagtattatcatggagttcccgactgaaatagaagaactctataataatattttacgtgataatccggttaatactgactcaccggcaatcaggatagccagggctaaaatagatatcgctaaaaaacaaattgatgttcaaaaaaatgaatattatccgacaataacattggcgccttactatgaacatgatttgaccgagcaatcggtcagcaatggctccaccaaaaatcgcgaccgttatggtgcctttataaatgtaaaagttccgctatatcagggcgggtctgtatcatcaaaagtacagcaagcacaagatgcgctcaatactgcacaatttaacttagatgcagaaaaaaataatgctgaacagagaataatggaatattcaagccaaatgcgaaacaccaaaattagcctggaaaacaaacgggaaagggagcaaagcgctataagaacgcgtaatctttatatgtcacagtatctggagttgggggcccgttcggtttctgatttaaccagtgctgaagccgagatccatcaaaccaaagccgacatcattaatagtaattatacagtatcgaaccttgccatggaaagtctgtactatgctggcaaattaattaatttaatgaaaaataaaggatga

SEQ ID NO: 94901 - DNA, 2145 bp, Enterobacter aerogenes
gtgcaagatatggatttcttttcctatatggaaaatgacagtgatgccaaagagtactatctggaacaatggaaaagtgcgttagtgactatcgcacaccactatcggctcaatgtttcagaacagaatattctgataacatctttatggcatgataaagattcaagcagtaaggtggtagaaatcatgagtcgccgggcaggtctttcttttaaggaagacgctgttgcgggctatcgatttaattcgtggttgtttcctcaagtgctggaaatgaaagatggtcgtctggcgattattaagagtattgatgaagataaaaattttgttgtttcgtttattgaagataatgagctgatctcactgttacaagaagatgagctccgtgccgaaggacgtagaataatcacgctgcgcccggccaaaaatgtatccgatcctcgcattgatgattacatcaagccggctgaaaagtactgggtctggaaaattatttttgcagacatgaaaccatactatctggtcatactgggctccctgtttgtcaatgtgcttggtctggccggcattacttactccatgcagacctacgaccgcgtcattccagcacagtcacatcctacaatgtgggtgctttttattggcgtgatcctggcgcttatttttgatttcaccttacggttaattcgctatagcgtaactgatattctgggcaagcgtgcagacttgattatttcagacagagtatttggccgtgccttgagaataaaaaaaccctatcgcccgaaatcaacgggttcgtttatttctcagctaaaggaactggaacaagttcgtgaaatgatgacttcgtcaaccgtcgttgccatcacggatttaccgttcttctttatgttcctggtaattatttattttttgggaggaattgtctttctcgtacctttggctggggccattcttatggtacttcccggtttattgagccaaaagaaattgttcagattagccaacacggctacgcgagaatccagcctgcgtaatgccatgctggtcgaaactgttcaagggctggacgacatcaaattcttacaggctgagcatcgctttcaacagcaatggctgcactacattaagacgacagcagaaaacagtctggaattaaagcatctgacgcataccttaactacctggtcttatttcgtccagagttcggtgtttgtatgcctggttttggtgggtactccctttgttatgtccggcgatctctcaaccggggcattagtggcctcatccattcttagctcaagaatgatggcgcccattgcgcaaatagcgggcatcattacccgttggcaacaaaccaaagttgcgatgacaggcctcgactcgataatgcaattacccatcgatcaaccggaacatcagcgattgattcacaagaaatttatcgaaggtcaatattcgattaccaatgcggcttttacgcatcaggtcgatgggcagaaagtagctgtaagtattgattcgctggagatcaaagcgggtgagcgcattgccattcttgggcgcaacggttcgggaaaatcatcgttgttaaacgcgctttcagggatgatgcatcagaagtccggcgaggtaattctggatggtatcaatattaatgatatcgaccctgccgatctgcgtcgtgatattggatacctgagccaaaactcgagactatttttcggttcgcttcgcgaaaatattacattgggatcccccctggcacaggatgaagatattattgaagctattaagattaccggtgccattaatttcattaaccagctaccttcgggattagattacattatccaggaaggggggcacggtctctcaggcggtcagcagcaaacgatcctgttagctcgactggtattgcgtaatcctaatattgtcattatggatgagccaacctcctcacttgatgatgttacggaggatgagttcgtcaaaaaaatgagcagctggatttccggtaaaacagttattattgcaacccatcgtaagaaaatattggatcttgtcaatcgaactatcgtggtgtctggcggtagagtggtgttagataaacgcaaagatgagattattgatgacatgtaa

SEQ ID NO: 94902 - DNA, 1281 bp, Enterobacter aerogenes
atgaaaaatattcctggaaaaataaaaaagaattttttacttgcaaaggacttttgtaataatgttttttttgcaacggataagaatgtgacccatagggtaagagaaactgatgagtttacgcttgccgacacccatggtggcgttaaaactagccgggcattgtatattctgctcagcgttatcttttttctcagcatatttttgctatgggcttccatgtttagtattgatgaagtctcgaaaggcgatggccgggtaatccccagctcgaaagagaagatcattcaatctcttgatggcgggatcctcgatagcatcaacgttacagaaggacagattgttcaggcgggagatgttattgctaatctggatacgataagaaccgaggctgcagtaatggaatctgaatccaaatatcgggcgctattggccagcaaaattcgactcttggcggagattagcaatcgccctttagtgtttcctgatgaactacatgattttccagaaatcaccgatagagaaatggtgctttatacttcgcgaaaaaataattatatttcatcgatgaaagatattcaggcgtcaaaggttttattgaacaatgaactcgcgattaacactcgacttatggctcagggagcgtcaagtaaagtcgatgttatcagactcaggaagcagcttgtcgatctgaatatgaaagaatcagagctaaactacaactatcaggtaaaatctggtgaggaactatcgagaatttccggagaagttgattcgttatatcaaaagatcatcggtcagcgtgatctactgaaaaaatcgaccattacttctccagtcaggggaattgtgaaaaatattgaagttaacactatcggcggcgtcattcccccaaatggaactatcatgaacatcgttccccttgatgaccgattacttatcgaggctaaaatattgccacgtgatatcgcttttattcatcctgggcagcgtgcgatcgtaaaaatcaccgcttatgactactcaatctatggtggtctggatggtgaggtggtaacaatttcacctgatacgatttctgaccctcaaaaaccggaagtcgtcttttatcgtgtttatatcagaacaacgaaggaccatctgcaaactaaagataataaaaagcattttatctctgcagggatggtggcgagtgtagatattaagaccggcaaaaagacaattcttcagtatctgattaaaccatttaacaaggttggtgaagcgcttagggaaagatag

SEQ ID NO: 94903 - DNA, 471 bp, Enterobacter aerogenes
atgaaatacaaagccattgtatgctctattgcatgtttgggtgcttttgcaggggcatatttttatttatcttccccattcagtaccggcagtgccatttcatgccatagccgccatactctaataaacaatgattttaaattagatgcaagttatggatttatctttggcggtaataaaggtgagttaacaatgtatggctatgcgatagaggatggcgttcgggtaaatattaggagagtgattagttttacctatacaaaaatggataacatttatacacttcatagtaaaagagtagaaaaattttacggagataacagtgaaaaagggaatgttaacattcatctccccgaatttttttatcatacagggaaagatattaccatgcaactcaatcgggatagcttcaatgttccgataattttcgtgcatcgtatgcctgttttttattgcaataaatctggttaa

SEQ ID NO: 94904 - DNA, 918 bp, Enterobacter aerogenes
atgatcacagaaacagaaaacggctcaaaaaataatcataactttataattaatggtcgtgttaaatttattccatttcgcagaataatagaggacatgaatacaggaacgaaaataaaacttcatgttccggcaagcctgtgtcttgatagattattaaataaccaaggacggcttgtatctcaggatgagctaatcctgtacgcctgggggttgaagagggaatcaaccgtaagctctaatactttttatcagtgcatactacatctacgtagaaaactggcacagctggagttatgtgatgttattgaaaccgtcccgcgccatgggattatttttaataatagtgtcagtgtattaattacccaggatacccccccggtatttcaactcgacgatgagggctatcaaacaccagaagacacagcggaaaaggatattgagctattactgcctgttgaaatcgacagaaaacagattaccaatgaaatgccttcaccgctttctcccgaaaaaggttctgatacaagcctcacgtcaacgattcggatggtggaaaaagatagattacgaataagacctcgccacgttttattcaccagcgctatattattaatactaatagccgtattgggattcatgtacataacttttactaaagataatgttttcaaatcttataaccaactctcatccacgaattgcttcatctataccatagacaagcaatattctgaaaatgaaattaaaaacataatgaaaagtgttggattaccctgttttaataaagaaagtgttttttttaccgtgtcttcaatgcagtcaaaactgaacataatcaactgcgccacatataataaaaaacaacaaagctgtcgctcagtaaccatagcgagagaattagaggaaaaaccatga

SEQ ID NO: 94905 - DNA, 681 bp, Enterobacter aerogenes
atgtcttttcagtgtaaaccaatcaaaaaactatctattcttcacattagaaagcgaaacgcattattagtttgctttgtaataaaaaaagaatcaacaataacaatgaatttcataatgattaaaattgataatgatttatctactatacattgtgctttgacgacggaatatcatttttatgtcaagaatcaatatgtaaaattggggcttgatgctttgcatgatgagataagaatgggtgagaaaactaaaatatatatacttgaagagctaggttttcttagtatatatactttattgtatatgattcatttgattgatgaacgcagagaggcttcaatcatcatactgagcgagagagtcgttcggggggatgcatctttattctttgtatcaaaacgtgcatctatagatgagtggcgaaaaatattgatggttgataattcaaaaaaaataaaagtattaatttcgtattactattcaatttgcaatggggaagggttaacccgacaggctcactctgtactactgatgaccaggggaactaaaaccgttggctctatatgcaatactttgaaccttaaccggaaacaagtttcatattatcactctaaactcaaaaagaggcttggtttgcatgacccgatgttattttataactacctcaattggttataa

SEQ ID NO: 94906 - DNA, 234 bp, Enterobacter aerogenes
atgctgaatctgctggatggtaaacctgttccggagaatcgcaacgatctttccgtcaggctcgatgctcatatctccaaacagcacgcttccgtttacgaagacgagtatgttgagatacgttacttccagaaaggcactgggcacatcatctttaaacgctctaatttgattgataagatgaatggaatagttgcccgccattttcctgcaaccctaccacctcgtacctga

SEQ ID NO: 94907 - DNA, 597 bp, Enterobacter aerogenes
atgcagactgaagctgaagtgttaaccggccataccgacgtgatttgctcgaccagcattgagcgtatcgtcaccggacgtaacgctgcactggcgcagattgaagtgctcatgcaacagcttggtgatatttctgcactaactgacagtattggcgggggcaaagcgaatgaatggggagtgcggcaataccgttacgactgctggctgatggaggaacccgaaaccgcgatgaaggcgatcacctgcaatatcgatcgcagcatctggaaaaacctgatgaataagtcgggaatgctggcactcatggacgcacaggcacgtgacgagtggtacaacagtctggagagcggtgacatacccgccataagtaaggccaatattgtcagtacctttgagcagttgcatcaaagcaaagcagaagtctttgagcgtgggatcattaacgtcttcaaatcactgagctgggactacaagagcaacagcccctgtatgtttggtaagaaaatcatcgtcgatggtctggtacaatatgaccgttggggatttcacttccgtcatgggcgtagacgtgagcagttagcagttagcagttag

SEQ ID NO: 94908 - DNA, 168 bp, Enterobacter aerogenes
atgaaaagatgcgcacgctgtaaccgaaaaaggtgtgttctggaccggattttcggactcgataaagaattctgcgacgagtgcttatttgataccgagcaggaaatcagggaaaaacacattatccccgtcaggcgtcagaaagatgacagccaggggaaagcgtag

SEQ ID NO: 94909 - DNA, 972 bp, Enterobacter aerogenes
atgaagcctgaaattgatgtcagcgtcattatcccggccttcaatgcgcaggctaccatcggccatctggtgcacaaactcctgaacgagcaaacgctccgcatggaggtgattgtcgtggatgacggctccaccgacgaaacgtggaccatactcagcgccatcaccgatgagcggctgatgcttattcatcaggaaaatcagggggtatatgccgcacgtaacgccgcgctggcggtgcacggcggcgagtgggtggtgttcctggatgcggatgaccaggtagccgacggatttttgcaggaacggctaagggctgctcatgaaacacaggccgatgttgccgtgttcaatggctggcgggccgacaatgcaggtctgcagcgctcgcccgtacactgcaaacagccttacggtcagttgctcaccggccggcagtggatacgccattgcgtgaagcagcgggaatggccgcattatctgtggctgcagctctcccgttcggcgtatatccgcgagcatgacctgcgattccagaaaggcaaaagtcacaaagacattctctggaccatccacctcgcagccagaaatggtcggttttattttgcagaccgccaggactacacctatatcagcaatcctgaatccattacccaccgtaaggattattacgatattcgtgcagccagctatattgacgtgattgctgatattctcgccctgagcgaacaacagccacactgcgctacccgacgcgctctggtcagacatgctctggtggagtgtcgtcattttctcgggctgtatcgacgcaaagtcagcaaccagcaggcgctgtgtatcagttttcgcacacgaatagcctttcgccagctattacccggaataagcagcctgagcgatgtttttttcctccttaagctgattcgtaaaatttacttctccaacgttgcatcgaaggagcaaggttaa

SEQ ID NO: 94910 - DNA, 468 bp, Enterobacter aerogenes
gtgcaattcgcgaatattctggaacgggcatggcaaactgcggttacaggccatggcaacatcccgtcagccagggctatcgtcgagcgctggtataataaaggtggaaaccttaatcaacgcgccagacgatttatacgtcgcgagtgtctgtggacagccgtacattaccgcaataccgaagttgtgctcacccggcagtttcgtctgctggcagtgctgctgtatctggagggctatttcctggaaagcgatacagcctgtatgcacccggaaaaatgctttattgtgctcaacgccccggacatggctcccggtctgataaatggcgctgctcctgaggttctggcggctttttgtcgcgatatccattacaacagacgcttctcaccattcagatgttaccggcataccctgagggtgagcgaacagttatacctgttgctgatggagcaacctcaccgctaa

SEQ ID NO: 94911 - DNA, 213 bp, Enterobacter aerogenes
atgctggcattaaccactgaagccgctctcaacattctgactgaatggcttcaggacaacatcagttgtgacactgtgcttattttcgacaacgacgaagacaggacggattcttcgaccctgttaccctggatagagcaggcgcgaaaagatgtctgcgcactgcaccagttacgggcattgctggttcccggaacaggctatgtccgttaa

SEQ ID NO: 94912 - DNA, 492 bp, Enterobacter aerogenes
atgaaactgtccctcaccgtaaaagccgataccatcaacgttctggccctcaatatgggccggatcgctgtagatattgacgggattgaactggcagacctgatcaatgtggtctgtgacaacggctgcacgctgcggatcgccgatgagccgggtaaggcaatcgttgaatcaccactctccccctttacgtcattacccggtatctgctgcagcactgcgcacatcacggcggaagacaattcactgctgtatgccctgtcgcatcaggatctggattttggcgagtcggaatggatccattattcaggctccggctacctgatccgcctggaggcgtggtcgtttccgagcttacgcctcaaacgcctcggtctgtcgaaagcctgccgccggttagtggtgacgcttattcgccgctacgccgttggtattattcatctggatgcggatggcgatatcctgccgggattcgtcacgtttgactggtaa

SEQ ID NO: 94913 - DNA, 378 bp, Enterobacter aerogenes
atgcaaacccaaccactatcccaaactcgggaggcaccgacacgcccgtctcccgtggagatctggcaacggcttctgagtcacctgctggatcgtcactacggtctgacacttaacgacacgccgtttggcaacgatggtgtcattcaggagcatatctacgcgagtatctcactgtgcgacgcggtgaactttatcgtggaaaaatatgacctggtacgtaccgatcgtcacggcttcagcgcggcatcacagtcaccgcctaccagcagtatcgatattctccgtgcacggaaagccaccgggctgatgacccgcaacgattacagaacggtgaccgacatcaccaccggtaaataccgcgaggtgcagccatga

SEQ ID NO: 94914 - DNA, 360 bp, Enterobacter aerogenes
ttgtcgaatgaaataccggcagtaaaccacgatgtttctgaaccctggtggggacttaaacgcaatatcacgccctgttttggcgctcgtctggtgcaggaaggcaaccggctgaactatctcgccgatcgcgccagtatcaccgggcagttctgcgacgcggatttacgccatctggatcaggcgttcccgttacttttgaaacaactggaactcatgcttaccagcggcgaactcaatccccgccatcagcacagcgtcacgctttacgcaaaaggtctgacctgcgaagcagatagcctcggctcacacgggtacatttatattgtgatttatccaacacctgcagcaagcacgtaa

SEQ ID NO: 94915 - DNA, 417 bp, Enterobacter aerogenes
gtgcatcagcagtatgaacgcgccaaatccatggcgcagctcacgaaacagggacatgtgtatgtgatttcgaatatcggctccttcggtgaaaatgtcttcaaaatcggtatgacccgacggctggagcccatggagcgcgtgaaagaactgagcggggcagccgtgccgtttgattttgacgtccacgccatgatttcctgcgatgacgctcctgcgcttgaaaagacactgcatgaccatctggaaagctaccggattaaccgggttaacctgcgtaaggagtttttccgggtagagcttagtcgaattatcgatgaagtggaacgtcatcatggccaggttgaatatatcgccgacccggtggcgttacagtatctgcagagtctcgaatatgcagaaagcgaagccgcataa

SEQ ID NO: 94916 - DNA, 1380 bp, Enterobacter aerogenes
atgaatgacattacccaacgtaagattaaaaccggcggtgacccgcgctcgctatctgattatgccgccttgcgtgatgagctgagtaagctgacgcatccggctcgcccggatgtgaactggcgttatgcggaaaaactatgtctctcactatttgagcagaacggtgtggaattgcaaacggcagcctggtatacgcttgcgcgtacacagctggccggtttattcgggctcaatgaagggctgaccatactcgaggcactgataagccatcagtggggggctctgtggccgcagccagtccatgcccgcatggaaatcctcagcagtctgagtcagcgcctgcagcagcgaatgcgttcgctcccgctgaattacagtgacctcagccagctgtatcgggcggagcaactgcttacaggtctgggagaggtactgcagcgtctggagcttaagcatctgagccagctcgatacgttgcgtaccctgatgcacaacagtgctgttcggctggaaagcagcgatggcataaccagtaccgggccgggcattcagcctggtatcgtgttgcctgccaccgttatgaatgatgcgacagcatccacgagagactttgctgttggaccagatgaagataagccagagagtgcagtgaagtgggtttacgttgcgcaaccggaaccgcagccgaatgtggaagtgctgtcgacaatgcctgttccggttaaaaagtggaaatcctttgtcgccgggatgtttgccatgctgctgataagcatagtctcagcgtggagctggcattttcttcaccggccagaccctctacagaatcagcttgctgcttcactggctccgttccctgcacctctcacgtctgaacaactggatatgttgcgtcagcggactccgttaccgcaggaccttatcgcacagatacagcagcagcttgcccgactggataagttgcctcctgactgggatattgcatacagcagaaaactcatcgaacaggtccaggtattgtggccggagcaggcaaagcccctggtacagcagtggcagcaacagattaatgtctctgttcttcctgtcgataaaatgaacggctggcatgaaggtatgacgcagcttcaggctcttgccgataaactgaatgcacttgatggtcagaagggaaaatacatcaccgtcagtgaacttaaatcgcaggtctttggcatgctgacaagcttccggcagaccgtgccagtggaagaacagcttcggcagttgaaggtgctccctgaagactctccgcagcgtcagcagcagattcagcaggctgagcagcatctccgggctcaagtctatatgctggcgcaggaaaaacatcgtgagtga

SEQ ID NO: 94917 - DNA, 813 bp, Enterobacter aerogenes
gtgagtgatgtaaaaggaactgacggggtgggtaaaacacagcgacgccgtaatcaccggacacagtggacggccaccgaaattacgtttgtggaacaacactatggtcagctgtctgcccgtgaaatcggggagcggcttggccggtctgcccatggagtggcccgaatcgttcagcttttaggtctgtcccggggcgtcgcaccgtcctggtcagaagaggagctggcattgctccggacccactatgcagaaggtatcgagtatgtcatatcacttttgcccgggcgttcacgcaaggctatcttccggcaggcgtcccttgccgggctcactggtcgcagtagctggagcagtgaagagaaggcatttctggaaaaacattacagaaatctgccaacaaaagagattgccgccagactgggcagaagcgtcagtgcggtgagggcagcagtggtcaaatttgaccttggaacagggaaaaacagaccatggtcggaaagggaattggtcttgatgcaggcgcactacagtaaagggattgataaaataaatgcgtcgctgccggatcgtacccgggaggccatttttgcccaggccggaaaaatggggctgactgaggcccggctctggcagccagttgaggattgcgtattaagggatatatatcctgaaagaggtgttccaggtgtgcgggagaggcttcctcacaggacgatccctgctatcaaacatcgggtgaaggcgttggggctgaggtccttcaaaaggaaaaaacggataccaagtgtgagacatgatgttggaggatga

SEQ ID NO: 94918 - DNA, 1212 bp, Enterobacter aerogenes
atggcaatttcaaaaaagaatggtcaatctaagcccaagcggaaaactgaggttcctggtcaagcgttagggtacagccttcaatttacactcctcactcatttgttgcttcaagcgcctgagggtagtctttgcagtttggaggtacttgatgacgttgcccaagagaataattctggtgatatcagattcattcaaagtaaaagcgctcttacagctaatcctgcagctgatcgtgcaaaatcattatggaaaacactttctaattggattgaccttgctacatccccaggcttcgaagtggaaaaagctatttttgagctatatgtatcgcgtccagttgaagggagtatagttaaaaagtttaatgaagctaaaacaacagaggatgcccaagaagccattacccatgcccgaacagaattatggggtgattcaccacacttcactttgaaggatggcatctcgaaagaaatttccaaatacgtcgaaaaagtctttaccgcagaccaaaaccttctacaacgacttatttgcaactttcaactgacacttggtagtggtagcccacaagcagatcttgaagcatgtgtgcgaagccatcctgtctcgccttcaaaggttagtgatatcactaattacctttgcggaaaagtgaaacgccacatcgatatgcttctagaggcagaaaaacctgctgtcattgcccgtgatgatttttacacctggtacaaagcatatgttcagaaaatagatcgccagatggttctttctagccgtgctcaggccccagcaaaagagaaggctcaggagtatcttcctgataaatttgtccaacaattagagatcatcggcctgccttatgaagaaatacttggagccataagtgactatttaatggcctcattcgaccgaactgattgggctgcgcggggagaggttgacgaaacctcatttgatgatttggatactctgcttcagagaacatggaagaataaacagagaatctgtggtttaacacacagagaaaagcccgaacaagatcaagggcagctactttactttgaatgtatgcagtttaataccccacttcaggctatgtctccgccaagccattttattcccggttgctatcatattttagctgatagcttagccgtaggatggcatccaaactatacgacgcagttgaagaataagaaggtcgcataa

SEQ ID NO: 94919 - DNA, 495 bp, Enterobacter aerogenes
atgctggcaagggaagctcaaaatattcagaatcctgcattaggcgctgcccttgtatggcggttttgttgtggttatgtcaaaactaatcgggtaagcgcgcctcctcctcttccatttctctttctggtacttcctataattctgcatcaagagacttctgagtttgttaagcgtacctataaaagttcagggttgcgggcttttgctgcaaagtttggcgattcatcggtatcaaagcaagatttgctgtttcaaattcatgaacgttcaatccgttggcgacagcttagcctgcgatcaattgagcttgctgtcgcaggcgaactactcaaattgcaagatgagggtgatgtaatccctttatcgaaaacaaaggcgaggggattatcggatgaggtaaagacactcatggatttggcagaaaaactgggctcttggtttggcgaactctcgattcatgaggttgtgacaactttaaaggtgaaactctaa

SEQ ID NO: 94920 - DNA, 831 bp, Enterobacter aerogenes
atgtattttcaaattcgaggcatcatactctggccacgaaataaaaaatttaagcctcgtaccattcgttttgaactcggcaaagttaatgtcatcagtggtgcctcacgcactgggaaatcggcagtaattcccatcattgattattgtcttggttccaatagctgttcaattccagtaaatactattcgtagatattgtgagtggtttgggatcgtcgtggcaacagagcaaggtgaaaaattgttggcacgaaaagaaccaggaaaccaacgtagcaccactgagatgtatgtattagaggccgaaaatatttcgtccatccccagtcgtctggaaaaaaatactagtgttattgcagtaaagagaatgcttaatgatttggctaacctttcgaatcttgacttttcaggtggtgatgaaaattcaggatttgatggccgaccagcttttcgtgatttagctgctttcacatttcaaccgcaaaacgttgttgctaatcccgatgttttattctttaaaactaatacctatgagcatagggaaaaattgcggaagatttttccctatgtccttggcgcagtaacatctgaattaatggctaaacagtttgagctcaatagaactcgcctattgttacgtcgcaaagaacgagagctcaaagatgcccaagctatatcagcacaatggcttgctgatttaaagtctaagtacagtgaggcccaagagcttggcttggtacctaaaccgcaagaacagttatcccgagagcaaatgattgggcaccttgaagatgttatttcacaaaccgatctaggctgtgtcccttaa

SEQ ID NO: 94921 - DNA, 516 bp, Enterobacter aerogenes
atgtgccgctggggctcaaaaaaacataccgatatcgccggtgataatgggctgggtcgctctcgcggtggttttggcaccaaaatacatctggcgacagacggaagcggtctgccgttgaacattgtgctcagccccggacaagcccacgaaagccagttcgcgcaacgcctgctggacggcattggtattcagcgccagaacggtagcatgaagcgacgtagtgatgctgtactggcggataaagcttactcggggcatatgttacgtaatgggctgaagaacagagggataaaagctgttatccctcgtaaatcaaatgagaaaatggcgtcggatggtcgttcacggctcgatcgtgatgcataccgcaatcgcaacgttgttgagcgttgctttggtcgtctgaaagaatatcgccgcatcgccacacgttacgacaaaacggcgagaaattatctggcgatggttaaactgggttgcatcagactgttttacaaaaggttatgtaattaa

SEQ ID NO: 94922 - DNA, 432 bp, Enterobacter aerogenes
atgaagatccccgtttatctgaaacataaacctgtcattactgtcgaaaattatgatcgtattgatggtccatacgctgacgacagtgatgccaaaggcctgtcagtcggcatcgcgcagtggaattcccccggctggacagagttgtcagctaaagtctggcgcaataccggagaaaaatggtcaaggcagtcagaagaacttcctctgcacagggtgatagaccttgcaaccctagtctgtatcgtgatggattacagctggaatgggcgtctgtcttctgatgatgattttccggtcagtcgggcgggagataacccggacctggaacatcacacggaactaatgaaaaaagagctgaagcagaatcacagatatctggatgagagtcttaaacgacttgctgtcgaattaaaaagggccggctactga

SEQ ID NO: 94923 - DNA, 1263 bp, Enterobacter aerogenes
atggcgctcactgacgctaaaatccgtgcagctaaaccggatgaaaaaccttataaacttgccgacagcggcaacatgtttttgcttgttcaccctaacggttcccgctactggcggctccgctaccggtttctgggcaaagagaaaacgctcgctctgggtgtttaccctgaagtctcgttatcagaagcaagggaaaaacgcgatgcggcaaggaagcagatagctgagggaactgacccgtgcgaacagaaacgtatcaaaaagtctgtacccgaaacagctcagacatttgaaggcatcgcaagacagtggcataagagcaataaaaaatggtctgcctcacatagtgagaagatactgaaaagcctcgaaactcatgtgtttcccttcatcggctcacgcgatattacctcactcaggacgccagatttgcttatccccgttaaagcagccgaagccagagagatatacgagatagccgcccgccttcagcaacgtatcactgcaatcatgcgctatgctgcccagtccggcatcatcagctataaccccgctgtcgatatgactggtgcattaacaacagtgaaacgacagcaccgccccgccctggccctcaaccgcatttcagaactccttgaacgcctggatacataccggggtcagcctctgacacggctggcaacaaaactcaccctgcttatcttcatccgttccagtgaactccgtttcgccagatggtctgagatcgacttcgaaaaagccatgtggacgatccctccggagcggaaacctattgacggggtcaagtactcgcatcgtggctccaaaatgcggacagaacatctggtaccactctctactcaggcgctggatattctgaagcagatccacactatcagtggagagcatgaactgattttcaccggcgaccataatccatggaaacccatgagtgaaaatacggtaaataacgcactgcggcttatgggttacgatacgaaggtcgaggtctgtggccacggcttccggacaatggcctgcagttcattgattgaatcaggattatggtcgagagatgcggttgaacgtcagatgagccatcaggagcgtaatggcgtacgggcggcttacattcacaaggcggagtttctggatgaacgaagactgatgctgcaatggtggggggattttatcgacgcaaacattcacgaggttgtttctccttttgactacgccagagtcaataatccactgagataa

SEQ ID NO: 94924 - DNA, 1662 bp, Enterobacter aerogenes
atgatttacgcttttattaaaaagggaagctttcaggattccgtaagcctgatgattatttcccgaaaattaagtgaacgcccggaagtggatcaggtttcggtcatgatgggtaccccggcgaataaatcgatgctggagtcgaccggattctggcacccggatttcgccgaggcgacgcccaacgatatttgtgtcgcagtccgcacgcaggaagcgcagccggaaattctcgatttaatccgtgaacaattagagaaagagctgagcgctatcgctaatgcatcgggcagctcaacgcagctggtcaaggcgcggcgctgggagagcgcctgccagaaattaccggacgcgaatctgttgctggtttcggtggcaggcgagtacgccgccggggtggcgaaagagggattgttagccaataagagcgtgatgctgttttccgataacgtcccgctggagcaagaagttgaactgaaaacgctggctcgcgagaaagggctcattgtgatgggtccggactgcgggacggcgatgatcgccggtagtccactggctttcgctaacgttttgccgcagggcggaattggcgtcatcggcgcatcggggaccggcatccaggaaatcacctcgcaggtggcgctgcatcaacagggaattagccacgccatcggccttggcgggcgcgatctcagcgccgaagtcggcggtatcagcgccctgaccgcgctggagatgctggcggccgatagcgcgacgcaggttatcgcttttgtctctaaaccgccttcgccacaggtgcgtgcccgcatcattgccggcatgcaaaaacagaataaaccggtggtggcgctgttcctcggcagccgtgccgagcagcgccgcgagggcaacgtctggctggcgaactcgctggcggacgccgcgcaactggcggtactgctgatgcgcgtagcgcaacagcggcagagccagccgcaggttgcaggcaaggggatttatggcctgtacgctggcggtactcttgccgccgaggccgcgatgctgctttccgctcatctgggagtgccggtcagcgacagccacgccgacggtgtgatgctggaagccggcgggcatcgcattgtcgaccttggcgacgatagctacaccctcggcagaccgcacccgatgatcgaccccaccacccgcagcattgaaattgagaagctggcggcgatgccggaagttggcgtgctgttgctggatgtggtgctgggctatggcgcctgcgccgatcccgccggggcagtggttgaggccatcgagcaggttcgccgtaaacgtgtcgcgccgttggtggttatcgccaccatgaccggtaccgatgccgacccgcagggccgtagcgagcagatagccatcctgggcaatgccggggtcgcggtggtcgaaaccctcgaagaggcgacgctactggcggttagcctgacgcagcatcagccgcagagcgaatcgacagcgcataacccgctgctcgacggcgtgcaggtcattaatgccgggttgcgcagcttcgcgctggatctacaaagcagcggtacgccagtggtgcattatcagtgggcgcccgttgccggcggtaacgctcgtcttgccagtttactcaagcagttacattaa

SEQ ID NO: 94925 - DNA, 834 bp, Enterobacter aerogenes
atgaaaaccctcaatgcgctggcctgtaacggccttgaacagttagccgatggcgtgtggcagcgtcatagccggttttcacaggcggttaatttcgtccacgccgatgggactttgctgacgttgtttcgctacggcaaaggtataggtccgacggggattctgcttagcagtacacagtatgcgcagttggctaatcttccgcggctggttaagcaggggcgcttgttatggggggcgggagtcgccatccgcccgcgtcggacgctcaaacttcgctttcccgtcggctactcgtttcctctcgatctttcggcttattcacgtcagagcggacttcgcgtcgcgcttaatcaaccgttagcggatatgccgttttattcatctattatgggtgagcttgagcgctggcggcgcggcgatctcccggactggggatggctgattggcaacgggccgggattaactcccagcggcgatgatatgctcgccggaatgttggcgatgctgtacggcgccggtttttctgaccgcctgcacgcgtttatccccccggcggatcaacttacctcgctgacaacttcggtaagctgtagctatctgaatagcgccaggcgcggcgagttttcgctgccggtggttaaggtaatgcgcgggctgcggtcgacaggcgatcctaagtgggcaattcagcgtttgctggcggtaggtcatacttctggggctgatacgctgctggggatggcattcgcgcagcactggttacagagagtggattcaaggagaacgcatgctcgatcaggaaaccatccgcacgtttatacaggtcgctga

SEQ ID NO: 94926 - DNA, 3624 bp, Enterobacter aerogenes
atgaagacacggcagtatgcgcaaaaatcaatcttcgatctggaagcaatcttcgagcagtccagcaacaatgttagcgaacttgaacagttgttgagcgagctgacctttcgcaacactgccagggcgcggacgctgacggctaaaatcgagcaatctctatttgcacttagcggccacagcgtggtcgccatgtcggcgtccagcccatcaacacgccatcccgattcggtgtccattcaatcttctcgagttgtgccccacaattcgcctgctgcggaagagcaactgcaactgaaggccatcccagactctgccatacgagagcaattcgacaaagaccaaatcgaccttggtccgaacccgtctttttctccatcaggtaaggcgaatgatgcgcgagcaatactggcagcatggacagctctcgaagcactgtcgcctcaaggttataaacgcccagaggatatggcaaccggcgaccgctctagggttgctctattggagcgaggtgttccatggggaccaaatgcccgcagcaagcccagttataagctttatttcgaggtcgtcctcggctccatcgctctcgacaaggcgacggacgagctggtcaaggtttttggcgaggatgaggagcgttcacgcccggacggtaagaaagcggccatcggctcgatcctgatcgacaaagaaggctatgtgcttgaggacaaaggcgttgccgtgtccagttttgcctgggcactcaagccggctctcgatctgaagcttgggagtttagggaattggccgaatgttgagccgcgcattatcgagcatctggatcgaatggttcgccaccacaacaaagatggagaacccataccgatcgatctgaatgttgttcataacgcttataaatggcttgtatcgcagttcagtgtacccgagcatttggttgagccacccacattcgcgattaaggtgtttcatcatttcaaggctaaggcgccgcctgaaccttcgttactgaattccttctatcttgaagatctcggtgaagcaaccaaattgctcgagacgggcaaagccggaaccggtttgcgccgctacatgggaattggcagacctgaccagaaaatcgacgtgctatcgcccatttccgcagttgagccgttcgtcgcaccgtcgctcatgccgcaggctcgttggccttcgaaaggcggccatccactggtgctgcttcaacaggctgccgtgaatgcggcgcgtgctgagctgaatgatgctccaggtatcatcggcgtcaatgggcctccgggaaccggaaagaccactcttctccgggatatcgtcgttggatgcattctcgatcgggccacggcgatgtccggcttcaacaaaccgcaggatgccttttccacaacaggcgagaagctggcattcggttccaatgcattcctgcacttctacaagttacatgcatccttgaagggccatgagatcgtcgtagcctcctccaataacaaagcagtcgaaaacgtcagtaaagagcttcctctcaaggaagccaatggtcgccatgaacagatcgcctacttccggtccatcagcgacctgattgcgaatcccaaacgcgccggctatttcgaagccgaggggggcatcccctccgacactgtcgaaacctgggggttgatcgccgcagctctcggcaagagcagcaaccgaggcgcgtttcagcaaggtttctggtggaatgaagacggtggtttccttacctacctgaaagcagctcgcggcataaatgtcatgcgtgagatcaaggacgagcgaactggcgaaaccatcgatcgcgtgatgcccagcgtggttgtcaatgagcggcccagcaccaacgaagcggatgctgctgcggcctggcagaaagcgcgaaccgcctttcttaaacttaaggagacggtagacgccgaaatcgccagcatcgaagagatgcgacgggatatccaggcgctcaagggagcgatcaccgaacttcaaagggctgaacagcgtcgaccgagtctgaatgaagccgtcaaagaagcacacaagactgctgaatcctgccaacgagagcatgagaaggcaaaatcgcagatcgaccaggacaagatcatgctcgacagccatcttgcttgccgtccaggtttcttctcccgtttgtttgcgactgcggcctggaagtcgtggagatcgacactgcagaagctctcggcgaccttgcagcaatcagtcatacgggcgcaggggacggacggtgccctggagcttgcaagggctgagtggagcaatactgagtcccagttacagcaactcgaccaggaaatttccagcaaatgtcaggctgtctcgaaattgaaggcaaccgaggcacaggcacgaaaccgtatgggagacagggtcgttgatgagaggttcttcgagcgcgagcacgagtctatccacctcactgcaccatggcttcccgatgaggttcatcgcctgcgggaggatcttttcgccgctgccctgactgtgcataaaacgttcatcgatgcttcggccagccgcttgcaacacaatcttgggttattgatgtcaggcatggtagctggtgccttccagtcttccgctcaccgtgaacttctccccgacctttggtcaagccttttcgtggttgtgccgaccgtgtccacgacattcgcctctgttcggacgatgttcggggatctgccaccagagagcattggttggcttctggtagatgaagcgggccaggccgttcctcaggcagcagttggagctattatgcgggcaaagcgctccattgtggtaggtgacccgttgcaaatcccacctgtagtttcacttcctgaaaagctgaacgccgaaatctgcaagttctttgacattgaccaagtcgaatggtctgcccccgcagcatctacgcagacccttgctgatcaggcatcgcgcttcaaatccactttcgtcatggacgtaggtgatcgagaagtcgggctgccattgctcgttcacaggcgttgccagaacccaatgtttgatgtttctaactccatcgcctatgccgggcagatggtccatgctgtcgggcctaaaaaacccggatctatcggctcggctttggggagatctcactgggtggatatcaatggcgatgctgagacgaagtggtgtcccgacgagggcgaagcggttgtgcgaatgctcaaagagctggcagcatcgggcattacaaatccggacgtatttatcatcacaccattcaagatcgtagagcagaacatgcgtcggcgtctcgacagtgaaactgatctgctgcgaacgttcggcgtaaagctggatgaatggtgccgtgatcgtgtaggcacaatccacacgttccagggccgagaggcggacacggtaatcctgttgctgggtgcgccgaaagcgagtcagcaaagggcacgtcagtgggcggcaagcccaccaaacataatcaatgtagccgtctcacgcgccaagcaaaacctgtatgtgatcggctcggctgctgcatggacaggggcgggaactagccttcaggtcctgcatcggcaattggcgaaatcagcctaa

SEQ ID NO: 94927 - DNA, 672 bp, Enterobacter aerogenes
ttgagtcagggagcacctttctccgggaacaccaaggatacaataatctcattcatttctctgctggctgttcgaacaccggctatgcgagagcatatgacatcacagataaccccaatcattgaaatgattgcaaggatgtctattgcgactcaagaaaggtacgagaacgctatttcagagatagtaaatagcactggcaatgcaattgcgagtaacgtttcatatgaaacggtcagagattttgttgagagtgggaattataacatttccctaaagcgtgaatttcttattgccgctgaaatacaagtatctaaagcaattgaagaagctcttgatagacgtagttggcgaatgtttcgttctactttaacttcaggttcttttgtgacaactgataatccagtgcacctgatgtggaatgatgatagagaaggggtgccaggctttggtttactggacacatcggtattattccctgtgtcaaaagatcttattttgttgggagattataatggtgttgagggtgtttttgatacagacgacaagttagctgcatactttaactcaaaatccatttttcatgcggttgaaagagtattctcctctgatctgacatttaattacatcgatgcgaatggggatgtgaagcagggtaaaaaattgatttaa

SEQ ID NO: 94928 - DNA, 432 bp, Enterobacter aerogenes
atgcatcagaaatacgtcttggttaataccgttccacctgcagaagacttttgccgtttacgcgtcatatctggcttaacacctcgtcctctggatgctgctaaacgtgcacttcctggaagctattacggggttcatattgagcatgctgggctaattgttgggatggggcgcatcatcggtgatggtgccctaaattttgagattgtcgatattgctgttgacccggctcatcaaggaaacggtctcgggcgaaagattatgcagaatttaatgtcttggtttgaaaagcatgtgtcaccaggtgcctacattactctcgtagctgacgtccccgaactatatgaaaaattcggttttaaaaatattcgcccagcaagcgaaggcatggcattggtttggatgggtaatgaccaatattccctgtattga

SEQ ID NO: 94929 - DNA, 411 bp, Enterobacter aerogenes
atgctttcagaatccgacaaagatctgataaggctcgccaaatcattattagatgatttagaacaacatgacttagataattttgtagaggaagactattacctccaagatgaacacaaggactatatcacttttaatagcgaaattgacatattcaaccatcatttcatcgattatgaaaagctgaaagatgctgtatctcatgatagaaggctggtgctaagagctccccttatagaagaagctatcgattactttgagaataacgaggcgatattgctttatatgttcaatcatgcttttaattgggttaagggcgaccgaactccaaatgaaatactgccccaaacattgagtcgtgaaattagacggcagacaaaagattgggtttatcacatgacgggttattaa

SEQ ID NO: 94930 - DNA, 1191 bp, Enterobacter aerogenes
gtgagcttacatgttatccaagttactcctccgcattctgtttccagtttgcgccaacgtatggggcgttctgggcgacgcgattccccatcaatactcagaatgctaattacagaaaatgagcttactgtgagtagcagtatcgttgatcacctacgactccagttggtgcagtcgatggcaatgatcaggttgatgatctctaaacaatggtttgagcctgccgattcccggcagatacattactccacgctgctacaccagattcttgcaattaccgcacaatggggtggagttcgtgccgaccagctctggacacaactatgccagacagggccattcagaaatgtagatttaaacgatttcaaaagcctgcttaaacatatgggagcatgtggcctactcactcaacttgctagcggcgaaatggttgttggggcagagggggagaaactgactaaccattacactttttatgctgtgttcaatactccagaagagttccgcattgtcaccggaaacagaacccttggaacagtgcctgtggactccccactgctaccagaccaacatatcatcttcggtgggcggcgctggaaagtgacagagatcgagacagagaaaaaagttatctatgtagaggcaaccaaaggcggtcagccaccacaatttagtgggggaggtatgtctgttcatgatgccgttcgtcaggaaatgctcgctatctatagggaaggtgattaccgcatagcaataggtagcaagagagtagattatgccgattctgccgctagaagcctatttgcggaaggcagtcgtaactttcagagttataacctgcaaaatgagtattttcttacgagcggccaatactgttacatcctcccatggatgggagataaggttgtcaatacgattacagccttgctcatacgttgtggctttaacgctaattcattggctggagttatagaaattgacggctcaagtatcacttctgttcaacaggcccttaaagacctgctgctgtcaggcttgccctcagcgtttgatcttgctgtaaatgttccagaaaagtacttagataaatatgatgaatatttaccagagtttctgcttgcgaaaggatttggggaaaaagcgtatgacattgaaggcgcgtgtacctggctgaaagaacatcttcagtaa

SEQ ID NO: 94931 - DNA, 759 bp, Enterobacter aerogenes
atgggattcacataccctgctgtcgctggagcactgcagaatgatcagagagccttttctgctgctctggcctcgctgcaaggaacggcatcaaactttgccgcgcattgtattcaggactcccgtgttagagtgcaatatctacgtgatattcaaaacatgtccgccgagtttgttcaatcagttggaagtgggaaaatgtctcccagagaaggcgccacattagcctctcagatgcgcaacgaaattctggatctttcacggctaagaaacagccctgtcggtagagcctacgcgaaaaagttaaaaccatcggggcgtacgatggctgacctaactgaacattatgctacgaagatgtttcagcaacctttcgagtctctatcggaaagacagcaggccacaatctttaaagaaatgatccactcggctggacgtgacaggggcgcagtatcgggcatcgctaaaaccttgggtatggccggtaagcgtgtcctctttgtctctttagctgtcgccgcttacgaaatctatcaagcggaagataaaaccaccgaaacgatgcctcaaggtgctatagccgctgctggtgttgccggaggatggggagtcggagctgcagtggtcgcaacaggtgtttgtgcggcaactgcgcctgtttgtattggtgttgctgcattagtgggcggaattctcgcatcggtcggaacagaccttctgtttggaaccttatatgtttcaccacaggggagaaactaa

SEQ ID NO: 94932 - DNA, 204 bp, Enterobacter aerogenes
atgcgcgagctacgcgacgactccctcattgacatgaagttcatgatggaggatgctggatttactgctaagtatttttattcgcagattaatgccggaaaactccccaggccgatcaaacttggtcgctcatcaagatggatgtatgctgactaccaggcatggaaacttagccacctccccaacatcaaaaaagcatcatga

SEQ ID NO: 94933 - DNA, 240 bp, Enterobacter aerogenes
atgggaaaagttacgtttgtagttgaatttaaggatggagaagaacctgccgtcaatggaggtactgatattcttggtggaagattatccgcagtgctatggagcgattatcgagaagattacttttcgccagagcagagagatattgtcattgaagcactcaatgaacttaccaaggatgaagttgatgcagaatgccacgatgagattatcaacaaagctgagttgctgaccttctga

SEQ ID NO: 94934 - DNA, 198 bp, Enterobacter aerogenes
atgactcaagtcaccaaagaatcactatccgctcgtatcgctgaactggaatcaggaacaaggtcaattaaggaagattaccagttggaggcttatcggatgttgcttaaagtgatggaggatgagaattattatttacataaaaaccatcaaataaacatggaatgccaaaagctagtttttattggggatagataa

SEQ ID NO: 94935 - DNA, 342 bp, Enterobacter aerogenes
atggattacagcaaattaagtgattttgagattaataagttggttgcttcggctattggattagaggtgaagggctatcctcagtacgatggttctgcagtttggtatgttgtgaaaaatgattctgggaatgatttctttgactacattgattattcagacttctgcaacaacccagtagattcttggccgataatcacttccaatcgtattggaattattcctggtactgccactgataagtgggctgcgcatcatggtgacagggacattactatcgacgatgttaacccactccgcgctgcaatgattgtcttccttatgatgcaggaggccaaatga

SEQ ID NO: 94936 - DNA, 279 bp, Enterobacter aerogenes
atgagcaaaaacctatatatcgaactcggtgagaaatatgtcgttaccggatcgaagcatgaccttattctcagcgagaagaaaaaggtttctgacgaaaagagtaagaactttggtaatgagattcttgttcgccttggttattacagcaagtttgagcacttggtaaaggagctatgccaccgtgaaatcctacaatctgaagctcagacgctggaagaattacgcgattatatctttgctctcggcgagaagctgagtaaggcgatgcaatcatga

SEQ ID NO: 94937 - DNA, 723 bp, Enterobacter aerogenes
atgcgaaaacgagagcgagaaataactcttctctatggagtgtctctcatacgtgaagatgttcttaatcatccagtctacaagccaacattcaaagacaagataatcgagtttatctatcacgctctgcacatcatcgctgcggtgattgttgctgtcgtgtctataggcttccaggttaaccgcatcatctctgaatatcgaaacaatcgaatcaccgttaagtttcgccctggcgacaaagaggccagcgaagagttagcgaacaagctgaatggcctgtttcgcgctgactacgaagagacggatggtggcgaggcatgcgataacgcatttgacgacgccgcaacgggtggttttggctgcttccgtttaacttctatgctggtcaatgaatacgacccaatggatgagcgccagcgcattgccatcgagcctgtttacgatccgtcacgctccgtatggtttgatcctgacgcgaagaagtacgacaagtcagacgctctgtgggcattctgcatgtactcactatcgcctgagaagtacgaagctgaatatggcaagacacctcctgcatcgctagatgtaaccacgatgaccagttgggaatatgactggtttgagcctgaagttgtttacatcgccaaatattacgaggtgcgcaaagagtctgtagatgtaatcagctactgcagcagaccagtgcagacattcaggaagtaa

SEQ ID NO: 94938 - DNA, 873 bp, Enterobacter aerogenes
atgcctagcaatatcgcgcaggaaacggttaacaacctgatgaaccgctctgatatggcctcgttcatctacctggacaacatggccaagagcctgaagcgagccggtgaggtctggttgtcaatggctcgtgaggtttacggttcagatcgcgaggtgcgtgttgtcagcgaagacggaacagatgacattgcgctaatgaatgcgcaggttgttgaccgacagaccggacaagttgtcgcactgaatgacctttcaaccggtcgttacgatgtcactgttgatgttgggccaagctatacagcccggcgtgatgccacagtgtctacgctaacgcaggttctgcaaagcatgctgccgcaggatccgatgcgccccgttattcagggaatcatcctagacaacctggatggagaggggatggacgacttcaaagagttcaaccgcaagcagttgctcacatctggtgcagttaaaccgcgcaatgaatctgaagcgcagatggttgcgcaggctcaggccgctcagcagcaacagccaaacccggaaatggtcgctgcaatggcccaggacaaactagctaatgctgagctgcagaaagccgccaacgaacaggctgacattcaggttaaagccttcaaagctcagacagatgcgcaggtcgccgcggctaaggtggtggagatcctcgcatccgcagacagcaagcagaaagaagatatccgcgaagccctcaagcttcttggccagttccagcaacagcagggtgataacgctcgagctgatgctgagttagtcctcaaagggcaggcgcaagggcattcagagcgcatggatagaggccgttcgcaacggcatgaaattcgtcgatga

SEQ ID NO: 94939 - DNA, 1098 bp, Enterobacter aerogenes
atgaaattcgtcgatgaagatcagcgttctactgttggaaatctggcagccgctgcccgacttgccgcaacctcacctgaagcgatgggggcgtggttgcagaacaactctgaggacttgaggcgcgtcggattagaccctgcagaggtagcacaaacataccagcaaaatcctcaacagttcagcgaatttgtggatcaccttggtatggcagcattgggaccagtcgattatttcaacgttcaagacaagattgttggtcaggctttaaatcgtgacaagctgaacgaaaccattcgcagcaatcaggctggcgaaggtttacaggcgcaaagcattgctgctagtcgtgaaaactccatgcgctctgctggaggtgctgttcctgcatctgttaaagaatatcaatatttcaacagcctgtctccagagcaacaaaagacatatcttcgtgttcgaggacgccctgatgctggcggggataatgttgtgcaactggcagatggcagaacggtaacggttggcggcaagcttcatggggcaggggcaaacgccttctatgagggcgtagatgataacgggaacatggttcgcgtcccggcaagcgctattgcggctcctcctacatctgctgcatctgcgcagaactatgcaatgaagaaagacattgacgcgatctcaaatgccgacccggggacgttagggtttatgactgggtacactggagatactggaagtcccgcatggggggcagatgtaagaagtcgtgttggaggcaaagaacagcgccagctttacaatgccgcacagagaattcaggggcgcatgcaaaaccagggtgtagcagctgctcgtgatatgggtgcaagcggaatcaacactgttccggaggctaaaatgtacttccagagcatgcctcaaatcgattattcaagcccagaagctcttcagcaatctatacgagatattcaagaatacaccgacaactacaaccagcagtatcaggtgaatgtaggcagtggcgcaagacagcagccagcacctcagcaaccaagtaagcctaaatcttctggttatcaatctttatggggtgattaa

SEQ ID NO: 94940 - DNA, 1047 bp, Enterobacter aerogenes
atggctaaggcatggaaagatgttgttgcctctccacagtatcaggcattggcaccagaacagaaagcgcaggctcaagagcaatacttcaacgaggtagtggctccacaggccggcgatcatgctgaacaggctaaacgggctttctatactgcctatccagtaccaaaacaggacgatcagcaaccacctcaatctgtagatggctctctggcttcaggtttctctcagctagcaacacaacaaaaggaagggttagatcgctctgccgaacagggagctagccttggtgcggcaatgcgagaggcggtaactggcgaaagcaggatgactccagaactagagaagcttcagaatgttggatctgctcctgagctaaatgcctttagcactgacgcattgagggctggaattgctcagctttttggctcagatgcgtcgcaggagcaggttcttcaaagcatgggtgccacgctaagccaggacgaaaaaggcaatactatcgtcaaccttccatcgggaagctacgcgctaaataaaccagggctctcgccgcaagatgtaacatcttttcttgctaacgcattagcttttaccccggcctcaagagcaggaagcgttcttggtgcagcagcaaagtcaggagctactgatttagctctacagggagcaactcaggcagttggtggtgaggatattaaccctcttcaagttgcagcttccgcggctcttggtggggctgtgaaaggcgttgaaagaggggctggtgctgtttctagagcggctagcggacaagtatcaccagaggcgcgcgcatcaataaagtttgcagatgagaactccgttccattgcacacaaccgatttactccagccagtatctagaactggcagagcggcacaggcaactgctgaggcgattccttggattggcactagcgggatacgatcaactcagcaagaagccagaagcaagcttgttaaaggagtggtgatgtacatcatcaaccgggcaacccaagacgatgatgattgcccggtaatgtga

SEQ ID NO: 94941 - DNA, 1170 bp, Enterobacter aerogenes
atgcttaccgttaagcagatagaagcagctaagcctacagacaaatcatatcgccttgcagattcaggaggccttttcctgttcgttcccccgtcgggtaaaaaggtgtggcgcatgcggtaccggttcgaagggaaagaaaaaacgctagtcattgggccctatcctgaaatcccactcaccgaagccagagcgaaacagtctgaagcaaaaatgaagttgcttgccggcgttgatccggcagaacagaaacaggccataaagaagaaagaaaaagaagagctagctgatacctttggggatatcttcagggaatggcacacccataaatcaaaggtatggtcgaagggatatgcagacgagatgatgagtatgttcacggatgacatactgccgattatcggacacctgaaaatggatgatgttgaaccaatggttcttctgaaggtgataagactttttgaagacaggggcgcgatggaacgcgctgacaaggcgaggcgcagatgtggtgaggttttcagttatgcaatcgttactggaagagccagatttaatccatctagagaccttgctggagcaatgaggggttacagaaagaaaaactaccctttccttcccatgcaccgcattcacgatttccagggtgctttgaatgcatacggtggatggatagtaacaaaaattgctacgcagattcttcattacacagccatgcgcacaatagaattgcgttcgttggtatgggcaggaatagattacgaaaacaggttaatcagcgttgaccctgaggtcatgaaggggagaaggttgcatgtaatccctatgtctgaacaggttatcgaacttttccgctttttgcaaaatatcacgggtcagtacgagctgtgcttccctggcagaaatgacaggaagaagccaatcagcgaaaacgccatccttggcgtcatccgtaatattggatacgaaggacaaaccagcggccatggcttccggcaccagttcagcaccgtgttgaacgagaagcactggaacagtgatgccatagagatgcagttagcccacgttagtggaggaactcgatccgtctataaccatgccgcatacctcgatacacgcagagagatgatgcaatggtgggctgattatctggatggcaaggtagcgtaa

SEQ ID NO: 94942 - DNA, 822 bp, Enterobacter aerogenes
atgttcaagttaacaccctggctaaattgctggaatctcattcctgatggcaccccatttgtcactcatacgtcacagttgtatccggtcaaaacagcaacccatggtattaaagccatgttaaaagtcactgatgatactgacgaacaaaccggtaatgcactcatggtatggtgggaagggaacggcgctgcccatgtgattgcacatgaaaaggaagcaattcttctctcaagagccacaggttccgcgtctttatcagcaatgtctcgtggagatagggatgatatagcttgtcgtattttatgtatgactgcgaaccggcttcattcattcgccaaaagaccgttcccccggctaacctccctgcgtgaatggttttatcctctaaaaccagccgccttgcagtatggcggtatcctgacacgttgcgcagaaatttcagaagagttgctttcttctccacgagatgtggttgtattacatggcgacttacatcacggtaacgtgcttgattttgaaacgtccggttggttagccattgaccccaaagggctgataggtgaacgtggattcgactttgctaatatttttactaatccggatcttggttatccggtacctgctgttgcgactgtaccagagacctttaaacagcgtctaagcatcgttaccaggatggcagacatggataaagagcgcctgctcaaatggataattgcgtggtgcggtctttcaaccgcctggtcactctcaagtaacgaaacggcttcaataacaataaaaattgccgaactggcgattgctgaattggaatcgtga

SEQ ID NO: 94943 - DNA, 1314 bp, Enterobacter aerogenes
atgaaatttttagaagaattcttctcttcaatagcaggaaatgcaagaacaagaatcaatgatcccttcgttggtacttttatatgctcttggttagtatgtaattggaatcatcttgcattacttttctggggagaaggtaaggtagctgaacgaattagtggctttactaattatttagaaaaaactccattgattggttggaatcaactttttgttattccattacttattgcatctttttatcttttcctttttccttggttttcattatttattaaatttctacaacactgggctaaggagaagcttcataaacaagctattgcggaagagttgataaaaattgatcatcagaaaaagttgaatatggaaaagcttaaagctaatcctaataaaaagtttttggagcaattagtccaacatgatattgataaacgcaatttgatattggaccatatgacactgagaacttctcgtttagaggctaaaaaggcagagtcgacacttaaaactcaagagcagttgtttaaaacgcaagaagcagaaaataatgaaaaaatatcaaagctggaacttgttaaaaaagagaagaaaacagaattagaaattctgcgatttgagaatgagggtgctaaagtaagagccacccttgcctctaatagatttccatctgctttttttcttatgcaaatactagcagatagttttaaggaggatgatgtatatatttctattaaatccttaagttcaattattgcagtactgtttggttatgccgattttgattcactacttaacgataaaaatttcaataatgaaaccttagggaaggtggagtatatatattatgatgaagaacttgcaaaggaactgcaccagatagtgttagatgaaaattcagataatgaagattttacagctgatttcattttcaagcatcttgatatgttatttgaagaaaatccttttagattaataacaggagacagcttggcagaaatatgcaaagaatcctttgaaaataaccccaacgatatttttgatggtgatggagtatcaggagcaattgcgatgtccgacacaatttttgattcggtagaggatattacactagaaaattataggtttgatagtgggttttatgcggatctttctgctaatgcaagcggagaacattataaagaggcaggagttcctgggcgggatatgagtgtttctataacaatgaaatgccctgtattaattggtaggtttggtctggggtctgtagaacaaggagaagttaacgggacgctggatgaatttgaataa

SEQ ID NO: 94944 - DNA, 1179 bp, Enterobacter aerogenes
atggcagccagaccaagaaaaagagaatatcgccaccttccagaatatctattatttgataaggatcgtggtgtttataaatttacgcttataacaggaaagaaaaaaaatcttggtaaagatcgagctatggcgattgctgtagctcgcgaatataacctaagaatgagaccattaaacgcaccatctgttgatatattaattagggaatcaggtggtatcgctggcgaggccaaaccatttgctgaatatgtagaacatattatgaagcgagcaattgataatgagcggccatcacaaaataccctcgacgattggaataatgatgccattcgtgtgaaagaattttttatcaacattcccgcttgcgatattgaactggagcatgttaacgcctacataaaccattatcatgctgaagcttcagcaaacgtacagaacaggaaagttagcttccttaaaaaacttttttcctatgcggtcgatgaatcattaatgtttgataacccggccactcgtaaaaagatgcgcaggacagaggagaagaaacggcagcgcctgtcactcgaacactttaaagccatcagacgcgccgccgaaccatggctacgtaccgcgatggatttagcattgcagacgacgcatgcgcgccttgaggtgtcacgaatccgatattcaatcagtgagccgaaagatggcgtctgcgggtgcgtatggcttgcacagccggaaaacgggatttatggcacgctgtacatccaccgccagaaagtacagaagaaagaggcctcacatgtcgcaatcccgatcggggaagagttgaagcggattattgacgaaagccgcgataacgtagcaagcccatttatcgttcaccggattccagaacggcaggttaaacgtagtaaagaggtttcacacccgacacaggttgcgccggattatctgagccggtccttttccgcagtgcgagacaagctaggtttatgcgacaaactggcaatggatgaaagaccaacctttcacgaaattcgagcattggccgctcacctcttcgatcagcaggggatagatccacaaggtcgaatggcgcatagcgatgcaaagtccaccaagatttatactcaaaatcatatagactgggttgtcgtccctcatggtgaaatcaaagcctgttag

SEQ ID NO: 94945 - DNA, 210 bp, Enterobacter aerogenes
atggcaaaactaatgaaagcgagtcaatggggcaaacgcgaatttgccaaagactctattccggataaccgaaccattaaacgttgggttgaaaatggactactcactgggaagatcgtcgacggttctgttttcgtcttcgagtctgaaaaatggggagtcgactcaatggttaatcatacggttcgacagctaataaatgaaggttga

SEQ ID NO: 94946 - DNA, 288 bp, Enterobacter aerogenes
atggctaaatcatcagacgtacatgacctgttaacgtcttaccagaaacaggcgcggaaaatccctgctaagggtgtctatgcatcgaggcatcggcaggttgaggtacaggcggctcacacacgcaaaataatgcgcaagcgtcggcggtcagttggcaagtcaaataagcttggctgtcgctttactgcggaaatgcgagtggcgctgatttgcgatatgaatttttgggcattggtgtgccgctctaaccgcaaccaggtaaatacgacgggagccaaccaatga

SEQ ID NO: 94947 - DNA, 402 bp, Enterobacter aerogenes
atgactgatatcaaccgactgttaaccagcctcaagcgccgctcagcccacgtaaaagaattcggcgacgatattacgtttgtaaaacttgaagaccttgatgtgctggtagaggcgctggagaaggcgcagcagcaaaatatgagcgactttgaaatcaaagcccgtctctgcaaagagagtaatagcctccacgacaggttgagagaagcagagaagcgcatcgccgagctggagtcccgcaccgtgaagctgccgaagcgctccgttggcgaaattatgcatatgagcgggtttagccgggattatgccgagggttggtgtgccggtaatgacaacgccattcatgaaatgcgcgtcgctggagtcaatgttatcgaaggagagcagaataatggctaa

SEQ ID NO: 94948 - DNA, 198 bp, Enterobacter aerogenes
atggcacacgtaaaagtaaaagacctcgttgcggcagcttatgccgcatcacagggtttgccaccagcagaggcaaaactgatgcgtgatgtcgctacccgtctggatgtaacttatgtcgctctgactgaatcgatggatattaataccgcgctgtccgccgatattgccaagcttcgcgaggttagcaatgactga

SEQ ID NO: 94949 - DNA, 528 bp, Enterobacter aerogenes
atgagctttattcaaacactgtctggcaagcactttaactataacgatattcaagaggacgctatcgtcattgaggacattgcaacagccctctcacacatctgccgctttgccggccatctgccggagttctacagcgtcgggcagcatagcgttctggttagccacctggtgccgcaggagttcgcactcgaggctttactgcatgacgctgcagaggcttatatgcaagacatccctgcgccgcttaagcgattactgcccgactaccaggttatagaaacacgtgttgatgcggcgatccgcaaaaagtttggtctgccggcagagcagcaccctaccgttaaatatgccgacctagtcatgctggccagcgaacgccgtgacttcgagatcggcgacggcactcactggcctatgctcgatggaattattcctaccgaccaattcgttattaacccggtccgccctgggcagtcttacggcatgttcatcaaccgctttaaccagctgatggagcagcgctaa

SEQ ID NO: 94950 - DNA, 699 bp, Enterobacter aerogenes
atgaacctacaaaatctggaatatacccgtattgaagtacgtcgggcgttgcaaaatttatcaggtgcgaccaaggggcagctcgaggcgtttagcgagaatccaccagcagacaagaacaaaagcccccgtcagcctcgtcatattgtagatctggatggcggtattggttgtggcccgtcggtggttaaagctctcactacgcccgtctatgtgatggagacccgcagccgccgccggccgatgccacctattaacgatattgagttcagttattcgccgtggcgccgcgcagtgaaccaactggaaagccaccagcaggcatgggtgcgctattgctatggtttcgatctcaacttccagtatcaaaccgaaatgtgccagtacgtctggactgaataccagaactaccaagtaagcaagccgctgcaatcgagagtgatcaaaaagctggtggggctggtctggttggctgcccaggaggttgccgcgacacggaataatgagacttataaagcctacgctggcgccgcactggcgcgtatggtttcagttgatcgttcaacatggaaaagagtgtatgccggtcattgggagcggcttaaaaaggctttcgttgagatggatagcaacgcattgcaacacatctacagccatcatgaactaatagaagaggccagaacggaaaaatgtgattaa

SEQ ID NO: 94951 - DNA, 192 bp, Enterobacter aerogenes
atgctaaatcaagatgatatgacggaagtagcgcgcgcggttttcaatgaattaagtgatgaaccagctacggttggggagatttcgcaaaacacgcatctgacgcgtgagcgctgtcagttaattttaacgcagctggtaatggcgggtttatctgactatcaattcggatgttacaagcgcctcccttag

SEQ ID NO: 94952 - DNA, 1050 bp, Enterobacter aerogenes
atgaaaaatactgtaaaaatatccagtgctgaattaatcaacgctgattgcctgcaatatcttccgtccctccctgataactccattgacttgatagttacggatccgccgtattttaaggttaagccgaacggttgggacaaccaatggaaaggggatgaggactatttacgttggcttgatatgtgtctggcgcagttctggcgtgttttaaagccgaacggtagcctttacctgttctctggtcatcggcttgcctcagatatcgaaattttagtgcggagtcggtttaacgtactgaatcacatcatctgggcgaagccatcaggacggtggaatggctgcaataaagagagtttacggtcctattttccagctacagagcgaatattgtttgctgagcattatcagggaccgtatcaaccaaaagatgatgggtatgcggaaaaaagtaacgaccttaagcagcatttgatggcgccgcttatatcttatttccgtaatgctcgagattcgcttggcgttagtgctaagcagatagctgacgctaccggcaaaaagaacatggtgtcgcactggttcggcattagccaatggcagctgccaaacgaaagcgactatttaaaactgcaggcgctattttcaaagatcgccgcagagaagcaccagaagaacgagctggcccaccctcaccatgagttagtagcaacctggcattctctgaaccggaaatattcagaattgctggaggaatacaaatccctccggcgtcaattcgccgttacggcgcttgttccctatacggacgtttggacgcataagccggttcagttctatcccggtaagcatccatgcgaaaaacccgcagatatgctcctgcagatcatcaatgccagtagtaagcctggtgatctcgttgctgatttctttatgggatccgggtcaactatcaaggaagcaattaagtctggccggcatgccataggggttgagctggaaggcgaacggttcgagcaaactgttgacgagatccgcaaaatggctggctga

SEQ ID NO: 94953 - DNA, 411 bp, Enterobacter aerogenes
atgatttatccgctctttattttcaaagccgatgacggcacttttgatggctactttcctgacatcgaaggttgcatgtttgccgggaacaacctcgaaagcgcattgagagacgcggagtcagctttcggtcagcatatggaagttttgactgaacaaggcggtcatgtgcctgcgccaagtgatccagccgattatctgggtgatgaacgtctcaccatggataacggctttctggcgcttgtcgagattgacccatcaaaatacgaaacaaaagccgtcaaatttaatctcaccatgcctggtaatctattgactgcaatcgacagttacatagaaaaaaatggacggtacaaaaaccgctccgcttttctatctgagattgcgagaaaagagatagccagaggctaa

SEQ ID NO: 94954 - DNA, 255 bp, Enterobacter aerogenes
atgaacaaaatcatgcctgacaaaatcttttcagcggctacgtactgcacgtcaggcggcctgatttgtactggcctggcgcgtgtttatgactggttccatggtcttgactggaacttcattgcgcttgtcagtggtgtagtgatcggcgtcgccacttatttcacgaacctttatttcaaacgtcggcaaaccaaagcctatgaggatgcgctcaggcgggggtatgtgacgcaaccgccgcaggataaataa

SEQ ID NO: 94955 - DNA, 534 bp, Enterobacter aerogenes
atggcatccctgaaaacgaaactcagcgcagccatgctgggattaatagctgctggtgcatccgccccaaccttgatggatcagttcctggatgagaaagaaggtaacagccttaccgcttatcgcgatggtagccaggggatctggactatttgccgaggcgccacgcgaattgatggtaaacccgtcacgcagggaatgaagttgacccaagccaaatgcgatgaggtgaatgctatcgaacgtgataaggcgctggcgtgggttgatcggaatatccgcgtaccattgacgcctccgcagaaagtcggcattgcttcattctgtccgtacaacatcggccccggtaaatgcttcccgtctacgttctaccagcgcatcaacgccggcgaccgtaaaggcgcatgtgaagcgattcgctggtggattaaggacggagggaaggattgccgcatacgcgctaataactgctacgggcaggtaactcgccgggatcaggaaagtgcgctgacgtgctgggggatagaccagtga

SEQ ID NO: 94956 - DNA, 381 bp, Enterobacter aerogenes
ttgaaaacgttgaaagtcacaattacagaccttctacagattaaggctggtgttgtctgtggtgccaaagtcacatttaaagtcattcagtctggttacgttctggtggagaaggttgtttctggcaaggctaccggcccgtttactttgtcttatgatgtagatgcgaatgatggaccgctggtggttgaacatgatcgccctgatatccagagcgttagcataacagcaagattggagtctaaggctcaggatgatgcggcctacaaacaggccgctaggggaaatgttgaagctaaaacgcctattagtttttactcaggatataaaagtgaagggttagcttctttcttttataaggaaattatttcccggcgttag

SEQ ID NO: 94957 - DNA, 204 bp, Enterobacter aerogenes
atggatattaaagaaatgcatagcactgcttaccgagccttagtgcaggcaatcattgccaatatgcctcaggaacaaaaagacgcagtaaaagcaacgcttgataagatgtctgctggaattcctgcggatatgaaggatgatgaactaatcaatgaagcgttcaaatatgcacatcatgtgattactaacgccgggaaataa

SEQ ID NO: 94958 - DNA, 327 bp, Enterobacter aerogenes
atgcaaaatatcaagattgaatacgttaatggcgcgctggtggcgctggagcgtgacggcgtgtcttacgcgcacctgcctgtgtcagctatccatttcgaccatacgactaagattttcccgcacctcaagattgagattgaggctggtggcgcaccattcgtacccgcagcgcaaccacaaccggcagagccagaactaccaccagctgtcgtggaagaagcgcagacagcaaaagaaggggagctcttgccgccggataatagcgcgccacgaccggcgcgtcgtccccgtcatcgcaaccgtaaccgcaaccggagccagtaa

SEQ ID NO: 94959 - DNA, 156 bp, Enterobacter aerogenes
atgggcatcgagctgcgcgtcctgaaaataacgctcccggtaaaaatgatgccagtcgcccagctcggaggacgtcatgccagcaagcatggcgcgccagtcgggccgcccgaactcgcgcgccagcttcaggacaaaatcaagctcactggctag

SEQ ID NO: 94960 - DNA, 675 bp, Enterobacter aerogenes
atgcctattatcggtacactttatgtcgtccataaagagcacaaaatcccggttgatatacaccttgaaaatagtgaggaaggagagtatgtctattatacggcggatgccagtattgatgcggatggcgccaatgggcaaaacggctctcccgccgcttaccaaataaatgaccagtttaaggaaataggcagcgatcgtttagttagccttaatttaaaaatagattccaatggtgtattccacaaaataaaccctacaagtggagttaatgccatcttagacggcaatggtcaaccaaaaatatttccgcaaggaattattgcatctaaaacatcattacattatcaacatatttcattagatgaccccaaagcttatatcgatgcagcgacagttctctacattgccgtaccaatgatagtgatcgcgcaaacaaaaggcacagtgattggatgccaggcgagagtaacatggaaagataaatctataaattgtgtggttgcagatagtagcggcaatggtattggtgaattaagcatcgctgcagcagaggcgctcggggtaagcggaaatccgctacatggaggaattgatgaaattgccgtcaggtatgaaatttggcccggtaaagccactccgggattcccgttacttcccaccaagcatcattaa

SEQ ID NO: 94961 - DNA, 663 bp, Enterobacter aerogenes
atgcttatctcctgcagctcaccactcccggttccggttattgatgccgataaagagtgtattcagaacgctcgaacatgtcataattatgccgatggtctggattcttttaaaaaggtagttggtgcatataaagccttcgccataaaatgggagcacgttgccgataccaaaaagttggagtcgcaaacagcagatgaaataaccttttacggattactggccagtgctgtcggactagctactaaatcccctgagacggtgattgccggcgcgtcagtgggtgcggcaggtaccctatacagcaagcgataccgccttgaagtgcaatcgcataattacgatttggcttctcaggcgatgcagtgtctatatatggcaacatttcctttcaaagaccgtaggtttcctgataaccatgccattcgtaacgcagcgctggactcattaactaatgtcagagggaagttaagacagttgcaatattcgatggtactcggcacccccgatatttctggtttaatcgccattattaacaacccatataaaatgccaccccctgccattacaaaaaataataaaaatagtggctctaacatgtctcaagtggaaaccgacgagctattgaatgaaatgaaaaaatgcgaaaccaaactgaactag

SEQ ID NO: 94962 - DNA, 624 bp, Enterobacter aerogenes
atgccgatttctgcacagcaattatctcaggttgttattaatgagtgggatagatggggaacctacccaggaacgccgaatttaaaatcccaacatttggagtcacaggctaagttctcgcctattgttcatcaatactggcaagctataggtgctgatttggacggtacgagcccttatgcatggtcggctgcttttatttgtttttgtataaaacagataggctatactggccatgattttccactaaaatcgtatcattccgaatattgcgcctatatctatgcggggaaatatccaaaattttcattgttagttccagaacttaccccggtgcaagtaggcgatatcatttgtaaaagacggcctgatgcaaatggcaattatcatgagccattaacctactatagtgcaatttctttttataataacattcttgttgacgatagtaataattttgattctcacagtgatattgttattgaggttaacaatggtacgattttagctgtagggggaaacgttagcgatgcagttgcttcatcaacctatgatctgacaagtaatggcggactgaacatgaatgatgctccttttttagctattattagaataaactcataa

SEQ ID NO: 94963 - DNA, 2151 bp, Enterobacter aerogenes
atgaataaaattaccagcgtgtgcccctattgcggggcgggttgtaaactcaaattggttgtcgaaaatgataaaatcattcgcgccgaggccgccgacggcgtcaccaatcaaaaccagctatgtctgaaaggctactacggctgggatttcctcaatgacacgcagcttctcacacctcgcctgaagcagccgatgattcgttatcagaaaggcggcccattcaccccggtcagttgggaagaagcgattcgctacaccgccgctaagctccgcgagatcaaggccaaatatggcccgcgcgccatcatgaccaccggatcgtcccgcggcacggggaatgaaaccaattacgtgatgcagaaattcgcccgtgcggtactcaataccaataacgtcgactgttgcgcccgcgtttgccacgggccgtcggtcgccgggctgcaggcttcgctcggcaatggcgcgatgagcaactcgataagcgatattgagaactcaaaatgtctgctggtctttggctataactgcgccgattctcaccctatcgtggcacgaagggtactgagagcccgcgacaacggcgcgaaaatcatcgtctgcgatccgcggcgcattgaaaccgcccgcatcgccgaccagcatctgcagctcaacaacggcagcaatatggcgctggtcaacgccttcgcctatgtcctgctggaagaagatctctacaatcacgattacgttgagcgttataccgaagggcttgaggcctatcgtgaggcggtgaaagactactctcccgaagccgtggaagcgctggtcggcgtcccggcgctggccattcgccgggcgatgcgcaccttcgccgccgccccttccgccaccattatgtggggaatgggcgtaacccagtttggccaggcggttgatgtcgtccgcggtctcgccagcctcgcgctgctgaccggcaacctcgggcgggctaacgtcggcgtcggcccggtccgtggacaaaataacgtccagggcgcctgcgatatgggggtgttacccaaccagttcccgggctatcaggacgtcaccgacgccgcggtgcgcgccaaattcgccaatgcctggggcatcgatccggcgctgatggatacgcaaatcggcacccgtatcaccgaagtcccgcataaagcgctggcgggagaaatcaaagcctactacatcatgggagaggatccgctgcaaaccgaggccgatctgggtctggtacgcaaagggatggaagcgctggattttgtggtagtgcaggatatttttatgaccaaaacggcggaagtggctgacgtgctgctgccggcgacgtcctggggcgagcacggcggcgtctttacctgcgccgaccgcggcttccagcgtttcgaacaggctattccgcccacaggtaacgtgaaacgcgattgggaaattatcagcctgctggccagcgagatgggctatccgatgcattacgccagtaaccagcaaatctgggatgaaatgcgcgaactctgtccgctgttctacggcgtaacctgggagaaaatgggcgatatgggccacgtgcagtggccgtgcccaacgctcgatcaccccggtacgccatggttgtatcaggataatcactttgatactccatcgggcaaagggcaactgttcgccgcgccgtggcgcgcgccggcggaaacgccggacgatgatttcccgctggtgctctgcacggtgcgcgaagtcggccattactcctgccgttcaatgaccggcaactgcgcggcgctgcagtcgctggcggacgaacctggccggatccagatgcaccctgccgatgcagagcggactggtatcgccgatcgtcagctggtatgggtgagttcgcggcgcggcaaagtgatgactcgcgccgatctcagcgagcgaatcaaccccggcgcggtgtatatgacctaccagtggtgggtcggcgcctgtaacgagctgacccaggataatctggatcctatctcgaaaaccccggaaaccaagtactgcgcggtgaaggtagaggctattgccgaccaggactgggcggaacggtacgcgtggacgacctatagcctgatgaaggcgcggttaaaggcggcagctaacgcctga

SEQ ID NO: 94964 - DNA, 558 bp, Enterobacter aerogenes
atgagttcaggggatgcaaccaaaatatgttcaacttgcccgatatttttaatgataaagtttggattaggctctcgccctacgcgtatgcctatatcgatacgatgctcgatagtatcaagtttcatcatatctaaacgccagtcgataaataactcaggatatggacgcagtgcagtcaacagttcatacaagatttgctcatgttttggaaatcgaagtaatgtgatacgaacaatacctttcatttcattatcatctttcgccatcagaaataacttttcagaatcttccagcagtcgcttcgcttggggtaaaaataactcaccgaaactggtgagaaagatcgaccgagtattgcgtttgaaaagaggttcaccaagctgtttctccaactcagcgactgttcgggttactactgatggtgaaaccgacagctttatggctgcttcgcggaagttcagggtttcagaggcaatgataaaaaactttagggcatcaagtttgttcatgattgttgtgaaaattgcaataatgtattttgataatagcaattaa

SEQ ID NO: 94965 - DNA, 1170 bp, Enterobacter aerogenes
atgaagagagaagtcgtgcacagaaatgatcgtcagcgagtatccaggattaatccaaccacacccgaagcacgccagcgtgtgatcacggcgttgaaggcaagggctgatgaagatctcattgctctggttcaatggctgacagtcgacaaacagaaaggtaaccctattccgtttgtgaaatgcgaaagtcttcgttccgctattgctaatctcgagaccctaaaggcaggtgtacacaccaggtggaaacaggctctggggttgatggaagcagaaatccaaaaaagtcatcgttcgaaagcttcgattccggcaccctcccagattgttactggagttttgagcagtcttaatgacatcagtgagaagattgcttcaggtaatgctgttcccgggatgctgggcagacttgaaaatatgcagcaagtaattaccaaactagaaggtagtgaggagctggccaaaagcatcaacattgttatccaacaggcacaggatgctttacgtggctatcgcaagccacagccaaaatcaaaaacaaggaagcctgaaagaattaatccagccattcgtgaagagcaaacgttccgggatgaatgtgctcctttgaccggagagagtgatattttcgtaattgctaattgcctcatctctatgtcggcccgattaggtcaatcccccgttagtctggctaaaagggcagcaactctgaaaggtgttattaaagttgaaattctgcctgagctgctagagttgcttcagcaagaggtagatctgaatgccttgataccgcgccccaaagtcaaagatgacaatactcgtagtgatggaggcaaacttgttgggttgactggagttgtagaaggtggttggtctattggtgttgaagcgcaacgtattattactgctgaactcaaaaagattgctcatttctccgggactcaacgcgtctatctggatacggcgcgttcagggctggctctggaaagcgacacctttaaggttattgaggaggtaaagcgtatcgctggtacacagaactgcagtccgttgactgttgcggtgtatgcgacccataaaactcctggtataagacccgagatagcaggggatgtgattactttgttggctcaagatgaaatgcttacagcgaacttaaaacggtaa

SEQ ID NO: 94966 - DNA, 909 bp, Enterobacter aerogenes
atggatataaatcagctgcgttgctttgtggtgttaggtgatgaacttcactttggccgggctgcccgccaactcgaaatgatgcccgcgtcactcagccgtttcatcaaactgctggaagacgatctggggataaggctactgaatcgatcgacccggaatgtatcgctgacacctgaaggagcagagtttttacatgaggccaaagccgtgattgctgattttgatgcgctacggctgcggtttcgtaaaaatgcgctgccgcaaaaaaggacgctgcggatcggtgctattgatagcgcagccagagggttactgccggaattgcttaatcttttcgtcaggcagtttcctgatgcggatattcatattaccgaagataagtcgcacaatcttatcccacggctcatttccggatggctggatgtggtctttgtacgtccacctgaacatgctgatgttacgctgacgacgcgttttattgcgaatgagacctgtgtgctcgccgttcctgctgaccaccgactggtcacttataacgaagttagtatcgctgattttcgtaatgaacccgttattgtgccggaaagacgtacccgtcgtcacagccatgacctgacaatgaatattttcaaagagggtggctgcgtgcctgtcattgcgcagtatgccgaagagaagcagaccatcctgagtttagtcgctgccgggttaggcattgcccttgtgcctgcatcgtataaaaatatgaatgctgacggtgtcaaataccttcctctttctccaaagcaagatgttgaagggcttcctctgagcgcaatgtggcatcaggggaataataatatttatgtgagatcgctactggatatgctttccagcaatatcgaagaactgacaagtaagttgtga

SEQ ID NO: 94967 - DNA, 723 bp, Enterobacter aerogenes
ttgaataccaaactgaacaaactcatgcaattggcgtttaacaactccagcgccaatgaggccgcacaggcattgaaaatgcttgccgctgcaatgcaggagcagagcataaacccggccagcctactacaaattaagagcgactccgccagcagcgagttggtagctgagttacgtcatgagctttccattctcaaaacggattacaacggcatggtagaccgttataacaccgttgtacgtgcccataaggcacgcggcgagaaaattgcagcgctggagctgtcattgtccgaaaatggtgttgcggcagcacagcgggccgcagagacgcagcaggaagcatcttctgtatcggaggggactattgctgaccaaattcgcaaaatgaagaattgcacggcggatctggctaaccacccgaaagcaaaggccacacgacgcctggctgatgagttagctgcgcagaatgagcagtttaaagggcactggaactaccaggaacctagccagagcagcaagtatggtgatgcacattatagctatgactacggcgacaccctgcatatgtggatctgtaaatcggaaatcagcgacgggttttcagtaagtctcgcgacctttggtccgcgtggaggcaaaaaggacagtaaacataaatcttttagcgacgagacctcattgatggactggttactgaaagagtggggggtgttgaagtga

SEQ ID NO: 94968 - DNA, 294 bp, Enterobacter aerogenes
atgagtatcatttatgttgttgttttaacttacataaaacccatcgatgaagttgattctcaaatacctcaacatgttgagtggctgaagagaggttactcagatggtgtttttcttgcatcaggaagacgaatcccacgtaatggcggcgttattcttgcaaaatgtgacaacattgaatctctgaaagcccgccttagccaggatccattccaaaaactgggtattgcaaaaactgaaattattccctttgaggccactatgaaagctcaattgctggagaatattatttga

SEQ ID NO: 94969 - DNA, 207 bp, Enterobacter aerogenes
atggaataccaattgccattggccattcccactcatttcccaacacgaagaacgaagagaggcattactaccatctggatcaaaagtcctgtaatgcaatattgcgaaattatttctaatgatgataagtctaaattcgtcactatgaattattggacaaccaacttcagtagaaagtgcatctattgtttctgctcgatcaattaa

SEQ ID NO: 94970 - DNA, 960 bp, Enterobacter aerogenes
atggttagggaaagagatttatcatttgatagcctaaaaggggtgttgattatccttgtgataattgggcatgttctgcccggtagtgatagtgaaggcgtcagaggactcatttattattttcacatgcctctatttttggctgttacaggttatttcattaaaactaaagcccttgaggttgaatggtcagaattattaaatcgctataagttcaggatgatattaccatacatggtggcttttgtgatttatactttgtgccactgtctgttttctattggtatagagaacctaaaattgaaagatgtaatatggctaatacttcacccttattatcacttatggtatatacctgccgttttaatatttatcgcgtatactaaaatcatcaagggtaatatcatatctgtttatgttgtttttgttttatcgtcaataatatcaattctttggcacggggttgataacttagttgataatttattcccatcggtaaaataccttggggataagaggttttataactattactctttcttcttattaggctatctaattggaaacattaatgtaaccgttaaatggtatatatcagtaacaatatgcctgctgatggtttttattaataggatgattgctttttcaccaagcatgggggcagtaaattggtatattttcaatgtgttcttgatcttttttgttatcgcactttgtcagcataaatacttcctcgtaaaccgatttttggttagtctcggtcaggcctcgttgccagtttatctttggcatgttggggggatttttatcgcgggagagataatgaatgattcagatgttgcatactatggaatgacaatattttttgtgcttatacttatatggatctccatcagtcagcggggcaagtatcctctgttgaataaatatttttatggagaaccatataaagcgaagtga

SEQ ID NO: 94971 - DNA, 882 bp, Enterobacter aerogenes
atgctggcattgctgagggagatgagatcgactttttcactgcgtgtctttcgcaaacatctgggtatgtatttgtgcggcttcggggccgagtggctgtttgcttctgtctttacctactttatcatttttgtcctgcagtatgatccgactatggtatccggactgagcagcctgaactccgtgcttcagctcttttccactgctatttttattgctatctgcgtaaaacatgggttcagcaagccctatatacttgcgctgggtatcgttatcttttccttattgtgttatgccgcgctctattttttccacctacctcaacagtatgccactgcggcgatgctggcgattaccgttgttttcgggatcgggacgggcggggtgtattacattccctggaccgtgtatacctttctcgctgatgttgacgaagtctttaccggatgccgccgcgaggggatctatgccggcacgatgaccttctccggtaaacttgtgcgctctgtgattgtgtttactatgggagcgatcctgagtttctatggcttccagtctaaatcgcaaacccagccggaaagtgcggtaatggctattgcgctggtcttttgcgtcggtgtgattgcactggctctcgcggggatttatttcagcgcgcagatgaagctgaaccggaaggcacatctggtggtgcttgctgaggtggcacgtatccggggtggtggccagatttcacatgtcacagcggatgttcgtgccatcatggaagccctgatcggttttccgtatgaacaatgctggggtaacagtaccgtctgttgcgatggcagaaacgagcatcctgacaggaccccacttgccggcacgacccgacagccctga

SEQ ID NO: 94972 - DNA, 729 bp, Enterobacter aerogenes
atgagttttgatccatttggcgatttcgataccgcaggctaccttcaaaatgccctccagcttaaggaacctgaagaagtcaaacgagcagaacatcttgcttttgaagcaagtattgaaatcgcattcaattacttagctcaaatagaaattatggattaccagtcagtacttaaagttcatgagatccttttctccgatttttatccctgggcaggaaaagaccgtaacgaacttgtaccccatcttgccgttttcaaaggttcacaggataacccccgtcacacggtcttcgagcgaccagactctatccgtatggttgtcgaatacgcccttcatttagccaataacaagcaacgtttccgggaaaggcccggggaagtcatgggattattagcctttgcacaccctttcctcgatggtaatggtcgtactattttgcttgtgtttatggaactcgcctttcgggccggttttgccattgactggtcacagacaagcaagaatgattatttgaaggcactcagcgacgaaatcggagaaccatctaaaaggcaccttgatcgttacctggaacccttcgttgtgagcatcacaaaccgggatgcctggccagcgattattggcgggattaagggactggatggcttagataaagagaatatctcttatgaaagcctggatgaccccgaagtacaaaagatttacatgacttaccgttcagaatga

SEQ ID NO: 94973 - DNA, 948 bp, Enterobacter aerogenes
atgtccctacataaaatccgccaggagtggctgacgctggacgaggccgcagaagtcatccggcagcacaacatcacgttactgcccgccgacctgatccgccatgccctgcacggcgatctgccactctcggtctacttcccctcgcccgtacttctgagaccactcaatcccccttgccactttgcctgccgattcagcaagcctccttttccaccttctgagtgcaacaaacccggcaaccgcaaagtgatggcgaaccctccgccgtgcagacgcgacccgactctgcaactgaccaccagccatctatggaatttgccgttaattggccttgagcgcctgctgctccaccagcaactggcgaaaacgttgaatcgtccttgccccaaagatacccattgctgcaaccagattggcatcgtggtctgcgatgagaacgacagctactaccaactctgttgccgcaaatcgttgcgggagcttttgctggaactgctcgccacgcaaaacaacctccaggaagagctacatctgctgattggtcagttgtatggcaatggccgcaatgacctgaaatcccggctcagtctgtccgtctgctacctgcaggacacgctgcctcctgacgcactgttcgtcatccgccgcactcatctcgaagccttcctgacccgtcatcagccggaatcaaaggagcggatcacctccgcgctttcacgtttgctgtggctggcctgcaagcacaacccgcaactggacgaggaactggaccagcttaagctggaactcgatttccgccaggcactgacgcgcaataccgccagtcagatcctgcaacgcaaacagcagcgcgaccagcttcaggggcaggcggtggaggtgtcggacgacagcgaccgccgcctgcatcagttgaataacccacagccggacagcccgcaatga

SEQ ID NO: 94974 - DNA, 456 bp, Enterobacter aerogenes
atggccggaaataatgttaataaacccgaagtgttaaccgggcacactgatgtgatttgctccaccagcattgaacgtattgttacaggccgtaatgctgcgctgacacggattcaaagccttatcagtgaacttgatgatatctccattctgacccacgatatcggcggtggtacagcacaagagtggggaatgcgggagggccatcgctacgattgctggttcacggaaaaaaccgataaagcaatgaaagcgatgacccgcaatattgatcgccgcatctggcgagagctgatgaataaatcaggcatgctgagcctgatggatgctcaggcgcgtgacgagtggcacaaaagtctggagaaagacgatatccccgcgatctctgaagacaatatcgacattgaggaacggcacacccgcgaaggagatcaccagcagggcgctgtagagtga

SEQ ID NO: 94975 - DNA, 387 bp, Enterobacter aerogenes
atgcaaacgaaattacccttcatgcgggcggcatcgtcacgtccgtctcccgttgatgtctggcagactctcctgacctgcctgctggaacactactatggtctcacgcttaacgatacgccgttcagtgatgaactggtgattcagcaacatatcgacgcgggtatctcgctggccgatgccctgaattttattgttgagaagtatgaactggtccgcactgaccggccaggcttcagcatcagggagcagtctccgtttattacggccattgatattctccgggccagaaaggctacagggctgatgaaccgtggcacgtataaagaggtgacggctattaccagaggacaacatccgcaggccagcacttcaggcaagcgatga

SEQ ID NO: 94976 - DNA, 360 bp, Enterobacter aerogenes
ttgtcgaagaaaaccacactaacaacgcatgatatcagcgagccctggtgggggctcagacgcagtatctccccgtgttttggtgcccgtctggtccagatgggaaaccgcctgcactacctggctgaccgcgcgaactttgatggtcagtactgcgatgcagatttgcgccatcttgaccaggctttcccggtattgatgaaacagctggagttaatgctcaccagcggtgaactgaatccccgccaccagcatggcgtcacgctgtatgcaaaaggcctgacctgcgaggccgatacgctcggttcgcatggctacgtttatatcgcgatttatcccgctcccgtcaccacagaataa

SEQ ID NO: 94977 - DNA, 174 bp, Enterobacter aerogenes
atgaaaattatcagtaagcgtcaggcaatggcgatataccgccagcatccacagtcccggttgtttcgcttctgtacggggaaatataaatggtccgacagtatctgccactatgccggtcgcgaggtggaagatatcagcggggtactggccgtattcgcagagcgccgctag

SEQ ID NO: 94978 - DNA, 480 bp, Enterobacter aerogenes
atggaaaaacagttaccgttgtttgcatatgaactgacggcttccgcacaacagaccatccgcgaggcgctggccctgctggagcgccagttacgcgagcccggcgcatcgtttacgtccagcagctcagtacgtgactggttacggctccagctgacaatggaggaaagagaggcatttgttctgctgctgctggataatcagcaccgcctgattacgcatgaaacgctgttcaaaggcaccatcagccataccgaagttcatccacgggaagtggtgaaggccacccttaaatacaatgcggcagcggtcattgtcgctcactgccatccctcatgccatgccgaacccagccagtctgacagacgggtgactgagcgactgaagaacgctctggaccttgtgggtgtccgtctcctggaccacctcgttatcggcggaatggatatcgtctcgtttgctgaacggggctggttataa

SEQ ID NO: 94979 - DNA, 471 bp, Enterobacter aerogenes
atgactgagaacacactgcccctgtttacacccgcagaaaccgttcctgttgcagcccaacagcagatgacctcaacacaggtcaccgatgagaaccgcgtcagtttctggccgcagcacttcggcaacataccgcagtggataatccttgagccacaaatcttcagttggatggatcgcttctgcgcggattaccacggcggtatctggaacctgtacacgctgagcaacggtggcgcatttatggcaccggacacggaggacgatgacccctggacactgtttaacgccctgaacggcaacggcggtgaactcagtcctgaagccgccggaatagcggtctgtctcatggcttacagccaccatgcctgccgcacggagtgcgatgccataacggaacactattaccgtctgcgggactacgcgctgaaccaccctgagcgcaacgccattatgcacatcattgactga

SEQ ID NO: 94980 - DNA, 822 bp, Enterobacter aerogenes
atgagattagccagtcgctttggtcgcgtgaaccagatccgccgtgaccgtccgttaacctatgaagaactgatgagccatgtacccagcgttttcagtgatgataaacacgaatcccgaagtgacagatacacctacatcccaacaattaccctgctggataatcttcagcgggaaggcttccgaccgttctttgcctgccagacccgcgttcgggatgagagtaaacgcgaacatacgaagcacatgctgcgcttgcgccgcgaggggcaaattacgggtaagcaggtgccggaaattatcctgctgaacagccatgatggttccagtagctatcagatgctgccgggtttgttcagagctatctgttgtaatgggcttgtatgcggtgagtcttttggtgaagttcgcgtaccgcataaaggtaatgttgttgaaagggtaattgaaggggcttatgaggtgctcggtattttcgataaggttgaagaaaaacgcgatgccatgcagtcgctagtactatctccaccagcgcaacaggcactggctaaagcggcgctgacgtaccgttttggagaagaccatcagccggtcaccgccacgcagatactgacgccacgccgctacgaagaccggcaggatgaactgtggacgacctaccagcgcatccaggagaacctgatgaagggcggtcttccgggacgcactgagaagggtaaacgtacccacacccgtgccgttaacggtatcggtggtgacgtgaagctcaaccgcgctttatgggtaatggcagataacatgatgaccctcctcagcaaataa

SEQ ID NO: 94981 - DNA, 957 bp, Enterobacter aerogenes
gtggcaggtaaaaacagaattatggtgaatttttcatcaaaaaggctgaaggatgtaattgcaaagattgcagcggaaaaccacatcagtcagtcgaaggctattgagaaactggtttcattccggctttttgagggtaatggagatcccgtggttgatgccttcagtaaggccagtaagagcgctgttgagcaacaacagcaaagcgatgatgaatttcatatcgccctgaatacaccgtatattaaacattctgtacgtctttatatggcggatggacatatatccgaaagcggctcgctaaaattcacatcggatgaatttggaaagcttaatgtttcaattattgaaaaggaaattaagaggcttattaatgaccatattgaaaaactaaaacctaatgagtgggtgagagcgttcggggatgaaaatattattttttctgatttatggctgatttttattaatgagataattgttgaatataaatccgtaaggctggattctggtgatggagtaatttatattgattttagagccaaaaacattcgctgtattccctttacctttaacaaaaatgatttattagggaaaagatattgtaatgcaatggagcatcttgattttaattctgttgaataccgtacttttaaaagcgtggcaacgaaaggctggaacagaaataaacactcacatctcctgtatattggccgggcgtctgattccgttaagggtggtttttttattggtgtacaatatgaggaaaatgataaaaaatttacaaaacagtctcccatgtctccactttcaccccctgaggaggtattacctaatacatttaacacacgttacagtgagattaatacagagctaaaaattaacatttatcatatacccggtagttttaaaataagaaacctgacaccgacgctggagagtaatattaataaaggttag

SEQ ID NO: 94982 - DNA, 657 bp, Enterobacter aerogenes
atgagcaagaagagaaagcacaagaagacatctggtaaaaacgcctctaatccgtattacgtccggcgtatctcagaaaccattgataaagccctggagcaatatccccggttactggccgtcaggtttgatcttcgctttcctgacgaagaagaacggctggactgccctacacgttactacgactaccctgacgttatctcccgcttcattgactcagtgaaatcccagatagctgaagacattaagcgcaagagaaaagccggtaaggaaacgttaacctgcaaggtgagatatttctgggtaagggagattaatcaggaggaaacaaagcaccactatcacgtgattctgctgctgaacaaagacgcatacccatggccgggcaggagacataccgaaacgtcattcgaccggtacagtgtgtttcagaaggtcattaatgcctggatacggactatcaaacgttcagactctcatagagaccatcatggactggttcatcttcctgtttctggtttttggcagttaaaccgtaataatcccgatttcaaagtcgattacgaagagttgaccgacagggccatgtatctggcgaagatacgcagcaaagataaatcagatggttatcgcaactttggttgctctcagaactaa

SEQ ID NO: 94983 - DNA, 216 bp, Enterobacter aerogenes
atgaccactcaaaataacaactccagcctgcttagcgacaaaatggtcgatatggcattcattacccgttttacgggattgaccgacaaatggttctacaagctgattaaagacggtgaatttcctaagccgattaaactgggccgcagttcccgctggatgcaaagcgaagtcgaagcctggattcagcagcgtatcagtcagtcacggaagtaa

SEQ ID NO: 94984 - DNA, 501 bp, Enterobacter aerogenes
atgcataagtccacgttacacaatctgaagttatacctggctctcgacagtgacggtcattacgtgatttcgaaagagatgaaaaacacttctgatgctcagtggttctgtccctcctgctcttgccctgtgaaactccgcaacaatacccctggagaagatgcctggtttgtacacaaccccgatgaggcaactaaaccgctattggcaaattgtggttatctcaacactgaaatcaaaaggcgtgtcttcatcctgcggttacgcacgatgattgacgaactggagacgttgacagcaacgcggtactggttctgtgtatggtgtaaagcgcattatgaaggggagaaacactgtaaagcctgcaacacggggatatacagcatcagccatggcgactggtgctggaattataaccagaaggaaaatacatcagaaatcagcgtccatacagtcaccaacataaatcatcatcaccagacagcgtgtatcccatcctga

SEQ ID NO: 94985 - DNA, 294 bp, Enterobacter aerogenes
atgagtcacaagaaagaacacaccatcatggtcaacaaggtgctccaggagcttgccaggcagcagggccagactgccgaggctgttctggaacaattattctgccgggccagcatcgtcaatacggggttgctgaatgagtcttttcgtgaagcctttcagcagcattatcccggcaagccattcaaccacgttacctggtgtcctttctgccagtgttttgaccttatgcagcgctccgacccaatggtacagggtgaagcttgctggacattcagttccacacagttttga

SEQ ID NO: 94986 - DNA, 432 bp, Enterobacter aerogenes
atggagagttatcagaataagatgacctggggagaacctcctctgccaaaaggacctgagtactttggtgagcgcctcaaaactgttatcgggaaacagtctgtcgcctcgtttgccagggattgtggggtttccgaagcctccatgaggaaataccttaaaaccgataccgtgccgggtatcgacagtgtggctatgattgctgcctgtacggggcgttctctgacctggctcattaccggtgaaggtgacccctttactgacaacgctaagcagaaacgcttttcagaagaagaaactaaaaagtggtggactctgatttttgacgctctggatacggaagataaatccagtgttatcatggcttttcagcaaggcggcctgaatgcggtgttcagccctgagattatgactggcaaaaggaagggataa

SEQ ID NO: 94987 - DNA, 468 bp, Enterobacter aerogenes
atgagtgactgctggcaaccgggtaataccatgagcggtgataaagaacaggttgtacgccccactcaggctgttctgtcagtccggacgggagatgtggtcattagcctgatccacggtaaggccgctatcgtcagccctgagcatgccgggcgtctgctcagcaataactatgtcagggtcgaagttgacagccggaaggttgttccagcgtggtttgtctggcacttcaatgaaagcagggaaagccgccgccagcaggcactggcaacgcaggggtcaacgtttgtattgcgtttgtctcttactgaagtacgtcagtttactgcaacgctgcctcctcttaataagcagaaggcaatcggtgggctctatctggcaaccattgaaaaacgccattaccaggagcgcctggccgctcttaacgaacaacagatcctgagccagctcagtgatatgattcagtaa

SEQ ID NO: 94988 - DNA, 1608 bp, Enterobacter aerogenes
atgtcgccccagattgaagcccagaatttaagtgaactgcaaagccgcctttggaatattgcagatacgctacgtggcaagatgaatgccgatgaatttcgtgactattgccttggtttcatcttttacaagtatctttccgagaagtttgtcacctatgccaacaaaatcctgaaggaagacgggattaagtataacgaactgaccgctgaacaccccgcttatcaggatatcattgatgcggtaaaagacgacagcattcagacgctgggttactttctgcccccaactgacctgtttcacaccatggctcagcgcgtagcgaaggatcagaaaggtgccggagaaggttttatcctcgaagacctggctaccactctgcgcaatattgagcagagcaccctgggcactgactccgctgatgactttagcaacctgtttgaagacctggatttaggctccagcaaactgggtaatactgccaaagctaaaaatgagttgattgggaaggttatcaccgaactcgacaaactgagttttaacctcagtgaagccagttctgacattttgggcgatgcctacgagtatctgattggtcagttcgcatctggtgcgggtaagaaagcgggcgagttctacacaccgcagccggtttctacgttgctggctaaaattgttaccacacataagctcaaactgaaaaacgtctatgacccgacctgtggttctggctctctgttgctgcgtgtaaaacgtgaagcctcttctgtaggtaaaatctacggtcaggaaatgaaccgcaccacctataacctggcccgtatgaacatgattctgcatggtgttcactatgctgactttgaaatcatgcaggaagatacgctggagcacccgcagcatacacatctgaaatttgatgcgattgtcgccaacccgccattctccgccaagtggagcgcaagcccgctgtttatgaacgatgaccgctttgcgcaatacggtaagctcgcgccgtccagtaaagcggatatggcgtttgtgcagcatatgttctatcacctggaagatgacggcacgatggctgtggtactgccccatggcgttctgttccgtggagcggcggaaggacacatccgcaagttcatgattgagaagttgaactgtattgacgccgttatcgggctacctgcgaatatcttctatggcaccggtatcccaacctgtgtgctggtgctgcgtaagtgccgcaagcacaacgacggtattttgtttattgacgcaagcaacgactttgagaaagtgaaaactcagaatcgcctgctgccggaacatatcgacaagattgccgatacttataatgactggaaagctcaagagaagtacagccatattgccactcttgaagaggtccaggataacgattacaaccttaatatccctcgctatgttgatacctttgaagtggaagaaaagattgatctcaatgctgtagcgcaagagcttcgtaagctggaaggcaaagtagcagaaatcgataaggtcattgctggattctgtaaagagttggggatcgatgtaccttttacgcaggctggagggagtaagtga

SEQ ID NO: 94989 - DNA, 1191 bp, Enterobacter aerogenes
atggttccgaaactaaggttcagccaattccattctccttggtgtactaagacacttggggaagtgggcgagattatcagtggattaacctattcccctgaaaatattagaaactctggtttgttagtcttgagatcatcaaatattcagagtggtagactttgttttgaagattgcgtttacgtagacctgattgtagatgatgaaaaaaaaaccaggaaaaatgatattctgatctgcgtaagaaatggttcaagatcattaattggaaaaaacacattaattaaagaaattgatcaagaaactactcacggtgctttcatgactgtgtttcgtggtccattaaatggttacgttgcacaattattacaaacaaaaaaattctatagccaagtctactctgacttaggcgcaactataaactctattaatggcgggaatttaaaaaggtactcattctcatttccttctgattttaatgaaacagctaaagttgctgatttcttgtcttatattgacgataaaattatgttgctagataagcaacataaacagctttgccagtacaaaaaaagtatagtgcagaatatttttagtaagaaattacggtttaaggatgaaaatggaaaagagtttcctgagtggcatttagttaggcttggtgattacttaattaagcataatgaaaaaagcactgaaaacaaccaatatcctgtattgacgtcctcacgagaaggcatttattttcagaaggactatttcaatggtgaggatatcgcgagtaaaaacaatataggatataacgttgtccctaaaggttattttacttatagacatatgagtgatgatcttgtttttaaatttaacattaacacgttatgcgataagggtattgtaagtaccttatatccagtatttactacaaaattaaatgcatactttttacagttaaaacttaatgaaggaaaagagtttagggattatgctatccaacagaaacaaggtggttctcgaacatatatgtattactctaagctagaaacattgaagcttatgattccaaatatagctgagcaaactaagattgctaatttcatatccgcttttgacgacaaaattgccgcaaaaaaaacagaattggataagttaaaaacttggaagcagggtctgctccagcaaatgcttgtatag

SEQ ID NO: 94990 - DNA, 2916 bp, Enterobacter aerogenes
atggcaacgcaaagcgaatacgagttagaaacgcagctggttaaccagctggtggggatgcactacgaactggtcaatgtcaccgacgaagccagtatgaaagccaacctgcgcaagcagattgaaattcacaatcggctggaggccgccccacttaccaacagcgaatttaaccgtatttttctgcatctgaccaaaggtaatgaagtgatcgatcgcgccagaatcctgcgcgatcgctaccagctgctgcgtgatgacggtacggagaaatggcttagctttattaataaagatgaatggtgccagaatgagtttcaggtcacccgacaggttaagcagtacaacgccgaacaaaacacacgcaaaacgcgctttgacgttacgctgctgattaatggcctgccgctggtacagattgagcttaaacgacgtgggctgggtctgaaagaagcctttaatcagattgaccgttaccatcgggatgcattctgggtaggcagtggcttgttccagtatgttcagttgtttattatcagtaacggcgttgataccaaatattacgccaataatcgcgcgaaccatttcgagcagaccttcttctggacagacgagaaaaatgaacccgttaagtcactggagaagtttaccgaagccttcctgaaagtttgtcacattgcaaaaatgataactcactacacggtgctgaacgaaacccgtaagtgcctgatggtcatgcgcccctatcagtactacgcttgtgaagcgatgatccgccatgttaaggacagccttcatttacagggcaggccccgtaacggctatatctggcatactacaggtagcggaaagaccctgaccagctttaaggccagccaggtgatcatgtccatgcctgaagttgatcgggttattttcgtcgtcgatcgtcgcgatctggattatcagacagctaaagagttcaatagcttcgctaaagacagcgtggataccactaacaataccagtacactaattaaacagctaaaggctaacaacagtaaactgatactgaccaccattcagaaactaaacaatgctattacccatgaaggatataaggcacagcttgagcacctgcgtaaggaacgtattgtctttatcttcgacgaatgccaccgcagtcagttcggtgacactcacaaggctatcgtcagtttctttgaaaatgcacaactgtttggtttcaccggtacacctatctttgccgacaacgtcaacatcaccaacggcgtcaaacagacaactgaaatgctgtttgataaatgcctccacaagtatgtcattgtcgatgccatccgtgatgagaacgtattgcgctttgctgtggagtatgttggaacctatcgccgtaaggaaaccagcaatgagatcgatatcgatgtggaagatatcgacaccaaagaggtcatggaaagcgatatccggctgggcaagataaccgactacatcctggctcaccacaatgcaaagacccgaaaccgtgagtttaccacaatgttctgcgtgggctcggtggacatgctaattaagtactacaacctctttaaagaaaaacaaacaaagcttcagcagaccgatccgggttacgaaccgttgcgtatcgcaacaatctttacttatgcagccaacgaagcagacaaaagcgataaggaagcggttaacggcttactggatgaagaagatatcagtctgcctcagggcgggaaaatcgatatctccagtagggatcatctggacagcttcatcaaggattataatacgctgtatggcaccagctattcagctaatgattcgcaaagcttttacaattattacaagaacattgcacaacgaaccaaagaaaaagggattgatatcctgctggtggtcaatatgttcctcacgggatttgacagcccggctctcaatacgctttacgttgataaaaacctgcgttaccacggactgatacaggcattctcccgtaccaatcgtattcttaatgagaagaaaagccacggtaatatcgtctgcttccgcaacctgaagaaagccactgatgatgctatcgcactgttctcgaacaaagacgcatcctcagtcgtgctggttaagcctttcgaggagtacctgagcgactatcaggctgctgtagataccctgttgaccctgacacctacagtggaaagcgtggacagcctccctgatgaaaaagctcagcttgcttttgtgacggctttccgcgacatgatgcgactgaagaatatcctggagagctttgctgattttgatgaagtgagtaagccgttatcggatcagacccttgccgattacaccagtaaatatctcgatatttacgacaaggtgaaaaaacgcactggcaaagataaagtctcgattctggatgaggtcgattttgaagtgtcattgattcatcgggatgaaattaatgtcggctatatcctgaggctactggctggcatccaggcaatgccaccaaaagcgcagcaggagcagaagaagaaggtcatggatatcgttgacagtgacgtcacgctgcgcagcaaacgcgaactgattgataacttcatcgaagaaaacctgctgcatgtttcgcatgatgaagatatcacccagacctttgaaacctacgttgaacgtgaaaaacgtaaagctgttgcaacgctatgttctgaggaaaagctggatgaaagcaaagttgccgctttattggataactatctgtttaccgatgtaaccccacgcgaggatgaggtagccagggctctaacatggacaccaaagatccttgaaaggaagacagtccttaaacgtgtctatgacaaggtttgtggtgtgattgatacttttatcaacggaatgcgtgggttctga

SEQ ID NO: 94991 - DNA, 564 bp, Enterobacter aerogenes
atgataataaatttcctttttagagttcttttaacatttaacgcaacatcgttgttggctataattttctttgtacaaaagaagtacaccctttattactttttccaaagatttgaacacagtcattggttgagtttattaccacaaatgacatcatacgtattttacatgctaatccccatattactaacttggattagtttgcttttaagctccagactgggcaaggatgagtttaaagaaggtgaagtagtttctgtggagcatgcgaacaactcatttcttccaagctatcttggttatttctttgtggctttaagtataactagttggtctgccttgttttttgtttatgccgttttatttatttttacctttatgtctcaagcattatactttaaccctttatttctactgtttagatatgagttctataacattaaaaacaagagcggcgcatccatttttttaattagtcgtcataaatacaaaacccccaaagaaatcaagatccccgttgcatttagaataaacaactatacctttatcgaaaggaaaaaatga

SEQ ID NO: 94992 - DNA, 831 bp, Enterobacter aerogenes
atgaataacatttttgcgaaagtaaaaggacctcgtaagaaacctttttttaaattggtatcagactacactttgtttgacgctttagacttatctactcttagcctcattccatataaccctgaccataatcttgatgaagattcgtggtttaaaattgaaaattttagtcagcaatcattctgcttatcatgcattaaggatgaatttgattctaaggacttcgacgatctaacaaaacaatacttcgcgaagatttcatatatattctctcatcagaatgaagacttttattttcagaaaataaccccatctctatttatcaagagaaaaacaattgcttttggtgaatcagcaaaaatagaagaaaatgaaggacgattgattgttaaccatatacctgatgctgtatacttaaaggaaagaaatatattgttattcagaaatctcgccacaatttcaagtatatttaaaggtatcgatattctgtacaaagaagccacggaagaagaagttaagtcgtttttaagtgaatccttcattgtactttcaactgactatgatgtagaaaaggtatcaaagccaaaccgaaagagaattgcattagctatggatactcttgcagcgatgccagtggaagacagaggtgagatgctgaattacattaatgattattgtgctgaaaaacttaaatatgacactacggagagtaaattcgaagtatcatcagaagaagagttaaaatatttgctgtacggtatcgaacaaagattttacactaccagatttggtaatgaaaagagattagccaactcaatacaaagattataa

SEQ ID NO: 94993 - DNA, 1641 bp, Enterobacter aerogenes
atgaaaagcagactaaaaaatttatacaagcatttgattgaaaaccataagcatgaacttaaaggctggcatgatgcttatcgtgagttttatgagcaggtcggacaaattcgcgaacgtataaaatcaggaaaggaattatctccaagtgatgagattttcctaaagcaactcatctttgaaagaagtaatggaattgcttctcgtggtcagtcggttctaagcaacgaaaactttgacggttttattaaaaacaaggacttcattgctatattacaacaattcatcctgaatcccaacagagaggaactgaaaaagtttgagtgcacatggtcagaacatgggaagtctaataatcctgttcttatcaatcgcgtagcagcagcctgcacgcttgaagtttccacaactgttgattccgctaagttcaatcaggtatttagctggcttacacacgaagggataattcctgcatacccagcagaaaataatcaggactggttttcaaaaaatgtattcctgatgaaaattataaaaaatgagttcaacgatgaacttcgcaataatgaaactgatgagttttatctcagccaatttgtctgggttctgtacgagaatctctctaatccattcagtctgaaaaagcagatcgttaagtacgggcctcctggaacgggaaaaacataccaggctcgtcaacaaacatcgcttctttttgatatctggaaagaagagtttgcgccaaatagcagcctcacacattcaagtcagattgagttgattcaatttcacccttcttttagttatgaagacttcatggaaggtttgcgcccagttctggataacaatggtaaagcacagctgacgttgattaatggtgtttttaaggaattttgccggaatgcaggaaagtgggaaatggatattgaacgcctcgaccttaacagggattgggaatcaatcacgatcggtgaactccgtacatatcaaaataaattatcaggtggtcattgggaatacatcttcgaaatatctgacttttcgaagctgatagcagatgcagtgcctccgttcttttttataatagatgaagtgaaccgagccgagttatcacgtgtttttggtgagcttatgtattgcctggagtatcgaggaattaaaggaagcgtcaaaacccaatatgctaatctaaataaccaacaaacaggcatgcttcataccgcacaaggttaccaattttttattccaacaaatatctacctgataggtacgatgaatacgattgatcgtagtattgagagttttgactttgcactcagacgtagatttcgttgggaagaagttacgccagatacgagacttttaagataccatcttagccagttctgtaaagcttggactcctctggcagataacctcgaacgactgaatacccagattacgaaagagcctttactgggggctgattaccaaattggacatgcctatttaatgaatctgaagtatgccaggagccttacagttacagaagtgagatctcgtatctgggatgactgtatccgacctttacttcaagaataccttcgtggcagcaacgaatcagaactcatcgactcttttgcaaaagcatttggaatttaa

SEQ ID NO: 94994 - DNA, 1437 bp, Enterobacter aerogenes
atgtggctattcgatattataaaggatggtacactggtcgataacaggtcttattttgcaaataacggaatatttaccaataaatctctgggtgaatcaattagtcttaattttaaaacaaaaggtcagcggactaatattaaaaatgatgagtctaccatttggcattttttaaattcagtttcgcatgatgtagaaaataaacttaataatgatcttgcaaatgcactcatcctcttcaacgatcgagagtatgaacataataccgatgatggttttattactgtaaatggtactgattccagaaattttacgttaaacacaggtaatcttattggatttgtaaaacgtggcgaatattccctgaaagttggttctcgttttggcaatgccttccttcggtacatcatagcggacgctgacggttttctggagatggaaaatattggtggcgaaaatcacactgaaggatatgagtggctcctggcatatctttggaacatcaagttgaagaaggcttaccgactgggtatccctaaaacctatattacgaaaaaagaacgaaattcacggatacgtgggacaatcgatacaattgactacttcagaaataatacctcaggaaaatatttatgtacctaccgcgaacacagttacgacagtcctgcaacttcgttgttcatcaaagcctatgagacgattgaacatcaatcattctgtaagcatacgaggaatatctacaatgctttcatcactgctaatctgggggtgagaaggtctcgtcaggagatcttgagaactccatattttactaacccattttataacgactataacatactgatagatttatctaagaaaatcatcaatcaggaaggttctgattttggataccaacaagaatcaagtgctttcttttttgatatatcgatgcttttcgaatatttcatccgaaaactcctaaaacgaagtgggataaggatgctaagtaaattcgagcgaaattatgaaattccgaccggagctttcggaagctatgtacgcaaaattgaacccgacctagtttttgagaatgatggtggcatgtacgtttttgatgtgaagtataaaacctttgatccgcagtttggggttaaacgtgaagatatttttcaactacatacttacatagggcagtatgggaatggaggccttataaaaggatgcggctttatttatccaatatctgaaaacaggtggaatgcacttaatatggataaaacgcatggggtgatttctgatgagattcatcagcagggaaaagatattcctttttatttgcttttcttgaaaatccctaataactctgaccctgaatttaacaagagaatgagcgaagaatgtcatatgttcattgagaacataaacacgaaggtactaaaaaatgagaatagataa

SEQ ID NO: 94995 - DNA, 477 bp, Enterobacter aerogenes
atggaaaacattaatacgttaaaagctaaaatcgatacaaaggtaacgaagtttgtattgctgtctgttgtaactggtggaatttacccaatgatgtggttatatctgaaccagccaaagttaacagagcacattcataatgactttgttgccaaggattatcctctttggctggctattgttactggatttggatggttattgactgatataagttattctgtaagtgaaagtgaaacggtgttggatcatattgctacactgctttctgtcgcttcaactgtaatgattatcgtctgggcttttaaagctaaaacagctttacaggcttatgctttaaatgaatttaaattcgaattaaagatgaatccattctatacatttatttttagcatatactatattgtttattgcatcaacgatatggaatcagagttgcagaaacacaacattatttatagtaaacaaatttcctga

SEQ ID NO: 94996 - DNA, 417 bp, Enterobacter aerogenes
atgaaaaaaatactcggcggtgccatgctgttagccgcaggtatgttctcgatatctgtttatgccaatcctgataattcctgcgacggtgaacaaaccatctttgatgcttataccgccaagagtggcaagcacgtgggtgtgtgttacgtatacggcaatattcgttatgtgtatggaaaggatgataatcctgaaattttaattaatattccacgtgaaaaggttgatttcagtctgtctggaaatggtgatcaaagtgtcactattcccaatggtgagtatcgatatgagataggtgaatatttacgtggtggtccatttatacagatatggaaagggagtaagtttattaccgagatcaagttaaatggcgctaactttgaaaataatatcgagcaatatattaataattaa

SEQ ID NO: 94997 - DNA, 888 bp, Enterobacter aerogenes
atggaatacaaagagaaaggcggtttcaacccggtcaaagatgcactggagattttacctgaaaatatcagggagagtatttcaaggcgaataaatgaggtcatcaactatgagccagtgattggcatcatgggtaagaccggggcgggtaaatccagcctgtgtaatgcgatcttcaaaggggatatctgcgctgtcagtgatgtggaagcatgtacacgagaaacgcaggaagtacgcatccagtttggtaaacgcgcaatcagattgattgatattccgggagtaggtgaaagtgcagtgcgtgatggtgagtacgagaagctttatcgggaattactaccgaagctcgatctcgttctctgggtcattaaaggggatgatcgagcattttcagccgatgaacatttttacaaaaacgttctgaaacctgccgggggtgaagagaagacgctgtttgtgcttaatcaggtagacaagattgagcctttccgtgaatgggatgtacagaatgctcaaccctcgccagcgcagaaaaaaaacatcctcgataaaaaaacctacattactcaccgactcggttttactgaccatcctgttatcgctgtagcggccagtgagggctataacgtcacgcaactggttgaggcaatggtgcgggctctcccaaagcacgcacaaagcggggtggcctcccaggtcagggaagaacacaaaacaaaaaacgtaatagaagaagcaacagaagggttcggagacacagttgatcgggtgattgatgaattcattgatgcctctcttcctaagccggtggcaagcgtggttaaagcagccaaaaaagcggttgtcagcgggttaaagaaagcctggaatttcttcttcgggtaa

SEQ ID NO: 94998 - DNA, 1275 bp, Enterobacter aerogenes
atggccctaacggatactaaagttcgttctgcgaaacctgaggagaaagagtattcacttgttgacggcgacggcatgtccttacttgtaaaacctaacggctcaaagtattggcgatttcgtttccgttttggcggtaaacagcatttgatggcattcggtgtctatcctgaaatttcactggcggatgctaggaagaaaagggaagaggccagaaggttggtagctgctggtatcgatcctcgtgagcataaacgtgctgtgaaagaagagcaggcgaaagagattattactttcgagaaggttgccagagagtggcttgcgactaaccaaaaatggtcggaagatcacgctaatcgagtaaaaaagagcctggaggacaatatcttcccggcaattggtactcgcaatattgctgaattgggcactcgtgacttactggcacccattaaagcggtggaactgtctggacgtcttgaggtggcttctcgtctccaacagcgtaccacggccatcatgcgttatgcagtgcaaagcgggctgattgattacaacccagcgcaggagatggctggagccgtcgcctctggcaatcgacaacatcgcccggcgctggaattaaagcgtatccctgagttacttgagaaaatagacggctataccggcaggccgctaacccgctgggcaactgagctcactctgcttatctttattcgctccagtgagctgcgttttgctcgctggtcagagatcgattttgaaacgtcaatgtggactatcccgcctgagcgagagcctattcccggcgtgaaacattctcagcggggatcaaagatgcgtacacctcatctagtgccgctttcaaagcaggcactggcgatcctgaagcagataaaacagttttgtggtgataagcatgagctgatttttattggcgatcacgatccccgcaaaccgatgagtgaaaacacggtgaacagtgcgctgcgggtgatgggttatgacaccaaagttgaggtttgcggccacggcttccgtacaatggcctgtagttcgttaattgagtcagggctatggtcgaaggatgcggtggagcgccagatgagccatatggaacgtaactcggtacgcgcagcatatatccataaagcggaacatctggatgaacgcaagttgatgctgcaatggtgggcggactttctggattcgaaccgggagaaaagtatcagtccgtttgattttgctaaaattaataaccccatgctgacaagatga

SEQ ID NO: 94999 - DNA, 1209 bp, Enterobacter aerogenes
atgaaaaaaacattggttatgacgacactcgccctgctggtttctggctcggccgcggcaaaaacatgggtgctgacggacgctgaagagggaatggataaaggaaactggcagatcagcagcgatcagctgaaggtaaaagaccatgcgttcagcattgagcaaaaagtcctgcacggcggtaagcaggaaggcagcaaaatcatcaccattcacagtaaagatggcctgactatcactctcagtccgacgcgcggcatgaacttactgcgtattgagggtttcggcagccggatgggttgggattcaccggttaaagaggtcgtcaacccggcctttatcaacctggaaagccgcaacgggctgggctggctggaagggttcaacgagatgatggtacgctgcggctatgaatggaccggccatccggtgaatgcggacgggcaaatttataccctgcacggcaaagcgggcaacacgccggcctctctggtggaggttgaggtggccgacagcgcaccgtatgaaatccgcatccgcgggctggtgaaagagagcactttcaaaaaagccgatctgcagaccctgaccgaactgcgctacgtcccgggcagcaacagcttcagcttacatgatgtcttaaccaaccatgccgactatccgcatgattatcagatcatctaccacagcaacttcggcacgccgattctggaagaaggcgcgcgcttcctcgccccgatgtccagcatcagcccgttcaatgattacgctaagggtgggttaaaaacctggcaaacctatcagggaccgaccaaagattttgacgagatggtatttaatattcagccgctagccgatgaaaaccatcagaccctggccgccgtggtcaacaaagcgggtgataaaggggcctccattcagtttgatacccgtcagctgccggtcctgacgctatggaaaaacaccgacaccgtcaaacagggctacgtcaccggcatcgagccgggcaccagctacgcctatccggtgaccattgaacgcgaacaaaaacgcgtgaagcagctgcagccgggcgccagcgcgcagtttgatctgacctacaccctgctgcacgatagcgcccaggtggccgccgttgagcagaaaatcgcgcaaattcagggcgacaacaaagtcgcggagaacgagacgccgatcgccaaagagtaa

SEQ ID NO: 95000 - DNA, 354 bp, Enterobacter aerogenes
atgactgacaatcagacgcggaaaaattccactccgatcaaggtttactgcttaccggaagagaagatgcagattgaagcaaatgccgccgctgccggtctgagtgtcgcggcctatttgcgtaaagtcggtatgggttacgatgtggagtcaatggttgatatagaacaggttaatgaacttagccgagtaaatgctgatcttggaagacttggcggattacttaaattatggctcgcaaatgatcctcgaacagttgatttttcacccacactgataagaaccttgcttgcgaaaatagaatcaactcgccaagaactaaggaacattatggataaaatcttggataaataa

SEQ ID NO: 95001 - DNA, 426 bp, Enterobacter aerogenes
atgtccaggactccctatacacggttacgtattgagggcttccgcaaagcagaggcttccctgagacttgaaggaatggaccccagtggtacgccactgtacgagtccattaaggcacgtattatttcaggtgagcttacgtatgagcaggggcgttcagagattcttgcatactacacaaaagcagataccgccgggcctgtaacagtgggggagatacttgtagaggaattcttaaaaccgctgaacatgtctaatgatgaactagcggaagctatgggtatttgccgacaggacattgaagatatcatctacggtatgcgtcgtcttagggatgacgaggcccgcgttcttgctgagatatttgagactgatgaggacttctggtgcaaccttcagacgttgcgagaacgcctgcaactatga

SEQ ID NO: 95002 - DNA, 876 bp, Enterobacter aerogenes
atgagttcgcgttatgatagggacgtttgcagtgattctccaaaacttgaagttgctgcgattcagaaggttatgttttatgagggtgatgctggcgctccgagtttgcatgaacagccttgcccatcagatcagttgatcgtacgcggtaaacaggatgccgctctggtttctaaaatttcatatgggcagagcctgcttgttcccggcttcgatcggcggtcacgtgtgcttgacactaactctgatccttggcgaaaaatatgtgctttagagatcactgcgacagatgatgaacaaatgattggtacaggctggattgctggcccgcgattaattattactgcaggacactgcgtgtttgactcattcaataatgaatggatgaaacagatagtcgtaattccaggccgtgacggcgatgccgaaccatttgggcggtatgtatctgggaaattttgttctatggaaagatggacttctgccggtgatgaaaactacgatatcggtgcgatatttttatccgaggacttggatagccgccttgggtcgtttgcatttggagcttacccagacattgatttgtcttctcaactgataaatatatctggctatcctatttgtaccgtaggtgaggagcagatgcaccatgcgaataggataagttccattacaactcataagatctactatgatgtagatactgagggggggcaaagtggttccccaatttggttttatcccaatggtgctactgaacctgtagttgttggagttcacagtaatggggctgggaggtcactaaacgcgaattcaggtgtcaaaattactccagcgttagcaaggaagatctctgagtggcgcatgcgacaatag

SEQ ID NO: 95003 - DNA, 975 bp, Enterobacter aerogenes
atggcaagaagcgatcttgtattgaaacttgctcaagcaggtttaggcggcgataaggcctcagtgaggcgtattgttgaggctattatctcagaagaaagtactaggcaacatcacatctacgcgcagaaactaaaagacacacttaggtccgctaggtgggctgaaccttctgattcaaatggtaacaatgctgttttctcatatggcagcgcttcaaaaatagattctacacaaaatctttattcagaagttgttagcaatagatgtatttccgatctttatttggaaccggacgtacggcttatttttgaagagttaattgaggaacatacgcgtgctgatttattgcgttcatatgctttagaaccgagaagtaaggtattattgaccggacctccaggaaatggaaaaacaagtttggctggagctttggcttatgagctagggcttcctatgtatgtaatgcgttatgagagaataattggtagttatcttggcgagacagctactcgacttcaagctgcttttgatttttttagaactcgaccatgtgtaatattttttgacgaatttgatactattgggaaggaaagaggcgatgtgcacgacaccggagaaattaaaaggatagttagtaccctgttacttcaggtcgatgatcttccttcgtataatgtttttgttgcagcaactaatcatcctgaattaattgatagagctgcttggcgtcgctttcagattcatgtcaacttaactcctccaaatcgtgagcaaattctaagttggttaaagagttttgaagttttgattggtgagagtttcggtgaattgactaatgatacggttgataaattggatgggcttaatttttccgatattgaaggggtttttcttgatattagaaggaaaatcgttctttcagaaggtcagttaagccttaaagacgtcattaggaaaaaattatcattttaa

SEQ ID NO: 95004 - DNA, 2547 bp, Enterobacter aerogenes
atggcaaagcttccattactgattcttaaccctccaagcgcagacactcgcataaagggtagtcctagattttttagcatctcaacgcctaatccaagccgtcaattatctcggttagggccaaagtttgatgctctgagccgttattctcaaaatccagtttctaatggagttatttctgatgatactgatggcttgcatcctgaaaaagcgattgtattcgaattagcacaatccaaacaagagtttaaaaaagctgctgagaagcttggtttgacttgggttgatgaatcagacttttcatatgatagtgatgatgatttttacgataaaaataaatccggaaaaatgatggagggtcggctctatttaaccgtgccaaaccagcgtgcaattaatgaactgctcaagctatggtctatttatagcacaggaaaaacgctgcctaccggctataaagattgggataagctattttctcacttgattaatatacgtccatggggcgcgcaagatagacttacaccagaggcagttaaatatattgaaaatttgagaggggaaggagatgagagagttaatttcgaggttgagctgatatttcacggctcagaaaaacttgacattgcagctgcgcaagccgtgctgaaagacattgagtctacatcaactgaagttcttgatacctcatatatacccgagattaggtatcatgcgattcttatttcaagttcttatcctgaggctaaaaaactattaaaattagaatctagtttgttaaaaaccgatgaggttgcatatatacgccctcaagctatgagtattttttcttcagagcctgaggattttgaacaagttaatgagttaccaaaaaaagtacatttgaagtctccggtagcagcattgtttgatggggttttattacaaaatcatgaacttttgactgaccgtttgataattgatgacgaggaagatctagaaagaacatccccggttaatactcgccatcatggtactgccatggcttctctgattttacatggcgacatcgcaaaaaaagaagagcctttacaacgaaagttgtacgttcaatatttgcttgcagcaaatcaagagtcttccgttgaaaccacccctaaatcacgattgttacttgacgttatttactctgccgtcgtgcgtttaaaaaatgctccaaaggatcttggtggtgatgtttttgtaatcaatctatcattaggtgatgtaaatcgacctttcctaggtcaaatgagcgcttgggggcggctcatagatttccttgcatggaaatataatctgctttttataataagtgcagggaatatttcagatggtttaattcttcctgatgttatgagaccaactcagataacaaaaatgactgatgagaatagacatcttctattcattaatgcggttcaaactaaaatggcatatcggagtatattttcgccagctgaggcgattaatgctcttacagtaggagctagccattctgatggttgtacaactattccaagcccatatcttattgaaccatattccagtgataaattccctagtttgatttctggtttaggtttggggtataaacagtcagttaagcctgagattcttacttgtggaggtagagcactatattcttattgtacatcagcagatggattaaccttgattccgggaaaggcagggcgctactttggtcagcaagttgcaggtgtttctagcacaaatgacttagttcgtacgataggcacaagtaattcggctgcgttagcaactagagcagcagttattattcatgatgagcttaaatctcaattttctccttcagagtttggacgtattcggccatatttaccatcgctcgtgaaaggattaatcgtgcattctgctagctggggaagtgcaggatctttcttggaagacaccttagagccaaaaggtggtcgattatggaaaaaccgccgctctaacatcacacgttttttaggttatggaaagattgactatacgcgtgtcctggaatgcaccaaacatcgagtcactatgctaggcgttggtaatttagagtgtgagggggcagacctggttagtttccccttaccaaaatctctctcaggtaaaaaagatgttagaagactagtggttactttagcttggcttagccctaccaagcctgcagagcagttttataaagatgcactattagattttatgactgaagatactaatggttcgccgattggggtttcacgagtggctgcaaatcagcctccctcagatacatctcggcggggtacagtgatacatgaaatatatgaaggggaagatgctgtaccaattgctgaggacgacattctgagaatccgagtagaatgtcggacgcaaggggcaggaggattaccacgtataccatatgctttgattgttacatttgaagtggccaatactttaaaagctaatatctactctgaaatacgggatggaattgtattagcttctcgtagcaaaattaaaaattaa

SEQ ID NO: 95005 - DNA, 2841 bp, Enterobacter aerogenes
atgttctcaactatcgacattgaacaacccggtaacgagatgagacgtattgagatagtactgcgggagctggagaggctgagccaggccgtgacgctggaggatttagccaggggctcgaacgccttcaccgcagagcaaatcggctttaacctcgggctggcgcgcaactcggtgagtaaagatctcaatcagctatggagtgacgggctggtgattaaaacgcgcggccgcccggtgttctttttacatcgccggacgacggaaacgctgctcgaccgtacgctgacggaaagcgaacgcgagccggcaacgctcgccgatctcctgccacagccacaagataacaatgaggctgtcgatccgttcgccatgctgatcggccacgatcgcagcctgcacgatgccgtggaaaaagggaaagccgcggtgctgtatccccacgggttgcacgtcctgctgaccggtccctccggcgtgggtaaaaccttttttgccgagctgatgcaccgctacgcctgcgagcatgccggtgaaaaacggccgccgctggtctacttcaactgcgcggaatacgcccacaacccggaactgctgtcatcgcatctctttggccaccgtcagggcgcctttaccggggcgacggaaaacaaaagcgggttgatcgagcaggccgacggcggctatctgctgctggatgaagtgcatcgcctgccctatgaagggcaggaaaagctcttctcgctgctggataaaggcgaatatcgcccgctcggcgccagcggtccggcgcgcaatatcgccgtacgtctgatctgcgccaccaccgagcccatcagttcatcgctattacgcaccttccagcgccgtattcaggtcaccatcgatctacccggtattcgccagcgttcggtagaagagcagattgagctgatcatcggctttttacagcgtgaaagccgcaagatcgaacgcacggtaagcgtagataaacccttgctgctgtggctgctgaacaagccgctggaaggcaatatcggtcagctcaaaagcgatatccagtttttatgcgcccaggcatgggcatccgggatggcggcccataacgagatgctgttgctggacagcaaactggcggacggcccgatcaacgccacgcccgagcaacgacagctggtcgatgcgctgtttaatggccgcaacctactgaatatcgacgcccgcacgctaccgcagttgaaaagcccggcagccgatgacagcgtcgaggagagcgacctgttctacagtttcctgacccgcgagtacgttaacctgcgcaacagcaacgtgccgcccgccgagacgctggcgatccttaaaaataagctcagctcgatttttgaatatggcctctatagccgcgataacgccagccatgccccacgctatggcgatcggattgaagagcgggtggctctgcttatcggttacgttgagcaggtactcggcttcgccctgccggaaaacctggtcaacccgctgcgtaaacactttctcgctctcatcagctacgtacaacgcggcctgatcccgcagttatactcttcgagcctgatcctcgatcgctgcaaagatgaatacgataacgccactctgttgtgcaagaagatcaacgatctgctgcatatccagtgtccggccaccgaggtggtctggctgtgcctgttcctcaaagagtgccgccattaccgccagcgcatcaccgccagccctgactgcggggcgatcctcattgcccatggcgccaccacggccaccagcatggcgcaatacgtcaatcgggtgctggagcgcgaattgttcaacgctatcgacatgccgttcgaacaatcggtgcacgatacgctggaaaagctgatccaactgatccacagcaaaggctggcagcggctgatcctgatggtagacatcggatcgctggtccatttcggtagcaccatcagcaaactgttccagatcgatgtcctgctgatgccgaatatcaccctgaccagcctgctggagatcggtctcgatctcagctacgaaaccggcgacctgccgcggttggtcaatctgatgcaggaaaaaggtatcgccagccagctatgcacgccgcagcaggagaacgccggcaaggtgctggttatctcctgcattaccggcatgggcacggcggaaaaaatcaaaaaggtgctggaggagagctttggcgagctgatgtcgcaggatacccggatggtgatcctcgattacaacgaagttcgcagcccggagcgcctgcagcaggcgatcagggcgcatgaacggctggcgggtattgtcgggacattccagccggggctgcccgatatcccgtttatctcgctggaggagctgttttccgagcaggggccggagctggtgctcagcctgctgacccccgatttgtccagcagtgaacgtcgtctggagatggagcgcagcgcttcacggtttatcagcgccctgaccatggaaagcattatcaaccatatttcggtgctcaatccgcagcgcatattaaaagaaatggaagggatcctgaaccagctcaggaacacgctggccatcgcgcctaaccgccaggtgacactacgcttcctgattcactgctgctgtatggtcgagcgtatcgtgattaaccgtaaaccgttacagatggcgctggaaacgcggccggatatggacgctcaggcatttagtgtcatcaaatcggctttccatccggttgaagaggcctacgccatccgtttatccgatgccgagtacatttatatctacgaattattatttagttaa

SEQ ID NO: 95006 - DNA, 477 bp, Enterobacter aerogenes
atgaagcgaatgaaaaacttcgttgcctcctgtctgttgaccgcgctggttgtcccgagcgtcgtgctggcagaggagccgactaccgcgccgttggccaccgggatggtgagtgcgggaacggcggaagcgcaggtggtggaagcggttcgccacggggacattctgaccgtcaaggtgcgctttaagggcctcaccgataacctgaccgggcaatccctgtataccggaattgataaagacgctctcgccaaatctttctatctgctggtgggtaataagaaatacctgctgctgaccgattccaatggcgtcccgttggctccgaatagtgtgatgtttagctcacgcgccggcgtgccgtacgttgggtcgtggtacggtagcttcccggcgccgccaaaggatgtcaaagaagtctacctgactattgaaaacgttgagccgctcgggcccatcgccattacggatcgttaa

SEQ ID NO: 95007 - DNA, 585 bp, Enterobacter aerogenes
atgagcggcctgtacaaactcctgttcatcggcggcctggcgctgtgctcccccgctggggcggaagagtcgccggcgcatgcgccgccgacgatcctcgatctgcaagcgacaaccctcgatctggtaggtttccccgcggataccggcggcgcggtgctggatttgcagagtaaggcggcggatctggcgaagcagtcggcggatatctctttccgcgacgataaagacgcggtgacgctgtcgatgcgcagcgacgtgctcttcgcttttgatagcgatgcgattgccaaaaaagccgaaccgacgctgaaaaaggtcgcacaactgatcgccgacgatcctgccggcgtggtgacgatcgaaggacataccgattcagtgggcagcgataagtacaatctcgacctgtcgcaacgtcgcgcccgcgcggtcggcaaatggctgatcgcccacggggtggagccatcacgcctgcgcgagcagggcaaaggcgaaagccagccggtggcgagtaacgataacgacgccgggcgcacgaaaaatcgtcgcgtcgattttatcttgccgaagaagaaagagtga

SEQ ID NO: 95008 - DNA, 618 bp, Enterobacter aerogenes
atgggtgggaacgaatggagccagggtgagaaagccagagagcatggtgcagatgttctctcatgcgcagataacccgtctggtgaagcctgccagcgaggaattgctgagaataaagcttatgcaggtgcgttggcttcagcggggctaatctatctgccgggaggaatgctgattactggcgcgataggcggaacggcaaatgcgggaattcagtatcttattaatggagaagttaatccaacggacgtgctcattgcgacgtatgttggagcttttaccagaaatacaggattaaagggaacaatgagctggaatgcggcaggtggagcaacatccagctatctgaaagggagtaatccttttacgggcggcttaattaatggtttggcctctggagtgggttatggtgcaggaaaactcattgagctgcctatggataaaatttacaacccgatgaagccatggaaagactggatgtggacagatgtcggaatggggatatcgaagccattgtcattagatccaataccaggagttgctggtaatataacaagctcaataataacagaatatagtaatgatcaggcaggtaaaaacttagggggtaagaaatga

SEQ ID NO: 95009 - DNA, 693 bp, Enterobacter aerogenes
atgtactaccggaatgaagttcagggatattttaaaaataatagaatcttagctttgaaatttgatagggctctgtccagtgtcagggtgggggtgtcaaatcagattgaaatgataggttcaggagctaaaagagcgttgtattattcctcatgctttaccagtgaatatcaggatgtctgcaagcaacaaaagcaagaggatataagatttacaataggtcttggtcgtgttattgaaggggatagtgtggtttttgaaatggttaaggtttattttgatgagatttttaagtccaaaacgacacagcaattagaaaaaataaaaaaaatcctcatgactgtaaatattcacatagcagcaagcaccttgacacaacagggcttttctctgggggtggcatcggctgtcgcagtaagtacaaatgtaagctttagcatgagtgcattaaccggtcgggctgctggtatagctgttgggattgctggagcatatggcattgtacaaaaagctgctgagagtgctaatcaactgcgctcgcttcatccatggtattattttgcattatattcaaaggggctggaaatgatgtattttcttgtctcatctatatttgaaagggccggtgcatttagagtgcatcaaatctctgatgatgatattgctgatattattaaacgaatgattaggtag

SEQ ID NO: 95010 - DNA, 471 bp, Enterobacter aerogenes
atgagttatctcgtccgggcttcccgttgttatgctaacccatcgcgaaatcagataacccatgtaatagtcacaaaacttaatcgtagagatacatactcttctgagcaaagtattaagaaatctatatctgagccgtcattaagttcggaaatatcgtcaacagcactatcttgtggcggtgctctgttaactgcgggtgtttttattatcggtactggtgctactgcagttactgctggtgcatcaagcgcatttgcgatattagggtatgcaggtgcggtggcaacaactgcgcaatgtatcaatggtgtgataaggctatgggatattgagttcaataattctgcgttaacaggttggttggattcggaagattggtatacatcaacgtcaacggcgttggatgtcatctctcttgcttctgctgctggtgcattgcttgatgttttaaaaacttataaagtatga

SEQ ID NO: 95011 - DNA, 138 bp, Enterobacter aerogenes
atgagttctctcttctctaattcagaaaataagttattaaattatgacttttctcgctggatgggtaatacatctggctctgactttgatttccgcgctctaggttctgcattagattgcacccgtgattttaattaa

SEQ ID NO: 95012 - DNA, 867 bp, Enterobacter aerogenes
atgacactgaaaattggacctatcggaaaactgatcgttgtatgtagtcagaagggcggaatcgtcaaatcgcagtcatccagtgaaattgcacatgatcttcgtaaagctggtttccgcgtgcttgaaattgatatggactggactactggtctgacggagagggcattccctgacagcttaccttatgagatagaacgcgaacctttaagtaacagttttacacccggtgaagcgaatacatatcagcttttcttttctgaaacagagattcgaccgattgagcttcctggcgggcgcttttttatcggtgctaccagtgaacttaatgaaattaactatcgaaacagcgactgcatgttcgacttcagggaccgtattgaagaactgaagaaacagtttgattttattattgctgattcagcgccatcttattcaaatgttatgatcgcagcgcatatgtcagctgattatcttctgatccctaccctgctggagaagcaggcccgtaatgcagttggtaaacagcttacttatatgcagaaaattaagcggaactacaatccttcgctgcagttcatggggacttatgtgacccagacgcaggtgaaaaattataaaaaaccacttaaagaaggatatctggggcctattgatacactgaatctgaatctcctcatcgagatccttcagggaaaaggctactctgaagaatacattctcgcctatatatcatttgtacctgctgctgcaaaagaagcgatcgaactaggtctctcctttgatgaatatgaccccaagtgtcttcctgcaattcagtataaagaacttacccagaaaattattatgctcgcaggaggtaagtaa

SEQ ID NO: 95013 - DNA, 1032 bp, Enterobacter aerogenes
atggccaagaaaccttttatgaagcgactccaggcgcagcaggaaatgaaaaaaaatgctgcagttgtttctgatattgaacaggtcattgcaaataaacagccagatgagcagagccatgatatagctgcgcaccagattatggcggatattgcccgcccggatatcgaacctgatggtcagataatacgcgtcgatataaatctggtttatgctgaagaacaagtgcgacctgaagaagacttcgaggaagatatcattgatggtatgtctgataccttcgaaacgatagggatgcttaccccgcctcgttgttatcctcgtgacagacgtggctaccagatatggttaggcgaaacgcgtgttcgcactgcccgcaagcgtggtgatacccatattgatatatatgttggtaaaccaccgcgggaaagaaaagaacgcatcatcggccagctcattgaaaacctgcagcagtctggtttgaaaccattagcgaccgcaaaatcgttctatgagctcaagcatcagttcaatatgacgggtgagcagatcgcaaaaacaatgggtaagcctacctcatttgtcagtaagcatcttcggcttatcgatgcaccggaaaatgttatcgcccttctccgggataaagtcacatccgatgtcgatctggcatacacactgatacaggtaaatgaaaagtctcccgaagaggccgagaagctagtcgcagctgcgcgggtgtctggtatttcacgcgcgcaggttaaagcggttcttgatgaagtgaagagcaaaagcaaaggtgagatttcgcatgcgaaatctaaggctcggaacaaaaagcctaccaagcctttggacagcaattcagatgtgaaaacctggcaggttgttgtcgagatagacggccagcaaggagtcataatgactgaccgcgcgccagacgaaggggggtatgtgtgggtgaaactggaaattggtgagatttcagttgaggcttctgaactacgcgtcaaagggatgcgctgtcagtga

SEQ ID NO: 95014 - DNA, 324 bp, Enterobacter aerogenes
atgacctttcaagagcttgatgcttatatcgcaggctctggcagacgttctatcgcttctgcattaatcgcttttattcttgatgcgcttgatgacggacaggacggagtagatcttgataccttccagagccatacgcgcttcgttcgtaataatgtaaccacggtagccagttacctgcagctacatggaattatccatatactgtattaccgtgatggtgctgcagaacgtcagtatgagtccgttaataattacgggcggtgggcaaagcagcactatcgtccttctgaggctcttatacagctgcatcgacgtgattaa

SEQ ID NO: 95015 - DNA, 1374 bp, Enterobacter aerogenes
gtgccgggttcaaagagaatttgcaggcagtgtctgaacgatgaccgttatctgaacaacatcatcgcaagcgatcctgatgcctcagaatcatgcgattattgtgactccgaagagatgacgatgtcgatggaaacactggctgaaaaggtcgactggttgattgaaaattattatcggggcggagaatataaccattatctggaagagtatgaaggtgaacctctcttctctgttctggagcaagaggtcacagtcaatgataatatcatcaatgacttatcggaactgctcgacgagttatggtttgactggagctcacatgaaagaaaatatggtgatgagccgcattttgttgaagctgtaaccatctcaggaaacctgtccaggaaatggaattcaatggaaaggaaacttcgggagagtaatcggttctttaacatggatgcgatggctacttttgaagaggtttttggctatcttcatgaaaatcatccctcagcatttatcgattttgagccaaacacttcaattttccgtggccgaatttttcagtcagaagaggcgcttgaagctgcattaagaatgcccgagtcgagttttggtcctcctccgcccgaactgactccatctggtagaatgaatgcaagaggcatctcagtcttctatggcgctacgtccaaaaaaaatgccatatccgaagtgcgaccacctgtagggagttatgtagcagttgctaagttcgatttgctgcggacagtccgattactcgacctgtccagtctcagagtgctggcagttaacgggtttagccgttttgaccctgagtatcttcttcgatatgaacgcagtagttttattaagaatctctccagaaagcttgttatgccggttgttcctgaacttgaagaagcaaattacctgctgacacaagctattgcagattatctttcaacttctgaacgctacgatctcgatgggatactgttcagttctgcacaaaagccaaaggaaaacaccgacccatctgtcaggaatattatcctgtttcataaatcatctggggtactgaatgcagaccgaaggtaccgggaagctgtggtaaatatgtatcagcacgatgaggatatctcatactttgatccagagataacgacgacttccgatgatttccgtcgtgaatttaaggtgctctcaagtaagaaaaaaagggaagatatacttgagttaaaactcgatggcatagaaattcataaaatagaaggtgttgattactccacatcagaaacaacagtcacgcactatttaacggaaggccgcacaaaagaagtgatttcgcatgcgaaatctggctattcggatgacgaattctga

SEQ ID NO: 95016 - DNA, 1275 bp, Enterobacter aerogenes
atgtttgcactcgctgacgtgaattcattctatgccagctgtgaaaaggtgtttcgtccggacctgcgtaacaggcccgttgtggtgctcagcaacaacgatggctgcgtcatcgcgcgcagtgccgaagcgaagcggctgggtattaaaatgggcgtcccctggttccagctgaagacggcaaaattcccggagccggtcattacgttctcgagcaattacgagctctatgcgtctatgtcgaacagggttatgtctcatctcgaggagctggcgccgcgcgtggagcagtacagcatcgacgagatgtttctggacattcgtggcatagaccgctgcattaattttgaggacttcggccggcagctgcgcgagcacgtgcgttccggtacagagctgacaatcggtgtcgggatggggccgaccaaaacgctggctaaaagcgcgcaatgggcgtcgaaagagtggccacagttcggaggggtgcttgccctgactttaaataatccgaagcgaacggagaaactgctctccctgcagccggtggaagaaatctggggagtaggccggagaatttcgaaaaagttgggcactatgggtatcactacggcactgcagctggcgcgcgcgaaccctgtatttataaggaaaaatttcaacgttgtgctggagagaaccgtccgggaactcaacggagaaagctgtatttcgctggaagaagcacctccaccgaaacagcagattgtctgcagcaggtcctttggggagcgcgtcacgacgtatgaagctatgcggcaggcagtctgtcagtacgctgagcgtgcagctgaaaagctgcgcggcgagcggcagttctgcaggcatattgctgtatttgtgaagacgtcgccgttcgcggtgaaggaaccgtattacgggaatgtggccagtgagaagctgatgactcccacgcaggataccagggacatcatagccgcagcggtgaaagcactggatcggatctgggtgaatggccatcgatatgcaaaagctggttgcatgctcaatgacttcactcctacgggggtttcgcagctaaacctgttcgatgatactcagccccggagcaacagtaatcagctgatgaaagtcgtggacggtattaaccattcagggctgggaaaagtgtggtttgcgggacgaggcatcgcacctgagtggcaaatgaaacgagaaatgctttcccctgcgtacacaacgcgctggaatgatctcccggtggcaatgataagatga

SEQ ID NO: 95017 - DNA, 423 bp, Enterobacter aerogenes
atgatcctttttgtcgctcccgcatctgagccagcactgtttaccgcaccacttttcacagagcgctgtccggcaggttttccgtcaccggctgcggactacaccgaagacgaactggatctgaacgcctactgtatccgtcgccccagcgcgacctactttgtccgtgccattggcgattcgatgaaagatattggcctgcactccggcgacctgatgattgtcgacaaggccgaaagacctgtacagggggatatcgtcattgcagaaacagatggcgaattcaccgttaaacgcctgcagcttaaaccccggattgctctgctgccgatgaatcccgcctaccccactctttatccggaagaactgcagatcttcggcgtggtgacggcattcatacacaagacgcggggtacgaactga

SEQ ID NO: 95018 - DNA, 672 bp, Enterobacter aerogenes
atgtgcggtcggtttacgcagtacaactcccgcgaggagtaccttgcctttctcggagaagaagctgaacgggatatcccgtatgatccggagcccgtcggccgctacaacgttgcgcccggaacccgggtattgctgctgagtgaacgccgctcacagctgcatcttgatccagttcactggggttatgccccggagtggtggaacaagcccgctctcatcaacgcccgaagtgaaactgctgccggcagccggatgttcaggccactctgggagcatggacgggccattgtttttgccgacggctggttcgagtggaaacagcaaaacggcgtaaaacagccgtttttcatttaccgaaaggacggaaatccactcctgctcgcagccatcgggaaacaaccatttgaaaacggcaatgacctggaaggattcctgatcgtcactgcagctgcggatgagggactgctggacattcacgatcggcgaccgctcgtgtactcaccggctgcagcgcgtaaatggctcagcgaaaacacaaccggtaaagaggcggaagacattgcccgtgagggcagtcttcccgccgaagatttcacatggcaccccgtcagccgggcagttggcaatcccggtaaccagggccggaaacttattgagccactgacctag

SEQ ID NO: 95019 - DNA, 225 bp, Enterobacter aerogenes
atgacgaactacgccggaaacgaagcgctgcgtgccgacgttgccgccctggcaaacagcatgtgcgatctgcgcgccacgctcaatgcgctggaatcccgctaccgctacgacgcggagaacctgacggagcgccttgcccgccagacaatttgccgcatcaacgcactttatcttgaagcataccggcaggcgctggagctggacgccagctttaaagactga

SEQ ID NO: 95020 - DNA, 417 bp, Enterobacter aerogenes
atgtacggaacacgcgaagaactctgcactcgactcgaaaacatgttcacccccgacgagccgctggtactgctggtctggaccgaagaagctttttatgtcgcctgcggtgaacttgatgtaaagccggaacctgccgagattcagggactgatggaaacaaccggtaatacggatatggctgtatatcgcagggaaggcgttacaaattcaggcgtatgcgaccttctggtacgacaccgtgaggccgtggcgcgcgaggtaagcgttcccgcggcgctgctcatgcgcgtactgcggcgacaggaaggcgacctggaaaatcttgtcgggcaggcatgggaggcgggtcgacccgcgcctgaatccctcaaacaggcactgcacgatgtcagaatattgatggagcgaatctga

SEQ ID NO: 95021 - DNA, 195 bp, Enterobacter aerogenes
atgaacactacgaccaccacgcccgctgtctacgttggcacgtaccacaaatacaactgcggcagcatttttggcaaatggtttgacctgacggagtttgacggcagggaggatttttacgaggcctgtcaggcgctgtacgccgatgaatgggatgccgagtttatgttccaggactgggaaggcattccgtag

SEQ ID NO: 95022 - DNA, 132 bp, Enterobacter aerogenes
atggctgaagacaacggcctgctgaatgaggtgccggagccgctgcgcagctatttcgattttgaagcctgggcgcgtgacctgttcagcagcggttatgtattccatgacggctacgtcttcagcaactga

SEQ ID NO: 95023 - DNA, 549 bp, Enterobacter aerogenes
atgagcaggcccccgccgcaacgacggaacgcgcgggcgcgaaacggcgttgccccgaagaggcccggcagcattaccgccgggctggtgagagcggcgcatccgtttacggatgccacaagcgtgatgttgatgttgcgacagtgcgatggaagcccgacagggcggagacggtttaccggctccgtttacgacagcgccggttcccgtcagggaagtcgcccacaggcagacacaacaggaagaaaaaccgacagaacagcgatatcagccagtacgccatcggtatggccactattggcaacgacaacgacaacgacaacgacaacgacaacgacaacgacaacgacaacgacaacgacaacgacaacgacaacgacaacgcagagattatcaacagaacaggaatatcgccgaccggctacaacacatcaatactcatactctgacaccaccgggacatcaggcacttgcggagatacgcggtgccgcaggcgcggcgtacttcgccggcaggcagcgcctgccagggttttgcgcgcgggctga

SEQ ID NO: 95024 - DNA, 150 bp, Enterobacter aerogenes
atgagcgaggcgctggcggtattactcgacgacacctttacccgcgaacaggctgaggccgttgcggcacagtacaccaacgtggcgatagaggacgatcagggggcgcattttcgtcaggttgtccgtaaggacggcgagatggtctga

SEQ ID NO: 95025 - DNA, 2010 bp, Enterobacter aerogenes
atgacagtaacgaagactacagcaaaaacagcagctaaagccagcactaaaaaaatcacgagagcgcaggaagaagcactgaaagcggctcttgaggccgctgtcatcgagtatgttccgctgtccgcgctcgttaaatccccgctgaacgtacgcactatcccgtattccatggacagtgttcgcggtctggccgactcgatcgaggcgctcggactgctgcagaacctgattgttcacacgctcgcggacggacaatccggcgtggccgcaggtggccgccgactgaccgccctgaatctgctggcgcaggaggggcgtctcgctgctgaccatacggttgtggtgaaacgtgtttccgacgacattgccgcccttgcctccgtcgctgagaacgagcagcgcgccgccatgcatcccgccgagcaaatcgcagggttccgtacgctggcagagcagggcaaaacccccgcgcagattggcgatgcgctcggcttcggctcccgccacgtgcagcgcatgctgaagctggcaaacctcgccccgttcctgatggagaagctcgcgcaggacgaactgaccgttgaacagtgtcaggcgctttgtctcgaggacgatcctgcccgtcaggtagaggtattcgaaagcgtgaaggccagctggtcgaacgcgcccgcacacctgattaaacgcgccattaccgaaactgagatgcgcacggacaacgctaaattcttgtttatcgggcgcgaagcctatgaggcagcgggaggctatgtccgtgaagatctgttcagccaggaagagggcgacggcacggcagacagcgtgctggttgagcatctggtgcaggagaagctggagcgtatcgccctggacattcagcagcgtgaggactgggcatggagtcgcggacgcgcagcccgcatctggtaccacggtgaagacggtaaagagttcgttcagcctgttgaacccgaaccggtatacacccctgagcagcagcagcatcttgatgcgctgcgggagcagtacgacgcctttgacagcgtttgcgacgagtcggatgcgatcgaagcggacatcctcgcgattaaaacggcagcagaagtcagcgcgtggactgacgacatgaagtcaggcgcgggggtgatggtcagcctgtacgaagggcaggtgtacgtgcagcgcggagttcgcctgaaagcgcatatgccggaagaaaccgaatccggcagcgtaacagtgccgttcacctcacgccagcccgacgccgcagaggggatcagcgtcccgctgctcacaagaatgacctccgagcgtacgctggcagtccaggcggcactgatgcagcagcccgaaaaggcggtggcgctgatggtctggcgtatgtgtacctgtgtttttgccggatgcgtcaccacgccacatcctttccgtatcagcctgaccgtgtcccacagcagtctgacggagaacgccccgtccggcaaagacggagccgcctttggcatcctgatggctgaaaaaacgcggctgaaagccctgctgccggaaggatgggagaaggacttcaccacgttcttcactctgagcggggaggtgctgatgtcgctgatggccttctgcacagcctgttccgttgacggggtacagactcgcgatatgggacacacttcacgcagcaccctcgatacggtcgaggcggcaatcggattccacctgcgcgactggtggcagccgacgaaggacaactacttcggtagcctgaagcatccgcagattgtcgcctccctgaaagaggcgggtctgacgggcgcggcgggcgacgcggagaagatgaagaagggcgacgccgcagcacatgcggagcactttatgcagcacacccgctgggttcctgcgtggctgaaacgaccggagccagcggataaggccgatgctgacgacgcggtttcagataccgacagcactggcaacgacaccaccaacacggcacacgccgtctga

SEQ ID NO: 95026 - DNA, 432 bp, Enterobacter aerogenes
atgcaaactgttctgacccccgatgtactgaaaacgatgtcctgtgatgagtttgaggactggcgggacagcggcgaagactttcgccgcgaactgacccacgccattatgcgtgacctgtcctgtccggaaaactgggacatgaacggcgaataccgcagcgagtttggcgggttcttccctgtgcagatacgcttcacaccctcacacggcaacttccatctggcggtgtgcagtcccggtgccatcagtccggtgtggatggtggtgtttgttcccgccagcggtcgcccgttctccgtcattcgtgccctgagcggcttgcagccggagctggtcagccacaccatcagcctgacagcgcgtctcgatgccgacggttacagccaggccagcatcatcagtattctggcagcggagggcgcggcatga

SEQ ID NO: 95027 - DNA, 729 bp, Enterobacter aerogenes
atgatacctgcaaacctttcactggttcccttcagccctgagcgacgcgccgcgatggaggctatcgctgaggttgaacgccggcggtcgcgcggcgctgtgtccacgatgtatccgtatgccagcgcctttttccggcggctcacgggcagcacgcgcatctcactcagggaaatccatcattttgcgccggtgctgacggcgcgggagttgcggggctgcagggacagctggctcagtgccatcgatgccctgattgaaagccgcgggacgtgttgctggctgccgcttcctgtcggtgcgggtcagcacctctttcctgaggtggcctttcagcagactgagcgggttcgctgtcaggatgcactgcgggatgaaaaatacacccgccagcgccacaaggaacggtgccagcgtgagcaggcgtaccaggcgctggcggggcaggcggagattgagctggcattccatacgccagaaacggtcagcagctggagcgcgcgctggtcggggagtgaactgcgtcagtacgacctggaggagatgttctggcgctggagtgagcgttttccgtctttatccgggctggatcactggatgtttgagggggaacctttctggacggtgatggctgaaacgaaagtgctggcgcgggaaagcccggaatctgtcaggcaactggagcgctggatggtacccaacaaactaacaatgtgggaccgggcatga

SEQ ID NO: 95028 - DNA, 237 bp, Enterobacter aerogenes
atgcccgcgcctgaatcggtgatgtcacggtgggtggcgggcgccggatatgcggtctgcgtggattttctgtatgacaaaccggtcaggcgctggagtgatgagcgcaaggcggccacccgtcgccggaatctggcgcgtcgtgttcacagaatagcaccgctgtttgctgatgaacttatcgggcgggaactggcggcgcgaccggattattatcggggaaagtcaccctgctga

SEQ ID NO: 95029 - DNA, 375 bp, Enterobacter aerogenes
atgagatactggatattgacagctctgtttagtggtctgttaacgctgataatatatatttttgctccggagatggtcggaagcccggcgaattacgccggggtggctatctgtgctctgattgcgctggttatcacctggcgcgatccgcctggtatgctggacaacgtgctcttgtttctctttaagtggggaattgtggcttctggactggtgttttctgtctggggcatcggatacaagctggaattctggggggaacataaccccgatgaagttttcagcagtacattcgacaccatcttgccgaatctggcggtgctgtgcggtgttctgattctggtcagtggctgggtgttctggcggcgaaggtaa

SEQ ID NO: 95030 - DNA, 345 bp, Enterobacter aerogenes
atgcacttaaatctgaatgaatccagcaccgaagcaggtatttacgcgagcagtgaggccgagcgcgcgtactggctgagccgcgaaaagtcatacctgagcgcgcctgtcgaaatcgacgttcacgctttccatgatgcgctggggctgatgtacccgatgaactggcacagcagtgagaacggcgagtgtgaaaccttcatgctggcggaaatggtctgcggcaacgtgaccgaaatctacgcgcggatcggtatccgttattaccggatgcgtgactacagcaaccttgaccacgcggagattctggcacgcgttaagggggaaatgcagcgccagaaatga

SEQ ID NO: 95031 - DNA, 267 bp, Enterobacter aerogenes
atgaatcatttcagaagagcgtcgattgttacaccgaccgccctgtatgtccagatgcttgaggcggaaaacgcacctgtcaaaaaacaggtgcggattaagcgcggcgaaatcgcaccggaggcactcagtaccgaaatgcgggcgctggggcggcatatcgcaaagtgccgcagaaaggggcgctccgttcgcattccagccatgcgtggaaacgagtgggggcaggtgttacgcacgctcgaactgaagcgcgcatttaactga

SEQ ID NO: 95032 - DNA, 831 bp, Enterobacter aerogenes
atgtctcaactcagttttgccagcttctttgaccaggcgagagaagccgcacccttaacacccgctaaacccgtattgcccaccgtgaatgcgcagccgataccgcaccggatgatgacgatcgaccaggcacgccgccagtttatcagcgtgttcagggataccgcccgcagcctgcgccgctgggaggtgttcagcgactttatcacgctggctgccagcgagctggatatggcgcggataagaacgccggagaatattgagcagagccgtaaaatctgcgcgaagtacagcgcgagcgatatcagcaacctgcatacgcttttctgcctgatggtctgcgcgctggaggcaaagtttcacgactttctcggcgcgatcttcatggaacttgagctgggcgacgaccggaacgggcagtatttcacgccgtatcacgtccagtcactgctggcgaggctgctgatgccggacgtcgacgaaacgatacgccgtaagggattcgtgaccgtcagcgatccggcaagcggcgcagcgggaatgattgtcgcgtatgccgaggtgctacttgaggcgggctacaatccgtctgaacatatgttcggtagctgcattgatatcgatccgattgcagccgatatggcgtttatacagctttccctgctgggtattcctgccgaggtggtcacgggcaatacgctgacgatgcagttaaacagggtgcggtatacgccggtgtactacatcaacaactttggaaagcggctggacgatcagcgccgtatcagtgccatgcgcgaatttttgcgcggtataaatgacgctgcataa

SEQ ID NO: 95033 - DNA, 531 bp, Enterobacter aerogenes
atgcacacattaaacgttaaaaccgccactcgcgaatcagccgaacaatttaaaatcgatgaacgccagcgctactctgttactgatggtgatgagcgtcttgaatttattccggctctgttttttacaccgtcagcggacaatatgattgccagctggttacgtcagcattcagattatgatagcggtttctggaattactggattattccgcagggcactggcggaaacgtggcgccgaactgtgtcagattcaccacgacgcaaacaggatatatcgcaccggaaggagaacagcgctataacatggttattcctggtaattactttgaagcagaggtcagtgctgatgctgccggaattattgccacgctgatgattatgaactggttgtcctggcaggttgcggatatggggcctgaatattcgaaagtctgtaaacacctcgtcgctcgtcaggatgcactgaaagactacatcagtatcataaaacaccctgaagcatatttaatttatcgggctattgattga

SEQ ID NO: 95034 - DNA, 483 bp, Enterobacter aerogenes
atggataaaaaagacctcgtgttgaggtcttttttattgtttcgggagaaactgctctgcatttttatttttctttatcgcccgatatgttgcctcgatttttctggcatagacatatcttctctgcgcctgttcttctgttttccggaaacctgcattatacgcgcccacggcctgccagctgactccccactttttgaatgcaattgcaagatagtaagccccggtgtagatattcatacatggatcggaaataaggtgctccggttttattccataacaagccagttcgttaaagtgctgggagtccacctgcataagtccggagccaaagcccgaaacaggattgtagcctttaacgtctgtgcggaagttcgattcattccaggagattgcccgaagcagatctggatctatactataatctctgcccgccatatcaaaacaatctgcattagcattctgagcggctatcaggagtaa

SEQ ID NO: 95035 - DNA, 414 bp, Enterobacter aerogenes
atggtgctgtcaggacaagagggaaataaagttatgccacggcagaatgtttatatgaagcaaaaaacaattgatggtatccgacaaatcgtcgatatgagaagggaagagggcgcgacagcttctgatgccaatatctccagtgtctgttccgaaatgctggaactgggaatgcgtgtatacctcaatgctaaaaataataaggcctcagatgcagaagccggtgaagatgtatttcagagctctctttttgaagaggttgtaaagtcaagaatggcatcacaggagatactggcgctgatgttttctttgcaggatataaaatctgatagtcgtaacaattacgataaattgatcgactctctaaaagagaaaacagatttacgggtcaaaaaggtactcaacagagagtag

SEQ ID NO: 95036 - DNA, 741 bp, Enterobacter aerogenes
atggctacggacgatcctatggatctggatgtcagatctcaagcctttttaagggatttttatcaattccacaaaaactcatgcgatgcgtggtacataaaagatgcaaatcatcgttttatggatgccagtattacgttcctttcacgtttttcacctcctgacttaacatcggtcataggccttggtgatgatgtcgtttcagaagcatcgagcagagatattgccctcatgtatgaatttgaatcactggttatgtcgcaaggtaaaaacgtcgtaattcttacatggaattatttaaccgatcactatgatgtaaagtcttttgtcctaaagatgaagccatggcactattctaatggagttggggtaatagtatgtgtttcggatttagctgcggttaataagaaaatagactggttatcttgtttagtttctggttcattaacaatagagcagtcgagtgtttctacgtcatccactttttcaaaccctctttcttatgttacggaaagcgaatgggaggttgcctggctgataatatgttcttgctcaatcagatggattgcatctaattttgatgtcagtgttaagactgtagaaataaaagcccgtaatgcatatatgaagcttaatgctttcgacagggaaggattaatcagaatggctgaaaaatatggttggataaatatcattcctgcacgctttgtttctgcgtctaatcttataaggatttgctag

SEQ ID NO: 95037 - DNA, 387 bp, Enterobacter aerogenes
atgagccagaaaacaatagcagaagacgagggtgaattggttcgccctaaatctattggagtgcctcttaccagcgtagatagtgaaaaattgtctcaggctgctaaaaagggcaaacgctcccgccagctggaagccatgcttcgtctgcatgaccaccttaagctgttctccagaattccaggtgactgggctgttgcacaggaaggagaagcacgaaacaaaaaaattactgtgatcctcactgccagagccagcgcacgactgactgatgtagccgcaaaatcagagcgttctcgtgtgcaggaggccgcgcttcgtctgcacgaccatctcaggcgtgtccctgaaattagcggagattactatgagataacgacgctctga

SEQ ID NO: 95038 - DNA, 405 bp, Enterobacter aerogenes
atggctgatatttcagtgataaatcagggggcggacgttgtctgcaaggggaataaaaagggactgctgtcgcgcatggtatctgccgtgaaggcggcgccgtcgctggtgaataaccgtaccgcgaaggcgctgtttaagtatgtggcaataccgctggcattatttctggcggcgcgcggtatggcgcatgccgaagacctgacggcggccggcaaacaggatgcgacggatacctttggtgaagactccaccatgatgtactacttcatgatcgcggaagtggtgctggtcttcctgctgtacctcaaatcacataacccggcgaccttcctgcttatcccggtgtttatcgtgattaccaaaatcatcttctccatcatttctgcccgctccgggggctga

SEQ ID NO: 95039 - DNA, 306 bp, Enterobacter aerogenes
atggatgaggaacgcgcttcgcgcttcatgtttcctcagacactgacagagcagacacggcccatcggactaccgatggatgagacaatagccctgttcgcaccgatgggatggggcttttataccggtaagtacgttaccggtctggtcattgccgttctgctctggttctgtctgaagtatttcaaaaaggggagagggaccgactggctgcttaacgcctgctactggtacctcccgtcttcactcttcaaaggcatgtacaaagtcattcccgattcgtcattccggctgtggctgcgttga

SEQ ID NO: 95040 - DNA, 570 bp, Enterobacter aerogenes
atggacctgaaggcaaagcgcctgtcggcccgctacacatcactcatctttctgctgcttctggtgttctttggtctgagtcttgccggcaacctggttgcctggttgcgactcgatacgctgattaacagccgtgaagagacctatatcccgatggggtttgataccccgttcacactgacgcgcaaccggatggatgcgaactatctggagcaaactgccgaatcgctggtcttcctgcgctacaacgtgtcgccggaatcggtggaagccaatcacaaagcgctgctgcgcttctttgataacgaagagcgtcctgccatgcaggaagttctggccagcgaagcgcagcgcgttatcgacaataacgtcaccacggccttttacctgtccggtttcgacacctacccggcttcggggatcgtcgatattcacggaacagtacagcagtggataggcaatcgtaagcagctgccggaagacaaaactatacggatggcactgcgctatcaccggggtattaccaccattcaggatttcagggagcaggtggatgaaaagaaaaaataa

SEQ ID NO: 95041 - DNA, 777 bp, Enterobacter aerogenes
atgaaaagaaaaaataacaggcatggcaggcaccgtcttgcattgctggccagtctgctctgtctgagtggcaacgtactggcagagccggtggccgcactaccgacaaagataccggtttcgccggacagccaggtccgggtcgcgctcagcaacactaatccgaatctgctggttgtgcccggcgataagattatcgccgtggacagtgcgcaggggatgtttcttaatgacaacaaggcgctggggcaggctaacggcggtgtgcagctgatgaccgcccagactaccccgttcaccttctatgtccgcacggaaggagggctgaccgtttctgttattggtgtcccgcagaaacgggatggccgggtgctgcagtttatctccagccgtccggtacagcatgatgatgcgcggcgctgggagcagtctcagccgtatgtgcgcacccttatctctgtccagcaggcggttctgagcggtggcgtaccgaaagggtttaccgaagcacctgtcgtggcggtacccacattttccctgccgggctggttgtcggtgacgcctcaacaaatgtggagcggtggtgggcttcggctctatcgactgacggtgcgtaatcgtggtgccagtgtgctggctatacctgaacgactgtttcaggcaccaggcgtaagggcagtgatggtgtttccgttcagtaccacgctgatgcccggcaccgatacgcaggtgtgggtcacggtcagcaacgacggggaggggcagactaatggctaa

SEQ ID NO: 95042 - DNA, 1359 bp, Enterobacter aerogenes
atggctaacattaacgtgctgacccgtcgcaggcagatggcggtgctgatcgccgtggcgctgggattaagcgctatcggcggtgtcgcctggtatatcggtgcaccatcaaaggtgtcccccggtaagagccaggcaaaaaaaccggtaccggatatgaccggcgcggtgacctccagtaccttcggtaaaaaagtcagcgatacggcggtggccgacctgcagcataccgcgaatcaagccgataaaaagctggccagcttcgagaatcagctcaataaactcgccagtgaaaacaaggcctaccgggagaaaattcagtcacaggatgatgacatcaaactgctgcagacgcagattgatgccatgacccaggcaggcgatagcggcagcggtcatgcgtcgcctggtccgggcacgccagccggcaccctgcctgtcggtggcggttcaggcgcggtcccaccgccaaccgccttttacccgggcgttcccggcaatcagacgacggtgaatatcgctccacagctgaatcaggggctgtccaccatgagtatcgattacggcgaaaaaaaggatgatgcgccggcgctgccgtatattccgtcggggagttttgtcggggcgacggtgattgagggggcggatgctaatgcctctgtcacgggtgaaagtgcctcatcgccgatgcagtttcgtctgaccgggaaggtgattttaccgaacgacggggaatatgacctgcggggctgctttgtaaccgcagccgcttacggtgatatctccagtgagcgcgcgctactgcgtaccgaccgtctgtcctgccgtgttcatggccacgttatcgaccagcccttcaaaggacacgtctcctttatggggaaaaatggcatccgtgctgagccggtcatccgcaacggcaagattgttggctacgcctttgccggtggtgccatcgatgcaatgggcagcgccatatcgaacgtcggctcaaccagcgttggtctgggggcggcgaataccgtcagcggtggcgatgttgcccgcgccgggctcggcggtggtacgtcacaggcaggcaaaacgctctcagattactttatcaagcgcgcggagcagtatcacccggtcattccggtgggggcaggagtctctgtctctgtggtcttccaggagggttttcagctgcagtatgccgatgtgaagaaggagaagaagcccgctgtgtcttcccaggaaaaagcgaccggtaatggaatcactatcaccaaagaggcgctgcgtaacctcaatctcggggactcgatgggtgccatgaaggaccagatacaggctggcatgcaggagagtatgcgatga

SEQ ID NO: 95043 - DNA, 375 bp, Enterobacter aerogenes
atgaaatcttcactcaaaatagccattgtgcggatgtggacgttttacaccactgggccggatgccgttgttgaacagggcgtattgctagtccgctgtctggtctgctgggccctgagttgtactgtgctgtacctgcttctgggcggggcgtttttgtttgacctctggcgcctggagcatgacccgactctgacactcacggcggtgcgggcatcgatacgggagtgtatggatgcgtggcagttaatttgtctgttcagactgagctggctggtcccgctgggttgcctgctgttcaccctgcagcgcttttcctctgacgaaaccactacggccgacaggacccgcgtcccgttcgatccgcgtcgttaa

SEQ ID NO: 95044 - DNA, 246 bp, Enterobacter aerogenes
atgtgtaaaccacaacgccatcctctggcttcgttgtcttccccggagctggcgcaacacattctggataactgcacgacgtttatcacgctgaaccagcccgctcacccattctgcctgcagggtgagccgcaaagtggccatacgatagttgtcgggcgtaccggtggcggtaaatccgacctctgcgtccgtgtcatgaatgatgtgcttcgccgttccggtgacgggcgcgctgataagtga

SEQ ID NO: 95045 - DNA, 588 bp, Enterobacter aerogenes
atgaataaattcattatgcctttactggcaggcgctggcctgctctccggctgtgccgggatgaactctgactttgactgtaatactgtggcccatgaccgctgcatcaccatggagcaggctaatcagcaggcggcaggacgttcgtcgtcttccccggtgatgtccggcgttgatggtgatgcgggaaagacggacgcggctgttgagaccctgccgcgccttgcaccggttccggtctcaccctcaccgctgaccggtattcaggcggccacccgtgatgcgggtacgcgatctgtaagaacgacgacggggagcctgctgctgcctgcgtcgcgcccggttcgtccggatgtgggaggcccggcagtaccttctcaccggccagccgtttctcctgccttgccggcgtcatcacctgtcactgaagtccagcgctatgccgataccggggttagtcagcctgtacgggtcaatccaaccacggctcgactgtggattgcgggctggattgaccgggatgatgttatgcatcaaccgtcggtcgtgtctttcgtggtgaagcctgaccactgggccgggagctga

SEQ ID NO: 95046 - DNA, 2616 bp, Enterobacter aerogenes
atggccctgcatgatgaattgttccgtcgcctgatgaccgactggcagcggaaggacggtgccgcgaaagccggagaggcgctggatgatatggactacccttctctggtcagcgtgctgccttaccagcattacgataaagacagcggcctgtttgtaaaccagaacaccatgggttttatcctcgaatgtacgccgctgattggcgccaacgacggtatcgtggaggccctggacaacttcctgcgcaacaaacttccccgtgaacagccgctgagcgtgctcctcctcgggagcaagtgcgtcagccatctgctggataacggtctgtcagacatggcctggcagggggagcaggcaacgcgctttgaccatatcacccgcgcgttctatgaacacggtgccctgtacggactgcccaacaacaaaggctacccgttgtcgctgcgtaactatcgcctctttatcagctacgccgagccattgcgtcgtgatgttgatgaactgtttgcctcgctgggccagacgctaagtatcgtgcagcagtcgctgtttgccgcgaacctgcactctgaggtgctggatgaccgggggctggtcgggctggtccgtgaaatcgtgaacttccgccatgatcgcatcacgccaccgcctgatgaggtggacccgtatgaagagctgaatgcccagtgtgttgcccgctccatcaatctgaaagtaacgccggattgtctgcaccagagccagtcctccgcagagggggggcgggtgaaaacccgcatcatgagttacatgccggagaagaatccggtgaagtttgcgctgtggcagggcgggaacaacctcagcaatctgctggacccgacgtcgacggtgccgtgcccctttgctatcacgctgacgacagagctggatgttcaggcgaagagtcagaacgaagcggtacgcaagtttgccaccaacgataagcgggcaaactccccgttcggtaagtgggtgccgggggtgaaaaaggccgcccgtgagtgggacggattgcgtgagcgactgtctaccgggcagtcggcgctggcgcgctacagtttaggcgtcacgctgttctgcgaggatgataatgataaagccctgatgtgcgaactggcgctgcagaataccttccgcgccaatggcatttcgctgtgttcgcccacctttatgcagctgcgtaactggctgtcgctgtttccgttcatgatgccggaagggttatggagtgatatgcgccgcagcggcgcgacgctccgggcggagtccttcaatgtcgccaatctgttgccggtggtggcggataaccgtatctgcccgaaaggcgtgcccattccgtcgtaccgtaaccagctctcgtatctggacctgttcgacagcaagtcagggctgggtaatgacaactataacctcggggtgtgtggcacctccggaggcgggaagtccttcctgatgcagaccatcattcggcacatcctcgacagcggagggcgggcctgggtgttcgatatgggggattcgtacaaggccctgtgcgccaatgttggcggggtctacgtcgatgccaccgacctcaagttcaacccgtttgccggtatcgtcaatattgtggaatcggcagagagtatccgcgacctgctgctggtcctctccagcccgtcaggcaaggtcgatgataccgccaagtctattctgctcaacgccgtacaggcggtctgggaaggggaggcaccgtcgaaacgtcgcggcaacgcggtgctgattgacgacgtttccgacctgctcaacgtctggaccacaagtgagaagtaccgggacgccaccacggtacgtaatctgatggaggagatggtggtgtcgctgcacaagtacaccaccggcggtatctacggcgaatacttcaacagtccggagccggcgctcgatgacaacgttcggttctgcgtgctggagatggggcgcctcaaaaacaaacctgacctgctggcggccatcatgttctcgatgatgatttatgtcgagcagcggatgttcctgtcaccccgtagtgagcgtaaggcggccatcatcgatgaggcctggaagctgctggcgagtgaaaacggctttattggtgacttcattgagaacggctaccgcaccgcacgtaaatatggcggtgcctatatcaccatcacccaggggattgaggactttgacggtgacaaggccagcatcgcggcgaaagctgcctggtccaactcgtcgttcaaaatcatcctgcgtcagaaccgggaagccttccgcaagtacaaccagaagaatgaggggcagttcagctcaccggagcagaccatcattgaaggtttcccttcggccaaagatgcgcacttcagcgcctttatgctgcgcgtggccggacaggtctcgtatcaccgcttgatcctcgacccgttgagccgggtgatgttctcgtccgacggcgatgactttgagtttcgtgaacagtgcctgaaggaggggaaaactgtccatgaagcgctctggttactggcccgtaaaaaatacgctaaggaaatggaggtgctggaacaatggcagatacagtcgtga

SEQ ID NO: 95047 - DNA, 483 bp, Enterobacter aerogenes
atggcagatacagtcgtgaatcaaccggagtcccctgaattacaaccttctgcggacgttaccccggcagacggaatgcgtcataacgtcgcttcaacatcatcccatcaacgtcttagttgccgtcgccggcgctgcctggtaccggtggcctgtgtcaccgcttttattctggtcatgaatgccggcatctcgatgttgctggcgcaatggcagcgaccggagacggtgagcttcgatatgaccggtacggtgaataactttatggctcaggtggccgggcgtcatctcagcgatgatgaggtaaaagccaccaccgcgcgttttaataccgccctcaatgcctcgctgactgactggcaacgccatcacggcgccatcatcctggtggcaccggcggtggtggggggtacccgcgatatcactgcagatgttcaggcagaggtggcgaaccggatggcagagggagagagtcatgagtga

SEQ ID NO: 95048 - DNA, 216 bp, Enterobacter aerogenes
atgagtgacgaagtcgatgtggcccaggacgttgtcgagctgacgaatactgtggcggtgctggctatccgccatcagttgcaggcagcggggagcgaatattgccagtcatgcggtgaaactatcccggaggcccggcgtctggcggcaccgtgggcagacacctgcacgccgtgccagagcgtactggagcaccgaaataaggtggggtactaa

SEQ ID NO: 95049 - DNA, 312 bp, Enterobacter aerogenes
atggcgcagtacgacgtgtatcgcaataaaggaaagggacgtgagcactacccttatttcatgtccctgcaacacgacctcttcagtggcctgagcacccgactggtcattcccctcacggaaaaatcccggatgatcccaacaaaaggtattcacccggagctgaacatcgccggacaagaatacatcctgctgacggatttgatgaccagcatcgacagtaaaagactggaggtaaccccggcggcgagtgcacaacacctgcatagcgatatcattaatgccctcgatttactcatcaccggtatctga

SEQ ID NO: 95050 - DNA, 243 bp, Enterobacter aerogenes
atgcatcgtcagcccttgtcagtgccaaaaaaaagaaccaacgttacgatcagccagtcactacttctggaagccagagaaaacgggatcaatctttctgcatttctcgagcacgcactgaacgatgaacttcgtcggagtcgaaaaaaacgctatctcgaggaaaataaagccgcatttgcttcacataatgccttcattgaggaagcaggcctcttttctgaagataatggggtaatttga

SEQ ID NO: 95051 - DNA, 639 bp, Enterobacter aerogenes
atgaataaaatgagggtcagcattgtgctgattggtgtactggtcgccctgaatcagcaggcaacggcaaaagatctggggtcatggggagatgtctggccggtgcaggagcagagctttctggcgctgattcaggatcgcctgcaggggttgcaggataacggccaactggcggagctgcagcaacagttccaggaccgggtggtggagcacacgctgcgccctgtgccggtggaagggctggttacagacacgcaggcacatacgtcctggtatgacccgacctttgtggttggccagacgctggccgatgcgcagggtcagatctttgcgcgtcagggcgataccctgaacccgctggatacgctggcgctgaataccaccctctattttatcgacggtgatgatacgcgtcaggtcgcctggatgaaggcgcaaaccccgcccacgcccacctacaagattattctagtcaacggcaatatcaaaagtgccgccgatgcgctgtcagagcgtatctacttcgaccagcagggtgtcctgacgaagaaactgggtattcactacattccggcgatggtcagtcaggacggtaagcgactgaaaatcacttctgcagccatgaaggaggcaaaataa

SEQ ID NO: 95052 - DNA, 390 bp, Enterobacter aerogenes
atgatggttattatgatggcattcagtctgctctgtgccggactgctgattgtggtgtggtttcagcggcgggaataccggcggctgcgccgggatgctgacggtatcgtagtgcgctatgtgaaaatcgctgaacgttatgaaagcctggttcgggatatcacggaacctcatggcggtgtactgagcgggctcgaagacgtgaaccgtttgtcggcatgcctgccttgtctgccggaaaaagaacgcgccgcagcacaggtcgcgatacactgcctcgatcagtggctgcgttttcttctgtgtccggtagcagatcgctatcatctgtcagcggaagataagcagcgctggctgggtgacggtgccggggtggaggtgcgtgagtga

SEQ ID NO: 95053 - DNA, 996 bp, Enterobacter aerogenes
gtgaagcgctccttctctgcgttggttctggcctgtggcctgactatcggtaccggttcgcttgccttagagcctgaatgccaggggcgatttgtcaatccgatcaccgatatctgctgggaatgtatgttcccgatgtccattggtaatgcgacggtgtcgtccggctcgctgccggatacggagaacccgtcctcccccatccagttctgcccggttccgccacctgtctttcaacgtatcggactggcgattggtttctgggagccatttgctctgacggatgtgacccgcgcaccgttctgcatggtcaatctcggtggcgtgagcatcagcgccggcaagctcggcagcggtggaggtaagcgccaggctgcagacaataccggcgccttctaccatgtgcactggtacaaatacccgctgacctggtggctcaatatcattactgacctggggtgtctgcagggcggggacatggatatcggctatctgtccgaactggacccaacctgggatgacagctcgctggcctcggtgctggcccctgaagcgtttctgtttgccaacccgattgcgcagggggcctgtgccgctgatgcgctggccagtgcggtctcaaaacccttaaacccgctgttctggtgtgccggttcgcacggcagcatgtacccgtttacggggtttgtctctaatcaggccagcccgcaggccgccagtgtgctgctctccgagcgaatggattacaagttgcatcgccaggggatgatcctgaacagtgtcggcgccgatacggccgtgtgctatgagtatccgtcgcccgttatgccgaaagaccgctatcgctatcagatggtcaacatgtatccggatgcggggcgatgccatccgtttggtcgcactgtgatggcgtgggaggccggacatgccaccccggccagccggcagaactttggctacctcatctggcgcaagcgtaactgcgtcttcctctga

SEQ ID NO: 95054 - DNA, 627 bp, Enterobacter aerogenes
atgaacaaactgatgttaacggcgctcttcggtgtgctgacagcggctgcctgtgcgcaggctgatggcctgacggacgagcaacagctttttcgtgccctgcgggagcagagtgcgtcgatacgacaacacccacagggcactgcgtcgatgccggacgtcaacacccttctgcaggacaaactctccggagtcgaccgtcagtggatcggcgatatgcagcgccgggtgcagtactctgtctcgccggacagcgaagtgcgtcctgatgcgctttatttcctgtcgttctccattcctgaagacggtctgaaacagatggtgccggctgccacccgcttccatattcctgcgctgattaacggcctggtggataacaacttccgcaagacagtggaagctgtctttcgtctggcacgggagaacaatcagggcggggtgcagatagatccccggcagttcagcaaatacggtattaccacggtgccggccctggtggtgacctgtgatgccggatatgaccgtctgacggggaatctgaagctgaaagagacgctggaacggattgctgcagaaggggattgtgccgatacggcgaagaaattgctgaaggagggggcatcgtga

SEQ ID NO: 95055 - DNA, 1863 bp, Enterobacter aerogenes
gtgaaaaaacagctgataccgggcattttattgctggcaacggcggtatccgtactggccagcccgcagtatgacgaggcggcaaagtatgccggcagcgtgaagaatcaggggatgaatgtgatgaaggggaccgacccggcggcgacgatccccggctacaccgcgaaaccggatgaatccggttattacggcgggaccaccgccaccagtaatcccgacctggaaaatgccggcaacagtgagatgcataacggagaagccggtaagaccatcatggaggtcattaagaatcgcccgaaggatctcatctccaccgacgccccctttatcagcggttcgctggatattgaggacaaggctgaaaccatcatgtccggtaccgatacgcagtgcaaggatgtgaacgtggataagacccaaatcaccaattacacctgcgaacgtaccccggcggtggaactggcctgtactcgtacagccggagcaggcggtggtcactatgaacctaccacagtggtgtcgacctacaccgtcaccaatgatcagtttagctacagctatgatggcaacaaaagtgtttatttttcgttccgggctcccgcatcaggaacggttattagcgcttcagcaacgcttcatttcaatgacagaaatatgtactaccagatgacatggtggggcatcaatgaatcggtttcgggtaaccagaataaatcctgggaaatcccgggagcgccaggagctatcctgaatgagggcagcgcctccgtgcagggggtgattctgaataaaaattgtctgaatggcaatcaggggcgctgtcaggaatacgcccgtaaaacgctgaactggctgcagggtggctctgaagcgtggatgaacgtcacgctgaccatgcgtgttaccgggcagaaatgggttccggacgtggtgtggtcggagaactgcccgtttgataagaccgaccaggtgctgatcaacagcgtctgtaccgaccccggtggcgatcgcacttttaccgtcaatggtgaaaactatgttctgcacagcgactgctggcagtacaccgacacgtatgtctctcagtcggccgataacggtacctgtaacgactatatgcagaacccggcctgtaccgtcggctccacgacctgcctcgacagcctgaacggtacttgtttgcgtgagcaggtggtcttttcctgcgaggagaaagtgagcggcagtgcgcagctgtgcggtggcgaactggtctgtaccgatggcagctgtgaccagctggatgacgggaagtccaatgggtttcagtctgccgtttcggggctggccgcgctggcggctgccggtaaagatatcgccgccctgaatggcgtcaacgtctccgcctttaccggtgagggccacagctgtcgtaaggcgatggcgggtttcagcaactgctgcaaggacagtggctggggtaacgatgtcgggcttgccagctgcaacactgaagagaaagcgctggcggaggccaaaaaacgcaagctgagcatctatgtcggctcgtactgcgcgcataaagtcctcggtgtctgcctggagaagaaagaggggtactgccagtttgagagcaagctggcgaaaatcgttcaggaccaggggcgtcggggccagctgggtattggctttggcagcgggagttcgccggactgccgcggcctgacggtggaagaactgcagcgtctcaatttcgataacattaacttcgccgacttttatgacgacctggagaacggtactacgctaccggcagaccaggagctgcttgaccgcatcaaagagcagatagccgggcagatgacgggaggtggccagtga

SEQ ID NO: 95056 - DNA, 792 bp, Enterobacter aerogenes
gtgaagcgcaccctcccgatgctgtttctgttgttatccgctggcgtgctggcagataacacgccacaacaatcggcgtcttcatctaccgggacctatgtggatgcgcccattgtcgggtggcactggtacaacgaacctctgccagaggaggaggccgagccggaagatgacactgtcccgctcagcgccctgccgccaaacctgcagatgtcgttgctgcagaagctgacaaaagaaaagctcaacagcgccatattgtccccttccccggagaaagctgcggactacctgcgcatgcagtcttatctgatgaacctgtccgggcagtttacacagtcggccaaaaaggcgctgctgctgtatccggacctcgattacaacctggagcacagccgctataacggcaccgcaaccctgcagcagacggcggcccgtcagcagcagaatgatgccattcataacctgggtcagcgctatggcctgtttatgttctaccggggtaacaatccgcaggatctgcagatggcggccacggtgaaccagttctcacagcagtacggactgtcgttgatccccgtcagcatggacggtgcgcgcagcgaagtcctgccacagacccggcaggacagtggccaggcggcgaagatgggcgtcagccagttcccggccctgatgctggttgaaccgggcagtgagcagtatcagccactggcctggggcttcatgacgcaggacgacttagcccgccgcttcctcgatgtggcgacggattttaaggcacaatactaa

SEQ ID NO: 95057 - DNA, 297 bp, Enterobacter aerogenes
atgacaaaagaatgcatttctcattataagcacgaacaacagatcaggcaggagaacctgctgatgttctgtggcatggcctttatggcagcggggccagtgttctggtatctggcggggatggcgctggatgcgcgggctattagtctggggccggacaaggttgatgttcttgagtgggtcagtattgccgtttcgctattgctcagtctctgtggtgccgccctgggtctggcaggctgggggctggcgtcatggcatgcctggcgagcggtacggcagccgggaggactgtga

SEQ ID NO: 95058 - DNA, 543 bp, Enterobacter aerogenes
atgaaaatccaatatccaaaagtggcgctggggctggtactgatgctgagcggatttgtattgatggcgcacgcctcgacgctggatgagctaaaggtgctggaagccggcaagtcagaactgcagctccgggcagaggtaaggtcagtaccagagacttccactacgcctgcggggcgggcataccgtcttccggatggtcgttcgataaatactgccgattatcgactggtgttgtttatgcagtcttcctgtcatttttgtcagcagtttgatccgcagcttatccagctgtccacgcagacgggctttaaggtgttcccctatacgctggacggaaagggtgatgtgagttttccgcaggcgatcccggctccgcgtgccgttcttgaccagttctttggccccggtaataacggcgtgacgccaaccacctggctggtgaatgtgaataccctgcagagctggccgctggcgcagggggtaacggatatgaacagtctgctacaacgtattcatcaggcactggaacaaaggagataa

SEQ ID NO: 95059 - DNA, 438 bp, Enterobacter aerogenes
gtgaaaaaacgagtaattgcattctggctgactgtcagtgtgctgtatattgcgggttgttgctggctatatttcggcacgttgaattttgatgacctcgatctggtgacgtcacgcgaggattttagctatatggccgatgctcatattactgcattgcttggtgtattaacgactgctacccccgtcatgtgtttatggctggagttcaaagtcacccggcgttttggacgcctgaggttctgggtgaggcgatacggcgggagctttatcgcagcagcaatggctgcggtatttctttggttccgtagccatgctgctattgagcacccttacagcaataatgattttattattgtcctgacttctttgtggtatggattgattttaaatcactgtataatgcgagcacgccgcgcaaggataatatcaagataa

SEQ ID NO: 95060 - DNA, 1203 bp, Enterobacter aerogenes
atgaaaatagtggtcagaattactctgttgtttacatgtattgcaccactttacctcagtgcggtatatatcatgctgacactgtcaaaaagcgagtactacagcggtataaatcagcgtattgaaaccgcactctcatcagcatcgggagcatctgagccagacctgacattaatgtcccaccgtatgattacctccgatatgcaggatggtcttatctcgccacaaaatgcaaaaaaggcattcagtaataccgctggtttctttaatgaagtaaagcgtgcatgcctgaaagaaagcactcaaaaaacaaaagatattctttcctgtgcgaataaaactcttggcaaccatttttattattacccggcaagagaaactgcttctgcatgggccggacattactctgactgcgattcaaatgtttatctccttcttgatgttctgcaactgtttaataaaaccgccagcattgtgtatgccccaggccatgcctttctttcctggaccgatgaacagaccggattacctgcatggtgggaaaccacctcagacgaaaaccatggtcgcatggctgatttgagcagggacgacttataccgcaaaaccctgggttccttttattaccgcccacaatcagctcattatgctgagcaattttatgcctccgtggtaacgctggagagcctccctccagaatcaaaacaggagaggctggacctggtggccagacgataccctggaaatccgtttgttgacgatatccggtatagtctgaaaaaaccgctcacggagaccgacatcagtctgcttcatgcacagttacaggcagacgtatcctccgtgacgaaaaaatacctgctggcaaattattatctggaagaaggtaataaggctctggctacagattatatcagcaaaatcgacatcgataattgtgatactgaatgtcgcccgctcatgataatggctcatccacttagtcgcatctggtttatggcatcagatttttttagtgaggagacattgaacaatgaatttggaacgtttgccattagtaaattaaccattcccgcctccagtattcaacgttatgcttatggcgtcgctatattatttatcttgatattatccttgcgcggcgtgctcgcattatacagtgatttaaaatcaatccataccacaaagaagtcaggacaataa

SEQ ID NO: 95061 - DNA, 339 bp, Enterobacter aerogenes
atgaatagatcatttctgatgaggacggcccttgtcttctttctgctggcgatcgcctgtggctttgctggctggggcgcatggaaatactggaacgccatgttcagtgcgctcggttatggcactgtggattttgtgacgctaaatgcggaaaatcaggcgatgaaaaccccgctcaatctgaccatgtatgccatgccggtcggtttctggtgtgcagcggccggctttcttgccgcatccggtgtgtcttttctccttgatgttattggtgatattaaaacgcatttcgttgatttgtatttagccatgcgtagtaaggatgataaccatgcgtaa

SEQ ID NO: 95062 - DNA, 1368 bp, Enterobacter aerogenes
atgcgtaaaacgcttctggccgggatactggcgctggtctgtagcgcgtccgcgtatgcagatgtgaacggcgatcttaataactacttcaacaagctgggttttgaaggtaatgccaccggtgctgctgcctggcaggggcaggcggcaggttatatgaccggcggtaacctgtttctcaggagcccggtgaaacagatgcaggtgatgtcgtttaccccgccgtcactgaatgccggctgtggcggcatcgatgcctacctggggtcgttctcattcattaacagtgatcagctgcagcagttcatcaaaaacctgatggccaacgcccaggggtatttctttgacctggcgctacaaaccgtggcgccggagctgaaggacgccaaggactatctgcagaagctggcggcggacatgaacagcatgaacatctccagctgccaggcggcgcagggcatcatcggcggcctgtggccgaagacccaggtctcccagcagaaggtctgtcaggacattgcgggggaaagcaacctctttgccgactgggcggcctcccgacagggctgcacggtcggcggagagatgaacagcgtgctggataaggctggtgacaaggacaaggaccgggtgctgcgtaacaaaaacctgatgtgggagttgctggggcgtaacgccatgcttgacggggatactgaactgaaagaaatggtgatgaacctgaccgggacgctgatatttgaccgtaatggcgcggcaaaatctcttataccggaggtaaaccaccagggattactggtcgccctgatgaagggcggtaatgttgagatccagcgctgcgtctcgagcggcgactgcctggagctgaaaaacgggtccgtgaatatcagcagtaaccgcgccctgatatcgcgggtgagagacatgattggcagtatccgcgataaattgcgaactgatgaaccgctgtcagcggcggagaaagggtttatccagagtacctccattccagtgctgcgctacctggtggacccgatgcaactgagcctcaatgtagacatgctgtcctcactgtcggattacatcgcctacgacattatgctgcagtatctgaaagagctgattgaacaggccaaactctctctggccagccggaattatgatgaagaggtgatgaaaccgctgagggccaacatcagcgaatccagccgtcaggtagaggccctgcagcaggaagtacaggtgaaaagcgatgcgctggctgagatggaccgccagatgagctacctgcgtcagcagacttcaagccagctgctggatcgctatcagcagaactaccgcttcggcggcagcgaagggggcctgtga

SEQ ID NO: 95063 - DNA, 2883 bp, Enterobacter aerogenes
atggatgcggtttatgtcctgagcggcggggagttcctgacggccatctttaacggcgtggctgtcctgatggggaccaccgagtgggcctcgatgtttcgtattgcggcgctgatgtcggttatggtgttgtttgccacctacattcgcggtcatgacccgctggaggtgctgaagtttattgctttctttatgtttctcaccagcgtgctcatcatacccaaacgaacggtgcaaatcattgaccgcagtgacgccaccagtgtacatacggtcgctaatgtgccgctggggctggcggcaccggcgaagtttatcaccggtatcggtaccgccctgacggaaggctttgaggctgtattccataccccggattcagccacctacagtaaaaccgggatgctgttcggcgccaacctggtggggactgcaaccgactttgccttccgtaatggtgacctggcagagttgtttaccgcttatgtgcgaaactgtgtggtcggtgacatattgctcaaccacaaatattcgttccaggagttgatgaacagtgaagacccgtattcgctgatattcagcaagcccagcccgttacgcggcgtgatggtgccatacggtaataccatggcaaaccgggaagggttctggacctgtcaggagctggcaaccggcgtgctgcagccccagttgaccactgatactgaaaatggcggcaaaacctgggactactatgttgcccgccttaccggcggaaaacccaatgccagcgcgctgtttggcaccctgttgggtgacagctacagctattactacggtggagggagtagcgccagccagattatgcgacagaccgtggtgatgaacggtctgaagcagggtattgcctccaccagtgcgcagaacggtgatgctgccggtctggtcaatctggcctcgcagtcgtcctataccaagatgcgtctgagccaggccacgtcaaccagcattgccaccacctacctgccattgctcaatactgtgctgctggcgatggtgattggcctgttcccggtaattatcctgctggcctccattcataccctgactatggaagtgctgaaggggtatatattcacactgatatacctgcaggcctgggggccgatgttcgctatcctcaactacgcggtcagtatgtatctcacgggtaaaacagggacgctgagtttttctctgtcgaacctgtcggttatccagcagacccatgcggatattggttcgattgctggctggctgtccctctccattccgttccttgcctggggtatcgtgaaagggctgggtagcgcagtgtcgcaggccggtaactacctgggtacggcaatgaacagtacggcttcttctgaatcctcccgtgccggcgacggcagctgggcctttaataatctgcagaccgacaacgttgccggcaataagtgggacaccaactacgccagccgtagtggaatggccatgacccagatgggaaacggtgccacggcgacccggacacaaagcggtgcatcggtctacgataccaccggtgcgatttcccggctgccgaccgatattcagctggaccgttcggctgtcagtggattccagcgtcagcagcgtgaagcagagagtcagctgcagagcctgagcaactcgctgagtcgttcggccagtaccgggacctcacagctgtcgcagtgggccagccagcgagggagcagtgataccgtcagtcgtggtgctgataacagcgtcagcgcgaacgatgctgctgctatcagtaaactacagagtgccgtggcgcgttatgcgcgtgacaataatgtcagccaggctgatgcactcagaacggcaatggaacaaagccagaatatgtctttgaatgccggggttggggcttatgcgaaatttgactcgaacagacagtttgcagggaaaatagtgggatttgctaccggcgcttctgttggtggtgacctgcatggcaaggtcgattataacggccagaatggttcttctcatggcaccagttccgacatgagcaaccggaccagcagcacgaaggacttcagcgctcaggatctgaaagatatccgccatggcgttgatgtggtcgccagtcaccgcaccaccgacaacagcagccacacggataacgcctccggttcgttacttaaccagatggcagcgaccttcagcgacatgcgtactcaggccagtcagtacagcgacacacaaaatcgcagccatgaatatgcgcagatggcaagttttgtggagaacaacagtgcggccatccgtagcaatgccacccaggagtttgttgaatatgcgaaacagaatcatccggatgctgaacgtgtgctgactgacgtatccagcccgggagcgcgtgccgagcgagaggcactggctggtcgttttgtggaggaacgcatgatgccgcagctggaagcgcagttccgtgccaatcagggacgagctgcagaaggaatgggcgatacggttgctgccagtgggttacagggtgtcaaccatagtgattttgaaggccagcaacaacatatggcgcagacggctgccgatcacggcgtgaaagctgacggtgccgttgccagcgaggtgtcacagtcacgtgccgatgtgcagcgttctgttgattctgctcaagaaaaagtcaataaacagcagggtgaggtacataaacagtatactgaactggagcaggaacatcaggtgcagggacgccagtttgatagcgcaaataaggcagaacatgtgcggcaggatactgtgttcaatttgtctaagaaagaaaaagcgaaacaagcattggatgatgctatggatgaattcaaaggtaagtaa

SEQ ID NO: 95064 - DNA, 579 bp, Enterobacter aerogenes
atggttctaaaaagtgaaattgagaaagatgtccaacatctagtgacatcattgaaagatgattacagaattccatcatcaggtgaaataatatttccagtgattaaagttttgtctgttgtctatttcatgcatgtggtggcaatcattgccaatgaattttactacgatgaagatatatggtttcccggtgtggtgatgtggtttgttctgtcatgtgtaatattgacagcgttggcgctggtgatgacttatggaaatttgtcattactgatgtgtatcccaaaggaagtgcgcaataaatcattgcttatcagtattggcaagaaaaaactgatgacttatggctatgtgactattgcgattaattttgttgttgccattatacttataactggaaatcatgagtttatctttggttatggaatatcctggtttgcttgcatgattatcggtggaattaccttcagcatgtccatgagccgctatatgacgccagctgttgtcgctacgatcgataaaattcgccaggtggtctccgtgggagaaattgagccatcaaagccagccagtgagtaa

SEQ ID NO: 95065 - DNA, 231 bp, Enterobacter aerogenes
atgagttgttctgataacgtcagttctgatgtcgtattgcctgaagaaaacatttcgtcttcgcgtcagacaggaatgggatacgcccatataaaccagcttctgccgatgatgaaatggaataatgatgacctcattattatttatgatccggctgttgcatttcggaatgcaacttttgaggagatgattatctcgctttcatgtgaacatgccggggagcaaaaatga

SEQ ID NO: 95066 - DNA, 2181 bp, Enterobacter aerogenes
atgagttccaccaagcatattacccagggcggacaggtattcagctatatgctgaatatgtttatgcaggtcaaccgccgtattgccttctggttattgaatcttttctttgtgctgacaccgttatttttctggatgcgggtgccgtggcaggatatgcgtaacggcggactgtactggtggttatatctttccgctggcggtgaaaaagcgttgttcaatgtaccgcccgtatatgatgttccttatgacgggaaaatcctgcattttacctctgcagccattctgaaagacccctatatgacctatgccggtcaactgacgctgcaggagctgtttattgcggtattcctggcgagctgtgtggtgctggcggtggcttatggcgtctattaccttctacgccggctcggcgagaagcaggcccaggatgatctggtgggcggccgttcgctcacggaggacgtaaaatcagtggccagaatgctgcagaaagagggtaaagcgtcccccctgcacattgaccagttgccgctggtcaatggtgctgaagttcagaatatgttgatgcacgggactccgggggccggtaaatctaacgctctgaacaagttgctgaagcagttgcgacagcgcggtgacatggtcattgtctacgacaagggctgttcattggttaagcgtcattttaatgagaatgtcgacaagctgctcaacccgcttgataaacgatgtgagttctgggatctgtggctggaatgtcagagcactcctgactatgactctatggggaatacgctgatcccccagggaaccaaagaagatccattctggaccggggctgcccggaccatcttcactgccgtgtcatcccgcctcaaaaatgaccctgaccgttcgtataaccggctgctacgcaccctgctggccattaaccttaaggcgctgcgcgagtatgtcgccggatctgaagctgccaacctgatggaagagaaggtggagaagaccgcaatttctatccgtggtgtgctgaccaactacgtgaaggcattgcgctacctgcaggggattgagcggaccggtaagccccgctttgccatcagggaatggatgaaacaggtgaatgaacctgaccaacgtaacggatggctgtggatcacctcgaatgcccgccagcatgagtccctgaagccgctgatctcgatgtggctggcccaggcggctaactgcctgctggagatgggggagaacccaacccggcgggtgtggtttatttttgacgaactgtactccctgcacaaactcccagagctgccgggcgtcctggcggaggcccgtaagttcggtggttgctttgtcctcggcttccagaacaaaccgcagatggatgtgatttacggttctgattttgccaccgccatgatggatctacttaatacgcgtttcttttatcgttctccggatgaagaagtggcgagctacgtgatgcgacagttgggtcagcgccgggcgaaggtgtttaacgagcagtacagctacggtgcagatactgtgcgtgatggggtgtcgttcagcaagcaggaagaagatcagtatctggtcaactactctgacattcagtccctgccggatttgagctgctatgccacgctgcccggaaaatacccggtggtacgtatgaatatgacctacgaaaaaatggattttatcgcggcagagtttttgccacgggagctgaatgacagtctggatcaggagattgaagaggaaattacccgtcgcgagctggatgaagacagcatcgacaggttgcttgcggtacagagcagtgagcctgctgtaccggcaacaacagcatcagctgctgccgtatctccggccattgctgcaacagaaaccatcaattcatcccctctgccgccggccgctgtatcgtcctccgcatctgacatccaggcaacgaccagtccggtccagaacggtggccgggtgaaggaatatgacggactgcaggtggatacgcagaccggtgaaattctgactgagccagatcgttacgaagactatgcggcgtacgagcaggaggccctgcaggcgatgcgggaagaagagaaaaatatcctcgttcaccgtgaacatgacgaaccggacagggagtatgagccgggggaccgctggtaa

SEQ ID NO: 95067 - DNA, 5145 bp, Enterobacter aerogenes
atgctgaccgtatcatcgacggctggcggcggagccagctactacatggcgaaagataattattactttctcggcagtatggaagcgtcctggatggggaaagccgcagagctgttagggctggagggccccgtggatgcgaagacattcgatgatgccctggcaggtttcttcccgcagggcgtcgatctctcccggatgtcgggcggtcagaatgttcaccggccgggttacgatctgacgctgtcggcccccaaaagcatttccgtgctgggtgtggtactgggcgacagccgtattctggaggcccatcagcgtgctgtcggtgtggccatgggggaaattgaacgactggccagtacgcgagtcatggtggatggggtcagccagacagagatgaccggtaagttgctggccgccgctttccatcatgacacctcgcgtgagcttgatccgcagctgcatacgcacctgatagtgatgaacctgacggagtacctgggggagtggaaaaccctctccagcgataaggtcggcaacagcgggtttatcgagaacgtctatgccctgcaggttgcgctgggcaaaatttaccgtaacgagttgcgtcaggccgtggaggagatgggattccggaccgtggtgaccggcaaaaacgatctgtgggaaatagagggtgtcccggtggagatattttcacagcgtacacaacaaatccgggaggccgttggtgatggcgcttccctgaaatcccgtgacgtggcggcgctggatacgcgtaaggctaaacagaaagatcccgaccgggttgaactgctgaccgactggatgaaccgtctggagcaggaaggattcgatatcggcgcgtttcgccaggaggctgaagcccgtctgaaggctatggatagtgacagagcaatacgccctgagacgaccccggacgatgttcgtcaggcggtaagcctggcgatttctcagcttagtgaaaaacgtacccgttttacctattccgatgtgctgaaccggacgctgaacagtctcgatgcgcgggagcagattgcggtgatggcgcgttctgccattgaactggcgattgaggagcagcagctgataccgctggatcgggagaaaggtctgtttacctcctccattcatctgctggacgaactgagtctgcagcaactggccggggagatgaaatccactgtggtggtctctggcggtgttcccgcccggtcctcttcgtctgcaccggtgatgcagcagattgaagcagaccgtccttcactggcgattgtcagccagcccggaggcgcgggcggtatgcgtgaatcggtgctggcaggcgtgcagctgacgcagtcacaggggcgggacgtggtggtgctggccaccgaccgcagcagtgagcgctggctggctgagcaacccgggctgacggataaagtgataacgcttaaagggctgtcagaggccccgttgccggcgaacagtacgctgattgtggccggggcggagaagctctccgtccgtgatgcgctgacggtcgccgaccaggcgcttcgcgcacagtcgcagcttctgctgatggacagcggcgggcgcagcgggacaggtaatgccctgcagacgctggaggcggccggggtgacccgctaccgggtggaaacggaacgtaccgtggccgtcagcgtggtcagtgagccggacaagcgccagcgctatacggcactggcccgggattatgtggcgatggtgagccagggagagagcgtggtggcccaggccagcggcgagcgcgagcagcagtcgctgacggcagagctgcggcaggcgctgctggaaaaggggctgctcgggagtaaaacagcgaccatcgacacgctggttccgcagtggctggacagcaaaaaccggcgccagctggatacgtaccgggagggcatggtgcttgagcaacgcgcgccggacagccgggtacctcagcgctataccattgaccgcgtcagcgcggagacccgttccctgatgctggtcggtgaggatggccagcgtcaggggatgaagctcggtcaggtggacagcagctggagcctgtaccggtcacagaccgttgatattgccgaaggggagaaactgacctggctggcgcgacagggaaaacaacgtgccggtgacagtgtcacggttactgccgtgcggaagaacagtctggtggtggagcaggacgggcagaagcgcgtgattcgtaccgacgaaccgctgaaggccggatacggctacgttacctcaccgggaaagcgcgtcagcgagcagggcacggtgctggccgcagtctctggccgggataccggggcgacgatgcttaataccctggcccgcagcggcgaacatatacagctgtataccccgctggcgaacgatgaggctgaacgacgcctgtcccgctcgccgctgtaccggaccgcgctggcgcaggttaacccgcagaacggtgagctggctgccgcgctgtcggcggcgcaggaggcgctgatgtcgacggcagagaaggcggtgcgtcaggcggtgtcgctgacacaggggagtgacgtggtgttcagtcgccctgatgtactggcaaatgcccttccgctgcacccctcgctgcgtcagggggatgtggaccaggagctggcgcgacaggtgcagaccggggaaattatcccggtgccgggaccgaaaggcatcgcacagcagctgtatgtgacggccgcaagctatgaggcggagaagcgcgtcattcgtctggtggtggaggggctggacacgcaggcgccactcctgagccacgccgacccggcgttattcgccgggttgacgtcaggacagcagcaggcctccggcctgatactggagagcactgaccgcttcatcggcatacagggctacgccggggtggggaaaaccacccagctgaaaaccgtactggcggcccttgatacgctgccggcagaacagcgtcctgatgttgtcgggctggccccgacccaccgggcggtgggcgagatggccgatgtgggcgtcaaagcgcagacgctggagagcttcctgatggatatggagcgccgtattcagggcggagagaggcccgatttcagtaataccctgttcctggtggatgagagctcgatggtgggtaaccgggatatggccgatgcgatgggctatattgccgccggtggtggccgagcggtgctgagcggtgaccgggaccagctgctgccggtggataacggcgcgcccttcaccctgctgcaggaacgcagccccttagataccgccatcatgcaggatattgtgcgccagagtccggcactgaaaccggctatcgaatcggtcattgcccgccaggtcccggcggcactggacaccatccgcagcgtgacgccggatacggtgccgagaacgccaggccgctggtctccggggcaatccgtggtggccatcccacagacgaaagaacagaaggaagagcagggggaccgggtgatacaggccatcgtcgatgactttaccggtcgtaccccggaggcgagggacaatacgctgattgtcacccagaccaacgccgacaagaacgccatcaataccgccatccacgctcagctgcaggagcgcggtgagcttggtcgggaggtcacgattaccgtactggaccgggtgaaaatgcagaccgacaggctgaagtcggtagcagggatggctgcgcagcacggcaatattgcactgattaacgaccgttactacaccattcgtgccgggcaggacagccgccagaatggctatgtcgaactgattgatgagaccgggcaggcacaggcgttgtcggcctttgagagcagtctgcgggatatcgcggtgtttaaaccccgtgagattgctgtatcggtcggggagaaggtcagtttctcccgttctgaccgcgagcgcggacgcgaagcgaacagcaactggaccgtcaccggcgtgacaaaagacggcgagctgcagctgactcagggggaggagagccgcatcctgaacccgaacgccgacctggccgaccgtcatctggactacggctatgccggaacagcgcacaaggcccagggagccagcgcactgtatgtcatcgtacttgccggcgtggacggtggacgccaggcactggcctccctgcgcgatgcgtatgtcggtctgtcgcgtgtaaaagcacatgtacaggtctataccgacaatctgggcaagtggctgacgaaggtctctcagcctgcagagcggcagacggcccacgatgtgttgctggccgacaatgaccgtcaggcagcgaccgcacagcagctatgggaaaaggccacgccattgtctgacagcgccctggggcgtgcgctggcaacgcagctgccggaggcgggcgaggcccgctttatccacggcagccggaaatatccggcgccgcatgtggcgctgccggtgcatgatgccagcggcgtgcagcgggcagtattgttgcgggaggtgcagcttgatggcgatggccgattacgaggcttaagtgataacgcgcgcctgctcgggagtgaagatgccacactggtgatattccggcaaagcgaaaccggcctgacccgtcaggccacggacctggcagaggcccgacagctggggcagcagcatcccggcgacggtattgtggtcgtcagtggtgaatccccccccgatgccatcatgaagcgtctgagtggtggtctggtcctgtcggacagcgccagcgctgatatttctcatcacccggccgacacgccggacccggtcagcctcaaaacgccggaagagcagcggatggcgaaggcgctggcagaagaggcacgacgccagcagcagccggaggctgttccgcatttacctggtgacgccgaacgtcaggatgccctgcaacaggcagagcgcgctgaatcccgtgcgctgcagcgtgaggctgaacagtcccggcagcaggagcaggccgggctgagtcaggtcatacagcaggatcgtcaacagacgcgtcagcgggaaagcgtgaccgaccagcttcaccgggttgagcgcgagatagtgaaagagaaagaaattggtgagtaa

SEQ ID NO: 95068 - DNA, 684 bp, Enterobacter aerogenes
gtgaatgatgacaaaacccgtccgcgcctgagcctgaagcgtaaggccccgccagcagacacgtccgcgcctgccagcgaggcggaggtgggcatcacggtctcccgacggaaaacggtggtggtgaacaccgggccaaaacgcaataaaaagccgctgccggatgacagaccgcccgctccccggatgcctcagccgggcaacgggcaacccaaaaagacaaagaaaaaaaagcagcctgcgcctccacccaacaaagcggtggaggtaatacctcctccaccgaagaaaaagccacgccctggccgttcggcgcggctgatgcgcccggcggacgccgtgcagacgctgagtacacactggccgggcctgtacgctggcggccagctgcgcccgctggccatcggggtaagggaacagctctttgccgatgcagaacgccgggcactgccgttgtcgaagaaggtaatacgccgctgtctgaaaacgctgacgcggacggaaacgtatctgagcggcctgacggccggagtcgcatgctacaacgcggatggctctgttgaatcgctcattccgcctgagcgtgaacgtgcagccacggcaaagcttgcgagggtgcgggcagacaaaccgaagaaacaggcggcaaacgcacccgccatagatgaaaaaaaggaacattaa

SEQ ID NO: 95069 - DNA, 801 bp, Enterobacter aerogenes
atgttaacagtaaagcgcaccgcactggcggtgctgatgaccagcgctctgttgtccggtatggcaaatgcggcggagaaagccacacctgtctttactccggagcaggaggcccgcattggtgaaatcgcgaaagactacctgctggctcatcctgaagtgctggttgaggtcagtcagaaattgcaggcacagcagcaggaaaagcagcagcaggcgatgacggcggccgtgattcagcatcaggccgcgctactgaacgataaaggcacgccatcatatggccccgccgatgccaaagtgacggtcatcgaattctttgattaccagtgtatctactgtgcccgcctcgcgccggagctggagaaggtgataaaagccagcccggacgtgcgctttgtgttcaaggagttcccgatatttggccagcgctggccgacgtcgctgagtgcggcgaaaaccggactgcaggtctggaagcagaagggggccgatgcttaccttaactatcacaatgcgatttacgccaccggtcacaacgagggtaagctgaccgatgctgatatcagcgcggcggcaaaagccgtgaaatttgatgcgaagatagcccatgacgttcagggaaccctggatggcataaacacgctcgcgcagcagctgggcttcagcggtacgccagccctggtggtcctcccgtcaaccggcgccagcgctgataacgtgaccgttatcccgggatacaccagcgcggaggtactgcagcaggccatccgtcatgcagccggcaatacaaaaaaataa

SEQ ID NO: 95070 - DNA, 546 bp, Enterobacter aerogenes
atgcgtaagttcacctttcgccagctggccgtgtccggtctggtctgcctttcgctgagctgtcttcagtccgcagttgctgctccctccgttcaggtcggtttttcacctgaaggcagcgcgttgcagctggtccttaagactattgagtcagcgcagcacgacattcggctaatgggctactcatttacgtctccggaggtggttagcgcactagtcagagcaaaacaccgtggtgtggatgtgaaaatcgtgcttgatgagaagggaaacagaagcaaaaccagccaggcggcgatgaacgttgtggtgaatgccggtattccgctgcgtaccaacggccactacgccatcatgcacgacaaagtcattattattgataatcatacagttgaggctggtagctttaactacactcgctctgctgcatcgaggaatagcgagaatgtgctggttattaatgaggtgccggaagtggcacaaacctaccttcagcactggcagtcgcgctgggacgggggaactgagtggcattcttcatactaa

SEQ ID NO: 95071 - DNA, 279 bp, Enterobacter aerogenes
atgtcgcaggtcgaaaatgcagtaacttcctcatcgaaagaaaagcgttcttaccgaaaaggtaagccgatgtcggcaagtgaaagacagcttgccgcgattgcgcgtaaacgtgaaacacataaagaagtgaaggtctttgttaaaaatcctcttaaagattggatgattacgatctgtgaagaggaaggactcactcaagcgcagtttattgagaccttactcgaacgtgaactttctgaacgtggtgttctggatgtaaagacttcacattcttga

SEQ ID NO: 95072 - DNA, 552 bp, Enterobacter aerogenes
gtgactgaccacagccaatcacgatctaccaattatgttcaggtaaaaaatcctgaacctgttttcacagttcccctggactactctccttggcctttcgcgttgaaacttatggcaaaagccgatggtttcactgaaggtttccattttgatattgcatctgcaatattgcgaagggacggaaaacgtaagcgtaaaccgcctgttttgcgccgcagagcgatgaatgcgttgctcatggcgatatgcttttattacgatcccctatcaaataaggttcagcgctcactaagagagatggcctttgagtgtgggttggcgcgtcatgctcttactggcgaagtttccattgaaagggcagtaagagctctggaatcgctagaaaaggattttggattcgtttactgctcctcggcaggttatgcaactgccgagatttttttcaccccgaagctgttcgagtttctgaacgtattcccgcagtctctgagtgaagcgaagctgaagtgtctggccgcgaaaagcagtggcagggagagtgcagatgagtaa

SEQ ID NO: 95073 - DNA, 1020 bp, Enterobacter aerogenes
atgagtaattcgcacaatccgcaacactggagtcagctcgatacggaagaccaaatccgtttctggcagggcattgatgatggtcaggtagattcttttctggtttctccggagaagaagcgtactcgtcgtcgtcgcggtgaacactccacaaagcccaaatgtgaaaacccgtcctggttccggccatcccattacaaggcgctcggtggtcagcttggtcacgcctataaccgtctggtgaagaaagacccggttacgggagagcaaagcctgcgtatgcgtatgtctctgcacccctactatgtccagcatcgggcgaaagccgggcggacatatgctttccgaccggagaagcagcgccttcttaattttctgtggctcgtcatgatcagtttttgtgatgccggtaagcacacggtagggatgtgtatcagcagactggccagagaactcagcccgaaggatgcaaaagggaatgtcatcccggaaacggaggtcactgtctcacgtctttcgaacctcatcgctgaacaggttcgcttcggcgtacttggcgtgtctgaggaaaccatctgggatcgggagtcccggaagcggctgccgaaatatgtctggataacgcctgtcggctggaagatgctgggcgtggatttaatgaagctgcaggagcagcagcagaagaagctccgtgagtgcgaggaacgccaggccctcataaaagaaggactgttaggtgagcatgaggaaatttccgtccacagggcgcgtaagcgctggtacgagcaacgcagccgtgaagccctgagataccgtcgggcaaaaggtgcggcccgtaagcgcgccaatcgtctggccagaatgccgagagacaggcaggtctatgagatgacctgttggctgaagaagacgctgccggcagatgagctctatgcctattctgatgacaagcttgagcgcctggccatccggcagctgtaccagctggagttagcgctgagccacccaccgccacattaa

SEQ ID NO: 95074 - DNA, 672 bp, Enterobacter aerogenes
atggccgtagaggatgccaatgcggtgacgattgctgactatgttgacgatgttcgagcctgggtaaaagtgcttagacgtcagatgtacaacccctgtatttggattttagggcacagcgaaggaggcttagtcgcacttgcctcggctcaggaagaggatgtgtgcggcgtggttcttatcgcaactcccgggaggccgatgggcgaggtgttgaggggacaacttaacgctaatccggaaaacgagatgttattaaagcaggcactgccgataattgatgcactggagcatcggcgacgtgtcgatattacaaatatgcatcctgcactgcaaaatctctttaatccttcggttcagggatttttgatcaatgcgttttcatataatccttgtcagctcatttcgaccatttccaaacccgtgttagtgctacaagggcaacgcgatctccaggtgaaagatacggatgcaagactgcttaaggcagcgaatccccaagcgtccctggttatactgccgaatatgaaccatgttatgaaagaggtgatttcggacgatcgcaaggtgaatattgcttcatacgctgaacccgcgctccccttagcacccggtttaatcgactcgattgagcatttcctgagccacaccccaaattctgccaaaaactaa

SEQ ID NO: 95075 - DNA, 186 bp, Enterobacter aerogenes
atgcactttaatctgccgctcgatatttcttacctcctcacgcagggcatcacccagcagaacatcacgccgtcgcaggagtgcaccgagatatctgatttcgggtgctggcggctcccaacggtgagggttcttaaggaatgcgtagcaggtcagcatgtacgcgtccaccttatttgcttatga

SEQ ID NO: 95076 - DNA, 153 bp, Enterobacter aerogenes
atgcagtggttcgaagccgcagacctgatcgttaaaggcatggaaggcgctatcgctgccaagaccgtgacctatgacttcgaacgtctgatggaaggcgctaaactgctgaaatgttctgagtttggcgacgctatcatcaaaaacatgtaa

SEQ ID NO: 95077 - DNA, 204 bp, Enterobacter aerogenes
atgactaaagatcaaaccaaagaacggtgcagagacctttatcttgcatgggatgggcggcatcaggacggacctgcgaagggtatactttttcaggcccatatgcgtgaacagtctgacttttcctcgttcacatatggccgcgcaggcatgcatcaagtagtacaggggtgggtggacgagtgggatcaaatctttaaataa

SEQ ID NO: 95078 - DNA, 132 bp, Enterobacter aerogenes
atgaaccagacgctcaaacttcttgccttgctgctgctcagcggcacgttgcttactggatgcaataccgcccgcggttttggcgaagatatccaggggttggggcatgccatttctcacgccgttagctaa

SEQ ID NO: 95079 - DNA, 687 bp, Enterobacter aerogenes
atgctcaggactttatttaaacttgtcttcccctgctttttactgataagcggcattgcacatgccggcattgtcattgaatctacccgttatctttacaaagagggttcccgcgaaataaccgcacaaatagaaaacaaagacggtattccctacttaattaaatcctgggtcgagaccccgaaaggacaaacgccgtccttcatggccacgccgccactgttccgtctggaagcgaaacagcaaaataccgtacgcctgttttcaacgggtaatgtcgctgtgccaaccgatcgcgaatcgatgttttattttaacgttatggctataccacccgcagatgaggcaaatgccaaaaacaataccattcaactggcggttcgccatcgtatgcgtctggtgtatcgaccaaaatcgctatttgatatgaaaccaaacaccgaagcggcaaaactcgagtggcgaaagtctggtaataaattatccattaaaaatcctacgccatttttctactacttcaatacgataaaaatcggtaataccgagataaaaaatgaagtgaatgctatccctccgatggctacaaaagaagtgacattaaaagaaagtgttaacgcatcaagtattacatggaagatagtcaacgattatggtggagccggttcgctctattcctcaccgctgtaa

SEQ ID NO: 95080 - DNA, 363 bp, Enterobacter aerogenes
atgaaagaattaacagtttttgaaatggaagcaatctccggtggatatacgtgggatttttcctccgcttcagcagcgttcacttctctggctagtaatgcagtagaagcgctcggtgctggtatcctcggttctgtcattacggcctgtgtcggagcgggacttggcggctttcagggtggttctaacggtggcgtcctcgggctgggtctaattggcaatgccgttggcgctgtcgcaggctttatcttaggtgctatcggcggagccgtaggcgctgtcgcattaggttgggaaggttccgttgaggctctgcaatcactgattgagagcacgcttaacggcactttcgctccgtggtaa

SEQ ID NO: 95081 - DNA, 1257 bp, Enterobacter aerogenes
atggcgctcactgacgctaaaatccgtgcagctaaaccggatgaaaagccttataaacttgcagacagcggcaacatgtttttgctcgttcaccctaacggctcgcgctactggcggcttcgctaccggtttctgggcaaagagaaaacgctcgctctgggtatctatcctgaagtctcgttatcagaagcaagggaaaaacgcgatacggcgaggaagctgatagctgagggaactgacccgtgcgaacagaaacggatcaaaaagtcagtccccgaagcagcccagacatttgaaggtatcgcaaggcagtggcataaaagcaacaaaaaatggtcagattcacacagtgagaaaatactgaaaagcctcgaaactcatgtgtttccctttattggctcacgtgacattaccaccctcagaactcccgatttacttgttccagtaaaggcagccgaagccaaagagatctatgagattgcagcgcgccttcagcagcgtatcactgcaatcatgcgctatgctgcccagtcaggcattatcacctataaccctgccgtggatatggctggcgcgttagccacggtgaaacgccagcaccgcccagccctcgccttaaatcgcatttcagagcttcttgaacaactggatgcatacagaggacaacctcttacccggctggcaaccaaactcaccctgcttatcttcatccgttccagtgaactgcgctttgccagatggtctgagatcgacttcaggaaagccatgtggaccattcctcctgagcgaaaacccattgaaggcgttaaatactctcatcgcggatctaaaatgcgtacagagcacctggtgccgctctccggtcaggcgctggatattctgaaacaaatccacactatcagcggtgagtacgaactgattttcacaggtgatcacaacccgtggaaacccatgagtgaaaatacagtgaataacgcactgcgtcttatgggctacgatacaaaggtcgatgtctgtggtcacggcttccgtgcaatggcctgtagttcgttgattgagtcaggattatggtcaagagatgcagtggagcgccagatgagccatcaggagcgaaatggcgtacgtgcggcttatatccataaagcggagtttctggatgaacgcagactgatgctgcagtggtgggctgattttctggatgcaaatgaggaaaaaacagtgagcccgtttgacttcgcaaaactccattctcgatag

SEQ ID NO: 95082 - DNA, 1497 bp, Enterobacter aerogenes
atgaggatgtcaactgatcaccaaaaatattcgctagataatcaatctggatacataagggagtatgcaaaaaaacataatattacgataatcaaatcatacaatgatgctggtaaaagtgggttgaatctttcaggcagaccaggtctgaaagcgttaattgatgatgttttagagcatcgtatctctatatcattaattcttgtttacgatgtcagtcgttttggtcgattccaggatactgacgaagcaggccattattcgcaccttcttaaattaagaggggtcaaaattatttattgtgcagagcatttctctgaggctcagcctgaaatgttcactctgggtctggcgttatcacgacatggcgcagcaagtttcagtcgaaaccagtctgagaaagtttttctgggccaggtaaaccttattaaaaaaggttaccaccagggggggcttgcaggttatgggctcaggcgtcttttaattgatgaaaatcataaccctaagggagaactgaaacacgggcaacgcaaaagtattcagaccgatcgggtcattctgacgcccggtcccagggaagagatcagcctcgttaatcgcatcttcgatatgttcaatgacgaaggtaaaccagaattagtcatcgcctctgaattgaatcgcaggcagatccttgctgaaaatggaagttgctggagcagagcaaaagtacatcaaatcctgaccagtgaaaaatatataggaaacagcatttataacaaaacatcgttcaagctaaaacaacagtatgttaccaatccagaagaggactggatacgttatgatggagcttacacccccattgtttcggttgaaaaatttaatcgggctaacgaaattatcagatcgcgtgccgcacggctatctgaggatgaactgctggagaaattacgagttctgttgaaaaaaaaaggaagattatcaggcattatcattgatgaagaggaacttcttccatccagcagtatttatcgctctcgttttggcagtctcttacgtgtataccaattaatcggctacactccagagactgattacacatggttaaaaacccaaaaactggttaacgagtttaacgacaggtcaacaaaaaaaattatcgataacatcagtcatgaaggggggtgggtaagcgatacaccagcaccaggaatacttcacattaatgatgaatttactcttgctatacagtctgcacgctgtcagcgcatcagcccacaaagactacggtggaaaataaaattcaggacaatgttctcacctgatatcagtattgccgtgagaatggacagttcaaatcagtctgccgttgactattatatatttcccgcgatagatattctctccgagaaaatatcattagaggaaagcaatccttatcaactagacctgtaccgctttgataacctagcccctttttaccggctaataagaagagcaaaattaaaggactcatga

SEQ ID NO: 95083 - DNA, 867 bp, Enterobacter aerogenes
atgtctgatgaaaaagttgtacttatcgaaacaaacaaaatactggtcgttaaccctcgccaacgagataagttcacacataaagagattaaagagaacattcgtcaaattggcctaaaacgccctgtcaccgttcgtagaattgttcacaacgaatatgaatttgctttaatctgtggccaggggaggcttgaagcttacatccattatcaggaagcatacatccctgcgatcgtaaaagacgtcagtgaagaaacaggccacctgatgagcctcacagaaaatattgccagacggaaaccacgggcaaccgagcttctggacagtgtaaggcagttaaagaagcagggattgactgacaaggagattggcgagcgactgggatacgtagtaagttgggtccagggcgtaagtagccttcttgagaaaggtgagaaaaaattattggctgcctttgaggccggtaatattcccctgtaccttgcggtagagatttcccgggcgaccgatgagtcgattcaggactccctgacagaggcattgctgaacggtactatcaaaggtaaacaaattaacattatcaagcgaattattgataatcgaaaaaatggaaataaaggttcaactaataagacattctcaacgaagcgaattcaaaagaaatactctgcagaagaactcgcttcaatgtatcaaaaaagttcagatgaacacaaagaaatccaggctaaagcacggtactcccgtgaaactctcatgctgctaaaagaaatattcaggcaacttactcaggatagttatttttgtgaattattgaataaaaacaacattactgacatgcctgaaatattatcccctgcacgataa

SEQ ID NO: 95084 - DNA, 573 bp, Enterobacter aerogenes
atgctccagaaagcggttgaatctggcgtatcggtggaaaaattgtgtgccgttcttggattatctcagggaataattaataccagactccgtatttccgaaggaatttcgaaggaagcactcgcgttactggctgataaaaacgtatcgcaaaacgtattcgatgttcttaaaaaaataaaactccacaaacagatggattttgtgtcaacaatggtgacattgaataattttactaaaaaattcgctctatctatgttacatgccttacctgctgagtatttggtcagaaagccagataatgctcctgatgataaagatatgatcaaaacgcttgcacgacttgaaaaggaaatggcagcgcttcaagttgaaacgcaagatatcgagaatgaatttgcagaaaacaatctcaacctgatggttgcgagatcgtacattgcaaaacttctcagtaagaatgaggttattcattggttatatgataacaaaagtgagtatcttgacgtcctgaagaaggtgctgggggttaaacatctgaacgagattcagcctagccagcattctgtctga

SEQ ID NO: 95085 - DNA, 3204 bp, Enterobacter aerogenes
atgaagcaatccgcttacaccgccattcaagaaaaacgtctacagccctggaagggtgaagaagaagtacggtttgcctggaataaagcgttagaagacgcaacgggattgcatatttatgcagagcgtgaacgtaatgatgcaagttacaaccacgtcataattgaatataaagcgcccgggctcttcaacggaaaaaaaagtagtcctgcgtttctgaatgcaaccacagaaagactactaccgtacattgttaaaaaagcgtctcaaacaaaaattcctgaatccgatttcattggcattgctattgatggcgagcatatttgttttgctcaggtaattgatgggcatatcataactcaacatctgatgccatttactcctgaatccgttcagatggtcgttgatgcgcttcgttcggatacccgcaaaggtttaactacagaaaatctgttggctgattttgggcatggctctgcaaatgccagggctttcatgcaacaactctctaatggtttatggcaacaactcactgacagtagtaataacaaaattaaaatgctctttgctgagtggcgaacgctatatggtcaggttgccgatctttcagttcttcaagcagaggccatcaccaaagaactaaaatttacctggcccggctcaccatctgactcgatttctgcacggctttttgtacttcatacttacaactcaatgcttataaagctacttgcagctgagattgtatcagcgcatgggcttacttcaatcgctcacccagctcaaagcatggcagcattgatggacgatacacagatgttggaatttatcgattcagccattgagcgctctgcaattttccaggaagcgggaatcaatggttttgttgaagaagccattttcagttggtacctcgatgttgccagcatgcatactgttcctgaactacttcccactttaagacggctactttctgttatgtcgctctatcgcttggatcaactatcacagacacgcgatgtattacgcgatctgtatcaaggccttgtgccaggcaaattacgacagagcttaggcgaattttatacgccagattggctggttgattttacactggaaaaagtcagcactccggaacttcttactcacagagtcctcgacccaacctgcggttcaggtgcgtttcttctggctgtaattcgcaagaaacgccaattagcaaaggcaaaaaatctcagtgcaaaagaaaccctagaacttctttgtaaaagtgtgtggggttttgaccttaacccactggcagtgcagacagcgagggtaaacttccttatcgaagtagctgatctactatcacaatgccctggtcaggatttggaagtaccggttctaatggctgatgcgatttattcacctgcagctaccccagatacatttgaaccagtaattaagtatcgaattggcagtcaggttgcaaaactggacattcacttacctgcagcactggcactcgatcgtgtcagccttgattacatgtttaatcgcatgggtaaagatgtcgaaatggatatcgagtttgatgagtgtgtggaaaagatccgcaaggataaattcttcactgaaggtctgcctgatgaatgggataaacccctgcgctatacgtataaccaaatcctgacgctacatcgccagaattggaacggaatatggttccggattgtccgaaactttttctggtcggcaactgctggagagtttgatctggtcattggtaatccaccatgggtaaggtggtcaaaattacccgacctgtatcgggagcgagtaaaaccaacctgtgagcagtatgggattttttcaaaaactcgtatgcacggcggcaatgagctcgatatatcagcaatgattacatatacggttgcagataaatggttaaaagctgacggtcgattagtgtttgtcatcactggcacgctattcaaaaatccttcatcagcgggctttagaacattcaagattgaaccttctcgagaggattcttttttccttcaaccagaatctgttgatgacatgaaaggcctaaagccttttgaagatgcaagcaatcatacaacaatagctgtattcaaaaagtcagaacacgagccatattatccaattccatatcgtgtgtggagcccaggcataggtcataaacgagccattaaagcctctcagactcttgaggccgtcatggatactatccggtatgacgaaaaagaagctttcccagtaaatgaagcgggttcaccttgggcgatccttacgccagatcgtttcgataccattaaatatttgtctcgccaatgttcctggacaaagggacgcaaggggatcactactgatcttaatggcgtattcttcgttcccatcctaaatgtaaatgataagtacgttcagattagaagccggccagaggcgggtaaaaaagacattggtccggtaaagcaagcctgggtagagcctgaagatctatatcccctgattaagggagcgagcgattttgaagaatgctatctaaaaatcagcgcaccaggaataaataatgaagctcgcctgtacacgttcgtgccgaataccgggatctctaatgctgattacatcgaatcagcagagcgtatgaaccgacatgaccacaagaaaaccgcagcctggtttgattcatttgaaccgttgctgcaggcacgctctacataccgacgacaaatgaaaggcgctccctttcatgcagtttataacgtaggagagtacacatttaaaccgtggaaagtaatctggcccgagatgtctccatccttctacgctgcagtagccggaagtgctgatgtccccttggtaggtacacgcgcttatgtccctgatcataaggtgtatttttctgcatttgatgatcgtgagacagcgtgttacttatgcggactattgaattcagcaacagtgcaagaatggattaacgcacacaatgtgtctattcaggtcgcagacgtattcaagcatttagatttaccagagtttaatcagaattccagtcagcatgttctgctggcagagaaagtgctatctgctcatctggaacacgatgagaaggctcgcaaacttatagttaaagaagtgaaaagattagctgaagatattttgactaattggagtaagcagttctccggctaa

SEQ ID NO: 95086 - DNA, 2334 bp, Enterobacter aerogenes
atgaaatggcaaatatccaggattgaagtctctagtttcaaagcattcaaacatattttgctagatcttggcggggcgtcattactaactcttgacggcccaaatggttatggcaaaacaagtattttcgatgccatcgagctactgcttactggccagatcaatcgaatacaaaacctattcaatacattattaaccagaaacaagagagactatgcagacaatcttttctggaacagtcgttctggatataacgatctctgcatcaagattgaattcattaatgatggtcgaaaacttgttttagccagacattgccctgcagagatattcaaaaaaccagcaaacaatcgcgcagacaaatatggaaacttcaagctttacgagctaccagaattcgaatcatctgaattcactaagaataatttccgcgataatagcttccttgacgaaattttcggaaaaaatttcagggaaaacttctcttttcttaactatctcgagcaaggccaaaaccggcttttacacactcgggtagacgatcgtaaggagaaacttggaaacctctttaacatcagcgatatcgaagccgagatcgaaagctgcaacactgtatacactaaacttacaaggtacatcaacaatccagaacgcacggcaaaagctgtatcacttaaagaagagatagccaccctaagagacactttgcaggcagaggctgggattattgagtacaagaagctctcgacgactgatgtccaacctggttgggacaaagagatactgttctcatcgtattctgcggtagaccatgctgcttacctggaatcagttcgtaagcttattgcccttctgccactcaaagccacgataaaaaccaggattcacaacgagacaatcgatgctgccatcgagcgtaatgaggaatcactgagaagcttggctaggttcggtaaagacctcggcaagcttgatgggcttgaagctatcaagcaagagattgatgaattagagcgttcagcaaacatcatcaaacgcggtgctaaggtcatcaaggtcgaagaagcccgatcactaccaaactggaacgatgggcgccttgagtggtttgagttacaaattgaatcccgaaacagactagcggaaaaaagcagcaccaacgcgaatgttgtagccgaattggaacatctgaaaaagcaactgcttgaggaacataaaaagtcctatcccgacgataagatgtgccccctctgtggcgctgactgggaagatcacaaatcaatggtagatgccattgaagcaaaaactaagcagatctctgattcgctagggcaggacggtaaagacttagttatccttatcgctgctatggacgctgagctgaaactcatcaacacccatatacaagaccgcctgaaacttcttatgcctacctttgaaccaaatcttcatgtggcgctgagcagaattaaacttcggctcccggcaattatccagctactggagaagctgcaaagcgaaaatattcaatttacttatgcattcacggaaattgatgacgtagtagatgaacgatttgaaaagcttaaggaaattctaagaaataaaaaacaggttgaagctgatgccttagcgctgccggaggactggcgagaaaccataaatcgcgatttcaaagacttacaggacttctatatagtcacggttgaagatctgaaggacaaagagaagttcatatcgattaaagctaatgaggctcaaaattccaggctccaaacctgtattaccgaacttaaagttatcgaaaaggaaactaaggcagcccaaaaagcacaagataaaatcgaaaagctccgcagtacactgaagaagacagagcaaagttataccgaccagacaatttcggctattgagttcatattccacatctacagtggccgtctgatccaaaactaccagcgtggcctgggcctgtttatcgagagcagagaaggtacgcaattaaggttcctgactgccgagaagtcggagcacgatgcagtgatgtccatgagttctgggcaagtctccgccctcagcctagccttcttcctctcgctcaacaaagtctattcacaggtgcctctaattctgattgatgacccgtctcaatccctggatgaagtcaacgttgcatccctgaccgatctactccgttgtgagctcaagcattgtcagttggttgtctcatcccacgaggacgatatctcagcttatatgcgctaccggttcgacagagcaggtttggcaacaagttcgctcaacatgcagcttttggcgaaagaagcttcgtaa

SEQ ID NO: 95087 - DNA, 666 bp, Enterobacter aerogenes
atgataaaacaactcattaatgaagcacttgtggcccatgactttgtctgtaaactcgaccgggacaacactagtttttatattcgcgagtctggatctgctatcaggttcgcagtcctacataatcttgatgatctccctgatccggccgaactgaataacagaatcaatcatcttgctcctgacgagtttctcagaaacccaagctttaagaaaaactgcgatttgatttgtattcatcgccttgatgttctggccaagtttaaggatcacgaagaagaaatttttgcaattgaggaagatccgcacttctataaaaaatatgtcctctattacagtactgcggaggaaagcgcactcaccaatttcacctacgacaaactggtatctgtgatttctgacaaaaaggaatttcttgaatataaagaaaaccctcttcttgcaacacaatacagttttgctgcgaagacttttatcaagcttccattcttagagctacctagtcatcaagggaaccttgtgtccttgaggttgcaggcaactgaagctgtagccgaagccgacctaaacgatatatattcgactatccagcaattcacagataaaaatgctgacgattttatcaaggaaatgattcgtaatgaaatggcaaatatccaggattga

SEQ ID NO: 95088 - DNA, 1233 bp, Enterobacter aerogenes
gtgagccaagaagatgatgagaagtatcctgccagcgccatctcctcgtggagcggcttcgtttatcaagggaaaattgcactatatcattcccttaaactgattcatgatggcgacttggacttcgagcttcaactggatagtagtgacgacttcgctatttataaaaacgaaaaattacataccgcccatcaagtcaaagctaagataagtaaatatcgaagtggttacaccaaagcgctggagcagtctacattaatcgaaaacgacaaaatcaaggggacaacgcgttacttccatgtatctgtcccactagatgagactggcgattacagaggcactaacggagaaacagtaaaattctaccgctatggagacaactaccattgtggcctgggtgaaattgaaggactgactaaagaactcataaaaaaattatgtgagaaacagtccatcactgtcagtgataaccttatcaattttaactactgcctactgtcagaaaaaattagttctaaggcaatacacaaccataaattaaatcaagttgacgggatctctgaagacaaagccgcatacgaaggtcgtatcatggccaggagtattttagaggaactgctggctgaaaacccctatcagaatagggattactatgcagttgaattaaaggccaggctccaaactcatttagaagaaagattggatcaggagttaccaacaatgagcgatgctacttatgagagagccagacttctgagtgagtatatttgcaaaacgcacttcaacgaattaaaaaacctatgccagatgataaaaccatccgagcggtttcaagacgttcagaagaacgacatcaggcgatacaccaagctgatacaggctatttcgatggaacctatattcaaccatcttccgcactatcttgacaacgaaaatcggttctacgtacctaccgctcttgacgtggatgaaaacgaagagtgtgaatttgatatgatccatgagatgaaaaacaacggggatctgctgagactgctttttgagtacaaccatttaatcgccagtaaagcggaagcttcattcacctttaatacaaaattcacgaactcggataacttcgacaacaagcagacttctgaaaaatttgagagcaatatcactaagtcgctatgcattagtgtcataacaaaagacgacgcggaggaacggctgaatgataaaacaactcattaa

SEQ ID NO: 95089 - DNA, 294 bp, Enterobacter aerogenes
atgatggtggaggatgaggttgcacagaagctggaggctgctggtctctggcgcagggctgccagtcgctggcttgatgtgatgcagcaccatgggctgacggatcagcaacgtgaccggatacgtcagcacagaaaatattgtttttcctgcgcgaagcccatcaactccccggagaaactggatgtgatggaaatcgcgagggctgcaaagactactcaggagcggataggactgagtcagccagaaggggtcaataaacggtctgatgttagaaatacgcatacgtcttga

SEQ ID NO: 95090 - DNA, 789 bp, Enterobacter aerogenes
atggtggataaaacgcagcgtcaccgtaatcagtggacaccgtggtcggttgccgaaattacgtttgtggaacaacactatggtcagctgtctgcccgtgaaatcggggaacggcttggcaggtctaccaatggggtggcccggattgttcagctttcaggtctgtcccgtggcgtgactccaccctggtcggaagaggagctggcattgctccggacccactatacagaaggtatagagtatgtaatgtcattgttacccgggcgttcacgcaaggctatctgccagcaggcatcccttgccgggctcactggtcgcagtagctggagccttgaagataagtcctttctggaaaagaattacggcaatctgccaacaaaagaaattgccgccagactgggcagaagcgtcagtgcggtgagggctgcagtggtcaaatttggccttggaacatggaaaaacagaccctggacggaaagcgagctgatgttgatgcaggcacattacagtaaagggattgataaaataaaagcgttgctgccagcccgtacccgggaggccatttttgcccaggccggaaaaatggggctgacagaggcccggctttggctgcctgatgaagacagcctgttaagagccatatatcctgagtctggtgcccgtggggtaaaggagaagcttccccacaggacgatcccggcgataaaacacagggtaaccagtctggggctgaggtccttcaaaaggaaaaaatgggtatcaagggtaagacatgatggtggaggatga

SEQ ID NO: 95091 - DNA, 162 bp, Enterobacter aerogenes
atgctgacaagcttccggcagaccgtgccggtggaagaacagcttcggcagttgaagctactccctgaagattcgctgcagcgtcagcagcaggtccaacaggctgagcagcacctccgggctcaaatctctacgctggcgcaggaaaaacaacgcgactga

SEQ ID NO: 95092 - DNA, 471 bp, Enterobacter aerogenes
atgtcagtaaaatcacagtttctcgataaattgcagaccagacggtctgctccggcttcatctgtcagcaagactcaggctgatattgccgagtttcgcctccgaatggcactgcttcaggagcagatggacgcgtggctggtgggtaccggactgaatgtggagacacacaatacacccgttacggacctgctggtggaaggcggggcctttgatattgccggtatcgccctgcgttatgaaaaccggtccgtaaaatttttgccggtattcctgtatggtcagggtgtaaccgggtgcgtggaggtgaccttccatgatgggaggcatacgacttcactgggacgtttattcatgctgtcaggaatggtgaacaactggacctttactccgtctggtgctttatccccctccgggcagagttttgatgagagcacattttttggtttgattctggcgctccttccatag

SEQ ID NO: 95093 - DNA, 450 bp, Enterobacter aerogenes
atgaatcaaaatcccccctctctgtgcgagatgctttatggcaattttgtcggtgatctcgaccttcagcaggtcagtgaggaaaatcaggtcatcctctcggtactcgataacatgcagcgtatcctcaactgtcgcgccggcacgctggcgcatctgcctgactacggcctgccggatatgaccagagttctccagggcatgccgggtaccgcccatgagctcatgggcacattgtctgccgtcctgctcaaatatgaaccccgcctgaaaaagatagacgtcgttttgctggagcagaacgtacccggcgagttgcgttatgccatcgatgccgaactcaagggtatcggcctcgtgcgctatggcaccgagtttatgccggagggacgggtaatgttacgccatcttaagcaacagcagtatcttgacaccgcaacccgtctgtaa

SEQ ID NO: 95094 - DNA, 135 bp, Enterobacter aerogenes
atgcctattgaaaattatggaataacttttttcttggattccccccttaaaaaaactcaagcacagctaaaaagtaaacttgataatcgtaattgggaggttgttcatatcgtgatgaagaaagaaatttattga

SEQ ID NO: 95095 - DNA, 1788 bp, Enterobacter aerogenes
atggatatcgaaagtattattgctgctgccagtcgtgcacagcaggctgatgatgccgggttgggaaattgttcgcgtgtttggcatgtcggtttcttttttgatgggattcaccgaaatatagaccaggatgctatagaggcacgtcttagcaacgtatcgcgcctattcagggcgtttccggacgaagaaaaaaataccgatcaggatagctataactctttgtatttttcggggcttggcacaccattcaatgaagaactctctgagaaattgcataccattatggacagtgcacaaagctctgcattgaatgatttaaaagatcagccaaaagaaatggcgaaggatgctggcctggattatttgaaaagtggtaactggtgggaggttttaaaggactcagggaaaaaactgataagcccttcggagtggaaatcgctggtgggcgatgtagccaaaaacgccgcaaagaaatcaggtatcgaggcaaccccctggttgcgtgataatcccgtcattgcagatatgttagttaccggtgtcgatacgcgaataaattcggcaaaattacgttttgagcgtttctttgaaagaaccaaaaccaatagccctgtaccgatcaaactaatatctatctcattctttggatacgatgtcggtgcaactcttgcacgtaaattcattgatatgttgattaatgatatttttcagaaacagggtgataaacatacttaccaggggatccccgtagagattgtttttacaggtttgtttgattgtgcccgtcatactcccgcaagcaataataatggcgtggactggtttatttctgctttcggggggccgataaaagggattagtgtgctgatgggcgataagtctgttgatcaggaatcggcattgccggatacggttaaaaatgcactgcatctggtcgccgcccatgaaaaccggccctggcgtagcgtctattgtcttggtggaagtaataataagcacaaggaagagctgttacccggttgcgcggaggatgtagggggaggcctgaagccaaatgaacaaaaaccgagtgcagaactttgccgggtagcccttcaccggatgtaccgggccgcgacgatggctggtgttccatttccagatttacaaacactagatcagacggatactgatgttgctgcctatttcatcatgcaggacaaggttaaaaacaagtctgtcgctcaatggacaaagctatatcagcaagcggtgccttttaacgctgttagtatcggagcgcagaaccgtcatctggacagctatattgagtggcttgggcgacaatactatcaataccgctgcgagtgcatgaagtatgaaaaacaacgtggcgatattttagcctccgccggtgcttctgccgggttattggggatttcaccacaggcaaaagaaacttcaagatactaccagaatgaacttgatgtgttgcacaaaaattgggggtggctggatgatgtccatgatgccgcaataagaatgaagaacagtatggaaaacaatcctaatgataagcgtatccaaattgtgcctgatatctacaggcctgcattgaggcgagcgagacgttttcttgattatgcccatgctgcttatcatgggcagcctcagcctttccccgaagataatgcgccctcagatatgtatgcctggtttattcataacagacaagcaacgggaaatgaagttggcatctctcaggatttcctggtgattcgttcactggaaaaacctgatgtgtaa

SEQ ID NO: 95096 - DNA, 522 bp, Enterobacter aerogenes
atgggattttttaagacttacgacaaagttgataacgccgtcaatcgtggctatgtccgctggaaaaaatggatctggggcagtttattggctgtggttctggcatacgttggctggctagtctgggcatccatctgggggccaccgacgggaccagtaacattaattattcacagtgaaattgacaggcccattctgggattcagtgttaacggagtggcagggccaaatgcgtttgctcacggaggtggtaaggcaacctgttgtggcagtatcagtgggaaaacagcggaagttatatggacattaagcaccacacgtgctcagtacgatgcaggacttcgcaaagaaactcgccgtgttgtaatgcctttgccagaaagaaagtggggagaaaatgatttgcatgttcactttttgcccggggataaggtgttgctgggctggagtgataatgcctggtcgccttatgaaaaacgtcctgatattccagataagactgtaaagcaggggcaaaattga

SEQ ID NO: 95097 - DNA, 828 bp, Enterobacter aerogenes
atggacagtacagaactcattacagcgttatcctgcagttcagacgagaacatcagcctgctgtttgaagccggagcgcagccggaggccgattttctggcatttaaagagcagcatgctcacaggctgcattctctgtatatccatcctcaattaacggagtttcagaattacggcccctggttgctggcaattgataatgcagagcagttacctgattatctgacgtcgttgccgggatgtgccgcagtcattgtttcaacgcgttattcatcaatgctggcagtgcagctatcacgtggatgcacaattgtgcaacctgatggttctacggcgctgacgcgcttctatgcgagccacgttatcggtgtgctggcgcagtgtgccgagaacgactggcatgcctttctgttcaacggcatcacacaatggtggcttcctggcgaaacgcagtggcaggcacttgtcataaagcccccggaagcagataagcctactaatcatattatcaggcttgataaagccacctgggagcaaatcgcggataagcccgaagtgaccagtgtcctgaaagaatggcagaaaatgccgaccagcagaaagttcccagcttgtgcgcagcgcttgatggtgattaaggcgctgaacaaaagtaaagaatcgggtttgttatccgcggctgatcagaaagtgtacgcgctgtattaccttaatggtgggcggcaggcgctggaatcagatgcactgaaggttgcattaccaaaggtgctgaatggaatacagtcgctggcagaggtgttggttaaccttgcggatatacagtactga

SEQ ID NO: 95098 - DNA, 2343 bp, Enterobacter aerogenes
atggacaccaccctcgataactggctggcactgtttgacggacagacccgctaccgccttgagataaacgacagcatcctgaagccggatgtgctgaacttccacggacgggaagcgctaaatgcgccgttcaaatggcgcattgagttcaccacgccgcagaaaggcatcagccgtcaggattcgatgctgaagtatgccaccctcagcatgctctcaggccgggttgtgcagggcattatcaccggttttgaggtcctcaacgaaaccgtggaccagacgcatttcgccgtaacgctttcctcgcgcctggcgctgcttgcccatacccgccgctgcgcggtctggcagaatgtttcggtaccggaagtggtggagcaggtcctgcgcagccacgggctggaaggagcagattttgaattccggctggaacagacttacccggtccgcgaactgataacccagtggcgtgagactgacctgcagtttattcagcgaatactggccgaagacggcatctggttccgcaccggggtcaacaccaccactggtcttgatacggtgaccttcgccgacagccagctgcagtatcagtttgatgtatgcctgccgtatcgtgagccttcagcgctgcatgacggcgcagccgaagcggtgtgggatgccagagtgtggaaccacacggtgacaggcagtgtgtccacccgggactacaactaccgcacggccggtacgccgatggatgcacaggtcaccgtcagaaacgaggcggccaccactggcgaacactatcgctatgcggcctcgtaccgtgaagcgggcaatgacaccacctctgagccggaaaccgaaagcggcgcgttttatgctcgtatccatcacgaacgtgaactgaacagggccatccgcctgcatctcttcagcaacgccagtcacctgacgcccgggatggtgctggagaccggcgacagtgatgttccggagctgaaagaaggcatggtgattacgctcaccaccttccgcgcggcccgggacacccgtctgcacgtttccgtgtggggcatgccctacagcgagcagttttgcttcagacctgagcctgcaccgcgcccgcttattgccggcacgctgacggcccgcgtcgagagcgatgagaaaaatgcactgtatgcccatctcgatgaaacgggacgttaccgggtgaagctggacttcagccgtgaagacgccgagcccggttataactatctgtggatacgtcaggccaaaccgtacgccggggaaacgtacggctggcacaccccgctgataaatggcactgaagtggggattgcctttgacggcggcgacccggaccgcccgtatatcgcccatgcgttccatgattctgaacattcggacgtggtcacccgggacaatcgcagccagaacatcctgcgcaccgcaggtcagaacgaactgcggatggaagaccagcgtcaggcagagcatattgcgctcagtaccccgttcggggctacggcgctgaatcagggacatatcgttgacgcagggaacgaaccacggggaaccggctttgagctgcgcaccgatgagttcggggttatacgtgtggcaaaagggctgctggtcaccgccgatggcaaagtgcacggcgaaggcgatgtgctggatatggacgtggcactccgggagattgaggctgtccgcgcacaaatcgaggagcttgccaccgccacccgccaggcgaaagccctggaagctgatatcgccagccagcaggcaatgttcgccacacggctgaaaaccctcaatgagatgatccacttctcggcccctgaggggatggcttttaccagcgcagagcatctgcagctggcggccacttacaatattgccctgaatgccggtggtgatatcagtatcgggacccaggggcatatcaccgggctggcgggcgacagcgtgggaatgtttgcccaacacggcaagctaagcctgatttcggctcaggggccggtacagtttcaggctcagaacgggatgatgcacctgagtgcggagcagaaactgactctcatctctgccagcgagatgctactggccgggaagaagcgaatacgtctggtgggtgggggcagttccattctcattgagcaggggcaaatcaagtacgagacggcgggaacgtacacccgcaaggccagccggctggatacggaaggtggtgcttcgcagaggatagacatgccagtcttgtacccgccaatcgaaaataaaatttgtattccttgtctgcttaaagctattcaggcgaatgatgcgatagtgcagggagcataa

SEQ ID NO: 95099 - DNA, 528 bp, Enterobacter aerogenes
atgactttcgcttccctgtcgcgcagcgccgcactgatgctgctctgttccctgttgaccgcatgtggcctgactcaggccgtgtcggacggcactgtcagcgcaaccagagccattttctacaaaaaaataaaggtgctgcacctggactttgagccgcgagcggccatcaacgcagatgaaagccaggcgccgcttgccaccatggtgcaggtataccagctgaaggaccgccagaaggtggatgccgccgactaccagaaactgcttcgcgatgcggactccactctgaaagaagacatcgtcgccagcaagtctctgctggtgatgcccaaaggcagcgtgacgctcaatatgccgatgaacgaagaggcgaaatttgtggcggtggtggggctctttaatcggccggatatcaaaaacaacacctggaagctggtactgagccgcgacgacctcgacccggacaagccgcgggctatccagctcaacagctccgggctgaccctggttccggtgaaggagtaa

SEQ ID NO: 95100 - DNA, 1080 bp, Enterobacter aerogenes
atggaaagagaatcacagccagcacattccgggctgacagaagcgcttcgcgacgacatctggcgggttaatttctaccgcttctgtcagttgctggagcaggagaatccggacgcgccgaaactgggcagtaccgagaaactgtccgccgacccggtgcgttttcgtccgtggccgggaatgggcttcccggtcagtgaactgaaggcggttgaaaccgatgaggaccacccggacctgtcgccgacggtgcggaccactttcctcggaatgtacggggtggactccccgctaccgacggcgtacctcgatgatattgcgcagcgccgggaggggtatgaagccaccacagcgtttctcgatatcttcagccaccgtatccacacccagtactaccgtatctggcgcaagtacgcttacccggcgaccttcgaagccggcggcgtggatgacacctcccggtgcctgctgggcctggtcggtcttggcatcccgggtacggcggagcagattgccacgccggtttcccgcttcctggcgctactggggaccatgcggttgccaacccgaaacgcagaaggcatccgccagctggtgagtctgctggccccggacaccctgagcaaggttatcagcccggatccggtgaaagtcaccgtggagaatcgcagcggactcgggaaagccaaccgcgtatccctgtcacagcgggccacgctcggcaggaccgggaaagaagcctgcagccgtatcctcctgatgctggcgactgacaatccgcaggaggcgcaggactggttgcccggcgctcagctgcacactgacctgatggtgctgctgcgggtgtacatgggttatcgctccgatgtacgccttcgcctcacggtaccggtaagctgtctgcctgaaccacgcctgggtaagacaagccgggttcagttgggtcgcaccggcatgctgggcctcaaacgcgaccgtcccacgacccgtacgcacctcaccgtgagtctgggcacctgtgaaggcctgacctgtgagaccctgcggccggccgggcccggcggctatcgcttcgactga

SEQ ID NO: 95101 - DNA, 1770 bp, Enterobacter aerogenes
atggatgatctaacccttcgctattacgaagccgagatgcgttacctgcgcgaagccggtaaagaatttgctcgcgcccaccccgatcgggcagcgatgctcaatctggataaaaccggggcccgtgatccgtatgtggagcgcctgtttgagggctttgccttcctgatgggccgtttgcgtgaaaagctcgatgatgacctgccggaactgacagaaggactggtgagcctgctgtggccccattacatgcgcaccattccgtcgctgtctgtagtggcgttcacgccggactggcgccagcttcgcaaaatggaagtgcttgaaaacggctttttcgtcctgtcgcgtccggtcggtcccgataacacggtctgtcagtaccgtaccacccgcgaagtgcccctgcagccgctgcacctggctgaggcccgcctgcagacagaaccggatggacgcgccgccattcgtctgcgtttcgaatgcccggacaaggtggactggtcgaaagccgggattgataaggtggccatttacctcgatgctgacagcccggtggcctcggctctgcatctggcgctgacgcgccgggtgcaggcgatgtatgtccgccacagtgagacccgtactgagcgggtaggctttgacggctggtgtaaacccatgggctttgatgataccgaccggctgtggcctaaaggggactcagcgttcagtggctaccagctgctgctggagtatttcagcttccgcgagaagtttatgttcgtggagctcagaggcctcgagctggcagagctgagtcagaaaaccacctggtttgagaccgatatcgtgctcgacggcggctggccttctgacatgccgtttgagaccgacaacttccgcctgcactgtgcgccggtcattaacctgttctcactggaggcggacccgctgacgcctgacccgctgcagaacgaatacctgctgcgcccgatgcgcgtgcaggacggccatacggaaatctacagcgtggactccatccacggtgcagtgaaaaacggcaaacatccgtacgtgccgttcacaagtttccgacaccgcggtggcatgatgcgccatgacgcgccggagcgttacttccacacccgcgtgaagcgcggcccctcggggctgtatgacacctggcttatccttggcggtaagtcattcgaactggatcaactgtcacagaccccggagtcgctctccattcgcatcacaggtaccaacgggcagctgccgcgccgctcactccagagcacgctgctggacagggtggtgaaggcgggcaaggtgccggttcgggtcatgaacctgaaggtgccaactttgccgctttacccgccggcaaatgaccgcttccactggcgggtgatgagccatctgggttcaagctttttaagcatgatggataatccggaagtgctgcgcggcacgctggcgctgtatgactggaccgatgatgagatgaaccgccgacgactggaggcgattgtggcggtgaagcacacgcttattcgtcgctttgagaagggctttatgctgcgcggggtggacattgaaatcacccttaatgccgataactttgccggggagggcgacgtcacgctgtttggcgagatgctgcatcgcttctttgccctttatgccgatgttcacctcttcaatcagctcacgctggtcctgcaaccgacagggaaacgactgcgatggaaagagaatcacagccagcacattccgggctga

SEQ ID NO: 95102 - DNA, 663 bp, Enterobacter aerogenes
atgatggatgttttgttctgggtcgctgccagctttggtgctggcgtctgggttggagtgcagcacagaaaaagtcagcgaaaatcctttcggcagtccacatcgaagaaccgtactgtccgaagcgaagctcagccaacaccttgtccccccgcgtcgtcgccacatccagccgtaaaatacagaaactctcgctgggaagagaaggaggacctgttctggggaatggtggaagaaggtgtcattcttgaaaacaaaaaatacatgacaaccccgaccgaaagacaatacctggaaaagctcgaagcgtggttcggtcaatattgtcggatattttgccagctgagtcccgggcgcttcctgaagttaccggagcaggaggcgttcagtgctgaagaaagagcgcgtttctttacccagtttaatgcgatgtccgtggattatgttctggtctccagaaaaaataacaagattgtctgcgtcattgaactggatgataaaagccatgaactcgatgagcgcattgcacgtgataaacggctcgaacatctgtttgaaatggccggtgttccgttacttcgtgtcaacgttgacgaaatgaacgctcaacctcccgtgtgggagcgtcgtaaggctgtagaagaaagaatggccgtttcctga

SEQ ID NO: 95103 - DNA, 1620 bp, Enterobacter aerogenes
atggcgactgcagaaacgctcctgaccctgtgtcttccggacgcggtccagcgtaccgcactgctcgctaagagccgggaaaacctctctctgtggtcgccgtggctgacaccactcccgacgggtaatggagccggggatgacccgacctatgaggatgatttccagctgatgcgcgaggagatcaacaagctttccggcaccgataccggggtgctttgtcgtctggcggaaagcattctgacccaacatgcccgcgacatccgtgtggtgacctggtatgcctttgcccgtctgcagcgtgatggcgatgccgggctgacggatggcatcctgctgctggcagccatgctggagcagacggggcagcactgccacccacagcgcagcaccgcaagactggccgcactcgactggctgaacagtgagaaagtgctcgatacattctcgcgctggccggacgtgacgcgtgaagagaccgccagaacagcagccgcgctgtgtttgctggaaacggccctggaacagctgccggatgcggaacgccctgactttgccggtttgctgcgcaggctggaaacccgcctggccggtagcggcgggctggatacaccggtggcttcatcaggaccggacggctcaggtgaaagcacccacagcacaccgacgtcaggcactgctgtaccggaaaccgtggctgtcaaatcggaagtggaactggtccgtcagctgcgggtgctgtccggctgggtggttgagcagccgcagggctggcttgccgctcacaggatgatgaaggccgcccgctgggacctggtgacgcaacttccggctcttgatgcagccgggcggacacgcctgctgccgccaaaggctgactaccgcgcccagcttaaacgtctgtacctgcagcagagctggactgaactggttgagcaggtggatgtgatgttctctgagggcggtaaccgcttctggctcgatttgcagtggtatctgtggcaggggctgagccgggctggtgcgccctgggagcactgggcggagtatatactcagcgacctgaggctgctactgaaacgcctgccaggcctggagacgcttgcctggaacgatggcacgccgcttgctgatgaggtgacactgaactggatagccgaaaaggtcaacgataacatgtccgggtttgcagatgcgtctgcggtggcaaccggaggccagacggatgacatagctgcactggaagtggaagcgatggaaaaaggtgaccgcgatggcccggaggcagcgctgacctggcttcagaatcgtcccgacatggcctcaccccggagccgctggttaattcgtttactcatggcgcgggtggcagagcagtacggccgcaacgagcttgccctgcacctgctcggtgagctcaccgccagtgcaccgcggctgaccctcagtgactgggagcctggactgttgtttgacgtgcttgcccgccgtcttcggctgttgcgtctgaaagctggtcgcagcgagagcgacaaagcccggctcaccccggaaatggatgaactgctggctggcttgatttccattgaccccgcccgggcgatggtgctgtgcggttag

SEQ ID NO: 95104 - DNA, 3372 bp, Enterobacter aerogenes
atgaaaattgcatccacttttctgcttgcgctgcttctgggcgcactgtctgtctgcctcactggcggcgcactcttgttatggccggagtgggttaaggacaccttcaatatagggccattcagtacgaccggcatagtgataatcagcctgctgctgatgctggcagcattgattatcggctgggtgcttgaaaccgtattcgctaagaacggtgagaaacagggagagctggatgtggtcgcctccggacagcaggctgctgcatcccagcctgaagcgaagcataccgacgcggacacctcccggtttgtggctgaggcgctggtcgatcatctgcgccagcgctaccgtcgtcgctggaaagccaaagttcgcctgttgctggtacagggtaccgacagtgatatcgaaaaggtggtgccgggtcttaagggcgatcactggcaggaaagtgacggtattgtgcttatttacggcggtcttgcggaaagcgtgccggatgatgagttcctgtccgtgctgaaagcagtgcgaccacagcgtccgctggatggcgtggtgcaggtgatgaacgcggctgcactgcccgatacggcgaagcaggacacgctggtgcgtgtacgtcagaaaaccgatactcagctgggctggcaactgccggtctggttgtggcttgtccgggaaggctactgggaccaggacggagtgggggtacctccagccggcgcgctgtttggtccaggtgcgacaacggaagaggtccgttcgacattgacctcactctcgtcggacctgcaaaccccaggcgtgtcggcgctgctggagaactctcagcaccactggctattgagcctgtcgaaagccctgcgcggctcgttgcgacgctccctgatcccgctgctgaccacgctgatgtcagggccagccccataccgtctgcgtggtgtgatgttcagtccggcattgccagggaccgaaacggtgccgcatgcgcgcctttcaccaccggtctggcaggcgctcgaaaacgacagcctgcaggtgcatgcccgtaaaatcggtttccactggcaaaaggtgctgcgcctggtgctgctcggtctggtactgctctggggggcgggtacgctactgtccctgtccgtcaaccgcacccaaatctggctggcccaggatacggcccgggttgccgctgacactaaacagcctctgccggagcgcctgcgtaaccagttagcactgcagcagaccattgcccgcctgcagaaccgcgaagtgcacggtgcgccgtggtacacccgctttggcctgaaccaggacagcgacacgctgaagatgctctggccattatacgcccgtaacaaccagcagctgatgcgcgatgcgctaacagacgaacttcaccgccagcttaacgcttttgtgcagttaccaccggcaagcaccgcacgaacgtcagccacccagaagacctacggcctgcttaaaggctacctgatgctggcccgtccagacaaagcggatgcggagtggctggcgggcaatatgctgaaggcctggccgcaccgcagcggcgtgccggacagcgtgtggcagacccaggcgccgaagctgctcggcttctgggcgcagaacctgccggcacacccggagtggaaaattacccctgaccgcgaactggtgggtacggtgcgccagattttgctcaaacaaattgggcagcgtaacgccgaatctggtttgtaccaggagatgctcgggcgcattgcccgaaactggccggatttaaccctggcggatatgaccggcgacacggacgcgtcaaccctgttttcttctgaagaagtggtgccggggatgtttacacgtcaggcgtgggaagagcaggttgaagatgcgattgatgaagtggtgaagacccgccgcgatgaaatcgactgggtgctgaccgacaaaacccatcagccgggcagtgatgtgtcaccggaagcgctgaaacagcgcctgactgagcgttacttcactgactttggcaacgcctggctcaacatggccaacagcattcagtggcacgaagcgtcatcgctttcggaggccattgcgcaactgaacctgctggcggatgtgcgccagtcacctctggtggcgctgatgaatacgcttgcctggcagggtcagacgggtgccaaaggagaagccctggctgacaccctggtggactcggcgaaaaaactggtggggcgtcagaagagtgcaaaacagtttattgaacaggcgcagggtcccaaagggccgctggacggcgtgtttggtccgctcacgggcctgatggccgggaaggacggtactggttcgaacgggaacctcagcttccagtcctggcttgcccgtgtgacccaggtgcggctcaaactccagcaagtgaccagtgcgcccgatccgcaggcgatggcgcagatgctggcccagaccgtcttccagggtaaagccagtgacctgactgacacccgtgactacggctctctggtggcggcaagcctcgggcaggagtggaacggcttcgggcaggcgctgtttgtgcagccgctcgacctggcctggcgtcaggtgctggctcctgccgcaggcagcctcaatgcccgctggcagagcaccattgtttcgcagtggaacaccgcctttgccggacgctatccgtttaaggccaccggcagcgatgcctcactgccactgctggcccagttcctgcgcagtgactccgggcgtatcgccgcgtttatcaaaaccaacctcggcggcatgctgcatcaggaaggcagtcactgggtggtggatccggctgccagtcagggaatgagcatcagcccggcgtttcttgccgccatcaacaagcttgccgatatctcggatatcgtctttgctcagggcgatgccggggttcatttcgaactgatggcccgaccgtcacgcgatgtggcccgcacccaactgacgctcgatggtcagaaactggattacttcaaccagatggaaagctggcagagcttcacctggccgggcaatacgtattaccccggtgtggatctgagctggcgctcagtcaatacagaaatgcgcctgtataccagtaatcagggaaactggggctttatccgtctgctggataaggcgcttatcaccccgctcgacagcagccggacacaactggtgtggatcactccggatggcaatccgctgaaattcatcatgcgcagtgagctcggtgacgggccactggcactactcaaactgcagggcttcagtctgccgcagactattttttccgtgggcgcgaatgacggctcacacacccttgccggagacgaataa

SEQ ID NO: 95105 - DNA, 1161 bp, Enterobacter aerogenes
gtgccggttgaacttgagcgtattcccgcgcaggaaaaactgccgccccgtccgcgttttaaacgctggctgctcctgggcattgtgatgctgctggcgggagttgcagctacattcctgttctggaagggcgagcgctccggagctgcgttctgggggctgtcaacaggactacctgtcgtgttatggggccttttgattgtcgggcgctattttggctacgtgctcctttgtgcccgttgtgagagaaaaaatgcaacaaccgccgcccggtaccgctcagacgttgcgcgcggacagcgctttgcctggcttatcggtgaagtcctgattaacgggctggggtctgccagcccgatgacacacgaggcggtgttagccaaaaagcccctgatgatgccctgtgagcccgttaatggcgggaatccggttcgtcaccgggcgctggcggcgatgggagaaatggctgaccgtgaagcgcattacttccaggagatcaccgcccacgttcagaatctggtgtcgttgctcccgccgacgctgacctgctatctggcggtggataccggtgaacagttttcgacactgccatcgctcctgcaaaaaagcgtgtcccatccgctggtgcgcattcgcgacctgacggggctggaaatcctggactactggctggactgccattatgaccatgctgctgcgttactgctggtcagcgctcagctttacgaacacccgccagaggatagtggcgaggccatttccatgttactgcttaccaactgccgcctgaaggacatcccggatgtgtcggtcagggttcaccggccgcagatctgtcgcgatggcaatctcgatcgggcatttgagcgcgtcatgatgtggtcaggactggaaaaaactgcactgaagcaggcctggaccagcggcggccagatggcctccggcgatatcttcagcaaggcccgggaggcccatgccccggggcttaaagccgataaaattacccatattgatacggttgtcgggtttgcgggcgttgccgctccctggcaggcgttacagctggcagcccgtcagtgtttgagcggtagcgaagcccagctaattgtcaccgaactttcagaagacaaccgacaactctgtattgtcaccccggaataa

SEQ ID NO: 95106 - DNA, 258 bp, Enterobacter aerogenes
atgcaaggaataatccgtctcggcgacaaaaccacacacggtggtgccgtattgtcctgctcaacgaccatgctttttggtgatattggcgtggcccgtaaaggtgaccgtgtttcctgccctgagcatggtgataccactattgtcgaaggtaacccaaattatcgcgatcgcggagttcctgtggctttccatggccacaagtgtggttgcggctgcacgcttatcagctcactgcccaatgctctggtggggtaa

SEQ ID NO: 95107 - DNA, 822 bp, Enterobacter aerogenes
atgaaaaaaatactattattgtctgtttgtgtgttttcttttttttgcaatgcgtccgaagaagttaatgctgaatatacgataacttccttatataacggcacaatagggaaaagtaacatcacaatgagccttactgcatccagcgggacgtattctggtgtttatatttataataaattcaaaaaaaacatcttgctaaacggaacgtcctctgccgactcggttgtattgaatgagaaagtaggtgaaagtacagcagtgataacgctcaaacctacagtagatggatacaaaggtcagtggtgtgggaagaaatgccttcctgtaacccttttagctcatgattcatttaaagacggtctattgagtagtgtaaaaatatctgattctgagaatggtggttccgaactgaagttggaattcaatggtaaagttgaaaatatatccttgccggaatctattgacactcccaccatcgattttatggatgttaatggtgatggtttttatgacgtaattgccagaactgatcacaggccaaataatggaagtcagagtgtgtatatttcaaccaataaaggctttgtggagcagaaagtattaagcggcgtaaatggtacgttgacatacagaccattcactaaaaatatagtgtttgattcaaaggatgattgctgcgagaagtatagtaaaactatttactcattcgacaatggcaagcttgttaaaattaatgatgtgtcttttgattattcaagcgataaaggtcattctgaaaatggtagtgaagtttcaaaatccatgtttgagtcttattga

SEQ ID NO: 95108 - DNA, 2229 bp, Enterobacter aerogenes
atgaaaatctgttttcctgcccgaaaagcgaatggcgagcagtatgccaccctggatgacatgatgcagccgctctgtcaggagccacacggctcctggctggccggaacgaataacatgtggcatggcgggatccacatcacccgtaagagtgccccgggttctgtgctgacaaacgagacggcagacacggcggtgccgcttcagtttatggcgggcggcgaagtggtggcctggcgtattaatcaggactatctgaccggtaaatacatcaataacccgctgcagtattccagtacgtttgtgctggttaaatcgacctgtacccccgatcccgaaaaaaaggacaacagcctcgatttttactcgctgtatatcgggcttgctccgctgtctgcctttcctgagcacaagctgtatcaggttactgacaagggggatgggctgagtcagcgcgaatacaccggcaaagaaaaagacggagataaggcaccggttgcgaaggataaactgaaagcgggcgacagcgtcattgtgctgcgtgagatcacctttgacctgaagggacagaagcagacgttcgggcttgcccggatgctgaacagcaaatccgaaatgaccggcggggcgttctgggtgtcgcttgacccgcaatatatgacaccagccggtaaacggagggcgcacctgccggcctggatgcagcaggctgtagcacaggggacttttgataccgtcgttaaaccggcaactaaaatggaagttgcagctggcgatgctgcgggttacctcgcggaagacattgcccctgacagcatgggggcagtggagaaaagtgcgttcgcacacattgaagtggttagcaccgacagccggatgatcgattttctgagcaataaggcacaggtgaagagcggcccgaaatatgtttatattcacccggaaagcttcatttatagccgttccggcgatactttcacccaaaccaaggggaaggtgaagaaagatattcacaaaattatgccgcaggacaaatgccatccgttcaccgacagtaacggcaagcgctggtttgatatcggggacggggcctgggtaagcgaagacgatgccgatgcggatatcggccagtacgacctggataaacttggctttaaagcatttgaagagccgtccacgtccgatatgacgaaatccctgcgtgaggggtggatcaaggacgggttcaccagaattgcggagtgggtacgccctgaacgcggtatccgggaaaaacaggtctctgactactacaaagccctgctgagaaaaatggacagcgataacagtggtgacctgtcaggcgaagaattgcgtcacgcggtgaattacgcggagctggatgtcagggatattgcggcgcgaatggtggtcaaacacgacagtgagtggttaggcggtagcggccatcaccgctggagaacatttttaaaacagctggatccgctgtgcatcagctatgtcagacagtggtttgatgacatggaatggatgagcaaggtggacggattaagtggtggtgcgcctgtctggcatatgcatccggtgatttttttgaatgcgctttctgatggcgaggaaatgatcacctacgagcaattaaaggcaatgcttcctgccgacaaagaaaaatatgtacagatttatcttgaacctctaaatgaaacaatgaagctgtttgaaataaatacccctctgagaaaagcgcattttatggcacagatccttcatgaaacgggcttctttaaatatactgaagaaactgcatcaggaaaagcctacgaaggtcgtagtgatttaggtaataaccaagctggagatggtcccttgtttaaagggagggggttattacaaattacaggccgtgataattatacaaaatgtcagcagtatctaagaaccaaacttaacgacaactcattcgatataacatcaacaacagctaaggctagccacctttcaaacaacccaaggtatgcgacactagcatctggttacttttggagatacataaaacctaagctaaacagttcggctgataaagatgacatatactgggtgtcagtctatgttaatggctgggctgtacaaaagaaaccttattatcctgacaaagctaaagaaccgaaccacatggatgatcgagtggcaaaactatcgatagctaagaatgcatttggtctggagtga

SEQ ID NO: 95109 - DNA, 2352 bp, Enterobacter aerogenes
atgatggagaacccgagcagtctggcagagaagaaaacagacgaagtgctggggctgtcccgttatcgtgtggatatccatgactgttcacactttctggacgtgctgcgttttcgcgccagtgaaacgctgagccagccgtggcactacgatgtcaccttcacctgtgcggcgagtattgccagcagtgaggtgatgctgaaaccggcatccttcactttccagacgccattgtttgatggcacgccggctacgtcggtgcgtacggtatacggcgtggtggatacgttccgtcggatctccgtatcaggagatgaaatcacctatgccctgcgcatcgtgccgcgtattgccctgatgcagcacacgcaacgcagcgaggtgtatctgaatctgtcagtaccggaagtcgtggagcagatcctgcgcgcgcacgggctggaaggggccgattttgagtttcgcctgtcgcagcattatccggttcgtgaactgattactcagtggcgtgagacggatcttgaattcatccagcgcctgctggctgaggtgggcattttctggcgttttgaaatggacagtcacattgagcaggatgtggtgattttccaggacagtcagatgcagtatcagtttggcgtaaaactcccggtagttccgccgtcacgcaccagtgataacggccaggaaagcgtctgggatatcagcccggaagaccgggtggtaaccggcagcgtttcgacccgcgattacaactatcgtgaagccctgacaccacaggacagctccgtcaccgtgcgacaggaaggggggagcagcaccggtgaggtgtatcactacgctgaaccattcctgagtgagggcgatgctgacacgccggaaggcggggcctggtatgcccgcctgcgtcatgagcgctatctcaatgggcagcagacggtaacagggcgtgcaagcagcccgctgctggcacccggtgaggtgctggagcctcaggggagtatccctgcgtcgctgaaagacggcatcgtgatcaccggtattcagacatccggtgcacgtgacaagggttttcaactgcacttcacggggatcccatacagtgaaaccgtctgctatcgtccggcattaatcaaccgcccggtaatagcgggctctctgcctgcccgggtggaaagcgacgagaagggtgacacctatgcgtacctcgacaatcaggggcggtatcgcgtccggctcgactttgaccgtaacagcaccgaacagggctatgcctacctctggctgcgaatggcaaaaccgtacgccggggatacctacggcttccactccccgctgcttgacggtaccgaagtttcggtgatgttcgacggcggtgatcctgatcggccgtacattgcccacgcgcagcacgattccgaacaccctgaccacgtcacccgcgacaaccacacgcgcaacatctggcgtacggcgggggataacaaattccgtctggaggacaagcgtcaggaagagcatttcaagctggcgacgccgtttggcaagacgcaactcaacggcggtcacgttgtagatagtgagcgtgagccccgcggaaccggttttgaactgcgcaccgatgaatacggggcgctgcgtgccggacgggggatgtttctcactgctgatgcacaaccggcggcacagggcaaaatgctggatatggcgccggctattgaacgcctgaaccagtcagcggccgaaatgaaccgtctgaatcttctcgcgcagcaggctaaggcactcacctgtgatctggaaagccaaaacagcctgctggaaaaccgcctgaaagacctccagtccgctgcattgttgggtagcgcaccgcagggagtggcgttcacctcgggtgagcacctgcagatgaccagcaagcagaacactatcctgagtgcgggtcagcaccttgatatgggtgcgatgaagaacatcacgctggctgccagtgaatctgtcggtctttttgctcatcagtccggggcaaagctcattgccaatcagggggatgttgaggtccgcgcagaggcgagctcaatggagatgacatcagagctgctgtttaccatcagcagtaacaaagatgaactgctcatcagtgcgcctaaactgcgacttaacggcggcggctccagtatcacgctggacaacggcggcattctggaagaaaccccgggggattacctggtcaaatccgcgcattaccgctcaccgatggcgggtggcagcatggacattacgccgcccaggtttagccagacaaacgtcagcgtgacgccgcccaaaacacgtaatatcccttcacgttaa

SEQ ID NO: 95110 - DNA, 492 bp, Enterobacter aerogenes
atggcaattcctgtttatctttggctgaaagacgacggcggcgcggacatcaaagggtctgtggatgttcaggatcgtgacggcagcatcgaagtggttgcacagcagcatgatctgtacatcccgaccgacaacaacaccggcaagctgaccggtacccgtatccacaccccgttcaagttcaccaaggaaattgactcctcaagcccgtatctgtacaaggcggtgaccaccggtcagaccctgaaatctgctgaattcaagtggtacaaaatcaacgatgcgggtcaggaagtggagtacttcaacacaaaactcgagaacgtcaaagtggtgaaggtgaatccggtgatgcacgatatcaaggatccttcttttgagaagcacaaccatctggagcagattgagctgcgctacgaaaaaatcacctggacctacaaagacggcaacatcattcattccgattcctggaacgaacgcgccaccgcgtaa

SEQ ID NO: 95111 - DNA, 1683 bp, Enterobacter aerogenes
atgcgtgaaaaaaccctggcccgggcggccctgccggtagtgctctgccttgccgccgtgctgtggctggtatggggattcctgacctggctggttgccgggaaagccttcctgactctggtagccttgctggttgcgggcatgcttgcccgtcgccgttaccgtcaacagcgaccggtacagctggctgatgaggccggacttttcccgcccgacagtcataccggaccggtggtgctggtatgcggggatgtggacgatagcatgttcacagcagggcagacacgcggcacggcgcaggggtggtacctccggataacggaactgtccggactcacgccttttgctgagcgtctgctggcccgtacgccgacgatggcaggccagctcgccgtaatgtaccgctgtttgccggaccagtatgaagatgaggcgctgttgcgcgtctctttgaaagcattgcgcctgcagatgaagcagttgcgggatctgaccggctttagcgtgccggtggtcctgactgccgaattcagcggtccggaaacgccctggatagtggtacggggaaatacgaccctggtatgtcctgaagacgaacctgccgtcaccctcagcgaatggcagcagtccccgcagacggctcttattcagccatacctgacccaggcgacatcgctgcttcacgccgtgatgctggatgaactgagcaaagcagacaggctgtgtccggccttacgaccatttgctgtcaccctgcgtctcgggtcggtatccacctcgacagccgcgctgtggccacagttattgttccgccagacccgcattacccctgccggccatgtcactgcctgtgaacctcggtggcattttgccgatgcggtacttcctctgctggctccttataccaccccgttgcagggtggcaaaaccgggcattgggtggtgatgattctgctgttatgcgccctgggggccattgccctgtccgtgcggcataaccagtcgcttatccgcacggtcagcgccgaccttcagcgctggcaggctatcccgatgaaccactattccccgaaagcgcaggccctgcacgccctgcagcaggatgcattgttgctggagcgctggcagcgtcagggagagccatatcgctacgggctcgggctgtatccgggcaaccgtctgtggctggccgtgcagcaggccattgatacgtatgtgcctccgccgccaccgccaaaaccgaagctaaagccggtaccgaaaattgtccgtttcgacagtatgtcgctgtttgactccggcaaatcggtgctgaaaaccggctcgaccaaaatgctcgtcaattctctggtcggcattaaggccaaaccgggctggctgattgtcgtgtccgggcacaccgataacaccggcaatccgcaactgaaccagacgctatcacagaaacgtgccgaggcggtgcgtgactggatgcgtgacaccggtgacgtgccggaaagctgttttgcggtgcagggctatggcgcaagccgtccgatcgcaaccaatgacactccggagggccgtgcgctcaaccgccgtgtcgaaatcagtctggtaccgcaggcgaacgcctgtcagataccgggccacacccaggcgtcatcgcaggatgatggcgcatcacaacacaatggagagtaa

SEQ ID NO: 95112 - DNA, 729 bp, Enterobacter aerogenes
atgaataaggttatcgacattgatgccctgatggcagagacctggctaaccgtggcgcaattgcgtcacggtgggcaggtgacggatggccctgcgctgtatgcggcctgcaaagcgcaggtggaaagcgtacgcgaggcgctggagcgcgccgggctgggtgctgaaagtattgatcacatcacttatgcccagtgcgccctgctggatgaaaccgtcatgaatcgtaaacccgtggctcagcacacggaaaatgcgcaagcggcagtaatcggcgacagtgcccttggtgcgttgaatatgccccttgatgccgggcaacgcgcctggcgttctgcgccactgcaggcggtttacttcggctccctgagagcgggcggagccttgtacgatcgtatcgcggaggtgctgcgtcagcccgcgccggagcctgcggtgctgacctgctaccagcgggtgctggcgctggggtttcaggggcaatacagcctctccggggtgggacagtctcagcgcgatgaagtgatcgctgccctgaatgagcgagtgccaccgctggaaagcgggacatcactggtggttcagaagaccggtcgccgtcgttacaacctgctgcggtccgtctggttctggattgtgctggcggtgatcctgaccggtgcggtttggctgggcggtcatttgtggttgcaggatctgctgcgccagcaactgccggagcagccctga

SEQ ID NO: 95113 - DNA, 1350 bp, Enterobacter aerogenes
gtgaaaatttatcgtccgttatggaatgaaggggcgcttctggcccctcagcagttccagcagcagtctgaatgggatgcattttcccgggctggtattgccgcccgtggaaatgctttcccctggggtgttggtcgggttgagcttgatgacgcgatgctggcctccggccgcgtgcaggcgcagtcacttcgtctctggttaccggatgacacactggttgatacccgattcagtgacctgcctccggagccacgtgaaatcgaggcaccggcttctgccggcaatgccccggtgacagtgtatgtggcgttaccggtgatgcaggccgggatcgtcaatgtgcagacagacacgcaacctgcagagcgcccgcttcgctatcgggaagcgtgggagacaatcgccgaccgcttcggtcaggaagaagagtcgatggcggtggcccggtttaatctggcattccgtttcggacatgaagacaacggcgcctgggatacctgcgccattgcccgtctgttacaggacgggcaggggggctggcgtcaggatcctgactttatcccgccgatggcgctcttctcggcaagtcgtaatctgtgtgaacgtcttgcgctgctgaatcgccagctgcgctcccgccgtcagcgtctgatgtccatgcgtcgtgaaagcaacgacagaatggccgattttgcggtcgctgacgtttcgttgttctggttgctgaatgccctgaactcgcatgcacgggtgctatctgagtatgagcgcttccctgacagacatcctgagcaggtctgggccgaactggcgcgtcttgccggcagtatgctgaccttctcgcttgagcacgatctggatgccattccgggatatgaccaccgcgcgccggaaaaaaccttcccgccgctgtttgacctcatcagtgagctgctggaggccagcctgccgtcacgagtggtcgcggtcaggatggatcgtctggatccggaaacctggaaagcggtactgcatgatattcgtctgcgcgatgaagcggatttttacctttccgtacgagccagtcagccagcatggcagattgctgaacggttcgcagagatgtgtattgccggtgccccggcgaatgtcggtgaagtatccggcgtggccgtcgagggaattggcctcattgccctgagccgtgtccctgctgcactgccggtgcgtctggagaaccagtactttgtactggacatggagagtgatgcggcccgcgaaatgctggatcagggggtgtgcgtattctacgttccatccctgctcggcgagctggagcttgaactgtttgcggtgctgcgctcatga

SEQ ID NO: 95114 - DNA, 1542 bp, Enterobacter aerogenes
atgtctgtaaaaaatgagaatgcggctggtggcgaaagcgtggtgctggaacgtcctgctgcgggcggggtttatgcgtccctgtttgaaaaaatcaacctgaacccggtctctgagctgagtgcgctggacatctggcaggacgcgcaggcgatgtcggatgcgaccgcggatgaacgattaactgccgggatgcaggtgttcctggagtgcctgacaaaatcgggctcaaaagttgaaaaactcgacaaaaacctgattgaccaccatatcgcagagctggactaccagattagccgtcagctggatgcggtaatgcacagcgaagaattccaggcggtagaaagcctgtggcgcggtgttaagtccctggtcgacaaaactgatttccgccagaacgtgaaggttgagttgctggatatgtcaaaagaagacctgcgtcaggacttcgaagacagtccggaaattattcagagtggactgtataaacatacatatatcgatgagtatgacaccccgggcggtgagccgattgctgcgctgatttcagcgtacgagtttgatgcgtctgcgcaggatgttgccctgctgcgcaacatttcaaaagtctcagcagctgcccacatgccgtttatcggttctgccggcccgaaattcttcctcaaggattcgatggaggaagtggcggccatcaaggacattggcacctacttcgaccgtgcggagtacatcaagtggaaatccttccgtgagacggacgatgcccgctatatcggtctggtgatgccgcgcgtgctgggtcgcctgccatatggcccggataccgtgcccgtacgcagctttaactacgtggaagaagtgaaaggcccggatcacgataaatacctgtggaccaacgcatccttcgcctttgcatccaacatggttcgcagcttcatcaacaacggctggtgtgtacaaattcgtggcccacaggctggtggtgccgtgcaggacctgcctattcatctgtacgatctgggtaccggcaatcaggtgaagatcccgtcagaagtgatgatcccggaaacccgtgagtttgagtttgcgaacctgggctttattccattaagttactataaaaacagagattattcctgcttcttcagcgctaactccacgcagaagccggccctgtacgacactgcagatgccacggccaacagccgtatcaacgcgcgtctgccgtacattttcctgctgtcccgtatcgctcactacctgaagctgattcagcgtgaaaacatcggtaccaccaaggatcgtcgtctgctggagcttgagctcaacacctgggtgcgcagtctggtgaccgaaatgaccgatccgggcgacgagctgcaggcttctcacccgctgcgtgacgccaaagtggtggtggaagatattgaggacaacccgggcttcttccgtgtgaaactctatgcggtgccgcacttccaggtggaagggatggacgtcaacctgtcgctggtttcccagatgccgaaagccaaatcctga

SEQ ID NO: 95115 - DNA, 501 bp, Enterobacter aerogenes
atgtctaactcttcctttcagtccgaaatccctaaagcgcgtattaatttaaaacttgatttgcacacggggggcgcgagcaagaaaacggagctccccctgaaattgctggtggcgggcgacttcagtaatggtcaggagtctgcccctctgtcagagcgcaaaaaagttgatttgaataaaaataatttcgattcagtgttatccgaatattccccaaacgtcagtctgaccgttaaaaacacgctggctgatgacggcagcgaagacaacatcagtctgaccttccggagcatgaaggattttaccccggagcaggtctcccggcaaatccctcagctgaaggcgatgctgtccatgcgcaatctgcttcgcgatttaaaagcgaacctgctggacaaccaggctttccgtaaagagctggaaaaaattctgctcgacccggcgttaagcgcagaactccgctcagagctgtctgctctcgcacctaaacagccataa

SEQ ID NO: 95116 - DNA, 612 bp, Enterobacter aerogenes
atgaaaaaagctcacgataccttacccccggaacaaaccgtcgcggcactggcacattttgcatggtgcgcactggtcgccttacgtaccgctcagcaggatggtcaggcgctgtcgccactcagcacgcatgcatttttgatgcgctggttgactgtggcgtataagcaaaaacggtttccgcgtgcaatcgcatccgatattgagagtctggtggtactggggcgccagaaaggtcctgccgcgagtttattcagccgtctggaatatctgtggtcttcgtgcacaggacctgtgtctgctcagtcggatttgtaccgactgacgtactcaattgaacagcttaaatcgcagggctggatcaatgcggtggtgagtgacagggactgggacaatgagacgcttctggtccaggaatacagcgatacggatgcactgctggtaaggaaatcggcactgaccggtggattttcggatgagggcaagcagattgcaccggttgaatttctggtgacgggcaacctgtcagcatgtgcagaggtttttcaggcccatgccctcccgccagtcatgatggcgttgaaccggatctcattacaacctgagcaatag

SEQ ID NO: 95117 - DNA, 396 bp, Enterobacter aerogenes
atgatgcagttcaaaccggttgaacacgccatcactgaagacggggaatgggtaagcgttcaggacgtcccatacaactacgtcgggcgcctgctgtgtgattcctgccatactgaggtgattattcaggaggttgcttcgggtaaggagatatttgtccatgcccgccgcaaccggagagagaggcttaacaatcagagctgccagtacgcaataagtccaccacggcgagctgcaccggtaaggcctgctggcagacgagagcggaattcgtctttccgggggccgctgaacacccggacccaaaactggcggtgtacccggtgtgaatatacttacttcggcggcaagaaatgcccgcgctgtaacgactgggtctataccgttgcgcgataa

SEQ ID NO: 95118 - DNA, 396 bp, Enterobacter aerogenes
atgtactcaaaatcttttatcgcgcttgacggcaatcagcgcctcacgggggcaaccaccgcacagctttccccttacgaccgatacacctgccacctctgcggcagcgcgctggtattccacccggaatggggtactaaccgtccgtggtttgaacacacacgggaagacctgaccgagaacggtcgccaccactgtccgtacgtacgtcctgagccgaaggaagcaaagcgcatccgtatgctgcgccgttacgtcccggatgtattaccagtagtgcgcaaggccgactggcactgttcggaatgcaacagcgattaccacggcgaacgttactgcatgagttgccgtactggcgaccacagtatcgaaatcatccgcagcgaggtggcatga

SEQ ID NO: 95119 - DNA, 207 bp, Enterobacter aerogenes
atgacaactgattacagcgttcttaatgaccaactggtgacgatggcgtttattaccggactaaccggcctgactgataaatggttttacaagttgataaaagacggtgagttcccaaagcccattaagctggggagaagctcccgctggcttgaaagcgaagtggaagcctggctacagaaacgcatcgcgcagtcccgtcagtaa

SEQ ID NO: 95120 - DNA, 540 bp, Enterobacter aerogenes
atggttgaactgcaacatcaacggctgatggtatttgctgaacagctgcagctggacagtcttatcggcgcagcgccggcgctgtcgcaacaggcggtggatcaggaatggagctacatggacttcctggagcacctgttacatgaggagaaactggcccggcatcagcgtaaacaggcgatgtacacgcggatggcagccttcccggcggtgaagacgttcgaggagtacgacttcaccttcgccaccggcgctcctcagaagcaaatccagtcgctgcgatccctgagcttcatagagcgtaacgaaaacatcgtgttgctggggccatcgggcgtgggaaaaacacatctggcgatagctatgggctacgaagcagtacgggcgggcatcaaggttcgcttcacaacagcagcggacctgctgctacagctgtccacttcacaacgtcagggccgttacaaaacgactctcaatcgtggtgtcatggccccgaagctgcttatcatcgatgaaataggctatctgccagctaagtga

SEQ ID NO: 95121 - DNA, 1023 bp, Enterobacter aerogenes
atgatcacttttgagattcgtatggaaattaaagtcctgcacaagcggggaatgagtatccgggccattgccagggagctgggtatttcgcgcaatactgtccgcagccacctgaaagccaaatctgaaaagccgcagtattcaccacgcccggcaccatcatcactgctcgatgaataccgtgattacatctctaagcggatcagcgatgcgcatccctacaaaatcccggcgaccgttattgccagggaaatcatggagctgggctatcgtggagggcttactatcctgagagagttcatccgaaaacagaccctgccagcacaggcagaaccggtcgttcgcttcgaaaccgagcccggacggcagatgcaggttgactgggggaccatgcgaaacggcaagtcccccctgcatgtgttcgtcgctgttctgggatacagcagaatgctttacatcgagttcaccgacaacatgcgctacgacacgctggaagcctgtcaccgcaatgcgttcagcttcttcggcggtgtaccgcaggaagtcctgtacgacaatatgaaaacggtggtgctgcagcgtgatgcttaccagaccgggcagcaccggttacatccatccctgtggcagttcggcaaagagatgggcttctctccccgcctgtgccgtcccttcagggcgcagactaagggcaaggtggagcggatggtgcagtacacccgaaacagcttctatatcccgttaatgacgcgcctgcgcccgatggggatcaccgtcgatgttgaaaccgcaaaccgttacggcctgcgctggctgtacgatgtggccaatcaacgtaagcatgaaactatccagacccgcccctgcgatcgctgggtggaggaacagcaatccatgctggcactgccaccggagaggaaacagtatgacgtgcaggttgatgaaagcctgatgaccttcgacaggcagccgttgcatcatccgctgtccatctatgacacgttctgcagaggagccgcatga

SEQ ID NO: 95122 - DNA, 390 bp, Enterobacter aerogenes
atgaaattttctcataccgttctgactggcctgctggtgctggcccccgttttacccgccgtagcggccactcaggtagccactggctgcgaagccaaacgtcaagagattgagcagcagcttcgttatgctatgaagaacggcaacgatcatcgcacagccggtctggaaaatgcgctgtctgaggtcaacgcgcactgcactgacgggaagttgcgggaaggacgtgaagctgatgtgcgcgaaaaaaagctgaaagtcaaggattgcgagcaggagctcgctgaagcgcgggctgacggacgaccggataaaatcagcaaaaaacagcgaaaactggacgaggcccgggcagagctggatgaggcaaaattaaagctgacacaataa

SEQ ID NO: 95123 - DNA, 1350 bp, Enterobacter aerogenes
atggcttccattcatactggctccataaaaaaaatgggcctggcagcgcttacgctggttactgcatctaatatgatgggctctggtgtatttatgttgcctaccaatctggcgggtattggttcagtttccttatatggctggttaattaccattgttggcgttattgccctcgcacttgtttttgcaaaaaacagcatgataaccccccgggatggtggaattatcgcctatgccagcgatgccttcggtccctttattggctttcagaccacgatatgctactggatcagtgcatgggtcggtaacgttgccttgctggtagcaggcgtgggatacctgagttattttttcccggcgctgaaaaatccccttgtcagttcgataaccgctattgtcatcctctgggctttcattgccctggcctcggcaggtgcaaagaccgcaggacgttctcagtcattcaccgcgtgttgtatgcttgttgttgtcctgggtacagggatagcagggtggttctggtttaagcctacgctgttcagcgaggtgtataacggtacggaggaaagcgatttatcagcagttttttcggcagcttccctggcgttgtggggatttcttggcgtcgaatccgctgtggtatcaagcggacaggttgaaaacccggaatccactgttccaagagcgacagttcttggattgttgatagccgcagtgtgctatgtcaccagttgtaccgtcatcatggggctagttccgcatcgtgaacttgttatttctgctgccccttttgcggatgcagcacgttatatgtttggtgagtttgctggggaggtggtttctgcgctgagcattattgcctgttttgggtcgatatccggctggctgattcttcagtccgaagctccacgggctggtgcacgacagggactctttcccgctttctttgcacaggtaaataagaatgatgttccaatgaaagggctgatttttaccggtgtgctgatgaccatggttttactcaccacggcatcaccagaccttgcaaagcaatttcagataattattttaatgtctgtatttgcatcgctccttccctatttgtacgcactcgttgctctgcctgttattatggtggcgaaatctttaaataaaggcaggcagtttattacctactgtactctttcagtcatggggattatatacagcctgtttgcactttttggtgcgggaagtaatgctatgttctggggagttctcatgatgatgctcaccattcccctgtatgctctggtggctgccagtcgttgtaaaaaaggcgatagtatcctctaccttgaggataactaa

SEQ ID NO: 95124 - DNA, 2349 bp, Enterobacter aerogenes
atgagtattaatgaaaagccccatttccctgtactgataatctctgaagatggcagtggaaatggtatatctgacctctttaatacgcttcggagtgaactggagaaatataatcatcattttattttcgcccacacagaagaagcggcgctggctttgattcggcaggagtctggtgctggttgtgtcattattaacgactgcggcattaggacccacaacagcagttcactttttttcacagacgtagttcgtactattcggggaaaaaatagaaatattccaattttcttttgttcgactgcacctgcgctgggccgtttacctattggcgttatcaaagagctacatgaatcaattaatgtgtgtgacgactctccggtatttattgcaggacgaattcacctggcacttaaaaaatacgttgaggatctgcttcctccgtatttttcagcacttaaaaaatacgcacttgacagcccctattactgggattgtccgggacatcagggcggggtagcatatcttaaacatcctgttggtcgggaatttattgatttttttggtgaaaatctgatgcgttcagacattggaatatcaacgccggaaatgggggactggctggagcataaaggggccccggaggagtcagaaaagcgcgcggcccgactgtttggtgccgataaaaccttttatgtaaccgggggatcgtcccagtcaaatcagatcgttggacattctcttgatctgaagaataaagttgttctggtggaccggaactgtcataaatccgtcaatcatgaactgacgatcacgcaggctaatcccgtttattttcagccttcccggaatggatttggcattattggtttgatatcgcccgatcagtttacggctcaagtcattggaaaaaaaatctcggaaagtatcttggtaagtcaggcccaggagttggagcctgtgtacgctattattacgaactgcacctatgatggcttaatttatgatattacctcactgacagatatgcttggtcaaacacttccgcgcataaaattcgatgaggcatggtttgcatatgctgcatttcatcctttatatcggggacgttttgcaatggatgtcccacaggacaaacagcacggccctacactctttgcggttcaatcaacgcacaagatgcttgccgccttatcctcggcatctatgatacatatccgaagcaatgagcgtgctcctgtggattatgacgtctttaatcaggcatttatgatgcacggtacgacatcacccttttatcccattattgcttcaatcgacgtggcaacctcaatgatggaaggtgcggcaggaaaaaccttactggatgaagcaatccacgatgccataagttttcgaaaaacgctggtatctgttgccgacaggcttaaatcttcaggatcagaaggatggttttttgatgtatggcagccagaaacggtcagcatggaaggaaaaaaagtttcttttgtagaggcggatgatgaagtgctggcgaataatccggagtgctggttcttgaccgcgggtgactcgtggcatggttttgagaatttaccccacgggtatgccatgctggaccccctgaaagtgacaatcacctgccccgggcttgacgcgcagggaaatatgactgatttcggcatcccggctccggtcgtcgtgaaatacctgaacacgcaacgtattgtcccggcaagaaatggtgattacacgattttgatcctttttgctcttgggtcaactctcgggaaatggaataccctgatagacagtctgatgatgtttaaacatcattatgatatcaactccccgcttacggaagtgcttcctgaggttgcagtcctttctgaccgctacgcgtctatgggattacgggatttatgccaggcgattcattactccagtaaagagctggatattgctggactggctgaacgagcctgcgctgcggaagcggttccggttttgaacccgtcgcaggcatacgagtgcctgacctctggccagactgagctggtgaaagtggaaaatattcgtaatcgaacgcttgccgtcatgatcactccttatccgcctggcatccctcttatcatgccaggtgaaaaaatgtgtggtggaacagaaccaattattcactatctgcttgcattacaaacctttgatcagcgttttcccggttttgagcatgaattacagggagtggaaattgataaggatggggggtattgggtgaggtgtatcagggaaaacccggggcctgtaaaaaaagtctgtcatgtcgcgtcattgccttcaccgcttcattaa

SEQ ID NO: 95125 - DNA, 693 bp, Enterobacter aerogenes
atgcttgataatatcccgaaggaagtgctcgagagtataaaaaaactatcgcctaatatatcaaagcaggtcttaattaactgggagtacagtgaggacgcgtggtgcctaaaaaatgaaaatatgcaaccgatatatatgaacaccatttacaggcgtcttctcgaaaaaggggaggatggtacatcgtgcgcacttacgcccttcaaaacagctatcgctatgcacgaccatcgtgtgaagatggaaagacgcaaggttttggctaccggaatacttcctgtaagcactgttgcagcactgagcgtttttgaatgcgaacgaatgcctttttatgatagttatgcagaaccttcgggtattatcagtcattttaaatcgataagaatggtgacgcctcgattttttatcaatggggaatctggggaggttctgacaacaacatgtcctcatggctcattttccgccagggaatgggaggttgcctgtctgatgatggcgggtctgtcagagaaagaaatggcggataagctttgtcgctcactaagaacgattaaatttcataaaagtaacattctgtcactgacgcaatgtcggagtacccgcgactttatttccctggccagaaaaaataaatgggaagtctatcttccgccattgtttagccagccgcgttatatcataagtcagtaa

SEQ ID NO: 95126 - DNA, 189 bp, Enterobacter aerogenes
atgacatacgaagaaaagcactcgtcagctgtcattaagcggttcaggaaaattagttcggtggagttttttgtcaggaaaaccttggtgatgcttgatgatccggaagagaaattatttttaagcgcccttgcgcagaaaaaaattgaagaactggaaagagagtcgatctctgaggtggtagggtga

SEQ ID NO: 95127 - DNA, 471 bp, Enterobacter aerogenes
atgtcagtaaaatcacagtttcttgaaaaattgcagaccagacagtctgctccggcttcatctgtcagcaagactcaggctgatattgctgagttttgtctgcgaataacgcaacttcaggagcagatggacgcgtggctggaaggtaccggactaagcgtggaggcgtacagtacatccgttacggatctgctggtggagaacgggacttttgaaattaccgccctcgttctgcgtattgacgaccggtctgtaaaatttgtgccggcattcctttatggtcagggtgtaaccgggtgcgtggaggcgaccttccataatggaggactcgttacgcctctggggcgattatttatgcggtcaggcacggtgaacaactggacctttgttccgtgtggtgctttatccccctccgggcagggttttgatgagagcacattttttggtttgattctggcgctccttccatag

SEQ ID NO: 95128 - DNA, 453 bp, Enterobacter aerogenes
atgaatgaaattccacgtccgtcgctgtatgaaacgctctttggcaacttcaccggtggcctcgacctgcatcaggtcagtgaacagaatcaggtcatattgtcggtgctggataacatgcagcgtatcctcaactgtcgcgccggcacgctggcgcacctgccggactacggtctgccggatatgactaaaatcctgcaaggcatgccaggaaccgcacatcagttgctcaaaacattctccgacgtgctgctcaaatatgagccgcgtctgaaaaaaattattgtcgtcctgctggagcagaacgtccccggcgagttgcgttatgccattgacgctgagctgaagggcattggcctcgtacgctatggcaccgagtttatgcccgagggacgagtgatgctgaggcatctgaagcaacagcagtatatcgatactgcaacccgtctgtaa

SEQ ID NO: 95129 - DNA, 537 bp, Enterobacter aerogenes
atggcgattaccgctggtaaattttctctggctgcactggccgctggtatcaccttgatgctggcggggtgcgggctgactcaaaaagtgacggacggcaccgttgctgtgaccaaatcgatattttataagcagataaagaccctgcatctggatattcgggcccgcgaggccgtgaacagcaatgccggtggtgtgccgttgtcgacggtggtgcgtatttatcagctaaaggaccgcaagaccttcgacagcacggactacccgtccctgtttaaagccgacagccaggccattaaagcagaccttgtggcagagaaagatatccgcctgcagccgggtggcgcggtgatggtcgatatgccgatggaggaaaatgcgcagtacgtggcggtggccggaatgtttatgtcgccggaccaggtgaacaacacctggcgcgtagtcctgagccgcgatgaccttcatccagataaggctcgcgtcattgaagcgggcaacaaccgcctgaccctgaaggcgctgaaagatgaatga

SEQ ID NO: 95130 - DNA, 1104 bp, Enterobacter aerogenes
atgcatccggtggaaagagaaccacagcccgcgcctgcccggctgatagcgcagctgggcgaccggctgccgcacatgaatttttatcgcttctgccagctgctggaacagagccagccggataaaccggtcaccggcagtacctggcaggtactgcatgagccggtgcgctttcgcccccatccggggatggggttcccggcctcagaaatcaaaagggctgagccgcctgaacatccgcacctgccaccgacggttcgtatcacgtttatggggctctacggcgtggagtctccactgccgacgcactatatcgatgacatcacccagaggcgggaagggtatgaagccacagcctattttctcgatatcttcaaccaccggctgattgcccagtattaccgtatctggcgtaaatattcctacccggcgaccttcgaagagggcggtaaggacaaaacctcgcagtacctgctgggactggccgggctcgggattaacggctgcacggacagtatcgcgaccccggtttcgcgctttctggcgctgctgccggtcatgttactgccggggcgtaccgcagaaggtatggcctcgctggtgcacctgctggcacccaacacgctggcgaaaatctggcaccacgacaaacgccgtgtgcccctgaagaagcccctgaccatgagcgtgcgccagcctgtcaccctgacaaaccgtccggtgatgggcaactatgccactgacgtgaacagtcaggtgctgatgcgtctgaccaccactgacccggcagaagtgcagggctggttacccggcggtgaactgcacggtgacttaatggcactgctgcatgtgtaccttggctcgcgtcttgatgtgcggctgcagttgtgtgtcgaccgcagtctgctgccggacgcgacgatgagcactaaacacaaagctggctcagtgcaactgggccgtaccgccgtgatgcggccgctgaatgcggcaaagacagtcatgcaccccaaaaccttaaccatcaatcttggccgctatgagcgggtacaggaaaatattcaccgcaaggagaccgatgaagatggcgattaccgctggtaa

SEQ ID NO: 95131 - DNA, 1764 bp, Enterobacter aerogenes
atggaagatttgaccctgcgttattacgacgcggaaatgcgctacctgcgtgaggccgcgaaagagttcgcgcaaacccaccccgatcgggcggcaatgctcgacctggataaggctggcacacccgatccgtatgttgaacgcctgcttgaagggtttgccttctcaatggggaggttgcgcgaaaaaattgacgacgacctgccggaactgacggaaggactggtcagcatgctatggccacactacctgcgcaccattccgtctctctcggtggtggcactgaccccggcgctacatgcaatgaaaatggcggaggtggtgcccgcaggtcttgaggtatattcccgtccggtggggccgaagaacaccgtctgtcgctatcgcaccacccaagatgtgatgctcaatcccctgagcgtttcgggcattaccatgaccactgagcccgacggtcgttcgctgttgcggatgcgttttgcctgcagcagtcaggcagactggtccggtgctgacctcagccgtctgagcctgtatctcggggcggatgcactggtcagcagccagctgcatctgatgctgaccaaacgtcaggccgcactctatatgcgtctgcctggccagaccgaccgcatccggcttgacggatatttctcaccgggcgggtttgcggaggaagacgggctgtggccgaagggcgataccgcgttcagcggctaccagctgctgctggagtatttcaccttccgcgacaagtttatgtttgtccacctcaacggcctggatggcattacaccgcctgttggagcggagtatttcgatgttgaagtggtgttcagtgcgccatggccgtctgacctgccagtcaccgatggtgctgtccggctgcattgcgtaccggtgattaacctgtttacgctggaggctgacccgctcaccatcaccgggcttgaaagcgagtacctgctgcgccccaaaaggttgcaggacggacataccgagatttattcggtggattcggtcactggctcaaaccggaccagtgatgcggagtatgtgccgttcagcagcttccgccacaagggcgggatgatgcgccgccatgcaccaccccgttattaccacacccgtgtgaaacgcagcgtgaccgggctgtatgacacctggcttatccttggggggcaccagtgggaagaggaccgcttgtttgagcgtgaagccgtatcgctgcaaatcaccggcaccaacggccagctgccgcgccgtgcactacagagtacgctgcttgaccgctgtgagcaggtggtcagtacacaactttcagtacgcaatctctgcaaaccaacgctgccagtctatccgccttccgaagaccgttttcactggcgggttctgagccacctgggatccggtttcctgaacatgatgagtaccgccgaagtgctgcgcgggacgcttgcgctctacaactggcaggaagacgagctgaacacccgacgtctggaggcgattcagcatgtggagcaccaccgccttcaacgttttgaacagggctacctgcttcgggggctggatatcgaagtgaccctcgacagcaacggtttcaccggtgagggcgacatccatttgttcggtgaaatgctcaaccgtttcttcgcgttgtatgccgacatgaaccagtttaatcagcttaccctcatcgttcagccagaaggaaaatgcatccggtggaaagagaaccacagcccgcgcctgcccggctga

SEQ ID NO: 95132 - DNA, 1596 bp, Enterobacter aerogenes
atgagcacgctaaacacgttactgagtgcctgtcaggcagaacaggaaccattacttgtagcaacccgtgagcgtgtggcgcagtgggataactggctgcagccgctgtccggaccctcgcccactggtgaagatccgggctatgatgatgacttccagcagatgcgtgaagaggtcaacaaactcactggcgcagacaccgagcttatctgccgtctggcggagaagctgctgaccaccactgcaaaagacattcgtgttgcgacgtactactgctgggcgaagctgcaccgtgaaggtgagcaggggctggccgaaggactcgagctactggccggactactggcgcgctttggatcacaactgcatccgcagcgtgaccgcggacgtaaggcggcgctggaatggctggccggttcgcgtatgactgactccctttccctataccctgaggtggtcaggaacgatgcgatgcgaaccaccggggcgctgttgttgattgcgcagcttaccgaaaatgaaccggatgaaatacgccctgagctgaacgcgctgtatggtgccctggaaagccgtctgcagaaagcgggtggagtggatgcggtcgtgccgcagaatgccagtaccagcgaaacaccttccacggctggccacagtgatgctcctccaatcgggcgtatcacttccggtcaggatttgctgtcacaggcccgtacgctcagtgaatacctgcgtgagcagcccgatggctggctgtctgcccaccatctgatgaagagtctgcgtcatgacaccctgcgggccattccggccccggatgcacaggggcgtactcgtatcgaaccgccaagagcagaccagcgtgcgttgctcaagcgcctgtatctgcagcaaaactgggctgagatgctggaaacggctgacagcaccttttcccgcggggccaatcacctgtggctggatttgcagtggtatatccaccaggcgctgacgaaatcaggtcaggacactctggctggcatcattgctgccgacctgaaaggactgttgacccgcctttccggactcgaaacgctggcgttcagtgatggcacgccgtttgcggatgaagtgacgctgaactggatccagcagagcgtgcttgataccacaggcgggtggggcaacgacacgccatcagccccggccaccgccggtaacgatgacattctgacgctggagccggaagccgtggcactggccgacagtgaaggcctggatgccgcgctgggctggttgcagacccggccgggcatgaccaccgatcgtcagaagtggctgttgcgcctgctgatgggtcgcattgctgagcagtacggaaaaaatgacctggcggtgcatctgtttgcagagctgggtgagtgtgcaagagaagtgaccctcagtgagtgggagccagagctgctgtttgaggtacaggcccgccatctgaaactcctgcgcctgaaagccggtcgcagtgaggctgataaggcccgccttacgccagtaatggaccagttacttgccgggctgatcgccgtcgatccagcccgtgccgccgtgctttgcggttaa

SEQ ID NO: 95133 - DNA, 3414 bp, Enterobacter aerogenes
atgacgccggttagttcatggagcagaggagggcttgccggcattgtagccctgatctcactcgctatactgggcttgatcctgcattttggtcctcaatacggacttgatacacgcctgaaacaggcgatggcatttgcggctatttggcttgtcttgctgattattcgttatacgccgtttgtgttccggtttatgcgggaaaagtaccatcgctggcaggagcagaaaaacagcgcgttgccttctgatgaatcaagagttgcccggaccgcaccacacaacgtcaacgtcgacaccatccgtctcgccatgcgcaacctctacggtcgtcgctggggccgtaaaacgcgcattctgctgataactggcaccgccgctgaagtggagcagctgacgccgggtctgacgggccagctctggcaggaagaccggggcacgctgttgctgtggggcggagacctcaacacgccagccgacagtgcctggctgaccgcgctgcgcaaactgcgtcgccgtccggtggatgggctggtatgggtgacctcggcgttcgaccagctgtcagcgccggggctggagcagccattaccggtgccatctgaaagcaccatggactccctgtcccatgccatcagcgcccgtatggaaacgcttggctggcagcttccgctgtatgtctggtccctgcacccgcgcgccggtcagccggaaggccgcatcgtgcaggcgacaggctgtctgctgcctgtcggttgtcgtactgaagggctggcagagcagctgtccaccctgacgtcagatttgacctcgcagggtctgcaacagacctgtgatgatgttaaacataacttcctgctgacgcttgccgaccagctcattcgtgaaccggagagtgtgaccgcgccattgtcggtgatgctcaatccgtatcggccactgccactggccggggtggtgttcagtcagccttctgccggcgctgaacgtgccgtagcgcatcactggggcatggacaagcgctgggatgtcctgcctgaatctgtcggaatgcttcctgccgcgctgcgccccgttaaaccaggcattccgtggcgcagggtgttggtttctgctgttgcgcttacgatggtgagctgggctgtgtggatgagcatcgcgtatgtcaccaaccgcagccagattgccggtgcaaatgccctggcatctcttgccgcccgggagaatcagccgctggagcagcgcctgcatgcgctgtcggaattgcagaagaccctggctcgtcttcagtatcgcgctgagcatggtgtgccatggtatgaacgtgccggactcagccagaatgatgcactactgaccgcactctggccccgttaccgggacagcgcacaaccgttgttacgggatgcggcggcagaccatctgcagaagcaggtcagtgcctttaacgcgctgccgccgggtagcccgctgcgtgaacagatggcaaaaagtacctatgaccagctcaggctctacctcatgctggcacgtccggagcatatggacgcggcatggttcagctctgctttgctgaacgactggccgaaacgtaacggtgtgaaagacgccgtctggcagggtgtggctccgtcactgctgacgttctggggcgcgcagctgattgcgcacccggaatggaagctccgtgcggatgagagcatggtcagtcaggcgcgctcgctgctggttcgcctgatgggcgtgcgcaacagcgaatcgaccctgtaccagaagatgctctctcaggtggcgcgcctgtatgtcgatatgcgcctcgaagatatgaccggtgataccgatgcttcccgtctgttcagtaccaccgaaattgtgccgggcatgtttacccgccaggcctgggagcaggcggtacagcccgctattgaaaaagtggtgaaagctcgccgggatgaactcgactgggtgctcacggacagtaagcgtcaggtgaataaacaggatgaaacctcaccggaagcgctgaagcagcggctgacggagcgctacttcgccgactttggtggtgcctggctggcgtttttgaacagcctgcgctggaacccggctgcgacgctgtcggactccattgatcagttgacgctgatggccgatgtgcgccagtcccctctggtggcgttgatgaacacacttaacatccagggacgcaccggacagaccggcgaggcgatttccgactccctggtgaaatccgcgaagaatctgctgggcggtgacaacaaagatgccattgaccagagtgccggtgttcatggtccgctggatgcgacctttggtccggtactggcgctgatggataaaagtaacaccggggcacaggcgttgagcctgcagtcatatctgacccgcgtgacacaggtccgcctgcgcctccagcaggtgaccaacgccgctgacccgcaggcgatgacccagaccattgcccggacggtattccagggcaaagccgtggacctgactgacacccgcgattacggcagcctggttgcggccgggctcggtcaggagtggagcggttttggccgcacggtgtttgtgaacccgatggagcaggcctggcagcaggtgctgaccccggcggccgacagcctcaatgcccagtggcagcaggctgtcgtcagtgagtggaattcagcgtttggtggtcgctatccgtttaatgatgccagcagtgatgtttccctgccgctgctggcgaagtaccttaacgcggactccgggcgtatcgcacagttcctgcagacccgcctcaaaggtgtactgcacaaagagggcaaccactgggtgccggacagcatcaactcgcaggggctggtgtttaacccggcattcctcagagccattaacaccctgagccatatctcggatgtggccttcacggagggcaatgccgggatgaactttgagctgcggccgggcaccgccgatggtgtgatgcagaccgacatgattatcgacagccagaagctgacctatatgaaccagctgccggcgtggaagcgcttcacctggcctgcggataccgaagcacctggtgcgaacctgagctggattagtacgcaggcgggcactcgccagtacgcagatattccgggtagttggggcctcatacgcctgctcgataaagccagcgtgaaagcatatccgggtgtggggagcagttacagtctgagctggaaagccccggacggtcgcatgctcaattataccctgcgtactgaagcgggtgaggggccgctggcgctgctgaagctgcgtaacttccgcctgccggaaaccatattcagcacgaccggcgctgcggcatcaggcgaggtcgccagcgcggccagcgatgcagaggaggtctactga

SEQ ID NO: 95134 - DNA, 1161 bp, Enterobacter aerogenes
atgggctgggaaaggtcgaaagcaacaacaacggaattgccacctgagccgtcgttttttgggtggctgatggcaggtggtgttgctgctgttgtgggggtactgctgtttatactccatgcttctggtatggttaaggcgctggctacattcaatatctggtggctggcaatcagtcccataattggctggttattcctgttttgtctgcgaggctggctctggggaaaaacgattgatgaacatcgttttttgctaaaggaagctgaatacgggcagcagcagtgggaatcctgggcagggcgttatctggcggtgcttggcagcagtattctgttgccctcaggtgtgacgtctgatgctatcgcgaaatcagaggcatcaggcgcgccgcagcttctttcactgaccagccaatttggcgctcaacccgtaactttcggctctctgttagagctgggtctggctggtgtgcagagcgcaatcgcggcactacccgctaccgtgccgcttaacattactgttgtaagcgacgacaattctgcggaatctgactctcaatttcacaaagtctggggaaatctatatcccgatcgcgctatctctggttccgtttctttttgtgaaaccctgtcttttgcctgggttgaagagcgccttaaaaacccggttctggatatcgatttgatcctggtaatacagcagcatgggggcgggcgatattccgatgcgctggcgagtatgctgcttaccagcgatgatgtggctgaaaaatatcagcttccccattctgcccgtatattacggccgatgccgctggatatgactcatttcaacgctgatatgggattgtttctggaaacacaaacgatcgcctgccagacatcaaacgtgttttgtgactacggggactggaatgaccgttttgccgggctaatgacagcgtctgaatcgcatcagacgacgtgggtgccccaggatattgatgtactggaaaaatataacggtattccgggggctggcagtgcatggcttttagccgcattgctctccgatattacattggttggccaggcacctgttttaggtctgtttacttccggaactgatcgttttgtcagtaccgttacttcagggagtattaataatgacgccggttag

SEQ ID NO: 95135 - DNA, 768 bp, Enterobacter aerogenes
atgtatagccaatcaaaaattattctgctttccctggtgttgttttcctcggcgggttgcagcataagtcgggccgtaaataaaacgttatctccaccggcagatacaagatgggtcaattttgaagtaaaaaacccgtctcagtatacgaaaccgtttccgcttgaggtcagatacatctcgtatgaatgcatgaaaaaaagaatcagtggatttgatggctcagtgatcacggagcccagctataacgttattgggatccccatgcagcaagagggcggggatatctggaaagcaaaagttgctatgacgggtggtggctcgtgtaaatggaccctgagtgcggtcaatttaggtatcgagtatatagacgcaacacaccttggcaaagatcttgtacccggtacagcggtaggtgtgacgcttgcttttgataatgatgcttcgcgtaatggccaattcaccttctctacaggtgacttaaatatttcacctaaatattatccatatattcgagaaaggaaaatagcagagaaaacaaaatcactttctctgttagggaaaaacaatttcctttcttatagagtgtctgaatttagtaatatttatttttaccctgaaattgatgagatgaaagttgttaagtatatagagccagaaaaaaacgatggtgtgtactccaagataatttatccggacggaagtgttgctcctgaaagaactctcttccctgattttgataaagttgacaagatgaaaatcaattga

SEQ ID NO: 95136 - DNA, 774 bp, Enterobacter aerogenes
atgtctaatcaatcaaaaattattctgctttccctggtgttgttttcctcggcgggttgcagcataagtcgggccgtaaataaaacgttatctccaccggcagatacaagatgggtcaattttgaagtaaaaaacccgtctcagtatacgaaaccgtttccgcttgaggtcagatacatctcgtatgaatgcatgaaaaaaagaatcagtggatttgatggctcagtgatcacggagcccagctataacgttattgggatccccatgcagcaagagggcggggatatctggaaagcaaaagttgctatgacgggtggtggctcgtgtaaatggaccctgagtgcggtcaatttaggtatcgagtatatagacgcaacacaccttggcaaagatcttgtacctggcactgccgtaggggtgtcactcgcttttgacaatgatgcttccaggaacgggcaatatactgcaactgaaggtgatttgaatttatcaccaaaatattatccatatatatctgaatggaatctaggcgaaaaaaagaaagagttgtctcttttgggtaagaaaagttttttatctttaagcgtttataacgtaaataaaattaaattttcacctgtaatagatgagagcaaagttgtaaaatatatcgggatagaaaaaaaaatcaaaggtgcacattcaaaaatagaatatccagatggcagtgttatttccgatgggactgtatttcctgactttgataaagtcgataagatgaaggttggcaaataa

SEQ ID NO: 95137 - DNA, 2028 bp, Enterobacter aerogenes
atggctaataattcactggtcacttccataacccatagtaacgctgatgttatggcaggaaagcagaaaccgtattgggtcgaatttcaacttgtagatgaacagaatgaacctgtcgcgaatatgccatggactgtggaaagcgctcatcctgtctccgggctggtggagggattcacttattctggtcagagcgatgctgatgggctaatcagagtcgatatgccgcatgggctggaactgaggttgacgttagatggcaatcagctggctactgaaatggaaaaacgtaccttgcgtgttagcagggatgcggaaaatgattctgttgttcgccccggtgcagaagagaagggttatatctggcactatgcggtagtgggcgaactatgtcatcagaaacctgatttgcaactaagagaaggggaagagctacctttattccattttccgaacagcagttcatttcagggggttaaggtcagaacaaatgagcttgaaaaacgccatgtgattgaaatatgcccgttcagagcctgggagcttgttctgcatcatcaaaaggactattccattgcgaatgggattaaccttggggcagcagcaacgcttgcttatgcagatgacagtactctggacaccgtgtcaattaggcgcttttttattaatcagtgtcaggatctttcacgcttaccccagctttataaagacggctctgcatggaatactcttgtacaggatgttcccttcagcgatcggtattatcccccggtgtttatggatacctcgcgggatacttcgcctaaggtagataagaaggattcacaggcaacagcacagacagggggtgatattgctgcaaccgaagcagatggagatacgcagctttattatgcctataatacggataaggtgatcgttgcctggcgtggaacggccagcttgtttgatgtggggacggatcttgcgttcaggccggttaattctgaagtctgtgataaagataaaacgcaatgtactggcttactgcctgctggaaaagtacataccgggttttggagtggatatagtcgggttgagaagaaatttaaagatgaaataaagatactaagagcgttagttgaaaacaaagaactctttatttgtggacatagtttaggtggtgcactggcattaattcatgcagcaaagctgaaggattatattccacttctttatacttatggaatgccccgaaccttcacccgcgatgccgtaatgcagttatctgagattactcatttccgtcatatcaatgataacgacccgattccagctgtacctgcggaagccaacctggataatgaactatacaaactctggggatggcttggcggtactctgggctttttctggtcagtgggtgaacttctcgcttatcagatggttacctggggagactgcttctggcaccacggtaatacggtggcctttctcaccgtcacccagagcagggagtggaaagagtgtaagagagacctgccaactccggcagggtgtattcctatcagaagttcacttcctctcaaggctaaactttacctggtgcctgcgctggcggaacaggagatgcagcaggctggccagcagcaaaaagagtttaaagcgtcattaacgcaggcagatctaaatgactttttccccaaaggcagtaatcccgacagaggcgctaacttaaatatttttgagcactttatgaccgcctatatgccctatatgtataacaaggtgttagagctgattgataatgccgggatagtggaaaagcgtacctttactgagcatcgttataacgttgattcattcagggagcagatggaagaaaataaaaatgccataccggagaaagagttagcaagaaataacatctttctgggtatagaagggctgcttggcgtatctctttcctctacgttgtccatgccgtctggcaacgatacgcttttgcggtttgctcaatacggagaagaggtgatggaaaatgtctaa

SEQ ID NO: 95138 - DNA, 483 bp, Enterobacter aerogenes
atgaaaagtaaaataataactgggtcaggttcggtgatagctctgttatatacgctgttgattatttttgctgtggatggatttgaccggacaggattgattaatagcacagtagctttctttggttttgaaaatggtaatgtttatgctgcccttttattcctttgctgtgtgactgcattagtgttttactatattgtaatctcaaagggtaagaataattccattggggtggtgttaattatttcatttattattggtgctgtcttattgatattggttgttaagattgcttcagtacaaaaatacctttttgatttctacatatcctggttttaccatggggtgtattatgaaggggaagataaggtgccacaggtcttttcattcatttcacgtctcgtggttctttgtttctgctgcggcagcattatttcactctttatcgtaaaatctattaatcgaagcctgattaagatgtga

SEQ ID NO: 95139 - DNA, 624 bp, Enterobacter aerogenes
atgcctaacgacaaaacggtagcaaaaacgaatagtacgtctgactcacaaaaaaatgtgtcattaaaggttattacattcgatgaattatggtcggcttatccttccagtacgattgaacatattgatccgtcaagtaaaaaagatgttttttccgatcattgtgcaataaatgtcagtgatgctctttataaatgtggcatccttatgaaaactttcagtaaaacccgttgttggaattgcccgacacctgatccaacgacgaaaaaggggatgcacgctatcagggctgaagagttgagtggatatcttaaatctcgaccttttgcggggtgccctgttccggtgaaattgaatgggaaaaatttcaaggagaatgtcgaggggaagaccggaattatcttttttaaggattactggttgagagggaatgaacggactccaactggggatcatattgatttatggaataaaagtaaattagctggtagtggcgcattggcttcttatcttcgggtgaactttcctaatgcaacagagagcgtttctggtttatttggttcggataccagaattacatcgcttgaaaaagctaccgaagtgttattttgggaaataaaatga

SEQ ID NO: 95140 - DNA, 2721 bp, Enterobacter aerogenes
atgagtctgacagatacgcttaagaacaccctgtctgcgctaactgaaggcggactgaaccgctatcgtctggatattccgtcctgcacagcttcactggatgtggaagagtttaacggtaaggagttcatgagtgagctataccactacgacattatctttaccagcagcgatcagattatcagttcagcgcaactgttgaccaggcctgccacgctgaccatgggaaccgggcctctgatggggctgaccgggcagaaagtggtgcatggtgtggtgacgcattttaagcgtatcagtggctcacgtgaccaggcgacgtaccagattattattgagcctttcctgtctctgctgcgaaaacaattccgtactcaccgcttttttgtcaataaatcggtaccggaagttgtcgccgaggtgctgcaggaacatggcctgaaaggctgggaatatgagttcactctcaaagctgactatccgaagcgcgaacagattaaccagtacaaggaaaatgacctcgcgttcattgagcgtcttctggccgaagtggggattttctatttctttaccctgcaacccgacacccagactgaagtggtgcatttcgcagacaagcagagcgcatggacgttcggtaagtctctgccactcagcagcccgtcagggatgaatgataatgccactgactcggtgtggggcgttaatgtccgacagaacgtggttgagcgctccgttaccgccagtgattacaatcaccgtgaagcacagaatatcctgacttctgtaccggcggacatgacccgtggcgacggtgacggtgttacctacggcgatgtttatcactacctgccgcgccaccttgaacgtggcgataaaatcacgccagcggcggaaaccggtaacttctgggcgcgccttgagcacgagcgttttctgtcggggcagacaactatcagcggctgcagcaatgatgctctgctttctccggcccaggtgctgaccatcagtgagcatgttgtaccgccaacactgccatcagaaacggacaacggcatcatcattacccgcacgggctatatagccagtcgtaaagacgccctgatagtgatgtgggaagggatgccgtactacgagaaccgttgctggcgtcctgctgctaaaaagcgcccggtggttagcggcagcctgacggcccgcgtcaccagtgccaaagagaacgatatctacgcctggcaggatgcatccggcatgtatcgggtgaagttcgatgctgaccgcgatgataaacgtcagggcatggaaagtatgccggtgcgctttgccaaaccctacggcggcgacaaatacggcttccacttcccgctgatacagggtactgaagttgccattgccttccacgaaggcgatccggatcgtccttatatcgcccatgccctgcacgattcccgccacgttgaccacgtcactgaagccaacagcacgcgtaacgttgtcaggaccgcgggactgaacaagctgcggatggaggacaagcgtggtgaagagcatatcaagctcagtacggagtacggaggtaagactcaactcaatttaggacacaacgtcaatgcatccagaactctccgtggcgagggggcggagctgcgtactaacgactgggtcagcattcgtggtggtaagggagtaatgcttactgcagatgctcagcctgacgtcggcagtaaaatgcttgaaatggacagcgctattgaacaactcgaacaggctctcacactggcaagaagcctgcaggcagcggctaaaggggcgaaggcaacggtatccgatatcgacagccagaagacacttaaccgttcactgaaatatctaaaaatgccaggaatgctggctagtgcacctgctggtataggcattctcagccctgaaactgttcgtcttgcttctggtggggcaagtattggcctcatgtcagggaaaaacacggatattagtacgggccagtctttcactgttgcggccagcgaggctgtaagtttgtttgctcaggcggcaggaatgaaaatgtatgccggggcagggaaggttgatattcaggcgcaggcggatgccatgaatgtctcggcgttacaggacgttaccattatcagtggtcaggggagtgtaaaggtgaatgccagccaggagctggttttaagttgtgggggcgcttatataaagcttagcggcggaaatattgaactgggatgcccggggaatattttgctgaaagcggcaaatgttaatcagacaggccctgcgagtttaaatacaccacctgtgactttcccgaaagggtattcgggctccttcaccatcaaagatacggagactggcgaagttaagccttttacgaagtataaagttacctcgccagaaggagatatttttgaagggatatcggatttatcaggaaaaaccgccccgctttattcatcaactcctggtaagatgaaaattgaactccctgatacgttgagtgatgaacaattcagggcaatcgataagtcgacaggaacgcctgtctccggttatgcatactttattattgcagagagtggtgaatcagtatctggttacactgataataatggagaaacccaacgaattgagacaaaagatgagtcttctgttgaagttttctggggggaagatgcgcttgaaagaatgagcaggagttaa

SEQ ID NO: 95141 - DNA, 210 bp, Enterobacter aerogenes
atgaaggttttcatctttttaactttaatgatggcgggagtgttgtttcttcctgatacgtgtttttacacattcgttaagcgctttatccccattagtggcgacggcgaatacggcatgaacaattttgaaatgaccgtattgctgattaaaacccttgcctgcgccctcggggctggagtcgtaatcacgcttttacgtactcgctga

SEQ ID NO: 95142 - DNA, 465 bp, Enterobacter aerogenes
atggtgataaaaagatatagcactctattttttagggggttaaccgtgcccttcgtttttctgctggcagggtgtcccggtaaaggggatcgacttcagcttgatgaaacgacacaggttaaattggttagtgatagtatttgtttccacattagaaatgcgcaggattatcagcctgcaattatatcgataaatccaagaggtacgcctccgaagaaacaagggtttattgataatccatcactatcaatcagatcagaacaactatgtatccctccatcgttttatcaatttgcagataatgggaaatacatcgttgattttgttttgacctctgccggaaatgttgatgaaccaagaaagtttgttgttggtgtagggatagaccatggccaggtatataacttccccctgacggataaagaaatattaagaccatatggctcaattgacgtttctgaatag

SEQ ID NO: 95143 - DNA, 567 bp, Enterobacter aerogenes
atgtccattcatgatgccagtaagaaaaagaaggacgacaagaatcaggacgatgattccgtcagaaaactgacttccggggaaatcgccttagccagaacggtatttggtaacaggatcgattacgaaaaggtgaaaattcatcatggtagctatctgccatttggattgcagggcgagaatgtcgcaatgacacctaatggtgaactgtattttcgtaccacgttatacagagaggatttttctcagacgctggatgaccttcagcatctcttcattcatgagatgagtcatgtctggcaacgtgccaggggaatgaacgtcatcggtagaggtctggtgagttggttggtcagctatcgctacacccttgacggtcgtttgttgagtgattatccaatggagcagcaggcacagataattgccgataatttcaccttgcaggcgcatggttataaagcatggattacattacgaagatcgaatgacgttactctggatggagatatttcagaaagtgctatccggcaacattacaaagaagcgctaagagggtttccatggtga

SEQ ID NO: 95144 - DNA, 2658 bp, Enterobacter aerogenes
atggaaaatccagccgttctgttacgtcgcctgaatccttactgtgcccgtgcgatggaaggggcggcctcgctctgccagacccgtgcgcatgcggaaattctgcctgagcactggttgctgaaactgctggagcagggggaaggtgatctgacggtgctcgcccgtcgctacgagtgggatatggatgcgctctggcaggatctgctgggctggctcgataatcagcctcgctcggtgcgtcagcgtccccagctgtctgcaagtattctgacgctgatacaggaagcctggctgctggcctctcttaatggtgaagaacagatccgcagtctgcatctgctgatggcgctggtcgataaaccaaaactgctgcgttgtgacgggctgtggccgatgctgaccctggcacaaagtcagctggaacgtctgcgtccactgctggatgcgcagtcggacgaacgtccggaagtgcagcaggaagcggagctggcccacttgggtggcgatgtggaaatggtcggccgtccggtcggtgccagtgataacacaaccataaaggacggtgaactgtcaccggcactgcagaacgcgctggataagttcaccctcgacgtcaccgccaaagccagagagggcaagattgacccggtgtttggtcgcgacaccgaaatccgccagatggtggatattctttcgcgccgtcgcaaaaataacccgattctggtcggtgagcctggcgtggggaaaacggcgctcgtggaagggctggcgctgcgtatctccgaaggtaacgtgccggaaagcctgaaaacagtcgttctgcgtaccctggacctcggtttgctgcaggcgggcgcgggcgtaaaaggcgagttcgaacagcgcctgaaaaatgtcattgatgccgtgcagcagtcgcctgtgcccatcctgctgtttattgacgaagcccacaccattatcggtgcaggcaattccgccgggggcgcagatgcggctaacctgctgaagcctgccctggcgcgtggtgaactgcgtaccattgccgccaccacctggtctgaatacaagcagtacttcgagcgcgatgctgcgctggagcgtcgcttccagatggtgaaggtggacgagccggacgacgaaaccgcctgcctgatgctgcgcggcctgaaatcccgctacgctgaacaccacggcgtgcacatcactgatgatgcagtacgcgctgccgtcacgctttcccgccgctacctgacgggccgccagttgccggacaaagccgttgatctgctggataccgccagcgcccgcgtgcgcatgagcctcgacaccgtgccggaggcgctgacgcagtaccgcgcgcagctcacctcgcttgaaatcgagaagcaggcgctgctggaagacatcgcgctgggcaataatcagcatggagaacgtctggcggcgattgaacagcagcagaacgacctgattgtcgaactcgatattctggagagtcagtacggtcgcgagctgagcctgacggaacagctgctggaagtgcgccaggacatcagccgccaggccgatatcaccactctgcaaaaccagctgtcggtgctgcagggcaactcgccgctgctgtcgctggatgtggacacccgcaccgtggcgaacgtgattgccgactggaccggtgtaccgctctcctcgctgatgaaggatgaacagaccgaacttctggtgctggaaaatgagatcggcaaacgtgtggtcggccagaatgtggcgctgaatgccatcgcccagcgcctgcgcgcggccaaaaccgggctgacgtctgagaacggtccgcagggcgtgttcctgctggtcggcccgagtggagtcggtaaaaccgagaccgcgctggcgctggcggatgcgctgtacggcggagaaaaatcccttatcaccatcaacttgtctgaataccaggagccacacaccgtatcccagttgaaaggttcgcctccgggctatgtcggctacggccagggcggcattctgaccgaagctgtgcgcaagcgtccgtacagcgtggtgctgctcgatgaggtggagaaagcccaccgtgatgtcatgaatttgttctatcaggtcttcgaccgcggctttatgcgtgacggcgaagggcgtgaaatcgacttccgcaataccgttattctgatgacctccaacctcggtagtgatcatctgatgcaactgcttgatgagcaaccagaagcgactgaaggcgatttgcaggaactgctgcgcccgatcctgcgcgatcacttccagccggcgctgctggcccgcttccagactgtgatttatcgccctctgagtgagccctccatgcgcaccatcgtggaaatgaagctcgctcaggtgagccagcgcctgcatcgtcattacggcttgtccacgaatattgaagagagtctctgtgatgcactcactgctgcctgcctgcttccggataccggtgcgcgtaatgttgacagcctgcttaaccagcaaattctgccggtgctgagccagcagctgctgacccacatggccgcgaagcagaaacccacttccctggccctgggatgggatgaggaagaggggattgggcttgaattttcaggcgcgtctgaacgctaa

SEQ ID NO: 95145 - DNA, 492 bp, Enterobacter aerogenes
atggcaattcctgtttatctttggctgaaagacgacggcggcgcggacatcaaagggtctgttgacgttcaggaccgtgaaggcagcatcgaagttgtcgctcaggagcataacctgtacatcccgaccgacaacaacaccggcaagctgaccggtacccgtatccacaccccgttcctgttcaccaaggaaatcgactcgtccagcccgtacctgtacaaggcggtgaccaccggtcagaccctcaagtctgcggaattcaagtggtacaaaatcaacgacgcgggtcaggaagttgagtacttcaacaccaaactcgagaacgtgaaagtggtgaaagtgaatccggtgatgcatgacgtcaaggatccttcttacgagaagcacaaccacctcgagcagatcgagctgcgttacgaaaaaatcacctggacctacaaagacggcaacatcattcattccgattcctggaacgaacgcgccacagcgtaa

SEQ ID NO: 95146 - DNA, 1725 bp, Enterobacter aerogenes
atgcgtgatgtttaccggagtctgttaaccgccctggcgggcgtactggcactgtggcttatcctgggcttctggccgctgtcggtcgggagccgtgtggcactcagcctgctggtcattctgatgtgcggggcgatgctctggcgtcagcgccgggtatcactgcggcgggctcaggctctcagggatattgtggacgagagcctgcccccggaagattttcagggtgcggtcattctggcgtgtggcgataaccgcgcactgttcgctgagtcggtccggcatcgtgaaacccgtcagggctggtatctgcgggtaaaagacgcagaacagctgcccttgcttgcccaacacctgagtctgatccgcccggcgctggtgtcacaaatctccgtcatgctggcggtgatgccagagctgcacacatccagtgatgattttacccagtctctgcggtgctggcagcgtgctgtcgtccagtgtcgtgtggcatttggcactctccctccgctgtggaccatgacctgggtatcgctgccggcggcctgtgtggaggcagagcctgcctggtttaccacggtcagccaacggagcggtattcaggtatatcagcccggtcagggcaatgtgtcactgacggagtggacccgggagaccggctcagacgggcgtctttcccgtctgagtcagggcctgtggctggacagtctgcttacctggcagaacagcgcggtcaatgacctgctgtcggtacgccagggtgagctgccggtgatgaaaccctgtgtgcagggcatgtgcatggtgccggtgagcggtatcgcgggcaatctctggcaacagcacatcacttccgtgacagcactgccaccggatgccgttgtcaccacagagccactgccgctgcctgaactactgctgccggcgttgccacgccgacgtggtgtcagccgcagaatggtgttctggcgttatgccggattactgggcgggatttttctggcacttgccatgctggcgtcctggatgaacaaccagcgtctcattcgtaatgttggcgatcaccttgcgttatatcaccagctgacgggtaatcctgttgcaccgaaactgcgtgcgcagcagcgcctcagagccgatggcgcattgctggacgactggcagcgtcgcggggagccactgcgttatcgcctggggctgtatcaggggctgcgtctggttccacctgttgaggccgccgtcagcgactgggctccacctccaccgcctccaccggtcattaagaaaatcattcagggtccgaaaaccattcgcctcgacagcatgtcgttgttcgattcgggcaaatcggtgctgaaagccggatccaccaaatggcttgtgaactcgctggtcggcgttaaggcgaaaccgggctggctgattgtcgtgtccgggcacaccgataacaccggcaatccgcaactgaaccagacactctctcagaaacgtgccgaagcagtgcgcgactggatgcgtgacaccggtgacgtgccggaaagctgttttgcggtgcagggctatggcgcaagccgtccgatcgcaaccaatgacaccccggagggccgtgcgctcaaccgccgtgtcgaaatcagtctggtaccgcaggccaatgcctgtcagataccgggccaacccaaagcgtcatcgcaggatgatggcgcatcacaacacaatggagagtaa

SEQ ID NO: 95147 - DNA, 654 bp, Enterobacter aerogenes
atgaatacatcagaaatgagtcaaattgagcgtacgttctaccccggctggctgatggccagccagctccggggcggacaggaggtccgcgacggggaagggctctaccgccgggcgtgccgcctggtgcaggaggcgaaagctgcgctgacggaggcgggctacagcgatatcagtcgggatcacatggtctatgcgctgtgtgccctgctggatgagagtgtgctaaaccgcggggcaacagatgacggttacctgacgtggcggcgcgatccgctgcaggcgcatttttttggcaccctgaatgccggtgaagagctctgggagcgtattcgcaatctgcttaaagaaacggcacctgacatggcggtgctgacctgtatgtaccgcacccttcagctgggctttgtcgggcagtaccgggctgaagacgatgaacgacgtgaagatgtggtacgggcactgggtgaacgggtgcctgcctttacgctttcgcaggatgcgccgattgtcgcaagggcctcccgcctgcgcagcggtcgtcgtctgtactggctttcctggattatcgggacggctgtactggtggggctgtggttcttcctttcatcctccctcaccgaactggtgagtcagacggtcaggccggggtaa

SEQ ID NO: 95148 - DNA, 1338 bp, Enterobacter aerogenes
atgaaaatttaccgcccactttgggaggacggggccgctctggccccgcaacagttccagcagcaggcccgctggaatgagcacgttgccagcatggtcgcccggatggggttttctcatccctggggcgtggtagccgcagagtttgatgatgctgctctggcgttgtctcgcctgaatgccacccgtctggtggtacgtttccaggatggcacgattgttgatacagatctggcagataatcttccgtcagtctgtgatttgtccgcagcacagggcagtgaaactgttgacgtggttgtcgcgctgccgttgctgagcgccagcggtagcaaccttgataacggccaggacagtgagcgcccgcgtcgctggaaagcggaacgtgtggtggtgcaggaactggccgggcatgaaagcggtgaactggccattctgcgtaatgccatcacactgcgtttgtccactcaggaaaataccgcatacctgacctgtccggtcacccgtctggtgcgtaatgcacaggggcaatggagccgggatccggctttcattccgccgatgctttccgtttctgcgagtccgttgctgaccactgaactgggtgatctgctggttcgtctgcaggcacgacgtaagcgtctgatggccatgcgtcgtgagagtaatgagcggatggctgactttgcggtcgcggatgtctccctgttctggctgctcaatgcgctgaatagcgccgaaccggtgttgacggaattgctgcaggtaccaggtcgtcacccggaattgctgtaccgcgaactggcgcgcctggctggcagcctgctgaccttttcgctggagcacgatgccggtgatattccggcgtaccagcatgctgcacctgaacgggtcttcccgcctttactggccctgctggataagttactggaagccagcctgccatcgagggtggtcagtatccagcttgagcatcaggaccaaatctggaaaggctcccttcacgatgcgcgcctgcgtgaaggagccgatttttatctctcggtgcgttcctccatgccgaatcacgagctccagacccggttcccgcagctgtgtaaggcgggcagctttgaggatgtctcggatgtggtgaacgtggcgctgagcggaatagagatcaaacctctgacgcatgttccggccgcgatccctctgcgtctggagaaccagtacttctcgctggacctgagttctgacgtggcccggaccatgcttgagatgggcagttgtaccttctataccccgcgttctctgggagaggtgaaacttgaactctttgcggtgctgcgtacatga

SEQ ID NO: 95149 - DNA, 1542 bp, Enterobacter aerogenes
atgtctgtaaaaaatgagaacgccgcgggtggtgagagtgtggttctggaacgtcctgctgcaggtggggtttatgcgtccctgtttgaaaaaattaacctgagcccggtttctgagctgagtgcgctggatatctggcaggatgcacaggcgatgtcggatgcaacggcggatgaacgtttaacagcggggatgcaggtgttcctagagtgcctgacaaaatcgggctcaaaaattgaaaaactcgacaaaaacctgattgaccaccatatcgctgaactggactaccagattagccgtcagctggatgccgtcatgcaccatgaggactttcaggcggtagaaagtctgtggcgcggcgtgaaatccctggtcgacaaaaccgatttccgccagaacgtgcgcgtcgaactgctggatatgtccaaagaagacctgcgtcaggactttgaagacagcccggaaatcatccagagtggactgtataaacatacatatattgatgaatatgacacaccgggtggagagccgattgctgcgctgatttccgcttatgaatttgatgcctctgcgcaggatgttgctctgctgcgcaatatttcaaaagtgtctgccgcagcgcatatgccgtttatcggatccgctggcccgaaattcttcctgaaagacagcatggaggaagtggcggccatcaaagatattggtaactactttgaccgcgctgaatatatcaagtggaaatccttccgcgagacggacgattcccgctatatcggcctggtgatgccgcgcgtgctgggccgcctgccgtatggcccggacacagtgcccgtacgcagcttcaactacgtcgaagaagtgaaaggcccggaccacgacaaatacctgtggaccaacgcctcgttcgcctttgcatccaacatggtgaaaagcttcatcaacaacggctggtgcgtacaaattcgtggcccgcaggcggggggcgcagtacaagacctgccaatccatctgtatgacctgggcaccggcaaccaggtgaaaattccgtcagaagtgatgatcccggaaacccgcgaatttgaattcgctaaccttggcttcattccgctgtcctactacaagaaccgcgactacgcgtgcttcttctcggcgaactccacgcagaaaccggcgctgtatgacactgcggatgcaacggccaacagccgcattaatgcccgtctgccttacatcttcctgctgtcgcgaatcgcccactacctgaagctgattcagcgtgagaatatcggtaccaccaaagaccgtcgtctgctggagcttgagctgaacacctgggtgcgtggcttggtaacagagatgactgacccgggcgacgagcttcaggcctctcacccgctgcgcgatgcgaaagtggtggtggaagatatcgaagacaatccgggcttcttccgcgtccgactgttcgctattccgcacttccaggtggaagggatggacgtcaacctgtcactggtttcccagatgccgaaagccaaattgtaa

SEQ ID NO: 95150 - DNA, 498 bp, Enterobacter aerogenes
atggccgacagtttccagaatgaagtgccaaaggcacgtattaatctaaagcttgacctgcatacggggggcgcgagcaagaaaacggaactccctttgaaattgctcgtggcgggcgacttcagtaacggtcaggagtctgcgccattatcagagcgcaaaaaagttgatgtaaataaaaataatttcgatgcggtgttatccgaatactccccaaacgtcaatctgaccgttaaaaacacgctggctgatgacggcagcgaagacaacatcagcctgaccttccggagcatgaaggatttcaccccggagcaggtctcccgtcaaatacctcagctgaaggcgatgctgtccatgcgcaatctgcttcgcgatttaaaagcgaacctgctggacaaccaggctttccgtaaggagctggaaaaaattctgctcgacccggcgttaagcgcagaactcagagctgaactttcagccctggcaccgaaacagccataa

SEQ ID NO: 95151 - DNA, 603 bp, Enterobacter aerogenes
atgaagaaaactcacgataccttacctccggaacaaaccgtcacagcactggcacattttgcctggtgtgcgcttgtcgccttacgtaccgcgcagcaggatggtcaggcgttgtcgccactcagcacgcatgcatttttactgcgctggctcgctgtggcgcaaaagcaaaagcgcttcccgcgtgcaattgcatctgacattgagagtttagtggtgttgggtcgcaataaaggccttgccgctaacttacttcatcgtctggaatacctgtggacgtcctgcaccggggcagtcgctgcgcagtcggatttgtaccggttgacgtatgcaattgaacaacttaaatcgcaggactgggtcaatgcggtggtgagtagcagagactggggaagtgaaggtctggccgaagaatacagcggtactgatgcactgctggtcagaaaatcagccctgacccatggattttctgatgagggcaagctgattgcgccgattgaatttattgtgacgggcgacttgttagcctgtatgacggttttcctggcctatgctctccctgccgttatactgacgcctgaccggatcaccttgcatccctga

SEQ ID NO: 95152 - DNA, 561 bp, Enterobacter aerogenes
atgaataattattcaccagcttcatctggcggtaatactgctgatgccgctaacatacgtgcatttctgcaacaggccgttgaccattaccagcgattggtagcattcagctttacgctgaaattgccgtatcatgaggccctgaatgaataccgggcattgattctgcgttttcacactgaagtctggcagcgaacgggcgagtatttgcgccagcgtcagcaggcacgccgtcattcacctcccgcggttctgcgttggctgtgggaggccgtgagtacgccagaatgcgggatgattatgctgatgaacctcgatacgctggggtcagtgagaaacctgccacttatggaccgtgtgttgcaggagatgtatgcgattattggcgatgcatggcgaacggtgacggatgctgataatagcgtcaccagcatgtcgtctttcattatcagtcggacagacagatgttcattttcacggtcattcagtcagttacagaccagggtgaatgaaatggcatctctcgtcatgacggccagaacgggtgtggtttgttcgtga

SEQ ID NO: 95153 - DNA, 1605 bp, Enterobacter aerogenes
atgagtttatcccccgaactgtataatgccagccaggtaaatcttccgacacagcagtacagtcctgtgaaaaaaccctcagaaccctatccggttcagcaattccccactgttctccggaatgttatccaggcattacataacaatactcagatcccggtagaattaattggtaacgttgtactggcggctacgtcactaacatgccagtcactggttgaagtcattcagccccacacgaatatgccagaaccctgctcactttacctgatgaccatcgccgaatcaggtgaaggaaaaacaacgattaacaagcaggtcatgaaaccctgttacgtatttgcagcggagatcattcagcaatacgaacagcagatcatcgattataagaaaaaattaaaactctggaaaatccgtcagcaggcgcttgaaagcaatttaaggcaggcggtaaaaaagaattattccggggaaaatgaagaggcagaaataagtaaacatgcccagaatgaaccgctgcgccctgcccgaccaaatttcatttatgaagatacctccctcaaagcactcgttgaaggtctgaatgaacatcctgaagcaggatttatctctgatgaagccattaccttttttaaaagttatctaaaaaataacccgggactactgaacaaagcctgggatggtgagatgtttgattttcgtcgagctgacggagaaatttatcagattactccgcgtttgacattttcattaatgtctcagcccggtgtgtttatggattacataaataaacatggtgtatcagcacgagccagtggtttcctgtcccgttttcttttttcatgggtagagagttcaattggctatcgtcagatggctaacaaaaaaatggatgcagaccatgatttaaatatttttcaccagcgactggaagaactcctgcagcttaacaagctcttatctaaaaatcccacatcgagtaagaaacagctaaccctgggaaatgaagcgctggaaaactggaaaaacaatcgtgcaaaaattgaaaaaaagatagcaccagatggcgaatgggaacatatccgtgatatagcatcaaaagcaagcgccaacatcctcagaatagccgcactcatccagtttttttacgatgagagctccgaaataatttctcccggtgcaattcaatgtgcagttaacttaatggaatggcacctgaatcaggcctgcatgattttttacccaatgtcggagcgttttcagttcgaacaggatgtacgtgaattacattcatggattatgaacagaatcagacaaaacaatggctgtgctattttaaaaaatgaccttgagaagtatgggccgcatcgtctcagacgagcggaaagactcactccggtgctcaatcagttaatatcccagggatatttcggggtcattcagatgcacgcacatagcgcactttacattaccatacatcatcagaatggcatgtttaaccttccttgtgggtttgtatacaactcaccatttaccattatacagtcacgaaatgatacaaagggcaggccgtactatgttgccatccctttgattactcattga

SEQ ID NO: 95154 - DNA, 213 bp, Enterobacter aerogenes
atgacagataaaacaacccgcagccttctcagtgataagatggtcgatatggcattcattacagaatttacggggttaagtgataaatggttctacaaattaattcaggatggggttttcccgaaaccgattaagttaggtcgtagttcacgctggttgaaaagtgaagtagaggactgggtcaaattacgtatcgccgactcgcgcaattaa

SEQ ID NO: 95155 - DNA, 630 bp, Enterobacter aerogenes
atgagcatcaatactaatagctacggtacactgaacaagaattacgttaaacgtattcaggatactatcactaaagccctgaatgattatccccgagtcatggtcctgagggtagatcttcgtttgcctgagattgaaacaggctcatataaaaacgattcaggaacagtcacccgtttcattgtttccctcaaagctcagattgaggctgatttactgaaaaaatgtcatgcaggtaagagagttcacccttgtcgtgttcgacatatctgggctcgggagtttaatgagtacggtaaaaagcattatcacgtggccttattgtttaatcgtgaagcgtatgcctatccaggcagctatgccagcacagacggagaatatacccacaatctggccatgatgattatggaggcctgggtaagagcgctggggctgaatactgtggctaatcatcagcaatattaccctctggtagagtttccagctaattgctactaccacctgagtaaaaaccacaatgaatatacggctcagttatcaaatgtcactgaccggcttaactatctggccaaggactacagcaaagatagctcagacagccagcgtaactttggctgcagtcagtactga

SEQ ID NO: 95156 - DNA, 885 bp, Enterobacter aerogenes
gtgtcagataaaactgaacagggtcttgatgccctgaagcaacagctgtctctcctgcccgaaacactctcccgtacgatactaaatcgcatccgccagcacatccattacgagccggtcgttggcattatgggtaaaacagggagtgggaaaagttctctatgtaatgcgctctttcagcagcccctaagcccggtcagcgatgtgcagggctgtacccgtgaaccgcttcgcttcacgctcgatattggcgggcgtcgcatgacgctggtcgatttacccggtgccggtgaatctctggactatgaccgtgaataccggcagctatataaagatcagttaccgacgctggatcttatcctctgggtgatgaaagcggatgaccgggcctgtgcgaccgacgaagcgtttcaccggttcctgctcaattgtggcgtctcaccgggcagcattgtcttcgtcattaaccaggccgacaaggcggaaccctcgctggaatgggacagggaagcgtgtctgccctccactggccagttgctgacgctgaccgcccgaagcgcagccatctcacggcagttctcctgtccttatccggtgcatgcggtgtcagccaaaaccggctacaacctggcccgtctggtcgaaaccatgatatttgccctgcccccggaggccagcagcggcgtttttcgtcaggtcagggaagagcaccggactacggaggcagagagtaccgcccgacaggatttcggtgatctgctgggtgagttattcagccggatagtggacgccattccgctgccaaaggcggtccgtgaagcgctgggaacgatccgcgacggcattgtgaatgccgcttctgcgctgtggcacttacttttttga

SEQ ID NO: 95157 - DNA, 237 bp, Enterobacter aerogenes
atgatactcaggacactgacatggtccctgttacgcatgctgctgcgctatatccgaagacgggtggttaacaggatcctggattactgccggcgcgcaggctggccggagaaagagatccacagcgtccgttgggctctcatcgttctgtttcgcctcttactgcgtttactgagggcgagattaataaaacgcaatactacagccaccttcagccctgacaacgcctcctgctga

SEQ ID NO: 95158 - DNA, 729 bp, Enterobacter aerogenes
atgcgcgccacggaccctgcgccccgacacgacaggctggcactcaggctgtcagttattattagccggctttttgctggtgaatccctttcactaaaagcgctgtccggtgaatttggcgtatctgaacgcaccctgcgccgggatttctctcagcgtctgctgcatctggatctgactggcgataacggctgctggcggttacgaacaaacccgatgcgcgaccatactcctggtgcgctggcgtttgcccgcaacaccggaatagcccgtctcattccctcacagagccgccatctgatgcagctgttgatggatgaaaacggcacatctccatgcctgataggccatgcacagcagcccgcggggatcctcccggactgctttcagcgacttgctgaaggcatttaccaccaccgtctggtcagcctgttggttaaggggattcgtcacgaccaccttgagccctaccggctaattttctcacatgcagactggtatctggtggccagccagtatggtgcgatacgggtattcagggttgaggaggtaacgtcggtttccctgtctgaacgttcttttcatcggcgcagtgaaaccagcgcactcattgtagacgcggatttcatcaatgcccttccgcattttcactttatcagcaacgtcattcacaccttccgggagctttctcccgaacctaagaccagaccaaaaggagttaaaacatga

SEQ ID NO: 95159 - DNA, 504 bp, Enterobacter aerogenes
atgaaacacggtacagccctgctgctgagcgcaggaatgatgctggcatcgctgtcggccgtaaatgccgctacgcccgacgcgcttgtacaggctcataaacagcgctgcggaaagcccgtcttctatgcgcagaccgttaaccacaaaaaggaggttgagatttgcatcatcaccccgtcggtatcgtattcattcgggacgacgggcgcagagcataaggaaatggacattaccgtaccggcacataccaccacgtacgcataccagagtaatcaggtaatcagtctgcaggaattcaccgtccggaacggcgacacctcataccaggtctctgccgggacgaacgatgaaggcacaccgttcgcgtccctggacgtttacaagggaacacctgagacgggtaagcatctggcggaaatccggctcgacccggatacggtggtgaacaacatcagccatgcccttgaacaggaaggcgtggcggaatcggacagcctctga

SEQ ID NO: 95160 - DNA, 303 bp, Enterobacter aerogenes
atggatattaacacaatgattaataagcaattaaaaatgacgatggcttccaggagcgcattactggccgtcacgctgctgtcagcgctggccctgagcggctgtggtgacaaaaacgaacgtgagtttatccagggttgtaagtccggtggcgggaccacggcggtctgcggctgtatctgggatgaactgaaaacgaaatatacccacggggaactggagaaaatgaatcagcagtacggctatgtacccccgcgttttatggacaacatgctgagcgccgctcagcagtgcagacaataa

SEQ ID NO: 95161 - DNA, 312 bp, Enterobacter aerogenes
atgacgctagtgattaaatatttcgcgattgccttcggcatcgcgcttgtggtcgtcctgtttaacgtcttcgggaacacgggcgaaatccgcagtttcgggcaggggatggggtatctgttctggatgacgctcggtcccggtgccggtatgacggtcggcgcgttcctgcgccagtggctgatgccggacagcgtctataccaccggcggaatgggcggcctgttaaaagcccgactgttctggcttgcgggtcctcagtgtatcggctggctggccggcctgatgacggttggcaaacagctgatgtag

SEQ ID NO: 95162 - DNA, 357 bp, Enterobacter aerogenes
atgtttaaacatctactgaccgccgcgctgctcattatcagcgcctctgccctggctgacacggcacctctgtccgtaaattcacagggaacgtatctgattaataatccgaatctccccgtctggcagctcaccctgaccagcctcgaaaatgacatcaccatagagtcactcacgctcaaccggggcaactgcctgatttccatcgcaggccggggaaagaatatgaacaaacgtctgggctacgggcagacgttctctttcaccacaccgagtaacagtaacttcactcaatgtcgcccgctggagctgacggtacagaccagcaagggcccgtacacctttaactggcagtaa

SEQ ID NO: 95163 - DNA, 534 bp, Enterobacter aerogenes
atgaccgacatcaacaccctcagccagcggctgaatacccgtacgctgcattttgtcctgctcagcatggccacctgcggcgtctggcccctgctctggctctacaaaaagcaggatatcatcagcgacaccacgggctgcccgctttacggcaatctgtttattatctggctgaccgtctgtttcggactcagccgccagctgggtgccatggcagcgcctgatccgtacggctatgactcaaccggcgatatcctgctggccatcagcgggctgctctccgtggccagcgccgttatgtatgtggtctgggcctttaaggccagaacggcgctgcgtcactatgcgctgaacgcgtttcgcttcgacctgaagatgaatgccttttataccgtgctgtttaacgtcttctacatcacgtactgcatcaatgacatgcagcaggcgctggcgaagcaccagattattcacggcaacacggcacccgccacacctgcagcatcagatgcgataacaccccaatctccgcaatag

SEQ ID NO: 95164 - DNA, 819 bp, Enterobacter aerogenes
atgcgcttagcaagccgcttcgggcggacaaaccagatacgccgtgaccgtgctttaacccgcgatgaactggcgcactatgtgcccagcgtcttcagcgaagaaaaacatgaatcccgcagcgagcggtacacctatatcccgaccatcaccctgctggataacctgcagcgggaaggcttccggccgttctttgcctgccagacccgcgtgcgcgacctgaataaacgcggccacacaaagcacatgctgcgcctcaggcgtgaaggccagattaccggtaaacaggtccccgaaatcatcctccttaacagtcacgacggctccagctcataccagatgctgccgggcctgtttcgctttgtctgccagaacgggcttgtctgtggcgaaacctttggtgaggtgcgcgtgccgcataagggtaatgtggtggagaaagtcattgaaggggcttatgaggtactagggatatttgaccgtgttgaagaaaatcgggatgcgatgcagtcgctgttactcccgccaccggcacagcaggcttttgcaaaagccgctctgacgtaccgctttggagaagagcaccagccggtaacagcatcccagatactgacgccccgccgctatgaagaccgtcaggacgacctgtggtcagttttcaatcgttgccaggagagcctgctgaaagggggtctgccagggcgtacagccaaaggtaaacgcagccatacccgcgcggttaaaagcatagacagcgacgttaagctcaaccgggctctctgggtgatggcggaagaactgcagcaggcactgagctga

SEQ ID NO: 95165 - DNA, 249 bp, Enterobacter aerogenes
atgactgatgctgttctgttaggcgaaggcttcaccctgatgttcctcggcatgggcttcgtgctggcgttcctgctgctgctcattttcgctatccggggaatgtctctcgccgttacccgtctgttccctgagccgcctgccgcgcccaaagcggcgcctgcggccgtcgcgcccgccgacgacttcgcccgtttaaagccggcgattgtcgccgccattcaccaccatcgccgccttaattcttaa

SEQ ID NO: 95166 - DNA, 981 bp, Enterobacter aerogenes
atggtttctccaaaaattaagttatcaattattataccagcatataattctagtgcgacaattttagacacactaaactcattgaacgaatctattaattctccatttgaagtaattattgtagatgattgttcaactgataatactagtaaaattatcaatgattacatcctgacgcatgaaaacattaaattatattgtcttccatgtaatagtggtcctggggtggctagagatgaaggccttaagcatgtaactggggagtatactctatatttcgatagtgacgatttaatgcggtctggaactgttgatcgtgcgataacttatcttgataaaaataatattgatgtcgctgtatttgagtattcagttaagtttggacatgaaaagaaagatattggaatgtgggaaagggatagccaaatttacactaaggctcgtgctacatttggagatgtattctcacccgaacaattcccgcattttttaactgtaactaattatccctggaataaattatgtagaactaaatttcttcgtgcacataacattagttttggtcatctacgcttacatgaggatatacttcctcattggctgattctaatgaatgctgaacgtctatacctttcacctgatattatttcagattatgttctcgatcttaatggaagtaatgtaactaataacaagtcggaattacgtttgcaatgtttagaggcagcgaattctttatatttacacttgcaaaataaccctaagtataaaccatatttctctgagttctggtcgtttgctgcttgcctattggattgggcgaaagaagtcatcgaaactaatcataagcaaactttggtaaacggtgcaaaagatattttcatgaaaatgacatttgcagatttacagtctatttatcattccgatagaaatatacacgctatgatttataacttcattctaaataaaaaaggtttttaa

SEQ ID NO: 95167 - DNA, 1290 bp, Enterobacter aerogenes
atgagcgataatgtacctgacatatctgtcgtaataccagtatacaatgcagaactttattttcctgctgtttttgataaaattcagcatcaaacattttgtaatatagaaataattattgttgatgataattctcatgatagcacttacgatttaatttctgaatacgcttctaatgactcccgtattatcattttgaaaaatgagactacctctggcgcaggtgcgtgtagaaataaaggccttgagattgctaaagggaaatatgttattttccttgatgatgatgattttgtagattcgaacttattggaaagattatttgatatcgcaactgcacgcaatgcagatgttgtggtttttcgttcccaatttatagattggaaaacaaaaatcacaactccgattccttggacaattagggaggatctacttccagataatgacatattctcagcacaagatattaagttcgattttttcagagcatttgtatggtggccatgggataaattctataatagacaaacgataatatctcagaatgtcaaatttcaagaaattagaacttctaacgaccttttttttactgctgcacagatgcttttggcatcgcggatcaccattttgccggattatttaattcagcatactgtttcccgtgagtcatctttagaaaatactcgagaggtttcatggttctgtgcactagaagcattacaagctttaaagcaatttttagttgaacaattactttattcggagaggaaaaaggatttcgaaaactatagcctttcatttatcaaatggaatatggatacattatccggagatgcttatttcaagttttatgaaagtgcgagaaagttcatacactcatgtgaaattaataaaagtgaaatatatgaacatgagttatgttcattttatgaaaatgttatgagtttttcccctgaagagtatctattttttacccgcggtgtttattttgttcgtgcaagagaccttgaatctcagttagctgatttaaaaaagagtgtagatgaaagtacacattcattttttaaatcacagcaggaaataagttgtctcaacgattcactcgactcatgtcttctggaagtctcgatggccaaaaaagcgttacagctggagcaaacacaatgtagtttgcttactaaccagatagaggaattaaagcggaagattaagacaattactcatagtaaaagttggcgttataccaaactttttcgagttttaatgagtgtaattaagaaaatgttttaa

SEQ ID NO: 95168 - DNA, 2163 bp, Enterobacter aerogenes
atgactttgaaacttaacggtaaaacgcccactgccgaaggtgatgaaattgatttgggtcggttgataggcgaattaatagactatcgcaagctaattattgcggtaacagcaatattcaccttgttagctcttctctacgcattacttgccactccaatctatcaagcaaatgctttgattcaagttgagcaaaggcaaggaaatgcaattttgaacagcttgagtcagatgttgcctgatagtcaaccacaatcagcaccggaaatggctttgttgcaatcacgaatgattttaggaaagacagttgatgatctaaacctacagtcaagagttgaacaggattattttccggttataggtagcggtttagcacgcctattaggggaaaaacctggcaaaattgagatagcacatcttaatctgccatccgtggaagagtcaggtaatgaattaacattacaagttaaagatcaacgacattttatagttgagtctgagacctttcattacgagggtaaggtaggagttcctctcgaaaataaagatatatcactgttagttactggtattgaggctaaacctgatactaatttcactattacatacttgtccaggttacaggctattaatagtttattagattcgtttagtgttgaggaccaagggaaaaatacaggaattctgaacctaacacttaccgggacggataaagaattagtatcaactatcctagatagcataagtcagaattatttagcccaaaacgttgaacgtcaagctgcgcaggatgcaaaaagtctggattttctaaatcaacaactcccgaaagtacgtggtgagttagatgtcgcagaagataagttaaacgattatcgtcggcaaaaagattctgtagacttgacaatggaagctaagtcagttctggatcagattgttaatgttgataatcaattaaaccaacttacattccgcgaagcggaaatctctcagctttatacacatgaacatccgacgtataaggccttaatggagaaaagacaaacactacaacaagagaaagcaaaactaaataaacgtgtaaatacgatgccttcaacgcaacaagaagtattacgtttaagtcgtgacgttgaatcaggccgtgcagtatatctacaattacttaatcgacagcaagagctgaatatcgcaaaatcgagtgcaataggtaatgttagaataattgacaatgccattactcaacctaaacaagttaagcctaaaaaactaattgttgttatagttggagtagtgattggcctctttgcttcgatgggcattatattactgagagtatttttacgtcgcggtatagagtctcctgaacaattagaagaggttggcataaacgtatatgcaagtgtgccgatctctgaaacgttaaaagagaaaaacaggaaaacaggtgttcgtagtaagcacgaaaccagaacattactggcaactgaaaatcctgcagatttagccatagaagcaattcgaggtttacgcacaagcttgcattttgcgatgatggaggctaagaataatattcttatgatttccggtgcgagtccgaatgcagggaaaacatttattggcagtaacttggcagcaattatttcgcaaactggccagaaggttttgtttattgatgccgatatgcgtaaaggatatgttcataaattatttaattcatcccaaacaaaaggtttatcagattacctatctgggaaaaatgacatagaatctctgatttgcaaggttccaggcgaagaattcagctatatcggacgtggtgaagtgcctccaaatccggccgagttattaatgcatcctcggttggagcacttgctggaagatgtatcaaaaaaatatgatcttgtgattgtcgatactccgccgatattggctgtgactgatgccgcaataattggacattatgttggaacaactttgcttgttactcgatttgaagaagattcagtgaaagaggttacagttagtattaagcgcttcgagcaggcgggtattaatgtcaaaggttgtattctgaatggcatagtcagaaaagctagcagctattacggttatggctataaccactatggatattcatattcagaacaaaaaaataaataa

SEQ ID NO: 95169 - DNA, 132 bp, Enterobacter aerogenes
atgctccttggccattggcttggagggcgcgaggttcctgatccttacagaaaaagtgacgaagcttttgaatccgtctatcgattaattgaaaaagcctgcgtgctttgggttgaaaaacttacaagataa

SEQ ID NO: 95170 - DNA, 714 bp, Enterobacter aerogenes
atgtttattgttaccgacaccttccgcgatttgccctttattcagcgtgccgagtgcggctatctacgggcagacccagctttgaaattctgtcggatacaattcgccagcacacaattgcaggacaaactcttcagccaatacgccgtcgccctcccaccttcccttacaggcgccgtcgtaaaacgtaaagccgaatacctggccgggcgctattgcgcgcactatttgctgcggcaatccggttgcctcgaatcggtgtcatccgccgcggaccgcgcaccaatttggccggtaggttggcgaggaagcgtctcgcacagcaaagatatcgccatcgctgtggttaccgcagaggctgacggcctgcatcctggggtcgatatcgagcatctgcaaccggagatcatgctggaaagcgccgatatgtttgcctcgagaacggaacagacgctgctttcctgttgtgggctggataaggagtgggcactgctgctggctttctcagccaaagagagcctgttcaaagcgctttatccgcgcgtacagcagatgtttgatttcgatgctgccgccatagtcgcactcgacccggcaaagcagcgtttcacgttacgcctcaataaaacgcttagcgactcctttcccgcaggtagccagttcagcggcgaatatcacttcagtgaaggcaccgttcttacctgcctgtgctag

SEQ ID NO: 95171 - DNA, 507 bp, Enterobacter aerogenes
atgttgcatagactgagattagctattagaaaaatagcgcgttccttttacactaaaaaagtaataaagagcgcggcaaaaactggggttggaattaaagttaattttaagactgttgttaataaaaatactactctcggaaataatttcaactcaaatggcttaattataataggtcgaggaaaggtttctataggtgataatttccattgtggcttaggttgttatataattacagaaaatcataatcataaaggcgaaaaaataccttatgattcgacatatattgtaaaagacactgtcattggtgataatgtttggctgggtataaatgtaactattttacccggcgttacaataggagagggtgtcatagtacaagcagggagtgttgtggtaaacgatgtcccccctttatctattgttggtggtcatccagcgaaaatcttttcgcatcgagatgaggaacattacttccagcttaaagataataaacaattccactaa

SEQ ID NO: 95172 - DNA, 1008 bp, Enterobacter aerogenes
ttgaaatatttagcatatattgaatctccacttcaagcatttaatttaatggagtatgtaaataataatggtataacagttgatttattggtaattaacaagaaaagtgcagtatcaaaccttaattattctcaaatatgttatgtccttaaatatttcaaatatcgagaagttgtctctacagatatagagtcaaatcgccataatatagctaaaattaaagagtttgcgaaatcaattccatcccttggaagtgagtctgtgtcgttaattgggggggagtacagatcgcttattttttggtttattgcaggacagtataaaaaaaggaagttatttattcttgatgatgggaccgcaaccttacggttaaatcggcgtaccaggtcattcaaacactttattcgtgataagatatatagtttccttggctgtatcgataattttgttgaacctataaacttcatttccgtttatcctatagcagataaaatatcattaaatgatagtgttttgacccatcaatataagtattttaggcatcttacaaatagtttttccaacgaagagaatacgatttatatcattggggttcctttgcttgaagccggtgtaattacgggtgatgatattgcactaacgttatctcttatagttgatttagaatctaaatataaaaacgactgtaaaagtttagtttacattccacatcggcgcgaacgcaaggataaaattgacattattgggcggaaagttaatgttaaatatctggagtatccattcgaattactgcctctagtcagtggaaataatgtaaaacatattgcaggattttattcatctctttttgataatatggtctcaatttatgctgagcaactagttgttgatagctattatgtgccatccgccgttgtgacacctgattggattgatttcgttaagaatgtttataataattatgaaaaatacaattcgaaaacatttaagctaaataatttgaaatag

SEQ ID NO: 95173 - DNA, 1002 bp, Enterobacter aerogenes
atgagagaagtgtgggttgactatgccaaagcgctaggaataatcttagtggtagcaggtcatgtcaatagaggtttatatagctctggaatctatatttcgaagcaattttatactttatttgatagcatcatatattctttccatatgccactttttttctttttatccggattatttttcgtgacctcaatagataaaaaagggaaaaagaagttcttcattgataaactggatactattttttacccctatgtactatggtcactgcttcaaggaggcattgaagtaatattatcgaaatacactaactcaaaaacggagttattggatgttctttcctttctcctctatcctcgtgcacagttttggttcctttatgccttgttaatgatattcattgttgcgagtataatttatcgaaaacaaacattttataaatccttaccactaatcatcgtaatttctcttgctgcttatatttttagcaatacaataggctcaacacttcacattaactaccttacaaataattccatttactttttccttggttgtttattccccaaaatatctggtggtagcaactccaaaattgggtggaaaacactgcttatcattgctgctttatttatagttttagaatatactttccatttcattctgaaaatgacctatgtcgacactggtttatttaccttcgtgctggcatgcacaggaattgcattgatagctgcactatcaatgcgattagcgtcattaaatatcaagacgttagaaatgattggttcattgagtatggtaatttatttggtgcatatattggctgggagcggttcgcgaatcattctaaataaagtattgcacttgcagaactggtatatccacatgctagctggaacactaattgggattttcgtgccaattgccatttatttcatagccaaaaaatacaatatcaactttctgttttcgtatccacgaagtaaaaaacagatttaa

SEQ ID NO: 95174 - DNA, 150 bp, Enterobacter aerogenes
atggttatattgaaatccactaaaaaaatccacgctaccgcccatggctatcgctaccaaatcgcgcagtgcttcaatcaacttaagtactttaccccacctaaggatacatggcagtatttatggcatcagagcaacataaaaatctaa

SEQ ID NO: 95175 - DNA, 225 bp, Enterobacter aerogenes
atgttgtcattaatgcagttagtgttctgtttggttatcatttttttaaacatgaaaaatatctttcatttcctcgtcttcataaataattttctaggtttggtgctgttttgtttgtcagcattattttacttgctttcgggtgagggggatggtaaaaaaatgcttttcataacgatctatgaaaataattatatcttatgttataagtgtcatggtgactag

SEQ ID NO: 95176 - DNA, 3024 bp, Enterobacter aerogenes
atgactatccacagaatacagccccgtatggccgtgtcatttctcagtgcagccgtttttctggctctctgcgccagcagttccggagtccgtgccgcccccggggtcatcgccggtagcggcgagaacaaaaccgtcgccggagatattgcggcgaccgcaatcggcgatgccgccctgaaggtctatgacggtggcgtcattacgggccagggtgtttcgctgtccagtcagtttaatgcgcttatccgggcgtcagaccgggggcgtgttgagcttgacggcgtgacgctgggcggggcttttggaccgcaggcgtatattgaaagcggggcggtggtatcgctgtcggacgccacttttgccgccggagacgtctggtatgtggacggagaaggcagtcagttactgctgaagaacgcagtttcttcggcgtcagacgctgcgttcgatatccgccatcacggcagtctgcagttcgataacgtcaggcttgaagggcgctcttccgcaagtggtgcggcgatgatacgtgccgccagcaatgcggatgtcacggttaccggcagcaggctgacctcgcatgataatgctgtcctgaagttaagcgacggggcgagagcggtactgagggacagtaaactcgctacttatcctgagcatccggagaacacagggtattaccctgtggtgcagctgaataagggaacggctgtggatgcagataatgtggatttgagttttgccgcagagggcagcgcgctttcactggatgatgaggccagtgcggatatccgcaacagccgcatcaccggttcgcaggttaaggatgagggcgctgccgtggatgtttttgggcgtggcagccaggccattataaagaataccgatgttcgcatcagcggtgatatgtctgctgcgccgggacgctttatgggggtatacggcggaacagatgccaccgtcttaatgcagggaggcagtattacgacggagggagtgggcctgacggggcttcaggccgattatgcccgcgttgagctcaatggcacgacggtatcaacgcagcaggataagtcggtgggggtactgctgtatggagcgtccggcacgctgtctgagggagccgtcctgacgcagggcgagaactctccggctgtcgcgatgcatgaccggggaaatctgactattaacggggccggtatccggacgcaagcgtcggcggcgctggatatgaccggcggcccggcggcaccgctgcatctgaccctgaataatgcccgggtgaccggggggaatggcacatcgctcgtgatgcgggattcggataaggccggacccggcggggcagtcgtcagcgctgaattaggtcatggcaccatcatgacgggggatgtcgtcattgaggggcaggatacccgctctttattcagcctgaatatggataacgccaccctgacaggagcggtaaacgctgagggcggtcaggcttcactgtccacggctgcgggcggggtgtggaatatcacgggtgactcgtcgctggattcgttgaataacggtggaacgattgcctttgccggcgacggtccgggaaccacgcttcatgtccgcggtgattataccggaaacaacggtcttatcgtgtttaatacggtgctggagggagaccgctcagaaactgaccacatgacggttgacggggcaactcaggggataacgcatgtggccgtcaccagagccggaggaagcggagcccgtaccctgaatggcattgagcttattcatgtgggaggggcgtctgacggtgaattcctgcagaaggggcgtattgttgcgggggcgtacgattacgcgcttgtccgtggaaagggcgaaaatgccggtaactggtatctgacaaacgacggaatgagcccggagccgggcgacaatgctaactccggtgacaatactaactccggtgacaatactaaccccggtgacaatagtcataccggcggcactggcggcaccggcagcagtggtggcgaaggggctcccttttctccggacctgcgtccggagggcggggcttatgcaacgaaccttgcggcggcaaatacattgttcctgaacaggctgcatgaccggctgggtgaaacccactacgtggacgcactcacgggagaagaaggggtcacgagcctgtggatgcgccacagcggcgggcataaccgcagcagggatggtcatggtcagcttagcacacaggccgatcgctatgtactgctgctggggggagagatagcccggtgggatactgctggcgacagccgcatacatcttggtgtcatgggggggtatgcgaaccagaagagccgcacgcgaaaccatcacgtgggctatcgtgcagacggtaatatccacggttacagtgccggactgtacggaacctggctgcaggatgatgcggataaaaccggggcatatgttgatacctggatgttgtataactggtttaataacagtgtcagcggccagtcccttgacactgaaagctacaactcaaaaggcctgacggcttcagttgaaacaggttatacatggaaggccggagacaaaagttcgcgtgagggctggtatatacaaccggtggctcagctgacctggatgggagtgaaagcagacgaacattatgaagcaaacggaacgcgcgtgcagggagaaggggacggtaatttgcagtcacggctgggcgtgaggacgtttatcaaaggacacagcgccctggatgatgctgctgacagaacgtttgagccttttgtcgaagttaactggttgcataatacaagagattttggtgccattctggacggggagcatatccgtcaggggggagcccgtaatattgcagagctgaaggtgggggtggaaggtcagataaaccgcagtatgagtttatgggttaacgtgggacagcaaacgggtgataaaggctacagcgacaccagcggcatcgtgggcattaaagggagtttctga

SEQ ID NO: 95177 - DNA, 702 bp, Enterobacter aerogenes
atgagacgattagcggcgtatgccggtagacgggacgagatgatgaaacaaaacggacagcaaagggaaaaaaaaaccgcccccggtatcaataaacaccgggttgcaggcggggtcttcgcggtctgcaggggggggatagctgccggcctgatactgctggggctggggaatcagtggtccgccatggcgactatcagaccggcgactgcgcagcctgaattgccggtatgcgcggtgacggccggcccggcaacggtagattttggcagccggacccgggggcagctccaggataccgccggtggcctgactccgggagtgcggcgcctgacggtcagtgcggggtgtaccctttcccgggtgatgaagcttcgtttcgatggttctgccagggggccggacttcagctggggcggtgcagacagcatcctgcgtttcagggtatctcaggcgcagcttgatggtatccccgtgcagcttcagcggcaggaccgcgccggtaacccggaggctcagggggctgaagcactgccatttatcccgggtgacatcctgatggcggtcaaaaatggcctgcccgtgcatggcaggcagctgaatattaccctggagattgagcccgtgctgggcgaacgcgacagcaggccggtacggcggacatacccggaaggcctgctgcgggtaagcctggtgccatga

SEQ ID NO: 95178 - DNA, 2376 bp, Enterobacter aerogenes
atgctttccggcggttttatcgtaggagaaacatacggcgatgatattatcttcgataccggtgccctcaaaacccaggggctggatacctctctcgccacgcagtttcagcgcggagatgcctttccgccgggtattaaccgggtttccctgaaggtgaacggcgttgatcggggacgtcatccggtctggtttgataaggccggccgcgtctgcccggatgcatcgcttctgcgtcagggaggtctgagggtaccgccgggcgtgccggaccgctccggcgaagacgccgctaccgaagcgccctcttgtcccgacctgaccgccgtctggccgcagtttaccgtcgaggcccgcccgggcgagggtaccctggccctcatcgttccgcaggaagcgctcgatccggatgccgatagcgctcactggcagcacaacggtgccgccgcaatgctgaactacggcacacagtatatgggaagccagaccacgggctcccggatgaattactggcaggtgcagactgaggcgggttttaatgccggtgactgggtggttcgcagcaatcagagcctttatcacttcggggactcaacgcaaacggattatcagaatgcgtatgcacagcgcacctttacaggcctgaaaagcaccctccaggtggggcagatcccgctgaccggcggtctgtttggcattggtcaggtcattggatttcagatgacaccggagcagggcctgtatgccggagccggggcggcggtagtgaccggcattgcagatggtccttccgtggtggagattcgtcagctgggtgttcccgtctttcatacgaccgtgcctgcgggcccctttaatctgagtggtttttcactgctgaacacgcgaagtgatttgaccgtcctcctgaagggaaccgacggaagcgagcgaagctttatcgtaccggcgtcggcctatgcgcgtgaaggggcgaccattacgccgggggtatcctggggggtgggaaggtatgaccagcagggggcggacaagcacccgcttgttgccgtggcatcgaagggatttcagctttctgagcgtacggcgctccagggcggcgttttgtgggggggagactatcaggcggtaagtaccgcgctcaacacgacgtttctgtggcgtaccggagtgtcgcttcagaatacgttttcccgcgccgccgctcattctgaaaacggttcgctgacctccctgacggtcagccagcctcttggcgacgcattcaccctgaatctgaatggttcgcatcaggataagggataccgggaattcagcgaagcgcagatacgggagccggagaacatctcacgcaatcaggatcaaattggtggcggcttcacctggtctcaggagtggctggggagtgtcagtctgtcggccgggcgcagcacgcagacccgcggagatgccacaacctggactcagttaagctgggggcgccagtttgggcgggcgacggtaaatgtgaatgcttcccgcaatgagagtggcggcggatacgggcgggaagatcgcctttatatttcactccagtttccgctgggcgaaagcatgacgatgaacaccaccatgaaccacggccgtgatggctggcgctatggaagccgggtggatcagcgtctcagccaggatcgtaactggagcctttccgttgaacgcgacgaaaaccgcaggcaaaactcagcgacgggcaccttcagctcggtgacccgctggagcaatctgacggggagtgtttcagcagactccgatcattcgcgcagtctgagtatacaaacttcgggaagtgtggtggcacatgggcatggagtcacaatggctccctaccaggtgcgtgatacgttcgcgattgcgaaagtggggaacaaatctggcgtcaggctggagacgccggcgggtccggtctggacggataataacgggtttgcggtcattccctccctgaacagctgggcgcgtaccggcgtggaggttgacacccgcagcctgggcaggcgtgccgatgtgctgaacggtatgcaggaggtctcaccggcccgggggtcagtgagccaccttcgttttgatatggtttccacacggcgggtcatggtcagcatgcggggagccgggggccagcggctgccgtccggggcggcagtttatgacgcgaagggagagtttatcactgtggttgatgaggatggcaacgtgtttctgccggatgcaaagccgggtatgacgttcagcgttgacacaaagaaaaatgaatgccgcgtcatgctggaccgtctaccggaagagccggcggaagaggcgggcctttatgagacgattagcggcgtatgccggtag

SEQ ID NO: 95179 - DNA, 690 bp, Enterobacter aerogenes
atgaataaattaacgaagatttctgccgcaactttaatgttttttacggtggcggggcaggctatggctgctgatgacaatgtggatgtaaaggttacggggcagatagtccctccggcctgcgtgcctgcggtaagcgggggggcggtttttgattacggagtgataaaggcagggtctttagcatcggatgattttactgtgctaagtaaaaaaacattggatttttctgttaattgtgatgcagcgatgaaaatagcgtttaaagcaattgatggtcgatctgatacaaaagttaatccagttggtaagtcaattttagatgttatagttgaggaaaatacaccagtgtatggcttaggggtcacatctggaaataaaaaaattggtggctatcgtattttagtttttagcgctcaaattgatggggcgaaaaaaactcaagggctgatttctcacgataatggtgcaacgtggaaagagtcaatttatctttggatgaatccgggggaagggattgtttcatctttgggtgataaaagcagtgagacaccatcggttccagctgcattgaaaacaattacagggaaaattcaaatacaggcggccattaataaaggatcggagcttgacctgtccaaagtaaccaatcttgatggtctggcgtccatacagattgtttatctttaa

SEQ ID NO: 95180 - DNA, 714 bp, Enterobacter aerogenes
atgaaaacacaaaaaatgaaagcggttgtacgtaaaaccctgctggccagcctgctggctaccactgcgggacaggcaatggcagccggtgacagcattgatattaaggtcatcggtcagattgtaccagcagcctgtgctgcgagcgtgaccggtggggggacagtagattacggtacgatgaaaacgagtgcgctttcgagtgacgatttcaccatgctggatgtcaagacgctggacctgaatattacctgtgaggcgccggttaaaattgcccttaaaacgaccgatatgcgttcagacagtgtcattgcgctgacgggcaaaaactgggatatgaaagcgggttcagtcgctgcaagcgctcaggactttgggctgggaatggcaaacggcaaaaatgttggcgcatgggcaatgtggatggagccggcttccattaaggctgatggtaactctgttgacgcactggataccaccggtacgccaacttccagctcaacctggaccaaatcggctactggtgcgtcatggctttccagttctggtgcctataaatcctggggggcaacaggtaccacaacacctgtagcgttaaccacgctgaccagcacgctgtccattcaggccggtattaataaagcatctgagcttgacctgaccaaacccgtcacgctcgatggcctggctaccattcaggtttattatctttaa

SEQ ID NO: 95181 - DNA, 702 bp, Enterobacter aerogenes
atgaaaaagccattaaagcttgcttccgccgcgttgctggctgtgattgcgggtcacgccatggccgctgatgacaatgtggatgtaaaggttacggggcagatagtcccgccagcctgcgtgcctgcggtaagcgggggagcggtttttgattacggagcgattaaggctgcgagtctgtcacaggatgattacacagttcttcttaagaaaaatctcgatttttctgtaacctgtgattcgcccatgaaaatagcgttctctgccgtggatgcccgtgctgattcagtggtcgtgcctgtaggtaaaatgctaattatagatgctggtagtactattacagcggatgacgtttcgctttttggattgggcacctcctcggagggaaataaaattggtggatataaagtaaccataagagggagtattgtagatggaggaaaagacttccactccataaggtcggatgacggtggacagacctgggttaattacggtgctgactggagtgtatggttaaatcctcaaagagcaaacgttctgtcttcattggctagaaacggaagcactgaacccgtagcttttactaacttgtcagcaattcttcaggttcatgctgcccttaacaagggcgctgagcttgacctcaccaggatgattaatctggacggacaggcgacaattcagatgacgtatctctag

SEQ ID NO: 95182 - DNA, 699 bp, Enterobacter aerogenes
atgcaaatggtaatgcgtaaaacccttctggctgcggtactggcaacagctgcaggccaggccatggccgtgggggatagtgtggacatcaaggttcgcggtcagtttgtgccggctgcctgctccctgaacgtgagtggtggtggcacggtggattacggcaccattaaagccgaaaccatcgcgaaagatgatttcaccatgctggacgtaaaaaaactggatttgagcatcgcctgtgaggctccggtaaaaattgcacttcacagtacggatatgcgttcggacagtgtggtagcgctgacagggaagagctggtcaaccaaaacaccacttggcgcagatggcggtctgggtttaggaaaagcgggagctaaaaatatcggtgcctgggtaatgtggatggagccggaaacagttaaggcagacggtaaggcggtggaccctatagccatcaatggtctgccaactaacacgaatgatagctggggtaagcctagtacaggcaccatctggctggctcaggctggtgacgcctataaatcctgggctgcacccggtgaaatgacgccgatggaatttaccaatctgacggggacgttatcggtacaggcgggaattaacaagggctcagagctggatttgaccaaagcggtaactcttgacggtatggcgactatccaggtgttctacctctga

SEQ ID NO: 95183 - DNA, 756 bp, Enterobacter aerogenes
atgtattttttgaaaaaggtacgcaagacgacaatgattaaattatctattaattctattttaaaagcgctcataacatccactgctgtgagtctggcaatattcttctccttacccttatttgcaaccggaatggttccggaaacatcagtcgtgattattgaagccagcgacggtgaggcaacaatgaatgtcaccaatacggataattatccgatgttgctgacaaccacaattcagaatattgcgcaggataaagagaagttgcttctggtttctccgccagctattcgtgttgacggcgggaaaacacaaaaagtgcgttttatgctgatgagtaaaacaccactgaaaacggaacgtctgcgtcgcgttatttttaacggtatcccgccgcagaataaaggaaaaaacgaagtgcgaatgagcgtgagccagaatttgccggtcatcattcgcccggccgggctggcgcgcgatgaggcgccatggaagcgtcttgtctggaaagtttccggagacaaattaacagtaagcaatgattcaccttatgtggttcgtcttgcgcagggcgtgaagacactgccggataatattccgctcagtctgccgcagagctacattctgccgggtgagcatatatccgttaacgcaccggctgggaaaaagctcgcaggcacgcaacagatacgtatttctcctgcgacgacctggggttattcggttgatacctttgatgcgcctgtcgcgcactga

SEQ ID NO: 95184 - DNA, 501 bp, Enterobacter aerogenes
atgcgagtcagactattatctggattagaaaaaatcacaccttatactgcaatttttatgttgtttatcttgatttatttgattttacataactggtctcgttggagggaagagcattctgacagtatgacatgtgacgcaataataaacatctataaaggaaagcaacgactttctttgcgtcttcaatatgcctttcttggagaggaaggtactgttaatttatccggggcattagagatggagggggagaaggcgactcagataaaccggcaagtgttttttaattacatacgggtaaacgatggtgtgtatttggagaataagaaaactgctatttcccttcttgataattcaggtcccaatgggctagattctttattgccagcattttatactcatcaaggaggacgagtaaactttttggtatatgcccaaaagcctggagggtatatatttgtgaaggatttcattccagcattttactgtgctgaaaaatag

SEQ ID NO: 95185 - DNA, 846 bp, Enterobacter aerogenes
atgttggtagatggtaatgatgataatttaagtgatttttactatataattgaggggggaattcatttttttccaagccagcattctattcataatattatgaataatgtgactgtctctttgctcagtacggcatctgagtgtctgcttgttctgttggaggaacagggaagaattgtgtcaagaaaggaaatgaaagaacgggtatggtctaaaagaggtgtagtcgtaagtagtaacaccttttatcaaactatgctcaatttacgcaggggccttgaaaaggccggggccgggagaagtgttatttccacttattatggaaaaggcgtttctattgaagagaaggttagagttgaaaaaaaatcaactcgaactgttactgattataattttgaagcgaacgcatacgatttgcttccagcacaggataaagagccatatctgattgatgaaggaaatggcaagggaaatgagaaagaacataatgggaatagcttaaggtcttttgaagttaaagtatctgcacttaattttgttaatttaattttggttttatcgtgtttgtctttgttttttttaactaaagagctagaaagagaaaattttttcgataaatatactaaatcgggattaaaagttaaggggtgtacactttattcaggccctgcgcaaatgagtgacaatgagataaaaaaccttatctcaaaaactaaacttgaatgtgagccaggtgagaacctttatctttcatcaatatatcccgtacaacgcgtttcagttattcgttgtacaggaaacttttcgcagggggatgaatgcgagtcagactattatctggattag

SEQ ID NO: 95186 - DNA, 627 bp, Enterobacter aerogenes
atgaaactaatggttataagtgataatttgttttattctgcgggtttctcaggcattcattactgccaaacgttcacacccgagcatgcgttaaatttcatcaatactgacaagcaaaattatttttgcggcgctgtggtaatcattaatatatcttcaaatagaacagcattcagattaattaatttgatactaaaaaaagacatatcatccatattcattgaacccactctgtggcctgctcgcgatcggatctataacatatgtgatgtatatattttaccatgtggaatgacattatccagaatgctaaatagaattcagaaatgcgttacatcttcagataattcattcaaaattaacacaaaaaaaatcaaagcttctgaatggaaaataatgttgcatctaatcaatggagtttcaaatcgaaatctcgcaaagtatcttaattcgtcagaaaagacaataagcgccaaaatgatattccttgctggtaagatgggcatcttaggagttaataaagcaatgcaattaaatgttatgtatttcctttacaaaattcatttaataactatagagagcagtattaaagacattaatataaatcaccaaatggtagatttttag

SEQ ID NO: 95187 - DNA, 189 bp, Enterobacter aerogenes
atgcgaattctgaaatgttatctggcgaacaacacccgtaatcagtttgttaatgccaaggaggccgctcaggcctctagtaacaatgaatactggacatgctcaagttgcggctgtgaattactcctgcgcacaggagaagcccttggtttgagcacatactgcataccattccccatcaacgactaa

SEQ ID NO: 95188 - DNA, 387 bp, Enterobacter aerogenes
atgtactcaaaatcttttatcgcgcttgacggtaatcatcgcctcacgggcgcggtcactgcacagcttcacccttacgactgctactcctgccatctctgcggtagcgctctggtattccaccctgaatggggtactaacctcccatggtttgagcacacacgggaagacctgacggagaacggacgccaccactgcccgtacgtacgccctgagccgaaggaagcgcgacggatacgcatgctgcgccgttacgtcccggatgtcctcccgatagtacgtaaggccgactggcactgttcggagtgtgacagcgattaccacggtgagcgctattgcctgaattgccgtactggcgaccacagtatcgacgtctctgctaactaa

SEQ ID NO: 95189 - DNA, 177 bp, Enterobacter aerogenes
atggttaaggaaaaaaaacactggccagcaattattggccgctttactaaagccgattccgtggagttttttgtccgcaaaacgctggatatgcttgaggatccggaggaagtgttatttgtaagaatgctggcacagaaaaaaattgaagagctcgaacgagaatataacttatga

SEQ ID NO: 95190 - DNA, 366 bp, Enterobacter aerogenes
atgagccactgcaatccaagtacgcttaatgcgttttatgttaaatatcaatcaattgaatcattaacatatcataagctgatgtgtttgtcgtgtcgtgacagcaaaatcaaggatgtcacccgctataccgtaattttttctgcccttctgtgcattactagccgttgtttaacattctcaatcgtttatgctttgagggtctgtcagcaaagcgacagatacatcgtcctgccgggcattctgtccgggggacaaaacatcaaaacgatggagattaagcctatggcttatgtaaatccttatatgaaaggcggtggaaaatatgagttcaaaatcaggggtaaacccaaacgacgaagttaa

SEQ ID NO: 95191 - DNA, 2139 bp, Enterobacter aerogenes
atggacattgaattacgtcactgcaataacattgtacgagcccgtatcacccttacggccgataaactgaacattaagtttgcgccaaatggtaccggcaaaagcacgctgtcacgggccataagctgtgcagcgcgggacgacactcagggactgcaggctctgatgcccttccggctgcgcggagagaaccccgataacgccgggcccattgtcattggtgctgacgggattggggacgtgttgtgctttaacgaggagtacgtcggtcagtttacgttccagccggacgagctcatcagtgacagctttaatattcttatccgcaatgaagcccatgcggaaagagagcatgaaatagaagagatgacgcaaacgatccgggcggttttcacggatcacgccgagctgaattcgctgatagaccatctgcaggaactcagcaaggctttcaaatcaaccagttccgggatttcacgttcttcaaccggcatgagaggactgtcaggcggaaataaaatacaccacattccggctggtcttgagaactatcaaccctacatccgcagtgaacgtcgcgtggaatggattgactggcagacaaagggactcgagttctcccccctttcagatggctgctgtccgttctgtaccggtgatatcagggaaaaggaagcgcaaatccgccaggtcaacgaggaatacgataaatccaccattaagaacctaaccgctatcatcagactggtggaaaatctcggtaattacctgacggaggacgctagagaacgccttctggcgatcaccctgcttcagaatggtccggaagccgaacatatcgagtacctggtggcgctgaaacgccagaccgacacgctgacagagaagctcactgcgctgagaggcctgaatgttttcagcctgcaggaacagcagaacgttcgggaggtgctcactgccaggctgattgacctgcagttcttccccgatctgcaatgcgaactcactcaggggatcaccgacaggctgaacgcggcccttcagggcctgataaaccaagccggaccgctgcagggaaggattaaccggcaccgggacagcatggtccggctgatcgcgcagcacaaaacaaacatcaataattttctcacctatgccggctataaatacagggtggatattgccggtgagggggagcagagaaaactcaggctacgacacatggattttgatgggtacgtcagcggcggcagccagcatctcagctatggagaacggaacgcctttgcgattgtgttgttcatgtatgaatgcctgtcaaaaaatccgggcctgattatccttgatgatcccatctcctcttttgacaaaaacaagaagttcgccattctcgaaatgctgttcaggcgcgcaagcggtgaatgcctgaagaaccggactgtactcatgctgacgcatgacgtggagcctgtgattgacacgctgaagtcggtcagaaagctgttcagtaatctggtgaccgcctcctgcctgcgcctgtctgccggagttatagaggagttacccgttagcgacggcgatatcatgacgttcatgaacatctgcaaatccataaccgcgtcagcagactgtgaggaaatcattaagcttatctatcttcgccgctactttgaaatcgttgacgaacgtggcgatgcttatcagctcctgtccaacctgtttcatcgacgcgtcgtcccgctggatcatcgcgagcctgccgctgcgggcacgggctaccccgaaatggtgccagagaaaattcagcaggcccggcgggatatccgggagtatgtagacagctttgattatccgcgacttcaggctctcgtcagcagcccggatgaaataaaaaacctgtaccgtcgctgtcgtaacggctatgaaaaactgcaggtattccgtttactggaactggatcaggaccatccggtaatacgaaaattcgttaacgaaacgtaccacattgaaaatgagttcatctgtcagctggatccgtccagattcgatctcatcccggagtacgtgattatggaatgcgacaagctcatcgccctgccaccggcagcaaaccagagctcggttgccagtaccgcctga

SEQ ID NO: 95192 - DNA, 2226 bp, Enterobacter aerogenes
atgaagatactgaggcagctgtggaaccagaaagggcttgatgcggcagttgaagatgtacctgaggatcgatacggtttcggtaatatcgcagaaaatatatcccgttccatccttactcttcctcaggaggcttcaaatgttgtcggaatagaaggtgcatggggatcgggtaaaacaagccttcttaatctgatcctgagaaaccttgccctgaaaaaagatgctcacacgcatgtgctgcatatttctccctggctgagtagtggcagtccggttgaagcgctctttcttccggttgccacggttatccagcaggaaatggaaatacgctatcccccgaagggcttcaaaaagctctggcgtaaatatctgttgtcaccggaagctcaaaaagtgattgagtatgctcaggatacttcatcgcgcgtccttccactggttcaatatatcggacagttttccagcattattaactggatagcaggcggaataaaggtattttcagacagccgtctggctgttgatcagaaaaccactacaaagcttcgggctgaaattgcaggacaactggtgagtctggatctgaagttcattgttgtcatggatgatctggaccgactggagccatcccaggtggcggaagtgttcaggcttgtgcgtgcagtagccgatctgccccgctttacccatattctctgttatgacaggcagattatcactcatgccgttgaacatgcgctgaatatcgaagatggcagccgttatctccagaaaatcattcagcttagttttaaattaccccgacctgaagcctttgatttacgtaatgaatttcgccagcgggctgaggctctatatcagcaaattaataatcaaccgccagactctggaatggtaagggatctcgtcgcggtgactgatacctatggtgccgcactttcgacgccacgggaaatccatcaggccattaattccctgatttttctttatccggggatgcgggattttgtttatttccctgatttgtgcctgcttcagcttatacgggtgacaaacccggctctgtatgactggacagagcattacctgacagaacggtccgtgattgaagccggtcagggtatgctttctgacggagagaaagcagacttccgggaggggcttatcagatgtatgaagacgttcagggcatcaaatgcagactcgtttctgacacttgcagactggatcccaggtatcagtggacataatgatgaatatctgaatctttttgagcccgtcagtgaggattttcgtcatatccagacgaccggtaaacgactcagcagcctgacgcactggcgatattattttgccttctcctcaccacagaatgttctgccacctgaattcttcagacagctttttgagcaggctggcgtatcggaaaaacagcagcagctttctgaattgctgctctcaaaaatcaacagtgtgggcagtctgtccggaacctggtttgaacatatactgagcagactgactccaggcctgataagagaacgtaatttcgaagagtgcgcaggactggttcattttttcttcgatcacaccgatgaggtgagcactcgcttcagtatccgtaacccatggttttccctgcgtgaaatggccattaatgaggttgtacggcatctgctgaagcatatgcaggatattgatgagaccagaacgatcacgcttatggaaaaactgatcgttacgggtgcttcgccgttctggatagccgattttatgcgggatcttatctgggaacatggacttgctcagaatgcagtaccttcgccttcagacgctcttttcagtcgcgatattacggaacggttgcgtgacaggtttgcggaacgtatgaatcaaccagaacttcagcaacagcttctcctgcgcaagtctcttctcgggtatctctacgcctggagagacatgagttcaggtgaaaccgtgaagcaatgggtcagagaagttactaccactgatgaaggccttgttaacctgttgatacgattacagaccagtgtcttcagctcccaccgaggggcatatcgccggattgcgcgtgaccaggtcagtccgttctttgatgactggccagcagtcgaagagaagttgaaggttatgctgtccggcaacgagctgactccggagcaggaagcgctcaaaacagcgctggaaaatgacgactga

SEQ ID NO: 95193 - DNA, 1089 bp, Enterobacter aerogenes
atgctcagccaacttaacctgcgttttcacaaaaaactgatcgaggcgctgaaagtacgcgccggtcgcgaaaatacctcggtcaacgccctggccgaacgcttcctcgatgacggcctgaaaacggtcgcgcccggcgacgggtattttcggctcatcgccgatccggaggccaccgtccggcagctgtaccggcatatcattctgggtcagaccttcggcacgtcagcgctctcccgcgacgagttgcgctttgtcctggttcacgccagggaggccttcctgcgcgggcataacaggctggccacactcccggccctggacacgctgctggacatcaccggcaacctgctggcctggcaggtggagcacgatcgccctgtggacggtcactatctgaaggggattttccgccttgccgggaaaaactggacggaagagtttgaagccttccgggcagcgctgcgccccgtggtggatcagatgtatgccgaacacctcctgcgtccgctcgagagcgactgttttggcctggcggaggtgccggacgcggtgctggcagaaatcttcaccctgccgcggctgaaagctgttttcccgctgatgctgcgcggcctggactggaacacagaacaggcaagaacgctggcacaggagctgcgcccggttatttctgccgtcacggaaaccattgaggccggcacgctgcgcctggagatccgcgttgacggccagcaccccggagaacgcccgggggcctggtacaccacaccccgtctgcacctgctgatcaccggccaggacttcgtggtgccgtacggctgggaagcgttatccgaactgctgggcctgttcacgctgtatgcccggcatccggaagccctgacgcacggtcaccagggggagcgtgtgatgttctccccgcccggaaacgtcacgccggagggcttcttcgggatagacggcctgcggatttttatgccggcggaggcctttgagacgctggtccgggagctcgccacgcggtgtcaagaaggcccgctggcggaggccctgaccgggctgcgctgcctgtacggagatctgtaa

SEQ ID NO: 95194 - DNA, 939 bp, Enterobacter aerogenes
atggcgaagatccaggccagaaatgttgacgatgcgctgtttgcgcgcattgagcagtcagcgatgaaaaatgaacgttcaatcgaaggggagatccgcctggcgctggccagacagtatcctgccgggaccacctcaccggaagtcctctccagccggcaacagtggcagaaggaatgtggcgggcgtctgcgcgccctgtttgaccgtctgtccgctgacggctttttcccgggggccgggcatcccgggccgacgcggatcgccgaccaggtacggatagctcaccggttacatgtttccccgggactgctcctggactgtatcgatggcgccggtgagttaacccgtgatctggctgaacggattgaaagccggttcggcaccagtgcggactggctgaccaccggtgacgggatgatgttcccgctggtgatactgggaacgtattccggtgtcagttgggaggaatttttcttcccggatgatgatgaaaggtatgtctttgagttcatccgcatcgacggtggacgccatgatggcaccctgatgatcctgcgccaacatgagcagaacggtcgtatcactgccggcgtggtaacagaggcgtttttccttggtgccggtatggggtcaggagggtacggaaacctgaaagattttttgttgttcctcagacaacactgcgggaatctggtcttgaatgcgtatgttttctcgcccccggagccggattttgatttctggtccgtcatgggtcagcaccatccggtctggttccgtgacgcaaagcgtcgctccccttcccgctggttgcagcaggtactcagtggtgaagatccgggggaatggtttgccggcggctggtcaccgatcctgcaggaagtggtggcggcgcgggagagcaattctgaatgtgcgaatgataatgatgactaa

SEQ ID NO: 95195 - DNA, 696 bp, Enterobacter aerogenes
atgaccacggaaacgctcaaaaagcctgtcaatatcagccagtccaatgaactgacggaggcggcttactatctgcccctgcaggctaaacgtgtgctgtggctgtgcctgatgcagtgctacccgatgaaggacgacccggattctgtctcgccgatattcacagtaacggtggcggattatcagaagttttttaaggtcagcgtggataccgcgtctactgacgtcaaaaaaggcgtgaccgccctggccgacagcagcgtggtgttttacccgaaagaaggggagtttgaagaggtgaaacgcccctggctggcggaagcaggcctgaagaaagggcgggggaaatggcagatcgagttcaactataaggtaatgccgtacctgatgggcctgaccagtcagttcaccacctactccttatatgactgcggaaaaatcaacagcgtgcgggtcatccgcctttatgagagcctgtgccagtaccgttccagtggcgtgtggatcacaacccaggactggctgtctgaacgcttcatgttaccagaatcgcaacgcagtaactttgctgagatgaagcggaccttcatcaacccggccctgaagaagattaacgccaatacgcctcttaaagcggcaatgacgcagaatgacgacggccgcctggtattcactatcgtggatacgaaaaattaa

SEQ ID NO: 95196 - DNA, 621 bp, Enterobacter aerogenes
gtgacgctgacagaaaaatcgggccatctggcatggtgtgccctggtggcgcttgcgctggccagacagaatggagatgtactgtcaccggcacaggaaaatctctttctcacctgctggctggcgatcgcgctgaagcaacgacgtttttcacgtgatgtggcgcccgatatcgagtggcttctgaaacagggacgccagctgggcgtcagcgcgaagctggccaacaagctgaattacctctggcgctcctgcaccggcgaactgtctgagcaaaacgaccttttccggctgacgtatgccctggaaaccgcgaaagacatgagctggaattaccgcctgttgagcgatcgggaatggtcaggccggtatgccgtttcgctgaacgccggcgtgaacggcatttatctctcgcggacaaatctcgacgcggcatttgacgacgatgggcgacagataaatccgctgctgacgcgcctgaccggtaatgttgggggggtggtaaagctgtttaaccgctgtggctggcaggcagagtcagcacaggatgccttcctgccccatcagtttatattggtagcccgtcaggtttccggagcgaaccttcacgaaatcgcatga

SEQ ID NO: 95197 - DNA, 636 bp, Enterobacter aerogenes
gtgaatctagaaaagacgcttcaccttttgaaatatgctcgcgagatcgccacttttgaggcgggggacccggatgaaaatccctgggtgctggggaagccaaaagtggaggatattcaagtggagctctacaatcctggctgggcttcgcttttcgagtctctcaaggagcaaattcgatttgctttggctggccgagtgcgagcgattgaacatgtgggctccacagcagtgccaggtttacctgcaaagccagttattgatattgatgtggtagtggatgacccggaagatgaagatgcctacgtccccgcgttgactgagattggttacgccctgaccattcgcgagcgctcttggtaccagcatcgaatgctcaggcatgactcgccacgggtcaatctacatgtatttgcaccagactgcccggagcatattcgtcacctcctctttagggactggctcgctgagcatgaggaagatcggaacctatacgccgctgcaaaaaaacaagcggcaattggggttgatacagtgcaaaaatacaatgcaagaaagcaagaaattgttcggagcatttatgcaaggattttcgagtcctgcggcttgccagatggcgaaaatagagttggatag

SEQ ID NO: 95198 - DNA, 216 bp, Enterobacter aerogenes
atggtgaccagcgacgactggggcagctacgccagagaagttccgaaggagaaacacctgaccggcaaaatctttacgcagcgtatcgaacgtaacaacctgactctgcgcacccgcatcaagcggctggcacgtaaaacaatctgcttctcacgttccgtggaaatccacgaaaaagtcatcggctccttcattgaaaaatacatgttctactaa

SEQ ID NO: 95199 - DNA, 423 bp, Enterobacter aerogenes
atggccgcactaactttactgcaaaagcatatccaccatagggacctggcagaactggttgaccggctggcgcccatcctgctggccggatatctgtcttcatcacaggtaatatcgctggtacactatatcgtgcaggcaggcgaaacatccgacgccgaagcctttgtacgcgaactggcacagcgtgtgccgcaacacggagacgcacttatgaccatcgctcaacaacttgaacagaagggtatcgagaaggggattcagctcggtgaacaacgtggtattgaaaaaggacgttcagaaggggagcgccaagctaccctgaaaatagcccgtaccatgctgcagaacggcatcgaccgcaataccgtcatgaaaatgaccggtctgaccgaagacgacctggcgcagatccgccactaa

SEQ ID NO: 95200 - DNA, 198 bp, Enterobacter aerogenes
atgactatcgcacaacaactcgaacaaaagggtattgagaaaggtatccagcttggaagacaggaaggtcgttcagaaggtgagcgcgaagcgactctgaaaatagcccgtaccatgctccagaacggtattgaccgcaataccgtcatgaaaatgacctgtctgactgaagacgacctggcgcagatccgtcactaa

SEQ ID NO: 95201 - DNA, 345 bp, Enterobacter aerogenes
atgagctggtacgcgccagtgtttgatcatatcttaacgattttacgtcagtgggttgtccggtctgactccccggtcattgcgttactacgggagcggcatgacgaagggattggtattgccctggatgatttcggtacggcttattccaatatttccaaaatcaataaactgccggtgaccagcatcaaaatagaccagtccttcatacgggaattagctgattccatggagtcacagcgtctggttgaaagcattattgagctggccagaattaactgtctgtcgtggcagaaggcgtggcactccagcagggatattactggtcaaaatccctgccggtga

SEQ ID NO: 95202 - DNA, 261 bp, Enterobacter aerogenes
atggatatctccgttctcaccaccacaaatgacatcgaacagcttcgcactctggcgcttgccatggtacaaaaagtgatggctgagaatgaagaaaaagaaaagcttcagcaacgcatccggctcctagaagaaatgctgaaactggcacgccggcagcgcttcggaaaaaaagcgagtacatgtgagtgtgatgtgccaggtacttcctggtggcgcacttttcgcgactctgaaccgccttctttgcgtcgattttaa

SEQ ID NO: 95203 - DNA, 2973 bp, Enterobacter aerogenes
atgaacacgctttcccgcagagcgcatctgcgcacacccgtctcttttctctgtctcgccatcatcctggcgatgagtccctttagtacccaggtaagggcatctccggccattgacgctggtcagggagaaaacaaaatgattaccggagacattacggccaccgcaatggactcatccgcgcttaatgttcatgacggtggcatgattaccgggcaggacgtgacgctgtccagccggtttgatgccctaattcgtgcatccggacagggtcgtatcacacttgaccgtgtaacgctggggccgtcatttggggcgctggcgtatattgaagacggtgcaaccgccatgctgtcgaacgccacgtttacgtccggtgatgtcctgtatgtaaatggtgcgggtagccagttagcgttgaaagattctgcctcttcgcaacacaacacggcgtttgatatcagcaaaagcgccagcctgaggcttgataacgtcctcctggaaagccagtcctccggaagtggtgcagcgcttatcagagcgaccgaaaatgcaaccgtctcgctgactggcagtgacctgacgtcgcatgataatgccgtactgaggctaagcgatggtgcctcggcggtactccaggacagccagctttccgcattccccctgcatcctgagaatattggccactatcctgtgattcaactgaatcagggaacgtctctggatgcagaaaatgttgacctgtcttttacggcggaaggcagtgcgctttcactggacgacaatacgacggtgaatatcaatcgcagccgtattacgggtttgcagatacaggattctggcgccgctgttaatgcttttggtgtcaatagtcggacctctctcacggataccgatattttggtgagtggcgatatgtctgtagctcccgggaatttcaagggggcctatgtgggcaggggggcttcgctgttcatgcagggcggcagtattacaacacaggggaacgggcttaccggattacgggctgacggtgcaacggtccatcttatggatacagatatcctgacgcagcagtctggctcggccggtatggttataaatggtgcttccggagagatgacggggggggcgatagtgacgcaggacaggaattccccggcgttagtgctgcaggaacaagggcattttaccgtctctggtacccgaatacaggctcaggcctccgaagccctgcaaatatcaggtggccctgccgctcctttgacactcacgctggataatgctcaggtgaacggtggcgccggcaccgcgttagtgatgcaggacgccggtaagccacaaacttccggggcagtcatcagtaccggactgcgcaatggcacgctgatgagtggcgatatcgatgtgacagggaatgatatgcgctcggtatttggtgtggatattgatagtgctacgctaacaggtgcggtaaaggcggaaggcgggcatacatctttaaccacaacaaatgacggcgtatggaatgtgaccggaaactcaatgctggattcactccacaatgccggaaccgttcactttacaggtgatgccccgggaatcaccctgcatatacgtggagattataccgggaataacggccttatggtgttcaggaccgttcttggcgatgaccattccgttaccgatcatgtgaccattgagggagccacgaagggcacaacgcgagtcgccgtgacaaatgcagggggaagcggagccagaaccctggaggggattgaacttatccatgtcggcggtgaatctgttggcgagtttcagcagcagggacggattgccgcaggggcatacgattacaaccttatgcggggcaacggtgagcatgctgcaaactggtatctgaccagtaaagcacacgctttaacaccagaaccttcacccatgccagggccagaccccacgccgatacctgacatgaactccagcatacgtccggaagcaggtacctattcgtctaacctggccgcggcaaatacgctgtttatcaaccggcttcacgatcgcctgggtgaaacgcagtacatcaacaccttgacgaatgagaaaaaagtgaccagcatttggctgcgtcaggcaggtggccataacgcctggcgggatagcacgggtcaactgaaaacccggagcaaccgctatgtgatgcaaatcgggggcgacattgcgcgctggagcggcagcgggtctgatcgttggcacttgggcatgatggccggatacggacatagcagcagcaacacccgttcttcctccaccggctaccgctctgacggaaccgtaaacggttacagcacgggtctgtatgctacatggtatgccagtgatgatacgcacctgggggcttaccttgacagctgggtacaatacggtcggtttaacaaccgcgttaaaggtcaggatatccagggtgagtcttacaaatcgaaaggcattaccggctcgctcgaatcaggttacacccataaagtgggtgagtttaccggcagtaaagggacactgaatgagtggtatattcagccgcaggcgcaggccgtatggatgggcgtgaaagcagacgatcatcgtgaggctaacggtacgctcatcagcggtgaaggtgacggaaatgtgcaaacccgactgggcgtgcgcactttcctgaagagccatagcgcgattgataacggaaaagaccgcgagtttcagccgtttgtcgaggtgaactggatccacaatacccgtgactttggtacgaaaatggatggtgtcagcatccgtcagagtggtgcacgtaacttgggcgaaattaaaacgggcgtagaggggcaacttaatccagcgcttaatgtctggggtaatatcggcgtacagatgggaaataatggttacaacgatacctcggcgatggcaggaattaagtacagtttcaaatag

SEQ ID NO: 95204 - DNA, 705 bp, Enterobacter aerogenes
atgaaaacagtacaaaaaaacttactggccagcctgctggccctgaccgtcggccagtcgctggtcagcgctccgaccatggctgcagacagcatcgatgtgaaggtcatcggcaccatcgtaccggctgcctgtaagccgaccctgaccggcggtgccgttattgactacggcaccattccggctgccggcattgcggctgacgactttactgtactgccggtaaagaacctggagttcagcatcgcctgtgaggctccggccaaagtgtccctgaggtcggtggatgcgcgagcagggacagtggttaaacctgtgggtaaagagttgctgggcgttaccataaattcaacgacggccttgatgggtctgggtcaggccgatggcaaaaatatcggggcctatgccatgcggatagcaccaggaaccgtgaagctggatggtggacaagcagctcctgatcatattttcagcaacgaccggggcgcaacctggatcaatggccctactttgggctcatggctgggaggctattcgtcacgtcttttcagctgggccaataccggtgagttgactcctgtagccttcaaagccctgaccggcaccctggaagttcaggcctccattaacaagggctctgagctggacctgaccaaagctatcccgcttgacggtcagggcaccatcgaactggtctacctgtaa

SEQ ID NO: 95205 - DNA, 549 bp, Enterobacter aerogenes
atggatgaacaaaaacggttcgccatttacggaaaggacaggctgtttatgagcggggttcagcatgcgctggcgcctttcatgaatacccatgaaggacgggttgtggtgctggtgtataccggtatgacgctaccggaggtgcggatgtaccagccccggacagagcgggatgcgtcactggttgtgttctgcagtgctgcctgccgccgaatgctgaaggggactcagatttatgcccgcgccctgttcctgcaggacgaactgtcggtcactctgatacaacggcttttcctgcagtggctatgttcaccgaagaatagtgaggtactgcagatacagagaacggacgacaggatattacgcgccatcatgagcggacaaactgtgcaggatctcgcctgtcagttgcactgtaacagtaaaactctttactcacgggcgtcattactggctaaccgaataggtacgcggacaaggcaggaactgtatctgaaggtacaacttcttttaagccaggcagagaatgtggctgatattaagccataa

SEQ ID NO: 95206 - DNA, 597 bp, Enterobacter aerogenes
atgaaaacagcattacgtatcaacaatatgtcagttcgcgggctggttgccctgctctgtctgatggccggtatgacattcgccactgcagctcccgcgccggtcatgacgccggtcaccattccatcgtgtgtcgtgtcatcgggcaccacgctcgtggatttcgggcggcaaagccgcggacagctgaaggatgtaccgggcggaatgagtccgggcagcaggatgatgacggtgtcactggtttgcaacgtggtacagctcctgaaactcagagtcagtggcgcaacgtccggcaatcattttttgttcggcgatgacgggcagttaacggtgacggcggtcagggctcagcttgacggcaagcccgtgcagctacagcgaaaaaatgatgccggccgtgggggcgggctctcaggcccccctcttcgtcttcttcctgatgacgtcatggttccggtggtaagcggtcagcccgcggaagggcttcacctgacagtgatgctgcaactggtgcccctcctggggccgaaagcctcgcgtccgacgcagcaggcagaaaagcagcagcagctcagttttagccgggagccctga

SEQ ID NO: 95207 - DNA, 2475 bp, Enterobacter aerogenes
gtgcctgatatgacacacgtcgctcgcgccccggtgcgcagcggaaaaaaaatgcccgttacgtctgctgtttcttttcgcccggcgttaaatctgctgacggtcgccttgtgcgcggcctggatgttcagcccggtggtgcaggcggatgaggtgatttttgatgctgactcgctgaaagctgccggccttgacccgtcactggccacccgctttcagcacggtgccacgtttccgccgggtatgaataccgtcatcctttctgtcaacggcgaggcacgcggtcagcgtgccgtgcggtttgatgccagagggcagctttgccccgatgccggattgttgcgccaggcgggcctgaaggtaccggcaggtgtggccagatatcctgcagccactgacgctgcctgccaggcgctgcaggatatctggccacagttcaccgtccaggccgaccaaggagaaggcacgctgagcctcgtggtgcctcaggaggcactcgacccggatgcggatgccaccgtctggcagcataacggcgcggcggcgttactgaattataacgcacagtatatgggtagccgcagcccgggcaacagcatgcgctactggcagttgcagacagaggcgggtttcaacgccggtgactgggtggtccgcagtaatcagagcctgtatcactttggcgagtccacagagacggagtaccagaatgcgtatgttcagcgcacctttccccgcctgaaaagtacccttcaggcggggcaggtgccgctaagcggggggctgttcggcgtcgggcaggttattggttttcagatgacgccggagcaggcgctttataagaacgccggggcagccgtggtaaccggtatcgctgacggaccgtcggtggtggaaattcgccagttaggcgtacaggtttaccacacgacggtgccggcgggaccttttagtctcagtggcttccgtttgctgaatacccgtactgacctcagcgtgacggtgacgggggcagacggccagaagagcaattttgtggtacccgcatcggcttatacacgggaaggcaccgtggtgacgccaggcctgacttgggggatggggcgttacgaccagaaaggcgcagaacgtaaacccatggtggggctggtatcaggcggggtgcaactgacggagcggaccgggatgcaggtcggaaccctgtggtcggaagcataccagggtgcaggactgggcgtgaatacctctgtcctgtggggaacgggggtgtcccttcagtcgactctgtcgcgggcttcttcaccgtcgcgtcagggggtactgacatcgctgtctctgacgcgaccgctgggcgagaaactgtccctgttgctaaacggtagccgacagggctctggttaccgagatttcagcgaaaccctgtcgcgagagagtgacgatgacagccgcaatcgcgaccagtacagcgccggactctcttgggcggacagtacacttggcgggctctcgctgtcctgggggcggagtactcagacgcagggtgacgccagcacttggacgcaactgggctggggccggcagtttgggccggtatcggtgagcgtgaatgcttcacgcaaccagggtaccggacgggacggacgtcgtgaagaccggctgtacatgcagtttcagctgccgctgggcgaaagaatctcgctcagctccacgctgaatcacacccgggacggtatccgctacggtagccgggtagaccagaggctgagtcagggccgcaactggagcctgtcggtggagcgggatgcccgcagcaaccgcaactcggcgaccggcaccgttaacgcggtcacccgttggagcaacctgaacggcacggtgacggatgattctgaccggtcgagaagcctgtccctgcaggccgctggcagtgtggtggcgcatggtaacggtgtgaccgcgtcgccctacaacgtacaggacacttttggtatcgcccgcgtgggggataaacccggcgtcaggctggatactccctccggtcccgtatggacggacaacaatggctacgcggtgataccgtcgctgaatggctggagcacctcgcaggtgcaggtggatacccgcagcctggggcgccgggcggatgtggtgaatggtctgcaggaagtgtcgccagcccgtggtgccatcagtcaagtacattttgacgcggtatccacccgccgggcgctgatagcagcccgcgggcctgatggaaaaaaactgaccgccggggctgcggtgtacagcgacagttcagaatttctgacggtggtggatgatgacggcaatctgttcctgcctgatgtgaaacccggtatgacggtgagcgtgaaagccgaatctgccacctgccgcattaccctcgacacccttccggcgcagccagccgatgaggcggcactgtatgaaaccctgatcggcatttgccggtaa

SEQ ID NO: 95208 - DNA, 705 bp, Enterobacter aerogenes
atgaaaacagtacaaaaaaacttactggccagcctgctggccctgaccgtcggccagtcgctggtcagcgctccgaccatggctgcagacagcatcgatgtgaaggtcatcggcaccatcgtaccggctgcctgtaagccgaccctgaccggcggcgccgttattgactacggcaccattccggctgccagcattgcggctgacgactttactgtactgccggtaaagaacctggagttcagcatcgcctgtgaggctccggccaaagtgtccctgaggtcggtggatgcgcgagcagggacagtggttaaacctgtgggtaaagagttgctgggcgttaccataaattcaacgacggccttgatgggtctgggtcaggccgatggcaaaaatatcggggcctatgccatgcggatagcaccaggaaccgtgaagctggatggtggacaagcagctcctgatcatattttcagcaacgaccggggcgcaacctggatcaatggccctactttgggctcatggctgggaggctattcgtcacgtcttttcagctgggccaataccggtgagttgactcctgtagccttcaaagccctgaccggcaccctggaagttcaggcctccattaacaagggctctgagctggacctgaccaaagctatcccgcttgacggtcagggcaccatcgaactggtctacctgtaa

SEQ ID NO: 95209 - DNA, 708 bp, Enterobacter aerogenes
gtgttattacgtctatccccgctatttaagaaagtactccttggtattgcgttaaccctgccgggggcatcatgggcatccggcatgctccccgaatcttcggtagtgattctggaggagagtgatggcgaaacgtcaatgaacgtaactaatactgacgaccatcccgcactgctgaccacaaccatcagagggatagagggtgataacgagaagctgctgctggtttccccccccgctattcgcgtggatgccggaaaggttcagaaagtgcgtttcatgctgacgtcaaaaaccccgctgaaaacagagcgactgcgccgggtggtgtttagtggcataccgccgaaaagccagggtaaaaatgaagttcgcatgagcgtgaaccagaacctgccggtactcattcgtccggccggactggcccgtgacgaggccccctggaaacgactggaatggaagatgcagggcggcacgttgacggtaaataacgattccccttacgtcgtgcgcctggcgcagagtgtgcagaccctgccggacaatggaaagtgggcgctgccgcagagctatattttgcccggccagcgcatcaccctgaaagcagacggcaggaaagccgggggtggtgcccattcggtgcgtatttcaccggccacaacttggggctacgcggtcaatacttgggatgcaccgctcgtaaaataa

SEQ ID NO: 95210 - DNA, 972 bp, Enterobacter aerogenes
atgggactgaaatttcagggggtaaaaatggataccatcaacctgccaaaactgcatgcccgcagcattcgtgaagcccttttttacctgcacgatcatcgtgaacaagtggctgtcagcggatgcaacctgacggagctcaatgagaagatccaccacttcttctatgagaccgtactccatgatgaagaagctgatgcactcaagggcactgactacgagcttcggtcagagcatgtgccttatcttctgatggccagacgggatgactgggcaagagccgccatcgacaataaatatttcgcatggatcgctgaagatgaactggcgggcatgtttgtctggttccattttctggaattactgaataatgacggttacctgaatattacaggtaatgacaatgacaaactggatctgaatgactggaccagagccgatgatttaaatattgttcaccctgacacgccggaagaacgattactcgccattcagaacatttttgatacctccccctcaccgtgtaaaacaaaaataaaaatcatctctgaattaaaccaggaatgggcctacgccagcccaaagctcagaaaacgatttcgatttctgttcaaagacaacgtaattattccggaagcgattaaggccgttatggcgtgtgcaatcgatgaagggcttccttcattcgatctgaactgcagcaaccctcattcactccggctggccattccctgcatgtatcatttttgtgagcaccgtgaccgggttgtactcaaaaaactgagtcggacttattcggtaaaaaaatatcaggaaaagaataaagaaaaacagctggtcacgctgttgctggatccggacgtcaaagacatgctggatgaaatcgcagaaataaggggcatcagcctgcataaactcattacgcactggacccgccggcactacggcacgctcagaaagcccgttcagtaa

SEQ ID NO: 95211 - DNA, 573 bp, Enterobacter aerogenes
atgcttcacaatgccaacagaaatcacaaacccgatagttctctacagaacgtattattcaaccatcagaaccagctctttgaatgctactcgaaactgttaatgctgcgggtggattttgcctaccgccagaatagtgattcatttaacgccgctgacgtgaaccaactggtcgccgatataacctggttaacggaacaatgtacgacgctatccgggctggtgggttatgcctgggtactggaatacacagaagaccaccgttatcacattcacgctgcgttttatctcaatggtcagcgtcacaggaaggtctggtgcttctgggaagtcattcagtcgctttgggaggacatcactgacggagaaggctatacgcaccgctgcgagccaaaggggcattacagggtacggggagagcgtgtagttagcttttgcgatagcagggggcgagaaggaatgcaatacatcctgagctacttaggtaagcaatcgcagcgtacagaaaggcggatttacagagtaagtgcagttcccgctccggctgtcagtggcagacgtcgcaggggataa

SEQ ID NO: 95212 - DNA, 207 bp, Enterobacter aerogenes
atgaccacacccacgagtcttctcagcgataaattcgtcgatatggcgttcattacgcaactgaccggcttaacggataaatggttctataaactgatttcattgggtgagttcccaaagcccattaagctggggagaagctcccgctggcttgaaagcgaagtggaagcctggctacagaaacgcatcgcgcagtcccgtcagtaa

SEQ ID NO: 95213 - DNA, 591 bp, Enterobacter aerogenes
  misc_feature (533)..(542): n is a, c, g, or t
atggatccattatgtctggagtccagattatactcttttattaagaaacaaatatctaataatgtcagcgtttatgttggaattagtgactatattaaaaaagtccatgtgcaaactggtttttttcaaaaatcagaaaatactgtgatttataatagtattactgcaaaccagtgtgtaaaaaggcacggaagtgacaaaatagttctgggttatttaggtcgaatcgaagaggaaaaaggcgtagaggttctgcttaatgcactgagtaaattaagaggaatggagattaaaattgctggtaaaggttcagaagattacattaagtatttaaatgaaaaatatagtagtattccaatgagttttttaggtgttgttaatgctagcgattttttcccacagattgattatcttatagtaccttccatgtggaatgaacctctagggagagttgtattagaagcggcatctttcggaattccatcgataggtagcgctaagggcgggatcccagagataataaaagaccgacnnnnnnnnnncatactggatatatttttaatagtgaaagtcagctcattgatgtattaa

SEQ ID NO: 95214 - DNA, 1116 bp, Enterobacter aerogenes
atgaagatctataaaaaaatgattgcatgtatatctctattatcactaactatttcatctgcctattcttttgaaatcggggttggaacacacatttctcattatcctggcaatgctgaaaaatacattcatttgatgaatgaatatggttttacatcattcagggatggtatatcctggaattcagttgaagaaaagaagggagaaatgtctatccctgttaaaaacactccgttagataaaatttatcttaaagatgattctgctgcaacaaagaatgccatgtttgttttggcttatggcaacaaaaattatactgacaacgggcgtccaaaaacaaaacaacaagcggataaatttgttgactacgcaacatggattgcacagcgatataaaggacgtgtgaagtattacgaaatctggaatgaatggttagttcagactggtgttaaaaaaggtgatacggttccagatgatgacatttatctctatctggtagaacaatctgctaaagcaataaaagaggtagatcctaatgcaattgtagttgctggttctcttaatcctatttatgcagaacaagttaattggatcactaaattagttcaacgaggatttgcaaagaatatagatggaatttcgatacatccttatacctactatgaaagaaagcgacctttgcttatggaaccaagtgcagatatggacgtaattgatgcatttgaaaaacgtattagtgcttctgcaggtcgggcaataccaatttatattacagaaatgggttatccgacaacctctgctataccaggtggagtgacgcaggtacaagctgctaagtacatttacgaatataccgcattggctaaacaacgaggttatatcaaaggtgtttggtggtatgatctgattgatgatggtttgaatccaaataataaagagcataattttgggatgttcaaacaggatctgacacctaagagttctgcaaaactgatacggcagtttgctccgcaacttatgagtaatgcgtctacggtcgaactaaattctcaaaaagaggttattattcacaataaaggtaatagccatacgctggaaactttttcctccaagtaa

SEQ ID NO: 95215 - DNA, 1062 bp, Enterobacter aerogenes
atggctgaaaagatatttattaatggacggttcctcacgcagcatataacaggggttcaacgttttgccgtagaaatagcaaaacagttagttgctaaacgtgaaaatatatttattgttgtgccagatatccaaaaaattgtcgaccctacaatgctgaaaaagtttaacattgtagaagctaaaggtggagatggccatttctgggagcaaataatactacccttttttttgaaaaaaaatgggaatccattgttgattaacttgatgaatactgcccctgcattttacaaaaatcaagttgtcacgcatcatgatgtcacctatgtcagatatccggatagctatccgtttcgtttcagactactatataagacactaacaccatttttctttaataatgctaaaaaaataattacagttagcgaattttctaaaggtgaaatatctgaagtatataaaatagataagtcgaagattggtgttgtttataacgcagttaaagaagattttattttagatacctctttgccaaaaataccacaggataataaatatattcttgcggtatcatcgcagaattatcataaaaatttccacggcttgattgaggcatttgaacatgctgaacttgactataatttaaaaataatagggcataaggcaaaggcatttacatcagttgatttaacgaaagaaaatcagcgtattgaatatctcgggcgagtttccgatgtcgaattaattgatctttatagaaatgcgtcagcatttatattcccttcattatatgaaggatttggaatacctccgttagaggctcaagcctgcggttgtcctgtaatatcatctaaatcagcttcaatgaaggaagttttaagggatagcgcaatattctttgatcctgaaaactgcgctgatatttgtaatgccatgacaactgttttaaatgatactgatttacagaaagatttgattgagcgaggatttaataacgtcaaaagattctcttgggaaaattctgcaagcattttattaaaaattgttgaagataatcgttga

SEQ ID NO: 95216 - DNA, 1422 bp, Enterobacter aerogenes
atgattctccctgtggttatggcaggtggtactggaagtcgtttgtggccaatgtccagagaacgctatccgaaacagtttctccgtttgcatggagaaaattctatgcttcaagaaacggtctctcgtcttgagggattaaatgtaagtgaacctctggttatctgtaatgaacaacatcgattcctggtcgctgagcagttgcgacagatcaatcagctctcaaataatattatattagagcctgtgggcagaaatactgctccagctattgctttggctgctttgagtgcagttacgaaaaataatgatgatcctttgcttttagttcttgctgccgatcatgtgatcaataataaagttgccttccatgatgctattaaagttgcgattccacatgctaaccaaggtaagttagttacttttgggattgtaccaactgggccggagaccgggtatggttacattaagcgtggcgaagttgttgctgatcttgacgagccagcttatggagtcaaaggttttgtggagaaacctgatcttaagactgcaaccgaatacttagacagcggggaatattattggaatagtggtatgtttttattccgtgctaaaagttatctggatgagttatctcaatatcgtcctgatatttatgaagcatgtaagagtgcaatggctggtcttgaacctgactcacaacaggattttattcgtgttgatgaggaagccttcaccgcttgcccggatgagtcagtagactatgctgtaatggagcgaacaactgcggcagtagtcgtccctcttgatgctggctggaatgatgttggttcctggtccgcattgtgggatgtgaataataaagatacgactggaaatgttattaatggcgacgtatatgttcataatacttctaattgctatattaacactgaagaacaactggtcgctgctgtaggagtcgaggatttagttattgtaagtacgaaagatgcagttcttgtcattaataaatcaaaagttcaagatgtcaagaaagttgttgaatatctcaagaaatgtagtagaagggaatatcgtttacaccgtgaatcgtatagtccctggggaaaaagtgatcaagtagtaagcgcccctcgttatcaaatcaacaaggttacagttaaacctgggggaaaattttccttacaaatgcatcaccatcgtgctgaacattgggtcgtgctggccggaactgcacaagttacattaaatgaaaaaatctatttgctaactgaaaaccaatcgacatttatccctattggatcgcagcatatgctggaaaatccggggaaaattccattggagttacttgagattcaatcaggttcctatttaggcgaagatgatattattcgcatcaaagatcattacggacaatag

SEQ ID NO: 95217 - DNA, 1377 bp, Enterobacter aerogenes
atgactactaatttaaaatgttttaaagcgtacgatattcggggtaaattaggtgatgagctcaatgaagatatcgcgtatcgaattggacgcgcttatggtgaatatctaaaacctaaagatatggtcttgggtggtgatgttcggttgaccagcgagtcattaaaactagcattggccagaggattgcaagatgcagggactaatgtcttagatatcggtctggctggaacggaagagatctattttgcgacgtcgtatttacaagttgatgggggaatagaagttacagcaagccataatcccatcgattataacggtatgaaactggttcgcgagcagtcaaagcctattagtggtgatacagggcttaaagaaattcaacgtctggcagagaataatgaatttacagaggttgatttaaaaaaacgaggtagttatcgtaaagtttcgacgattaatgaatacacagaaaagctattgagctttgtaaacccagaaaactttaacaagccgctgaagttagtcatcaactctggaaatggtgccgcaggtcatgttattgatgctcttgaagagcgctttaagagactgcaactcccaattgaaattattaagattcaccatgagcctgatggctcatttccgcatgggattccaaacccattacttcctgagtgtagaaaagatactactgaggcagttattaagcataaagctgacatggggattgctttcgatggtgatttcgaccgttgtttcttatttgatgagaaaggtaactttgtcgaaggatactatattgttggcttattagcagaagcattccttgagaagaacccaggggcgagaattattcatgatcctagactaagttggaatactatagatatagtcgaaaaatccggcggtattccaataatgtccaaaactggacacgcattcatcaaagaaagaatgcgctccgaggatgcaatttatggtggcgaaatgagtgctcaccattacttccgtgattttgcatattgtgatagtggtatgataccgtggctgcttgtctctgagttagtttgcgtaaaaaatcagtctctaggagatttagttaatgatcgagttattgcatatcctgcatccggagaaataaatagtacacttgaaaatgcatcagctgcaattgagagagtacttaaagtattcgagccaaaagctttaaagatcgattacacagatggtattagtcttgaattttctgattggcgctttaatttacggagttcaaatacagaacctgttgtacgcttaaatgtcgagtctcgtaataatattaagcttatggaagataagactgctgaaatattaaaactgctacgagcgtaa

SEQ ID NO: 95218 - DNA, 1149 bp, Enterobacter aerogenes
atgaaagcgatgacgagatattcatttccttttctggtgctgggctggctgttactggtttttatccaaccagccaaggcaaattgctcaattaatgctccaacagttaccacccccatgccgcttcagttaggtagttttaccgtgggggctgacctggctgacggcacggtactgtataaacagacctataatcttaattatcagccgggcggcggacactggattcaggtcaattgtacgactgataatcagattatggcgaactacagtttcacccaaacaccattaccgttatcgtcctggggggggggaactttatctggcaaagtttatgaaacgggtgttccgggtataggggtctattttggccaagggacaaacggtagctatggtaccgttattccactcagtaaacctgcggcataccagcccaatggtaacaatggcgaatttaactgcagttcggcaaattgccttgttatcgggcagtttaaacgctgggatgtttattttattaaaactggtcaagtctccccaggaacaattattggcggaaaccttccctgtattggtgttaattataccaatggtatcaacagctctgaaaatcaggtggctaatatatgtatgacaggggcactcaatgttgtcgccagtacgtgtaaaacacctgatgtaacggtcccaatggggaattacgatgtatcctcgttttccggtaaaggaagcgcaaccaaatgggtgaatgcttctatcaagctgacagactgtccggtttattacggtcatggtagcagtggttcatggtatgccgatgcgagtggaacgaataatagcggtacaccaacaaaaaatgcgctaacggtcaggctgacgccagcaacgacggtgattaacagcagccagggaatttttggtctcacgcccacaacagatagtgcagggggagcagcaatacagctggcttatggtagcagtgcttcgcctgaatttgtggattttggcacaacgaaaaagtatgagatggatattggctctaccggtatttcagaaataccgctggttgcacgttatattcagactgatacaaaagtaactcctggaatggccaatagtgccgtgacattccttattaactattactaa

SEQ ID NO: 95219 - DNA, 1125 bp, Enterobacter aerogenes
atgaaacgagcgttacttgcattggggatcttcctgtttgtaatatcgagatccgtatgggcgatctgcacacttgataccacacatgtcgaatcagcacctatgccacttcagttaggtgctattactgcgggagctgatttagctgatggtaccgttttgtataaacaaacatataatctggattttacctctggtaatcaagctatcactgttacatgtacaggaaacggaaatccaagtgggcattatacctattcatccacgcctcttccccttagttcgtggagtagcggtatcgaatcaggtaaagtctatgaaacaggtgtccccggtattggcgtatgggttcaccagggaacgaccggtgatgcggctctgcctgtaagcaagttattatctaatagtggtgatgtccactgttcactcactgggggaaataatcagtgtattgtatttggtggttttaaacgctgggatgtttatcttataaaaacaggccctattcagccgggaacaattgttgggagcaatttgccttgtatcagggtgaactataatgtctccggtagtctatctgaagggttggtcgaagaaaatgtctgcatgagtggcactatcaatgttgttgccagttcctgtaaaacacctgatgtgacggtcccaatggggagttatgatgtatcctcattttccggtaaaggaagcgcaaccaaatgggtgaatgcttctatcaagctgacagactgtccggtttattatggtcatggtagcagtggttcatggtatgtcgatgcgagtggaacgaataatagcggcacaccaacaaaaaatgcattaacggtcaggctgacgccagcaacggcggtgattaacagcagtcagggaatttttggtctcacgcccacaacagatagtgcagggggagcaggtatacagttagcttatggtagcagtgcttcacctgaattggtggatttgaatgcaacaaaaacgtatgagatggatatcggctctactggtatttcagaaataccgctggttgcacgctatatccagactgatacaaaagtgacacctggtgtagccaacagtgctgtgacatttctgattaattattactaa

SEQ ID NO: 95220 - DNA, 1584 bp, Enterobacter aerogenes
atggaagacactctctgtattaacattattagccgaaactcaactccatttgttgaacgagatttatcaatgaaaacatggcgattttttatgatgactttattatttattgccatggtgctgctcgcgattatttatattttcccgttgtggcataagcatgtttcagacgaaaaaaacgatacatcactaaaaacccgtactgattatttattgttggatgcccgtgaattaagtgttcacctccgcgatcagcagaatctaccctgcactcccgggctcgcgcgcctgctcgaacatgaagctctgatatacccccatattcatggcgtttatctgtatcgtcacggtgaaatttattgttcttcattaagggagtggtttacgccggaggatgaatttgttgcggcaacccatgatgctgaagaaggccatctactttggctaagcggattaaggaccttccccgggaaagtctttctggcttatattcggggaaaccagaacagaggactgatcatcacaatagatacttactggctgcgccgatggtttgctgaaaacggtcagaatggcattatcattgacgggaaattgttaaccaaagacctgatcataactgatgcggaaacagtccggacaaaaattactcacccaatgcgttccactctgttcggtttcagcgtagtgtctttacgttccggtcgagggatgttccttatctggcctgtgctagtcatactgattctggcactgggtattcttaccgctctgtttatatgcctgtaccgtgaaaaaaaatttccaaccgcccggcaactggagcaggctattctctccggggagattgttccatggtatcagccgattatggatgtggcccgtagtgaagtctggggcgtggaaattctggcacggtggcatcatcccgaaaagggactgttaggtcctgactcatttattccacttgctgaatatagtggctttttgatctccatgacacttgcccttctgaatcaggtccggagtgacatggaagctcttaagttccgtttgccggaaaactttcatgtttccattaatattaatgccacccctgaaatggttgatgcactgaccgaggcactgctcagttttcattattcgtttcataattatctttctataatgattgagctgacggaagggacagaagtccttaatgactcgcccgtcatcgtaaaactcaggacattacgtttcgaaggaattggtgtcgccctggatgacttcggtacggcattttccaatatagccaaaatagaccagttgccggtgaacagccttaaaattgaccggatgtttatccacaaattaacggactcaagagagtcgcagcgcctggtggaaagcattattgaactggcaagaaacaaccgactgtgtgtggtggccgaaggagtggaaacagctttccagtcagagtttctgatgtcgaggggaattaaatatcagcaagggtattactggtcgaagccattgccgatgatggatttttctcgttatcttatctggcacaaaaaattgcctggaacatttaaatga

SEQ ID NO: 95221 - DNA, 177 bp, Enterobacter aerogenes
atgactgaggagaaaaggcactggtcagaaattattgaccgctttagcaaggttgatagcgtggaattttttgttcgtaaaaccctggtcatgcttgatgatccggaagaaatactgtttttaagtgccctcgctcaaaagaaaatagaagagctggaaagagagttcggtctttga

SEQ ID NO: 95222 - DNA, 180 bp, Enterobacter aerogenes
atgatggctatcttgatgtctacagggctgtcaatgccttacaccggaagatggggctggagcagaccggaagtatccccctcagacgctgtcgaagcagggggcaacgcaagtaacggcgagatatatacctattgctacgtgtcattcgtattaaatatgtatgctgaattccgttga

SEQ ID NO: 95223 - DNA, 591 bp, Enterobacter aerogenes
atgaaggaatatgattttaaacggatccattgtgataatttatatttcagtaaaggactgatcgagctgattaacggcctctttcagcacgaatttccggagaccgggcattctgacaccggcatgactgagtttcctgatatatgggttttttcccgtgacagtgcggaggaattatatccctttattcgccaggctgtttctcaccggctgaccattgtctttggcaaggattgccataaaagagtgctgagcagcgtgccgggcctcgagcagatggtatttatggatcttaatatcccccctgaaagggccggggacaggataaaaaaagcatttattgccagtcgttatggattaccggttaaccgggtctcgtttgccagcgatcccatattgacgttttttgaaaaatgggtcctgacggggctgatgtccggggtgagtgtttccgaatttgcctcccgtaccggacggtccgttaattccatcagcgcatgcaaacgccggattatgaaaaaactgaatgtgtttaataatcaggagttattcgccaaagcatgggcgatggggatccatttcgacgcgtaa

SEQ ID NO: 95224 - DNA, 561 bp, Enterobacter aerogenes
atgaaaaaaacaattgtgagtctttcactgctggctgcactgggtatggggatgtctgcggccaacgcggcttccaccgggaccatcaccttcaacggtgagctgaccgacaccacctgtgacgtggatgtgaacggtcagggcgcggacgccaccgtcaccctgccgaccgtcagcatcaaccagctgaccgccccgggtaacaccaccggccgcacctccttcaacatgaacctgtccaagtgcgtgattggtaccgaaggcggccactccaaggtggcggcgttcttccagccgggcgacaccgttgatctgtccaccggccgtctgaaaaacgtcggcggtgacgccaccatggttgacctgcagctgctcgatgcgtccggcaactacaaggccatcaacgtgggtaacaccgaccaggtgaacgacatgacctacgtggatattaaggaagatggtactgccctgctgccgtacgccgttgagtactacgccaacggccagaccacggccggtaccgtcaccagcagcgttgtttacaacctgcagtacaagtaa

SEQ ID NO: 95225 - DNA, 732 bp, Enterobacter aerogenes
atgtttctgaaaaccctccgtcccgcccttaaggcgggtctgtttgcccttgtgtttgccgcctttcagagccaggccagtatcgtggtcagcggcacccgggtggtctatcccggcaacgaacgggaagtcaccgtcaaactgtccaacaccggtaaagggcccgtgctggtccagagctggatagacaagggggatgtggaggcaaagcctgaaaaaattcaggtgccgtttatcctgaccccgcccatcaaccggatcaaccccgacaaaagccagacgctgcgtctgagctataccggctcgccggccctgccggaagaccgggaatcggtgtactggctgaacgtgctcgaaattccgccggtgaccaaaaatatcgccccgaaccggattcaggtggccttccgcacccggatcaagctgttctaccggccggtggtcctcagcgaccgggcaaaagcggcggaagccgcggagaaactcagctggtccgtcagcaatggtgaactgaaggccaccaatccttccccgtattttgtctccctggtctccgtgagtctgtcgcaggggagccgtaaaacctccgtggatggggaaatggtctcccccctcagcagtcacggcttccgcatgaaagacggggcgctgttacgcgccggcaccaccgtgtcctgggaatacgtgaacgactggggtgccgttaaaacgggccattccacccttcagtga

SEQ ID NO: 95226 - DNA, 2241 bp, Enterobacter aerogenes
atgttaattcaaaataaaatttctgattttctcgtcttcgaaactgaatcggtcctgaaagcattagaaaagataaatcagaacaaaaatcgtattgtttttatcgtaaatgaaaacggtaagttatgtggttctttttcggatggcgattttcggcgctggataactaatggggtatttgattttagtatcgaaattgcagaagtaatgaataaagattttgtgtctaagcgtgtagatagtccacgcaaagatattgaatctctattccataatggcgtaaatgtcatccctttaaccgacgaatatcgtcgctttgttgcagttgctatacaaggcgaaaaagggattgtaataggcaaacatattatctctgacaatactccatcatatctcattgctgagattggtaacaatcataatggcgatattaaactagctaagcatcttgttgatttggcagtagaggctaatgctgattgtgtaaaattccaaatgagagatcttggtcaactatataagggcggggaagagaaagataaatctgctgatcttggtgcccagtatacccatgatttattaagccgcttccagttacgtaatgatgagttaatcgaagtctttgattactgcaagtcaaaagggcttacaccgatgtgtacgccatgggatctcaacagccttgcaattcttgaagagtatggcatggaagcatataaagttgcatccgcagattttaccaatcatgaaatgcttgaagctttagctgctacaggtaagccacttatttgctccactggtatgtgcactgagagtgagattaaaaaatcagtggatttattgaaatcactaggtgctgagtttgttattctgcattgtaattcaacctacccaacaccattcaaagatgtaaacctttcgtacctaaaaagattacaaaatataacaaatgggattattggatattcgggacatgaacgaggtatttctgttcccattgctgctgttgctcttggagcgaaagttatcgaaaagcactttaccattgataagggtatggaagggaacgaccataaagtatccctgttacctaatgaatttgctgatatggtaagtaaaattcgtgaagttgaagaggctatgggcaatggcggtgaacgaatgatcacccaaggtgaaatgataaatcgtgagaacttagctaaaagtttaattatcaaccaatcattaaagcgtgggcaaattatcacgcgtgaaatgattgaaattaagagcccgggacaaggtctacaacctctttatattgatcagttaattggacgtagtgcaatccgtgattttgaaaaaggtgattttttctatgagtccgatcttaacgatgcaccaattgaagcacggaattatcactttaacaggccatttggtattcctgtccgctatcatgactatgcaaaattgaaaaacaagtcaaacctggactttgttgaatttcatttgagctaccaggatcttgaactagacttaaatgactttttctctggtgaagagaatattggctttgcagttcatagccctgaactatttgtaaatgaccatattttagacttggcatcagcggatgcagcatacagagaaaagtctattaactatttaaaccgtgtgtgtgaaattactcgtagtttaaaaacctttttccctaaaacggaaaaacccgttatcgttgtcaacgccggcggctttaataccactggttttttacctcgcgaatcacgtgctgggctctatgagcgtgtagctgatgcgctcaaacaggttgatcaagatggtgtagaaattattattcagacaatgcctccgttcccatggcactttggcggtcagagctatcataacctttttgttgatggttccgagattgcaaaattctgtgacgaaaatggttatcgtatttgtctcgatacttcgcactcgatgatggcttgcaactattatggctgggatcttcatgactttactttagaggttggtaaatatactgcacacatgcatattgttgatgctctgggcgtagatggtgaaggtgtccagattggtaaaggcgatgttgattttgaaattcttgctcgtgatttaaatcagacagccgcgggtattcagtttattcccgaagtatggcagggccacaaaaatagtggagaaggtttctggcacgcacttgatttcctggaaaaatatctctaa

SEQ ID NO: 95227 - DNA, 684 bp, Enterobacter aerogenes
atgagtaacttagcaataattccggctcgaggtggttcgaaggggattccgggaaaaaatataaaaaatatagctggaaaacctcttatcgcctggagtattgaacatgctcttaattctgatgcgatagaccgtgttattgtaagtaccgatgttgaagatatcgctgagatagctttaaaatatggtgcagaagtcccttttttaagacccgctgaacttgcgaatgatacagcagcaacggagcctagcttaatacactgcataaactggttagctgagaacgaaaattatacgcctgattatacagtattattacaggctacttcgccagttcgttatgctgatacaattgaccgtgcatttgctcgcttaaaagagaagcgggcagactcattactcacagtatgtgagttttggcacttcctttgggagaataacgaaaatccgaaggcatattatgattttctcaatcgtcctcgcagacaagacattagacccgagagtataaagttaaaagaaaacggatccatatatataactgacactagtgtattactggagacagggaatagactaggtggaaaagtttcctctttgatcatgagcgaagaggaaagttttgagattgatacccaaatggattgggatattgttgaacttattttaaaaaaatatatttga

SEQ ID NO: 95228 - DNA, 471 bp, Enterobacter aerogenes
atgccagataaacaattaattgttatcggtgatggccccgagatggaaaaaataaaatcaaaagctaaagggaatattgaactccttggttatactgaatttagtaagctgtgcgaaatgatgcaaggtgccaaagcttttgtatttgctgcagaagaagatttcggtattgcaccagttgaagcaatggcttgtgggacaccagttattgcttttggcaaaggtggagttactgagtcggttgttcctctcggatatgaacagccgacaggagttttcttcaatgagcaaaccgtcccctcagtgattgaggcggtgaaattattcgaaaataattatgataaattctcaccacagaattgccgactgagagctgagatgttttcggctgaacggtttaagtttgagattgaaagttatatttcggataaatggcagttgtttaatgactccaaaaaagtattgtactaa

SEQ ID NO: 95229 - DNA, 474 bp, Enterobacter aerogenes
atgaccgatattattaaccttaacgataccctcccgttaccgccacaacctgccagttcttcgccagcgctgaccgccacactcgtacaggacgagcagcgcatcagcttctggccagggcacttcggcagcatcccgcagtggataatcctcgaaccgacagtcttcgcgtggatggaccgcttctgcacagactaccacggcggtatctggcaattttacacgctcagcaacggtggcgcgtttatggccccggaagcggagagcgataaactctggtcgctgttcaacaccctgaacggtaacggcggtgagctcagcgccggggctgtcgggatcgcggtctgcctgatgacttacagccaccacgccatgcgcaccgaatgcgacgccatgacggagcactattaccgcctgcgggactacgcgctcagccatgcggaatgcagtgcgatcatgcacatcatcgactga

SEQ ID NO: 95230 - DNA, 480 bp, Enterobacter aerogenes
atggaacaacagttaccgctgtttgcccgtgaattaccctctgccgaccagctgacggtcagggaagccttaaccctgctggaagggcagctccgtgaacccggtgcgtcatttacgtccagcaatgccgtgcgcgactggctgcgcctgcatctcgccacgcaggagagggagtcgctgatggtgctgtggctggacaaccagcaccgcctcatcgcctgcgatacgctttttctcggcaccatcaacagcattaccgtccatccacgggaggtcgtgaaggccggacttcaccacaacgctgccgccgcgctactcgcgcacaatcatccttccggagaggctgaacccagtcaggccgaccggctgattaccggacgcctgaaacaggccctggagctggtcgatattcgcctgctggaccacctggtggttggcgggatggatatagtgtcttttgccgaacgaggctggctttaa

SEQ ID NO: 95231 - DNA, 372 bp, Enterobacter aerogenes
atgcaaagctcaacaaatgtagcaaatcacgatattcccgccccctggtggggacttaagcctgcagctatcccgtgttttggcgcacgactggtacaggagggcaaccggctgcattacttggctgatcgcgccagcatcaccggtaccttcagcgaatcagacctgcgccatctggaccaggcatttccactgctgttgaaacaacttgagttaatgctcaccagcggtgaactcactccccgacatcagcacggcgtcacgctctacgcaaaaggactgacctgcgatgcagacaccctcggctcctgcgggtacgtttatcttgcgatttatgcgacgccacctgtggcacaacccggaggagaatag

SEQ ID NO: 95232 - DNA, 378 bp, Enterobacter aerogenes
atgcaaaccttacccaccatcccgacgaggaaggtatcgtcacacccgtcgccggtagaaatctggcagcaacttcttacttatctgctggaaaggcattacggcctttcgcttaacgacacacagtttggtgatagtaatgtgattcagcagcatattgacgcagggatttcactggcagatgcactcaattttctcgttgaaaaatctgaactggtacgaattgatcgccccggtttctccattcagcatcagtctccgttcatcagcgctattgacatactccgggccagaaaggccaccggcctgatgcaacgtaccggctatgaggcggtgacttgcgccatcagtgggcagtcatccagggggcagcaatga

SEQ ID NO: 95233 - DNA, 492 bp, Enterobacter aerogenes
atgaagctgtccctgacggtggaagccgataccgttaatgtactggcccttaatgggggccggatcgccgtcgatatcgatggtattgagctggctgcgctgattgatgtggtcaatgataacggttactcgcttcgtattgctgatgcccccgggaagttggttgttgaagatcagctaccacgtaccgcccgtctgaatgggatccagtgcagtaccgctcatatcacgtgtgaggataacgctattctcgaccaggtcactcttcaacgccacgacggcggcaacagtgactggatactgtacaccggctacggttacctgttcagacttaacgctcgcttatacccagtgctggagctaaagagattggggctttcaaagggctgccgtcggttagtgaccacactgatacgacgttacgggatcgatatgctacatctggatgcagcgggtgacctgttgccgggttttagcaccttcaactggtag

SEQ ID NO: 95234 - DNA, 843 bp, Enterobacter aerogenes
atgtcagaacttactctcaccgaatccgaagtgttcaccgacaataccgacgtgatttgttctaccagtattgaacgcatcgtcagcgggcgtgacgccgcactggcgcagattgaagcgctcattcagcaacttggcgatatctcagccctgacaagtaccatcggcggaggcaaatcgaatgaatggggagtacggcaataccgttacgactgctggttgatggagaaaccagaaacagcgatgaaagccatcacccaaaatatcgatcgcagcatctggaaagacctgatgattaagtcgggaatgctggcgctcatggacgcacaggcacgcgacgaatggtacaacagcctggaaaaggacgatattcccgctgtcagtgaagagaatattctcagcacctttgagcagctacatcacagtaaagcggaggtgttcgagcgggggatcattaacgtgtttaaaggactaagctgggattacaagagcaacagcccctgcaaattcgggaagaagatcatcgttgatggtctggtacaatatgaccgttggggatttcactttcgtcatgggcgcagacgtgagcagttagcggatttagatcgtatgctgaatctgctggatggtaaacctgttccggagaatcgcaacgatctttccgtcaggctggaggctcatatctgcaaacagcacgcttccgttttcgaagacgaatatgttgagatacgttacttccagaaaggcactgggcatatcatctttaaacgctctgatttgattgataagatgaacgaaatagttgcccgctattttcctgcaaccctaccacctcgtacctga

SEQ ID NO: 95235 - DNA, 1143 bp, Enterobacter aerogenes
atgaagaaaatgttgatgaggctatgcctcctgttgatttcaggtggtgctgcgctttctgctcaggctaccgtcacctgtactttttataacgactcttcttttaatacgaccgcaagtctgaatggctctgcggtactgtcggtcaccccggatattccggttggtacgcgcctttatgctgcccgggttctggcagataaatatcccgatccattttcaattgaatgtagaggtcaaccaaatgaggcctttgttgcaatactaaagacaaaagttctgaacggctcaggactgggggataatattacatttgactccggctatcctggtatcggcgtacagttctggatcaatggtggttatattactgcggatggacagaaagcagccaatatagtgaattcatctataggtggtagtggtggtgtaatgcttggagctaatgtttttgatcgagaaatgacgatatttctggttaaaacaggggatgtgcagccaggtgtattatcggcaacgggatttccgtacgtgcagtatatctggaaccccggaaataacgccagcttcatcccggggatactgtcagagttccattttaacggacaggtgtctattaccacgccttcctgtaaaacgccggagaatgttgatgtaggactgggtgaatacacaaccactgaaattaataataatggtggttcgccgtggaaagatgcgtctatccggctgacaggatgcccgcgctttaccggttatgccggtaaacagggaagctggcatgtcacacagagaggtaacagttctatttcttatgccgcaggagaggcgcctgtttatgctgccaataaactggggctaacacttaacggtgtccgggggaatctcgataatgccaacggtattgtggatattgagcactcagtcggttccgccagtggcgtggcggtacagatagcaagaggcgatagcggcaacaattccccggcccagttgggcgctgagaccctccagaatatcccaatggatggtgtcagtacaattaccattccgttagtcgtcaggatgataaaacacggagagtcggcagtaaaagcggggcgggtaaatacccaaataacctatctgattaactataaatag

SEQ ID NO: 95236 - DNA, 537 bp, Enterobacter aerogenes
atgaaaaagaacattatcatagttgcactgatatcaggcatctcgggctcgtcgtcagtatattctgcggataccgggaatattaacgtcaaagggttgataacctcatccacctgttcaatcgacgttaacggagaaaataacgggactgttgaactgccaaccttaccgtccagtgtatttacagcatcccatccggatgacggcgagacaccattcacaataaatttaactcgctgtgatgatgtcaacagtggagctgtaaatatcgtactgacaaagcctgttgcagattcgaatccggacatactgcccacatcaggaacagctaaaaatgtggctttcagaataaggcatgatgaatcagattacccgacctggaactcgccttcagcaggctcgcaggaatatggacctattactatatataatggaggagccagcctgggttttacggtgtactatcacgcgacggattttcctgttaaagcagggacattaggtaccgttctgaaaatgggaattgaatatcgatag

SEQ ID NO: 95237 - DNA, 192 bp, Enterobacter aerogenes
atggcactgctgagagactatttggcgcttgcggaaaaagaaaataatattacttttgtcggacgtttaggtacttatcgttatttagatatggacgttacaattgctgaggcaatgcaaacagcagaaaaatatcttgatttattaaagactggagaaaccatgccagccttttctgtagaggttcaatga

SEQ ID NO: 95238 - DNA, 894 bp, Enterobacter aerogenes
atgaaggttactgctctaatagttacctataatcggcttaataagctgaaacgatgcatggcagctactctggcgctggatttttccagcgtcgttgttgttaataatgcaagtacagatgatacttcttcatggttagaaacaatcaatgatccacgtttaattatcattaatgaagcaaacaataccggaggagctggtgggttttataccggctcctcttacatttgtgagaatttagaaaccgattgggtttttttctatgacgatgacgcttatcctgagagaaacctattaaaaaattttgaaactatatcatgtgaatctaatgctgcatatgcgtctctcgttacggatctgtccggcgaagtttgcagtatgaatattccatttacaaaaataccttatacgacgcttgaattaattgaatatagctgttcgaaaaaaaagtatgttccatgtattacaaagtcagaaaaagtagcaacactctcttttgttggagcatgcatcaataagcaagtgttaacacaaaaattacattctatacgaagtgagttgtttatttattatgacgatctttattttggcttcgatctgagttcaaatggtttaaatattagattttcccctgagcttttattcaaacatgatgtttcacaaaaggaaggtgggatctatccagagtggaaagtatattatcttatcaggaacttattactttcattaaaaatttataaaacaacacgcccttacagtaagttgtctattatttttagagtaatgaagtatttcatattgtcgttaaaacaaaaaaacaagctcaaatacattaagtattgtgtgaaagcatgttttcacggattaacaggtattaccggaaagcagcattag

SEQ ID NO: 95239 - DNA, 1131 bp, Enterobacter aerogenes
atgaagaaaatttgttattttgtcaattcagactggtatttccatctgcactggttggagcgagcaaagaaagttcaggagcaagaatatgaagttcatgtcattacacatttcgtaaatgaagaaattaaagccgacttgataaatttaggatttatttgccatcatgttgggatgaatgcacaatcgtttaacccattcaatttgctgacttcattttacactagtcataaattaataaaaaaaataaatcctgatattttgcattgcatcactattaagcctacgcttattggtggcttgatagcaaaaaaatataataaagctgctattcttagttttgtagggctaggtcgagtgtttatggataactacactctaatggctcccttgcaaaagataatcctcaagctttataaaaaaatctgctcaaataataaatgtattttgatgtttgagcatgaacatgatcgtagaagactcacaaaactgcttaacctcgataagaataaaacagtagttgttgatggtgctggtataaaccataatatatataaatattcccaagagaatacgactgaaaaacctgttgtcctatttgctagccgattgttatggaataaaggcataggcgatctagttgcagtcaaaaaaaaattagcagagaaaaatattgactttgagctaaaagtagccggtattatcgtagataatgattctgatgctgtgccgatgtcatttattaataaatggcaacgtgatggcttaattacgtggcttggtcaaactcaagatgtatatagtctcatcaaagaatgtaatattgttgctctaccttccgtttatgctgaaggtattccgcgaattttgcttgaggcttgttcggtggggcgttcttgtattgcttataatgttggcgggtgtgatagtttaattatagataaagtcaatggaatactgattgataaaggcgatgtgaaatcccttactgataatattgagtatttgctgcaggcacccgaagttagaataaaaatgggaatgcaaggtaggtctcgcattgaaaaaaaattcacaacagaacatatttctcgtattacactggcagtttaccggtcacttttatcttaa

SEQ ID NO: 95240 - DNA, 483 bp, Enterobacter aerogenes
atgaaccgccctgaactgctcaggcttcttggggatgcggaacctggtgatgtcattctcattgaacaggtcgacaggcttacccgcctgggtgatgcgggctgggagacactcaggaagcaaatcaccgacaagcaactggccatcgtcagtcttgatctaccgaccagccatcttgcgctatccaccacaataagtgatgagtttacccgaagcatgctgaaggccgtaaatggcatgatgctggatatgctcgccgctattgcccgaaaagactacgaggaccgtcgacgtcgccaggctgaaggtataagcaaggcaaaagcggagggcagataccggggcagggttgccgatgaacagaaacatgaactgatacgcactcttcgcctgactcatggaaaatcactgcgcgaaacagcccgactggcgggggtatctaaaatgacggtaattcgcgtctgtaacaaagaggaagggtag

SEQ ID NO: 95241 - DNA, 315 bp, Enterobacter aerogenes
atgcgtttccttcgctcaagaataaatcctaaaatgattcacttcgcaggggaaaataaaccatggaacactcgtgaagtggatttttttgatgactttattgccaatgttaatgggacaccatgggaatcggagtgctatagccaattgtttaggaatgatcttggcaattcaaaagcacagaaaacgagtactcgtaaatataatatgtcatcccagttgttcaaatttattaaaaccattgtaaataaatatgcgccaattggtacagccagacgtaatgtacttgttaagttatattataaagtcaaataa

SEQ ID NO: 95242 - DNA, 312 bp, Enterobacter aerogenes
atgcgtggtgctgccaatactaacgcgatagaaaacatcatcaattcatatgggttcggcattggcgtagggagtgagagggcttcatccttaattatcgcattaataaataatctgggggttgttattttatttgtttttatttactacatatataaaatgattaaaactgacaacaatatcacaaataatattgctatcgttttattctttgtgacactaattggttcttttgccgggaatccagaatatacgttggcatttatgtgggtgtttaccattaatatcttcatgtttttaccgtacttttaa

SEQ ID NO: 95243 - DNA, 2724 bp, Enterobacter aerogenes
ttgacccggatgattaacccccataacatcacgccttcgggcgacagcgcgccacagcaggcttatcagcaaacagtcgaagcggtactggcgcaaaaaaagagccatgccgacggtctcagcaccgctgaagccgtcgggcgcctgaaatcatacggccctaacgcgctgccgcaaaagaaaggcaaaccggcctggctgcgttttcttgcccacttcaacgatgtcctgatttacgtcctgctggccgctgccgcgctcaccgcggtgatgggccactgggtcgataccctggttattctcggcgttaccgtcattaatgcgttgatcggtcatattcaggagagcaatgccgaaaaatcgctgcaggggatccgcaacatgctctccagcgacgcccgcgtccagcgcaacggcaagcatgaaaccatccccacccgtgacctggtgccgggcgatattgttattttgcgcgctggcgatcgcgtcccggcggatatgcgcctgattgaaagccacaatctacgggtcgaagaggcgattctcaccggcgaatcaacggtggtggataaaaccactgtggcgttgcacggcgagctaccgctgggtgaccgcaccaatatggtcttctccggcaccactatcagcgccggcagcggcgtcggtgtggtcaccgctaccggtcaagagaccgagctaggccacatcaatcagatgatggcggctattgaaaagcaccgtactccgctgctggtgcagatggataagctggggaaagcgatttttgtcatcatcctcgcaatgatggtggcgctgttcttcttcagcctcgcgctgcgcgatatcccgctgggcgagctgctgctgtctctgattagcctcgcggtggcggcggtaccggaaggcctgccggcgattatctcgattatcctgtcgctcggcgtacaggcgatggcgcgcaagcgggcgattatccgcaagctgccgacggttgaaacgcttggcgcgatgaccgtggtgtgttcggacaagaccggcaccctgaccatgaacgaaatgacggtgaaagcagtcatcaccgccgactgctgctaccgtgttgaaggcgacagctatgagccgcaagggcgcattttccaggagggcagcgacgagccggtggtggtccagccgggcagcgttttggaaacctacctccgtaccatcgatctgtgcaacgacagccagatcgttcaggacgagcgtggcctgtgggggatcaccggcggcccgaccgaaggggcgctgaaggtgctggcggcgaaagcccagttagcgccggtcgccacccggttggtggcgaaaatacccttcgactcgcagtacaaatatatggccacccgtcagcagatcggcgatgaggagcgggtgctgctcaccggcgcgccggatgtcatctttgccctgtgcggccagcagatgagcaagcaggggccaaggccgtttgaccgtcagtattgggaagacgaaatggcgcgctttgcccgccaggggttacggatggttgccgccgcctgtaaaccggcaaccgtcggcagcgccacattgacccacgatgatctgagggaggggctggtgttcctcggcattgccggaatgatggatccgccgcgtccggaggcgattgacgcgatccacgcctgccagaccgccgggatccgcgtgaagatgatcaccggcgaccacccgcaaacggcgatgagcatcggtcagatgctggggatcgccaacagccgccaggcgatgaccggctatcaacttgagcatatggatgatgccgagctggcgaaggcggcagtggagtttgatattttcgcccgtaccagtccggagcataaactgcgtctggtcaaggcgctgcaggatagcggcgaagtggtcgggatgaccggtgacggcgttaacgacgccccggcgctgcgtcaggccgacgtgggcatcgccatgggcattaaaggaaccgaggtgaccaaagaggccgccgatatggtgcttaccgacgacaacttcgccaccatcgccagctcggtgaaggagggacgccgcgtctacgacaatctgaaaaagactatcctgttcatcatgccgaccaacctcgcgcagggactgttgatcatcattgcgctgctggcgggcaatattattccgctgacgccggtgctgattttgtggatgaacatggcgacctcggccacgctctccttcggcctggcctttgaagccgccgagcgcaacgtgatgaaccgtccgccgcgaaagaccggccagcacgtgatggatgggttcgccgtctggcgcgtcgcttttgtcggttcgatgattgccgtcgccgcttttattctcgaagcctggctggcgccgcgcggccacagcgccgagttcatccgcaccgtgctgctgcagatgctggtgaccgcgcagtgggtctatatgattaactgccgcagcagcgacagtttctccctgaacaaagggttgctgcgcaacaaaggtatctggctggtgaccggcgtcttgttgctgatgcagctggtcatcatctatgtgccgctgatgcagaacatgttcggcaccgaagcactaccgctgcgctactggttcgtgaccctggcgattggcgtggccatgttcctggtggtcgaagtcgagaagcggctaacccgccgtttgcgtaaacctacctga

SEQ ID NO: 95244 - DNA, 282 bp, Enterobacter aerogenes
atggaataccgcgccattcgccgtatggcattgagcgaacgcattaccgatgaaacccgtagccaggtcaaagagagttttcccgagctgaacgagatgtgccagctgtcggtgaaagcggttttccttagcgacgcctatcgcgctttcggcgatgccctgttcctgtcgctggccgaaaccaccatcgaattcgccagccacgatccgcagcgcgcccgcgagatcattgccctcggttttgaggccatgtggaatgcgctgcatgagagtgagtcgtaa

SEQ ID NO: 95245 - DNA, 765 bp, Enterobacter aerogenes
atgggaactcttattggaaaaaaagcatttatcaccggctctgaacaaggtatcggctgggctacggcggaaaaactgattctggcgggatgcgatgtctttttgcactatcacagcggtgaagaaggcccgcaaaagttggcggctatcgccagcgcgcgagggcaaaaagcggcctggcgctatgcggacttaattgacactgaggacgcgaccgcctgcgtgcaggccgccgcggaattcctcggcggtatcgatatcctggtgaataacgtcggcggtatcgtcgggcgtaagtggcttggcgaaattgaccgtcagttctggcaaacggtgttagacgtcaatatgaccaccatgcttaacgtcacccaggcggcgcttccctggcttaaatcggcaacggatggcgccagcatcattaacctcgcctcgctggcggggcgctccggggggcatgctggttctctcgcctattcaaccacaaaaggggccatcctgacctggacacgctcgctggcggctgaactgggcgagcacggcgtgcgcgtcaatgcggttgcgccggggcttattctcggcacccgttttcataaccgccacaccacacaggcttcggctgacgaaaccatccggcaaattccgcttcagcgcgcgggaacgcccgatgacgtcgcccgcgccattgctttccttgccggcgagtatgacggatttatctccggcgccactatcgatattaacggcggaatttatcgcatgtaa

SEQ ID NO: 95246 - DNA, 807 bp, Enterobacter aerogenes
atggacgaacaaaaaggtcatggtcgaaggatcttcttcaccatataccgattgctttttgtgttactgagttttggcattgggattttcttaactatctgggggggcaagctgctctcgctcggcggcagcgcctggtatctgttagccggtctcgcttatcttatcatcgccgttgggtacttcactcgtagtcaatacgcgctgcctcttgctgttattaccttcctgttaacgctggtctgggcgctgtatgaagtgcagctcagctactggggcctgatccctcgtctggtggttcctgcgctgatgctaatgctggccctgtggctggcggcggcgatgccggtggctcgcgtgcgtctggcgaactggagcgccacggttatttttatcgcgctgctggcgacgctggtttcggcgttctatccgcacggcggcatccacaatggcgtcgtgaaagcggcgagcgacaatagtgcgacgcaggcggcaaaaagcgataactgggagttctttggccgcgatgcctccggcacccgtttcgcgccgtataccgatattaccccggaaaatgttcataagctgaaagtcgcctggacctaccacacaggccgccgcctgaccggcccggccattggcgttgacgaaaatacgccgttgcaaattggcgatacgctctattcctgtacgccgctcaacgtggtgaccgccattgatgccgataccggcaaggcgcgctggcgctttgacccgcacgcgcagacggcaggaacatgtgacctgccgcggtgtgggttactatga

SEQ ID NO: 95247 - DNA, 471 bp, Enterobacter aerogenes
atgttattcttcgcggctatcggtgctggggttatcatttacggtatcagtaacgattatatcatagccttgttggacaggatcaccggttctggacagattgatatcacgtctggacgacttgctacctgggttgccgttcctgatattcttggggaaaacccaatatttggtgttggttaccgtatggctacggacaagtacggcattgtgcctgataatgtgttcatttcatcaatactggaaacaggtgttgttggtttgtttttatacatggggatgcttatagcgctgtgctactgcgtgtacaaaaataattcagaaagcttacctcttatcctggcgtttatagcctcagggatgtttgttgatatctcgacgttctggattagtatccctgctttaatcttctttgtagctgtaaacagtcagcgcgatgatgatgaggatcgccatcgcgccatagaatag

SEQ ID NO: 95248 - DNA, 429 bp, Enterobacter aerogenes
atggacaaaaacatcatcaatccagagtttactctggaagagcaacttatcattattgtcgataagtatatctcaaaaagataccagccagccgataaaaatttctcataccagctttacttaatttttgtgggataccatttgaaatatttctacccaagaaatgtatatacccagtccagccgaaacatagataacattatgacgatgttcagttctgtatacaaatgtctgacaagtaatcttttgcagaagttaaacaataaagaggcagttcttagggagctaaattctctcgttaactatattgataacaatcaaggaaaagcagaagaaatttatgctgttgtaaaaacacagtatgaagtgaaggttatcgagaaagagttaacccatgaggttgttagagtaaggaatgttagattataa

SEQ ID NO: 95249 - DNA, 1617 bp, Enterobacter aerogenes
atgaacaggatccaggcgttgttaacgacgtgttttctgctatggttggccttcccgctttccgcggcagaacctcgtcagcagcccaccgctcgcgagcaggcgcgaaccgtcgcgattttccatcaaccgatcgtcatgctacaggcgacattcggccagaccacgccggaagaacgggttctgcgcatccgcaatacgctacgcgccttcaccgaagccgatatcagccagccgctgcaggtggtgccagtcacccgctacaaccagccggggcggctatttctgatgaatggcaaacctatcatgttgctaagccaggctgacctcgatgaaggcgacgatctgacattggatcaggcggcgcagcgcgttcttgcccgtatggaagcgcaacggacgtcgctgcgtgaacagtacaatacccgctatctgttgttggcagcgctgaaatccgtcgccggcgcgctgctcctcgccctggcctgctatctcgctttccgttcgtggcggcgagtgaggcgctttttccatctgcggatcctcgaaaagcgcagcctgatcccgcataactggcggcgttttctcggcaacattgaaagccggttatacgcgctattggtcatactgctagggatactggcgggttatgtctggctgagttgggtatttagcctgtttccgtggaccagggtatggggagaatcgctcggtgagtggtcggtaggcgtgattcgcgatatttcgctgtccatcgtgtcggcgctgcccggattgatgatcgtactgcttatctttctgattacgtggtttatcatccgcctgctgaaggtggtgttggatcaggtcgccgccgggcgtctgcagatccccggtctgcatccggaaaccgtcggcgccacgcgaaagcttatcgccgtggttatctggctctttgcgctctccgccgcctatcctttcttgcctggggcaaactctctggccttcaagggaattagcgtgttcttcggcctgatgttgacgctgggctcagcgggggtgatgaatcacgccatgagcggactggtgctgatttatacccgcgcgctgcataaaggcgactggatccgcatcgccgataacgaaggccaggtcagcgagatcggcatgctggcgaccaaaatcctgacccgcgagaactatattgtcaccctgccgaacgcggtggtggtcagcggtaaaatcaccaatctcagcgctagtgacccgcagcagggaatcaacctcaccaccggtgtgaccattggttacgacacgccgtggcggcaggtacaggcgatgctggaactggcggcccaccgcgcccagggagtggatcatcaggtggcgccggtggttcgcaaactgggattgcttgactggtatacgtcgtatgaactgcaggtgcggctgttaccggaaacgacgctgccggaggggcgcaacgcgctgcacagcagcattatcgatgtatttaacgaatttggcgtgcagattatgtcgcccaattttgtcatgcaaccgaaaggcgcggtggtggtcgccaaagaggattggtataccgccccggccgtcgcgccgcaggagcgcgacaggtaa

SEQ ID NO: 95250 - DNA, 237 bp, Enterobacter aerogenes
atgcctctgatcacgcggcttatgctgcaaaactttaaaaagtttccggaactggacctgcgcttcactcatgaccgtaacattctggtcggggacaatgagtccgggaaaagcacgattctgctggcccttgaccttgtgctgagtgacagccggcaccgggtcgaggcattgggtgtggaatcgctcctgtcccagtcagcagtaaggcagtttcaggggcactgttgcaaatag

SEQ ID NO: 95251 - DNA, 795 bp, Enterobacter aerogenes
atgaataacctggttccagttggatctccggcatctcccggaacattgctcccggtggccatcgattaccctgccgccctcgccctgcgccagatggcgctcgtgcaggatgaactgccgaaatacctgctggcgccggaagtcagcgccctgctccattacgtgccggatcttcaccgcaagatgctgctggcgacgctgtggaacaccggcgcgcgcattaatgaagcgctcgcgctgacccggggggatttttcgctggtgccgccgtatccgttcgtgcagctggccacgctcaagcagcgcaccgagaaagcggccaggacggcaggtcgtgcccccgcaggcagtcaggtccatcgtctggttcccctttccgatcaccactatgtcagccagctgcagatgatggtggccaccctgaaaattccgctggaaagacgaaacaagcgcaccggcagaatggagaaggcacgtatctgggagatcacagaccgtaccgtgcgcacctggcttagcgaagcggtggaggccgcagcggccgacggggtgacgttctcagtaccggttaccccccatacgttccgtcactcctacgcgatgcatatgctgtacgccggcatacctctgaaggttttgcagagcctgatgggccacaaatcgatcagttccacggaggtctatacgaaggtgtttgcgctcgatgtcgcggcacggcaccgggtgcagtttgctatgccggaagctgaagctgttgcgttgataaaaaagttaaccccaaaccaatctacatag

SEQ ID NO: 95252 - DNA, 2058 bp, Enterobacter aerogenes
atgtctgcaacagagtctaaggtaaaaactgcaccgaaaaccagcaaaaaaacgcttaagtctgccgaagctgaggcgcttaaagtggctctcgatgccgcacaggtcgagtatgtcccggtgacggcactggtgaagtctcccctgaacgtcaggaccattccctatccggcggagaaagtctgttcaatggcagattccattgaagccattggcctgttgcagaatctggtcgtgcataacctcccggatggtcgctgtggtgtggctgccggtggtcgtcgcctgaaagcgctgcagctcctgcagagtgaaaaccgtatcgatgccggatatcaggtgatggtgaaaaaggtacctgatgaactggctgttgcggcatcaatggcagaaaacgaacagcagatggcaatgcatccgtctgaacagatcgccgggttccgcacactggcagagcaggggaaaacccccgcgcagattggcgatttactggggttcggtacgcgtcatgttcagcgcatgttgaaactgaccgaactggctcccgaaattctggcggcgctggcgaaggatgaaatcaccaccgaacactgccaggcactggcgctcgaaagcgatcagaaacgccaggtggaagtgctggaatccgcccgcaaacggtcctggaataatgaagtatcagtttcctcgatccgtaacctcattatctcagaagaggtttccacaaacggcgacaaattccgctttgtgggagaggccgcattcagtccggatgaaatccgggttgatctcttcagcagcgaaaacggcggctatgtcaaaagtgcatcgctcgataccgccctgctggaaaaactgcagaacatcgcggagcacctccgcgaagcggaaggctggtcatggtgtgatggtcgtcttgaccctatttcacactacgggaaggacactaaaatctggcgcctgcatgctgtcccgcctgtggaatataccgaagccgaatcagaacgtcttgcggaactggaagctctggaagctaagtatgaagacgagaaccccggcgtgaatgatgacgtcttggccggggctctggaagccgtctgggaagaacagcagaccatcgcgcaccgggcaaaacaccgggcatggacggatgaaatgaagcaatctgccggagtggtggtttcctggactggccaggaggtgaaagtacagcgcggtgtggtgctgtgcgccgatgaaaaaatggaggagaaggatgcatccaccgatcaggtccctgaaaaagtcgaaccgctggacgccgtcagtgtcccgttgctgacccgcctttcttctgaacgcacactggcggttcaggcggccctgttgcagcagccgcagaaagccgtcgcgctgatggtctggaaaatgtgtaactcggttttccataccacaacgtccgtcaaagagccgttctgcattagcgtgagtgtgtcgcattacgcgctgacccgtgaagcacctgacggtgaaaacagcgttgcgtttcaggccatccagtcagaaaaagaacgtcttgaagccctgctgccggaaaactggcgaaaggatatgaccaccttctttacgctcgatggcgcaaccctgatggcactgatggctttctgcaccgcctgctccatagatggtgtacagggcaaggatgaatttggtcgtaaacaccagagttcgctggatggggtggaaaacgccattcagtttgaccttcgtgactggtggaaaccgacggctgataaccttttctcgcacatgaagctgccacacattgtacaggcactctctcaggccggactggctggcgcagcacaggacgccgcgaagatgaagaaaaaggatgccgctgaacatgcagagcacttcctctcaaaaatccgttgggttccggaatggatgaccagtgctgacaatcagaaacagcctgccgcaaagtctgaactcagtctggcaacaagtcagaacgataccgacgctgatgccggcgacgtcaccgaccataacaacccggcctgcgccgcctga

SEQ ID NO: 95253 - DNA, 1005 bp, Enterobacter aerogenes
atgaataacgtctctttgattggtattgatctcggcaaaaattcattccacgtccattgccaggatgcagcaggcaaagctcttagccgtaaaaaattcacacgagcgaaattattcgaatttcttgccaattgcccttctgcaactgttgttatggaagcttgtgcaggagctcactatatagctcgtaaagtttctaacatgggtcacaaaccaaagctgatttctcctcagtttgtccggccattcgttaaaagcaataagaatgatttcgttgatgctgaagccatatgtgaagcggcatcaagaccatcgatgcgatttgtagcccccagaactgagtcccagcaggaaatactcgctttacatcgcgtacgagaatctctcgtcagagataaagtcaaaacaaccaaccaaatgcatgcttttttacttgaatttgggatcagcatgcctaaaggtcttgctgtgatacggagactatccgtagtcctcgaggaaaatgaattacccccctatttggctaaattgttagtgaagttacaaagccattatttgtatctggttgaacaaattcgcgatatagaacatgaactggaactagcagcgaagcaagatgatacaacccaaaggcttatgtctatcccttcagttggtccgattacagcaagcgtcctgatggcaaacctcggtaacggccaacaatataaacagagcagagattttgctgcggcaactggtcttgtccccaggcaatacagcactggcggccgaccaacattgttagggatcagtaagcggggaaacaaaaatttgcgaaggttattagtacaatgtgcaagggtgtatatccttcacctcgagcatcagtcgggttatctggctgaatgggtgagaaaccaactatcaaaaaaacactcatgcgttgtagcttgtgctctggcaaataaactagctcgaattgcctgggcgattacgacaaaagagagcatatatatggcttag

SEQ ID NO: 95254 - DNA, 159 bp, Enterobacter aerogenes
atgaaactgccgcgaaacactctgctcgggtgcgtattaatagtgtgcctcacactgctgatattcacttacctcacccggaaatcactttgtgaaatccggtacagggacacgaacagggaggtggcggcttttctggcttacgaatccgctaagtag

SEQ ID NO: 95255 - DNA, 1113 bp, Enterobacter aerogenes; identical to SEQ ID NO: 11536

SEQ ID NO: 95256 - DNA, 141 bp, Enterobacter aerogenes; identical to SEQ ID NO: 11535

SEQ ID NO: 95257 - DNA, 273 bp, Enterobacter aerogenes
atgaacttcacgataaaatcccgtaaaaccggcgaaattttcagtttttacgcacccgacagtggcggttatgttcacctggagtccccggggcaccctggtaacaccggcgcccagatttgctgtggtggagggttcatggggagtacgctttcctgtggcgcttctgaggacgatctggccagtgttgcccgtaaatggtaccgacagttcgtgagggagcggcgcaaattcttaattatgtcgggccagtattctgaggataaccagtga

SEQ ID NO: 95258 - DNA, 351 bp, Enterobacter aerogenes
gtgaaaaaagagatctcccgcaacccctctttcacaccttcgcctaagctgcgagcacatctgaactcccacagggaaggggtgactgaacggctgaataatatctttgatcgctatgcgcatctggttcgcgcctgtgcccttcctctcgatgccgaagaaacacaggttctgcttaatgtgctgaatggctccgttgtggaacccgcctttattgaatatctggctcaggaaattcgggactcggatgattatctggaagggatacccgcagctaaatcactgtacgaaaagtgtcagtcagcgacctatccgcaattgctggccaccgtcgaacggctcgatcgctga

SEQ ID NO: 95259 - DNA, 357 bp, Enterobacter aerogenes
atgagcacacaaaacgtcaacgtaaaaccctccaccaaagaaagcacaaccctccggactgacggttttgtgcgcaacattcattcccgaaacccattcgatgttatccgcgccgatgtagtgctggaacgtatcgagaaaaaggctggtcggtgctgcgggatgcattacgagctgtatcaggcccatctgctgggtggtgcgctggattatctggatgcgctgccgttaaaagaccgtccggtgttaatgggcgctgcggcaaagcgcggctatctgctgacgctagccgaagaggaacgcgcgctggaagcacgggatgtactgatgagtgaactggcggcaaacgactgctga

SEQ ID NO: 95260 - DNA, 213 bp, Enterobacter aerogenes
atgaaagtatacggccatcaacactcatcagaggttttctcccgggaaacttccccatcctgttttgaaccaaaagcggaaaaggtgatcgcttttcatggaaaggatgccagttacgcctataacgtgctggccgatctgaaagccgcaggtgcttcatatacgcgccggaatatcatcgccgatatgttccgccgtctgggtgtggaatga

SEQ ID NO: 95261 - DNA, 225 bp, Enterobacter aerogenes
atggaacacgtgaaaagacaaatccagcagggggcagggaacgcctattatgcggggatgcagtggcgcggtattacactcggacacgccgatgctgcagcgcttaatcagtttgatatcgatatcagcaaagctcaggcacccgaagcacgcacctggttgcttcagaacaaagcggaattcatagctcttatgctgggtattgagattgtaaagatcgggtag

SEQ ID NO: 95262 - DNA, 321 bp, Enterobacter aerogenes
atgttcacagtcatctttcatgatgaggctgaaaaagagtttacggctctgcctgctgccattcgtgcaaaaatggccaggctactcatgaagctggaagcaaaccctcgccagctacgcgagccagataccaagccgcttggaaacggccttttcgaaatacgtacaatgggggcagatatcgcccgcggaatctgggtatatcagagtggtgaacgtatttttctacttcggatctttatcaaaaaatcgccaaaaacgcccccggcagaaatagatcaggcacttcgcagactggaggaaatgcagaatgaaatataa

SEQ ID NO: 95263 - DNA, 279 bp, Enterobacter aerogenes
atgaaatataaaacccttagccaggttcataccgaagcaatgaacgatcatgagtacagcgcggcattcgaggcagaagaagcctcggagctacttcgggaaaccttagcaacatggcgaaaagatgcgggtttgacgtcggcacaggttgcagaacgtatgggcatcaaagcgcctactatctcacgtatggagaagaacgctgcgcgaatgagtattcagacgctgattcggtacgccagagcctgcggtgttaactttaaaattcagcaggtttga

SEQ ID NO: 95264 - DNA, 402 bp, Enterobacter aerogenes
atgattagcgatgccaataaagcggtgaatgacctggcgagtattgtccctctgctgggtggcagttcgtcccgcaaagattacgaagatgtacgtaaactcgttgagtatcttctggaacatgacccggacagctcgctggttgatatactgactgcccgcattgatgcctgggaaaataacgcggtggaatttacgcgcatcgaagctggtaaaaacggtgtgtcgttgctgcgggttcttttgcagcaacgcgggctttcacagtccgattttgaaaacgagataggcaaaaaatcactcgtcagccggatcctcagtggtgaacgcagtctgacactcgatcacatgcgggcgctggcaaatcgatttcaaatcccggtctcgatgtttgttgactga

SEQ ID NO: 95265 - DNA, 216 bp, Enterobacter aerogenes
atgcgggcggcgcgtcagcgcggcccggttttcccggcgccgcaggcgcgcggtctttcgaggcgcggccagacggggaccgatgcccccttcgcctgctctgttcccgaatcagtcaacaaacatcgagaccgggatttgaaatcgatttgccagcgcccgcatgtgatcgagtgtcagactgcgttcaccactgaggatccggctgacgagtga

SEQ ID NO: 95266 - DNA, 822 bp, Enterobacter aerogenes
atgcgtttagcatcccgatttggacttactcattccattcgtcaggaacgcccactgactaacgatgaattagtcaaggttgtaccttctgtgttttcagaagaaaagcataattcacgtagtgatcgctatacctatattccaaccattacactgctggataaattacgtgaagaaggtttccagccattttttgcctgtcagtcacgagtaagggatgaggataaacgggggcatactaagcatatggtaagacttcgccgtgaaggggccaataaaggaacagaagtacccgaaatcattcttcttaactcgcatgatggatcgtccagttatcaaatgatcccgggtatgttccgttttgtatgcacaaatggccttgtgtgcggtacgtcgtttggtgagattcgtgtacctcataaaggtgatattgtgggaagggttatcgaaggtgcttacgaagttctgggaattttcgataaaataactgaaggcgttgatgtcatgaagtctattgccttaaccaaggaagaacagcgtctgtttggacaagctgcattaacctaccgatatgaagatgaaaataaatctccggtcagtattgaacagataattcatccgcgccgttatgaagataaaaaagatgacatctggactacatatcaaagggtccaggaaaatctgattaaaggcggtttgcctggccgaactgaaaaagggaaaagaacaacaacccggccagtaaaagcaatcgatggtgatgttaaactcaataaggcattgtggttaattgcggagaaattccgcactcttaaaggctaa

SEQ ID NO: 95267 - DNA, 486 bp, Enterobacter aerogenes
atgaagggagtagcgtttggtatcatcctgtctttaataccattgtcatcaatggcagcagactgctttgatatggctggcagggattacaaaattgatccggatctcctgcgtgctatatcatggcaagaatcacgatttaaaattgatgcgattgggcgtaatcctgttacgggttatggatcaggcttgatgcaaattgactcgcagcatttcaacgaactgtcgcgatatggaataaaaccggatcatcttcttagcgatgcttgtcttaacatctacaccggagcctattatctggctcaggcgtttaaaaagtggggcgtttcgtgggatgcagtcggggcatacaatgcaggcttcaaaaagaccccgcgccaggcagcaagacgttacgagtatgcgaagaagatccattactactacacggctatcaaagcaagcaaacgaacttcttctaaagatcagaaaatcgccatgaactaa

SEQ ID NO: 95268 - DNA, 384 bp, Enterobacter aerogenes
atggccagggtacaagcttatgctagtgatgaagttgcagagaaaattaatgcaatagtggaaaagcgaagggctgaaggggcaaaggaaaaggatgtcagtttttcaagtgtcgcttcgatgctccttgaattagggcttagggtttatgaggctcaaatggaaagaaaagattcagggtttaaccaaactgagtttaataagattttgcttgagaatgtcatgaagactcagtttactgtatccaaacttttggctattggctctctaagccctcatgttacaggtgatgaacgattcgagttccgcagcatggtgagtaacattcgagaagatgcaaaagatgttatttctcacttcttccccgagcaggaagaagagtaa

SEQ ID NO: 95269 - DNA, 720 bp, Enterobacter aerogenes
atgtgtgcgaaggatcgtagtcatattgctgtgcgcagtcaaacagattccattcattctatgcgcgagatgcttaatatttcatcttgccctgcttttattcgtgattcccggggcgaagtaattcacaccagcccaacctttgacaaaattttcttaacatctggtggaactggagcatttgatacacccagagcacctggaagctggtttctggatctctccctggagatcaaactggaactgatgcagtcagaactgaaatcgttttcagaaggttctgctgtacttgttaaaaatatttggttggcaggttcactttggactgtttttattgaaacgttctcgattaatgaagatacatacagtaaatgggtttttataaatgaagatgaaccgatacctcatccttcaatggaattcaatgacttttctataaagatgcaaagatatatcgaaagaattcagcgttcagcaaagtctgactgggctatctttaatctgtatgcggttgggttttctcatgcatgtatttctaagattacaggtgttggggtgcaaacctcaaaaaatacagttagtaaaataaaaaaggaactgagctttgatgatcgtgactatatcataatgtcctcgatctatactctaagttatggaaagtttatatcgaatgtggtttcgatattaaaagatggtgttaattttttgttaaatcaatag

SEQ ID NO: 95270 - DNA, 390 bp, Enterobacter aerogenes
atgactattactgagattactctcgcagcattaattgttgttcagtggcttacggtggttcgacaaaataaagaaattaaccaccgacgtgaatgtgaaaggcttctgaaagaaaaaattgacgattatgaattacagaatagtcggtattgtcggtatgttgaaggcaaagcaagtcatctcatcagcgatatggaaaaggatttggatgagctttttcttttaaaaccacatgatgaggactcgttctggcggaaggtttacagactggagtttatttccaacgtgctgaagcatttcgctaagggacaggatttaaaaaagcagaaagaaataatcgatggtgtaaacaacatctgggaaaaatacaggggaagggataatcaatga

SEQ ID NO: 95271 - DNA, 990 bp, Enterobacter aerogenes
atgagaaaaatatcatttttgtttatcctcctgtttttttcgttagtccctcaggtacatgcagatccgtcgtgtgaaggtcgattcgtcaacccgatcaccgatgtgtgctggcgctgcatatttcctttatcactcggcagcgtgcaggttggtaaaggcgatctgcctgataccagcaatccgggtagtcccctgcagctgtgtccggcgccgccaccgatttttgttcgccccggcctggccatcgggtactgggagccgatggccatgacggacgtcagccgttcgcctggctgtatggtcaatctggggggcttcagtatcaatctcggcaagaccggtatggggaccgcgagaaaggacgacaagcaggtgaacggcgctttttatcacgttcactggtacaagtacccgctgacctactggctgaacatcatcacctccgcaggctgtctggaaggcggagacatggatatagcctatctgtccgagattgacccgacctgggtggacagcagcctcaccaccattctgaatccggaagccatcctgtttgccaaccccatcgcacagggggcgtgcgcggctgacgctatggccagcgcgtttcatatgccactcgatattctgttctggtgtgccggctctcagggttcgatgtacccgtttagcggctgggtaagcaacgagtccagtccgctgcagtcctcgttacttgtcagcgagcgcatggcgtacaagcttcaccggcagggacaaattatggagagcatcgggaaggacaaggcggtctgctatgagtatccgtccccgatcatccccaaagagcgctggcgctatcagatggtgaacatgtacccggacagcggccagtgccatcccgtggggcgcagcgtgatgcgctgggaggccggtaaaaatccacccaacacccgtaagaactatggctatctgatgtggcgtaaacgcaattgtgtctttctctga

SEQ ID NO: 95272 - DNA, 639 bp, Enterobacter aerogenes
atgaaattaatgaatctgtttatggtcatgcttttgctgaccggacgagcagtgttggctgaaacctcctctgttacagacagagaatggctgaagcagcaggagaacctcagcgaacagctgcgccagcatccggataaacagctgcagcaggagcttgaggcgcaaatcaaccgtaatcctctgcccaaatcagaccgccagtttatcgataatctggtcagtcagcagaaagcggcgaatcaggaaaagccggcagaaggggcgctgtactttgtctccttctcgatacctgaagaggggctgaagcggatgctgcacgaaacccggcagtacggcattccggcgacactgcgtgggctcgtcaataacgacatgaagaccaccactgacgcggtgctgcagctggtgaaggatggcgtgaccgacggcgtgcagatcgacccgacactatatacgcagtacagcatccggagtgtgccgtctctggtggtacggtgtcaggccggatatgacgtggtacgcggtaacattcacgtcaaacaggcgctggagaaagtcgcacaaaccggtgactgtgcacaggtggcccggcagatgcttgatgcgccctcgaatgccgccgggagccagccatga

SEQ ID NO: 95273 - DNA, 534 bp, Enterobacter aerogenes
atgatgatgaccaataaaatcctcattgaagaagtagatgagctgaaaaatgtgttttcacgaggtgaaatggagataccatctttttggtcatgtctatggcctggagtaattgttgccgcctggaatatgatttgcgccctaattagtgtagggggcgggtatttgtctgttaagttcatattttgggtgttggtgttccccggtgttataagtcttattgttctgcttggtgtggcaagtgcgcgttcactttttttatctgttcccagaacctatagaatgcgctcgcaggtatatcggtttatatctagaaaagttatggtctatgcacttgtgtatatggctttaattctagcgcttgcactatttaatagagtgtattatgcctctccatttcctttttcgttcatgattcttattgcgacgatttttgtatggtttgttatgaatattgattttggacgatatcaactttcggtactctcatctgcgataaactctttcagagcagaaaagttgggggggggatga

SEQ ID NO: 95274 - DNA, 732 bp, Enterobacter aerogenes
atgaagcttaataaagtcatggctgtgatggtcgtcagctctgctctggtgttgtctggatgtagtgcaatgggaaccgctattaaaaagagaaatctggaagtaaaaacccagatgagcgaaacaatctggctggaaccttcaaataataagacggtttatctgcaaatcaaaaatacctccgataaggatatgagtggcctgcaggcaaaaattgccagcgctgtcacttcaaagggatatcaggtcgtcagtaaccccgatacggcgggctactggatccaggcgaatgtgctcaaggccgataaaatggaccttcgtgagtctcagggctggttaagccggggttatgagggcgctgtgactggcgccgctcttggggcggggattaccgcttacaactccagttccgcgggagcaaccctgggagtagggcttgcagccggtctggtcggaatggcggctgacgcgatggtggaagatgtgaactacaccatgataaccgatgttcagatcgcggaaagaaccaaaacacaggttcagactgataacgtggccgtattacgtcagggaacatccggcgcaaaagtgcagacaagtactgaaacgggtaatcagcataaataccagactcgcgtcgtctctaacgcgaataaagttaacctcaagttccctgaagcccagcctgttcttgaagaccagctggcaaaatcgatcgctaatatcctgtaa

SEQ ID NO: 95275 - DNA, 270 bp, Enterobacter aerogenes
atgtcacaggtcgttaacggagttacttcctcatctaaacgtccctataggaagggcaaccctgtttctgcggcagaacgtcagcagaaagctgttgcccgaaaaaaagcgacgcacaaagaggtgagagtatttgtgcgggacaagcttaaaaaccagcttcaaatcatgtgtgagaatgaaggaattactcaggcagcaatgattgagaggctgattgaaagggaatctgcgaaactaggaatcgacgtaacgacgtcacattcttga

SEQ ID NO: 95276 - DNA, 552 bp, Enterobacter aerogenes
gtgactgatcataaccaacaaagctcatgcaagtatgttcaggtaaacaatcctgaacctgttttcacggttccccaggactacactccctggcctttctcgctgaaacttatggtaaaagccaatggtttcactgaaagcttcagtttcgatatcgcatcagcgatgtcgcgtagggacggaatacgaaaacgtaaacccccatttttgcgccgcagagcgatgaatgcgttgctcatggcgatgtgtttttattacgatcccctgtcaaataaagttctgcgctcactcagggagattgccctggagtgcggacttgcaactaaatctctttctggcgaagtgtccattacacgagcaatcagggcactggaatcgctggaaaaagattttgaatttgttgcctgctcatcggattgctattcaactgctgagatttttttcacccctaagctgttcgaatttcttggcgtatttccactctctctgagcgaagccagactgaagtgtctggccgccaaaaacagcggcagggagagtgcagatgagtaa

SEQ ID NO: 95277 - DNA, 282 bp, Enterobacter aerogenes; identical to SEQ ID NO: 61246

SEQ ID NO: 95278 - DNA, 612 bp, Enterobacter aerogenes; identical to SEQ ID NO: 61245

SEQ ID NO: 95279 - DNA, 246 bp, Enterobacter aerogenes
atggataaagttaatttaaattcagatgattattttttttcaatgggtaaagttattagcattaaatcagaattaaaaatcagaagcttaaatggaaatatgataagtttttcttatggaaaaaatttatatgcatatataaccgatattggagtaggagaagatgtttgtttttggtatgaagaaaaggagggatgcactaaggtgattaaagaaatcaccagagcacagaatctacacggataa

SEQ ID NO: 95280 - DNA, 1005 bp, Enterobacter aerogenes
atggaaaacattgcgctcattggtatcgatctgggtaaaaactctttccatattcattgccaggatcgtcgcgggaaggctgtttaccgtaaaaaatttacccggccaaagttgatcgaatttttggcgacatgccccgctacaaccatcgcaatggaagcctgtggcggttctcactttatggcacgcaagttggaagggttggggcattccccaaagctgatatcaccacaatttgtccgcccgttcgttaaaagcaataaaaacgactttgtcgacgccgaagctatttgtgaagctgcatcgcgtccgtctatgcgttttgtgcagcccagaacggaatctcagcaggcaatgcgggctctgcatcgtgtccgtgaatccctggttcaggataaggtaaaaacaaccaatcaaatgcatgcttttctgctggaatttggcattagcgttccccgaggagctgccgttattagccgactgagtaccattcttgaggataatagtttgcctctttacctcagccagttattgctgaaattacaacagcattatcactatcttgttgagcagattaaagatttggaatcccagttgaaacgaaagttggacgaagatgaggttggacagcgcttgctgagcattccctgcgtcggaacactgacagcgagtactatttcaactgagattggcgacgggaagcagtacgccagcagccgtgactttgcggcggcaacagggcttgtacctcggcagtacagcacgggaggtaggacgacattgctgggaattagtaagcgaggtaataaaaagatccgaactttgttggttcaatgtgccagggtattcatacaaaaactggaacaccagtctggcaaattggccgattgggtcagggatttactgtgccggaaaagcaactttgtcgtcacttgtgctctggcaaacaagctggccagaatagcctgggccctaacggcacgacagcaaacttatgtagcataa

SEQ ID NO: 95281 - DNA, 1710 bp, Enterobacter aerogenes
atgaacagcgacaacgcccgcaaggtgcccgccgacgcgccgaccgcattcatcaagccacgctgggcgaaactggtgctcacggacgatggcattgaccggcgctactacgagctgtgcgccctgtcagagctaaagaacgcgctgcgatcaggcgatgtctgggtgcagggttcgcgccagttcaaggactttgatgagtacctggtgccggccgagaagttcgctactctgaagctggccaacgaattgtcgctggcagtggccaccgattgcgatcagtatttgcacgaccgactggcattgctggaacagcagcttgccaccgtcaaccgcatggcggcggccaatgatctgccggatgccatcattaccgagtccggcctgaagatcacgccgctggacgcggcggtgccggagaccgcacaagccctaatcgaccagtcggcgatgctgctgccacacgtcaagattaccgaactgctgatggaagttgatgagtggacaggcttcacccggcatttcacgcatctgaagaccggcgacacggccaaggacaaaaccttgctgctgacgacgatcctggctgatggcatcaatctcgggctaaccaagatggccgaatcctgcccaggcacgacttacgccaagctgtcgtggctgcaagcctggcacatccgggatgaaacgtactcaacggcgctggccgaactggtcaacgcgcagttccggcaatcctttgccggaaactggggcgatggcaccacgtcatcgtcggatggccaaaatttcagaaccggcagcaaagcggagagcaccgggcatatcaacccgaagtatggaagcagtccaggccggacgttttatacccatatctccgaccagtacgcgcccttcagcaccaaggtagtcaacgtcggcgtgcgtgattcaacctatgtgctcgatggcctgctgtaccacgagtcggacttgcggatcgaggagcactacaccgacacagcgggctttactgatcatgtcttcggcctgatgcacctactgggcttccgattcgcgccacgtatccgagacctgggcgacaccaagctattcatcccaaagggcgatgccgcctatgacgcgctcaagccgatgattagcagcgaccggctgaacatcaagcagatacgcgcccattgggatgaaatcttgcggttcgccacttcgatcaaacagggtacggtgacggcctcgctgatgttgcgcaagctcggcagctatccgcgtcagaacggactggccgttgcactgcgcgagctggggcgcattgagcgcacgctgttcatactggattggctgcaaagcgtggagctgcgccgccgcgtgcaggccggactcaacaaaggcgaggcgcgcaacgcgctggccagggcggtgttcttcaaccgactgggcgaaatccgcgaccgcagttttgagcaacaacgctaccgggccagcggcctcaatctggtaacggcggccatcgtgctttggaacacggcctatctggaacgggcaaccaatgctttgaacgggcacggcaaaccggtagacgagacgctgtttcaatacctgtcaccgctggggtgggaacacatcaatctgaccggcgattacctctggcgcagcagcaccaaggtcggcgcaggcaagttcagaccgttgcgaccactgccaccggcttaa

SEQ ID NO: 95282 - DNA, 1005 bp, Enterobacter aerogenes; identical to SEQ ID NO: 53712

SEQ ID NO: 95283 - DNA, 477 bp, Enterobacter aerogenes
atgaaaacaaacattaaagcgctgttttttgcttcgcacctggctttatttggcgtgggtttcggtgtcggtatctatgtactgcctatcctcaccgctgagaaaaactccagtgctgatgaaattaaggaagttaaaaataatgcccgctacacgggggcattttttaaaaaccaaaaagggagtaatgctgttcactgggttgatggaaagctgtatgtctccgatcaagaaatcgcatttgaaggtagcattgctccaggtccggattacaagatctatctgaccaaaacccaggctgatgatcgtaattcatttttaaaaataaaagaagaatcattatatataggtgatttgaaaaactacggcaacttcaaaaagaacctgccaaatggtgtcaatattgatgaatacaccactgtgcaaatctggtgcgaaaaattcgagcaatttattggttcagcccaatacaggtag

SEQ ID NO: 95284 - DNA, 267 bp, Enterobacter aerogenes
atgagaaagttcattattgctgcaatattgagtctgagcatcctgcccgtgctgacacaggcatcaaccgaaatcaacaattctcaccagtgcgaattgcttcgccttgggagcatcagtgtttcaggtggcacgattgatgagttgactagcaagcttgcagcaaaagcagaaaaatcaggcgccgattatttccgcatcacttatttaaataccaatgcccatggatatgccactgcaacgctatacgacaatgcaggcgcttag

SEQ ID NO: 95285 - DNA, 621 bp, Enterobacter aerogenes
atgattgaaaagaaaaaaactggcaggccaaaactcatctcatcagataagctggcggaggcgttatttcaggtttttgcgcaaaagggatatgcctcaacctcgatagcagacctgacccatgtaaccggaatgaaacctccatcgctgtatctggccttcggtaacaaagaggggatgtatgcggcggcgcttatgtattaccgccagcactggttgggggggctggaacagtgtctgcaggatcaaacacaaactttcgaacaacggatgcgtcattttcttcatgacgcctttacgttgttcagttgtgacggtaaaccgttggggtgcgccatgaccttttccgcactggctttccagattgatgaaggaggccttgccgcacaattacgcgatgaaaggcaggcatttacccagtggctggaaaacgaagcgcgagaggcgcagcaatgtggagagctgcctgcttaccttgctcctgaagcgtttgcctgttttattatcacactggaaaaagggttggcgttgacggcgctggagcgtccgaaatctgaggtggtgaaagagatgattgaaagggtcttgacagccctgtttcgccagcataagaagcaataa

SEQ ID NO: 95286 - DNA, 870 bp, Enterobacter aerogenes
atggccaattgcgcgctcattcttaaaatatccctggcaatgctggcgtttgctgcaaactctattctgtgccgtctggccctgcagggaggccacattgatcccctttcattcagcagcctcaggctggccagtggtgcactcgtcctgtcacctttcttgttttatcacgcaaaaactacattatcgctgtggcgtccgctgagcggattttacctcatggtgtacgcagtgctcttctctgtcgcctatatccatctcgataccggggcaggtgcgctgttactttttggtgccgtacagtttgcgatggtgatccacggattatttaaaggggaatcactctccgttatgcgggcttgcggtttagttattgctctggcaggaattgctgccctgctgttacccggggcgaaggcaccgccgctttacagtgcacttatgatgatcgttgccggattagcctgggccgcctattccgtcagggggagggcgggccaggcggccggggcttcaacggcggcaaattttgtactcgccacgccgatggctctcgctctttcgttgctgtttatgaagcagggtcactatgatgctgcgggcattgctttgtcattgctgtccggtgccgccgcctcagccggtgcatatgtattgtggtatacccttttaccctctctcggctctatcaccgccagtacccttcagctcagcgttccctgtctggcaatgctagggggtgtggtattcctggatgaatcactgacggtcagaacgatattttctgccctggcggtgctgactggcattgtgatggtgacacgcgagaaatccccccgtcagtcgatgacaaaggcgagagaaccttaa

SEQ ID NO: 95287 - DNA, 753 bp, Enterobacter aerogenes
atgaaaaaactaaaatttacgttcaaaaatgcggctggtgaagaactggccggattgcttgaacttcctgaaaatcctaaagcgtttgcgctgttagctcattgttttacgtgtggcaaagacctcaaaggcgcggcgcgtattgcgcggaaactgacagagaatgctatcgccgttctccggtttgattttactggtctgggaaacagcgaaggggatttttccaacaccaacttctcatccaatatttcggacctgctttgcgcggtagattatctccgccgacagtacgaagcgccttctttgctcatcggccatagcctggggggatcggccattctgtctattgccggcgaagttcctgaggcaaaggccgttgtcaccataggatcacccggagaactgacacacgtaaaacgtctttttaaggatgatgttgaaaacattaaccagcatggagcctatcccgttgagctggccgggcgggtatttaccttaaagaaacagatgctggacaatattcaggaacacaaaatcgctcataaggtgttcgccatgaacaagcctctgcttatttttcatgcgactgaagatgatactgtgttaattgagcaggccgaaaaaatattcaaagcagcaaagcatcccaagagtttcatttcgttgggtaaggcggatcaccttctgactcatgctcaggatgctgaatacgttgccgatatcattatatcgtggagcgaatgttacctataa

SEQ ID NO: 95288 - DNA, 1104 bp, Enterobacter aerogenes
gtgcccaccgttgaacgtcacatccggggcaaatgggcctgcgacagctgcgagacgttgatccaggcaccggtgccaccgcaggtgatcgacaaaggcatccccaccgctggcctgctggcccaggtgctggtggccaagtatgccgaccatctgccgctgtaccgtcaggaacgcatgttcggccgtgccggcctggaaatcccgcgctccaccctggccgaatgggtgggtgcctgtggtgtgcagttgcagccgctggtggatgcgttgagaaatactctgctggaacacagtgttctgcatgccgatgaaaccccggtcagcatgctggccccgggcaagaagaaaacccacaaggcctacgtctgggcctactgcaccacaccgtttgccgacctgaaggcagctatttacgacttcgcacccagccgtgcaggcgaacacgcccgaaccttcctgggtgactggcggggcaagctggtctgtgatgattacgctggctacaaggccgggttcggcaacggcattaccgaaatcggctgtatggcccacgcccggcgcaagttctatgacctgcacgaggccaacaagagcgaattggcggccaaggccttggaatacatcggtggactctacgagatcgagcgggaaaccaaagatctgccaccggatatgcggcgggaaatccggcaaaccaaagccaaaccccttgccgatgcgctgcatcagtggatgctggcccatcgccagaaagtgccggatggctccggcacggccaaagccctggattacagcctcaaacgttgggaagcgctgacgcgctacctggacgatggcgctgtgcccatcgacaacaactgggtggaaaaccagatccgaccctgggcgctggggcgcagcaattggctgtttgcgggttcactgcgcagtggtcaacgtgcggctgcggtcatgaccctaatacagtcagcgaagctgaatcggcatgatccctatgcctacctgaaggatgtgctgactcgcctgccgacacagaagaacaacgccatcgacgagctattgccccacaactggaaaccggccatacctaacaaggtgtag

SEQ ID NO: 95289 - DNA, 564 bp, Enterobacter aerogenes
atgaatacacgattatttacgttcgctggtggagaaacgggtgtttggcgcgttgttcggatggatgccgtggcgggagcccctctccctggaatcccccggctcgacgtagccgctggctctgtttcgccgcagcctttgggcaccaaatggcttcttcgcgggataacgagtaacgagcgttatgtcgtgcgtgaagagaaggatcgtctcgtggcgaagcagccaagtttgggtcgagcagaggccacctgtgccgccctgatccctatccggaaaaacccctcatggtggggactggctcaagacgaacgccggaagatttttgaggagcagtcccgtcacattcacattgggctccaatatctccctgctgtggcccgtcgtctccaccattgtcgggacctgggcgagagcgaacccttcgacttcttgacgtggttcgaatattccccgtctgatgagccgggctttaacaggcttttggccgaactccgggcctcggtggagtggaagtatgtcgacagagaaatcgacatccggctagtgcatgagccggcctag

SEQ ID NO: 95290 - DNA, 564 bp, Enterobacter aerogenes
gtggcccaccaaatcttccggtcatcctgttcaattacaccgctagccgtacccaggaggtgccgcagcgcctcctggaggcagaaaggcgtcgagcgtataggttgctgggcatgcgcggcgcaagttcatcagaaaactcaatccaagggcaagatcggccgagcggagatggcactgactcttatcaacaagctctacggcatcgagcgcgacatggaagaggcgggcgatgcccagcgataccagacgcgccagtcgcaaagccaggctttcctggagcaactgaaagctaggctggacaaaacccctccccaggtcacgtcgtcaaagtgccttgggcaagcaatcaattgccttgcgagcaactggttaaagctgatccgctacatcgaaagggggacacctgcccatcgacaacaaccctgccgagcgggcgagccaccttctcatgtacatatgaccaaagcgtcgcccgtctcctcccgttatgtcatgcctacccacgaaggagtattgacggtctctgtgcgccagagcatagttttcccgaagggcgcttag

SEQ ID NO: 95291 - DNA, 267 bp, Enterobacter aerogenes
atgaaaaacatcatcaaaaccacccttgccatcatcgccctgtccgccagcgcactgagctatgccgccagcccgcaaatggtttcccgcagcgaagcagcatcgctgcaaaaaattggggtggtctcttccggtggcttcaccaccctggatgacctggtggcctcactggatatgaaagccgctgatgccggggccacacactaccgcatcaccagtgccaccggtatgaataaactttccggtaccgctgtcctgtatcgttga

SEQ ID NO: 95292 - DNA, 558 bp, Enterobacter aerogenes
atgtccacccatgacagtctgattgaactgactgatacccttatccagcagaacggctaccagggcttcagctatgctgatctcgctgacggtctgggaatacggaaggccagtatccattaccattttcagaccaaaaccgacctcgggcttgcctattgtgaatacaaggaggccagcctgctgaaactggaagctgccctgttacagctgccaccgggtaaagcccgtctgcagggttatatggacgcatttctcaaatgcgccgacagcggccagatgtgtggcattcacgccatgctgtccgacagcgccctgtttgaagaacctcttcagaaagccacctcacgactggcacaaaccgacctgcgcatcctgaccagtgtgctggtttcgggtcgtgaaagcggtgaactggcttttactgctgagccggctgacgtggccattatcatcggcagcgccattaaaggggccctgatgctcaatcggatccctcctcatgatgcctgttcccgcaccatgagcgcgcttattcagctactctcccgcccgtaa

SEQ ID NO: 95293 - DNA, 261 bp, Enterobacter aerogenes
atgaaagcacttatcaacgacgttatcgctgtcttcacccgtaaagcccatggaccggtcatcatcaaatccgatcttactgaggaagaaaaagcagctctggtaccggtccgtacactctctgttggctgggtgtcttccgtggatgagctggagcgggaggttatccgcgaagcccttgaacatggcgctgccgcttatctgatttctgagcttgagcaggcccgtttcgttcatgcccgcgccacgctgtttgcataa

SEQ ID NO: 95294 - DNA, 507 bp, Enterobacter aerogenes
atgaaaaataacgtcgagacacaactgcgccggttacttcgtaaaacgtcaggcctggacattatggttctgcggctgtcagtgattttcatcttcgccctgtttggcacctacaaatggtttgccttcgaggccaatgcccttcaccacctgctgccaggcacctggctcggtgcgctgtatccggctctcggcgttcaggggctcagctacgcactcggcgtggtggaaaatatcacccttctggccctgattgccggatttttccggccggcagtgggtgcagcaggcgccctgatggtggcaggcaccggcatcgtcaccctgagccttctgccgcagctgggtcgcattgacagcttcattatcaaggatgttcttctgattggggctggactggtgctgttgcgtcatgacctgcgacggacactgattaaccggagggcgaagcaactcagcgccgtgcacaaaccccgctcgtctgacgcattgtcagccatggggtga

SEQ ID NO: 95295 - DNA, 138 bp, Enterobacter aerogenes
atggaagccgcctttcgggcggggatcactccccgctactttttagagcgctacctggaaaataagtcgctccccgccaacccggactttgaaaaacactatctggatcttattcatgagcaggacccgtcccggtga

SEQ ID NO: 95296 - DNA, 462 bp, Enterobacter aerogenes
atgaacaaaccgtataaaaaagacccacagaccattcaggcactgacggaactgcagttcagcgtcacccagaaaagcgccactgagcgcccgtttaccggagaatatgacgaccactttgaggacggactgtacgtggatatcgtctccggtgagccactgttctcgtcgaaggacaaatttgattcgggctgtggctggccggcattcagcaaaccagtggaaaacaacgtccgcaacctgagcgacctcagtcacggcatggtgcgtactgaagtgcgttcccatcacggtgacagccatctgggacacgtcttccctgacgggccacaggataccggtggattacgttactgcattaactcggcttcactgcgttttatcccgaaaggcgctctggaaacagaaggatacggtgaatttcttcccctgtttgagaaaggagataagcatgaaaactga

SEQ ID NO: 95297 - DNA, 495 bp, Enterobacter aerogenes
atgaaaactgatgtggcaatccttgccggtggttgtttctggggtgtccaggagctgatccgcaaactcaatggcgtggtcagcaccgaagtgggctataccggcggacgtaatgataacccgacataccagcaccacccaggacatgcggaggcggtgaaggtggtgtattccccggataaactgagctaccgaaaactactggaatatttctttagtattcacaaccctacaacaatacttcgtcagggtaatgacgtcggctcaagctaccgctcagccatctttttcaccacagaggagcaaaagcagcaggcaaaccagcttatccgtgaaatagatgattcaggagtctggcccggagtcgtggtgacagaagtagagcaggccggtgagttctggtctgcagagccagagcatcaggattacctgcagcataatcccaacggctatacctgccattttgaacgacctgactggacgcttccgggataa

SEQ ID NO: 95298 - DNA, 222 bp, Enterobacter aerogenes
atgtttagaattatgctgaccgttatcgcaggatcgttattttacggactctcggccagtctgtgttttgccgggctttttcgcatacacgcccccagtgcctgcacagccttctgtctgacttataacccaacagccggctatgtcatgctggttaccggtatgacactgtttatcgtatttttgctcagccttttccggacaacaaaagcccctatttaa

SEQ ID NO: 95299 - DNA, 1431 bp, Enterobacter aerogenes
atgactcttcttgcatctcggctggaagaagttaacgcgatggcgcttgccggtgatttgcccgatgtagatatctcagataaaggcgtaaaaatcactccactggagaacagcgttccttcaggtgtttcgccctttgcagatttggtctatggcatgcttccccatccgaaaattacggagatactggaagaagttgatagctggacgggatttacgcgtcacttcgcgcacctcaaaaataataacgtcagaccaaaagacggaagactgttgctgaccaccattctggctgacggcatcaaccttgggctgacaaaaatggcggaatcctgccctggggccacaagatcgtcactcgaaggtattcaggcatggtacatcagggatgaaacttattcagcggcactggccgagctggtcaacgcacagaaagagcggcctctggccgcattctggggcgacgggacaacatcgtcgtcagacgggcagaactttcgggtaggcagtcacggacgttatgccggtcaggtcaatcttaaatatggtcaggagccgggcgtgcagatttatacgcatatctcagaccaatacagcccgttctacgccaaagtgatcagccgggtgcgcgactcaacccacgtgcttgatggcctgctgtaccatgaaagcgatctggaaattaccgagcattacaccgataccgcaggcttcactgaacatgttttcgccctgatgcacctgctgggattcgcttttgcgccaaggatccgtgatcttcatgacaagcggctgtttattcatggaaaggccgagcgctatccggggcttcagtctgtcatatcaacaacctgcctaaatatcaaagacattgagtcgcactgggatgaggtattgcgcctggcaacctcgattaagcaggggacagtcaccgcatcactgatgatgaaaaagttagccagttacccaaaacagaatggacttgccaaagcgctgagagagattggccgcatcgaacggacactatttatgctggactggttccgtgatcccggtctgcgccgacgcgtgcaggcggggctgaataagggtgaggcccgtaatgcccttgcgcgagcggtctttttgcaccgtctgggtgaaataagggatcgtgggctggagaatcagagttatcgcgccagcgggctgacattactgacagcagcgatcacgttgtggaacacggtatatatagaaagagctattgagtcactaaaacgaaagggtatcccgataaatgagcaactggtctctcatctttctcccctgggctgggaacatatcaatctgagtggagattacgtctggcgtaataatcttaagctgggatccggaaaataccgctcattacgtacagtcgataccgctttgtacaaaaaacagtcttag

SEQ ID NO: 95300 - DNA, 705 bp, Enterobacter aerogenes; identical to SEQ ID NO: 8686

SEQ ID NO: 95301 - DNA, 1314 bp, Enterobacter aerogenes
atgtctgaaaaacggcaattacgtctggggacgattttacatggcgcctcaggaaatatgtccgcctggcgtcatccggcggcgctggcggatgccagtattaattttgaatttgtgaaagaaacggcgcaaaaagccgagcaggggaaactcgattttatttttgtcgccgacgggttatatattaacgaaaaatccatcccgcactttttaaatcgttttgagccgttaacggtattatcaacgctggcggcggtgaccgatcgtctggggctggtcggcacgctctccacctcctatagcgaaccgttcacgaccgcgcgacagttcgccagccttgaccatttaagccacgggcgcgctggctggaacgtggtgacgtcgccgctggaaggctcggcgaaaaacttctctcgcgcccagcatcccgatcatgcgctgcgctatcgcatcgccgacgaatatcttcaggtggttaaaggattatgggattcctgggaagacggcgcttttgtgcgtaataaagagagcggtcagttttttgataaaaataaactgcatacgcttaatcatcatggcgatttctttaaagtcgctggtcctttgaatattgcccgcacgccgcagggacggcccattattttccaggccggcgcctccgatgacggcaaaaaattagccgctcgccacgccgatgccatttttacccaccaggaatcgttagccgaggcgcaggcgttttatcaggatgtcaaaagccaactggctgcctatcagcgcagtgcggatcaactgcatattttccagggcgtcagcgtaatcgtcggtgacgacgcggaggatgcggagcgtcaataccagaccacggcggcgctggtctcgatcgacgacgcgttgaattacctgggtcgttacttcgagcatcatgattttgcgcaatatccactggatgaacccttcccggatattggcgaccttgggcaaaacagcttccgcagcaccaccgatgagattaaacgcaatgcccgtgaacggggattaaccctgcgccaggtggcgctggaggccgccagcccacgcccgcgcttctccggcacggccagcgacgtcgccgacggcttacagctgtggttcgagcaacgcgccgccgatggcttcattattcagggcggcacgccggaaaccttcccgcgtttcgttgatgaagtggtgccattgctgcaggcgcgcggattgctccgccgcgactatccaggcaccacgctgcgggaaagcctggggctggatctgcccattaaccaattcgaaaaataa

SEQ ID NO: 95302 - DNA, 567 bp, Enterobacter aerogenes
ttgaccgaaaaccagggcgaggagagcctgcgcgcgacccccattccaccgcgccgtgcggacggtttcctgctcggcgccagcgtcgacagcgcccgtctggcggccagtctggactggaactttgtttttgccgcgcatctcaatggcgataaaaacttgttgcaggaggtgctgacgaactggcgcgaattgagccgccgcgaggtgatcgtggccgtacaggttatcgttgcgcaagacgccgccagcgcggccgatctggcgaagcaggtagaggtctggggcgtcgagctggcaaacggtcagcgggtgacggtgggtagtgaatctcaggcggcagcttttgcccgtcaggcaggtagcccgccgacgcgcattgagcgccgcgagtcctcgctgttgttcggtaccgcagaagaggttaaagcacaactcgatgcccttcaggcgcagtggggcattgatgagtttattattgatacccctattgccgaagggcgtgcgcggctggcgtcgttgggattgctggcgcaggcgcatcttggcgcggaggtaacgccatga

SEQ ID NO: 95303 - DNA, 1563 bp, Enterobacter aerogenes
gtgttttcgtaccgtttgacgggggttgctcgctctaataatgaacagcaacagaatgcggagcagcagcgctatgcgatagcgccttctttttcatggcgtcctgacgataagacgaactttactttcttatcctatttccaaaatgagccggaaacgggttattacggttggttgccgaaagaaggtactgttcagccactccctaatggcggccatctaccaaccagctttaacgaaggcgcgactaataatacctattcacgtaatcaaaagatggtgggttatagtttcgagcatggttttaacgataccttcacagtacgccagaatttacgtttctctgaaatgaaggttgcgcagaaaagcgcctatggtaccgggctgtgcaacaacagtatgaatgccttcaactcctattgccaatcactgactccagagcagcaggctcattatttaggacgaggtacagtcgttgataacgagcgtttacagaattttagtgttgatacccagctgcaaagcaatttttcaacagggaacgtcgatcatattttgctgactggtgtcgactatatgcgtatgcgtaacgatattagtgccctgtttggtaatgcaccgtcacttgatcttaataatttaccgtctatgagcagcgttgattttggtgatgctgttccttatcaaatgaatgaaagtaagcagacagggatttatcttcaggaccaagccgagtggaataaatgggttttgacgttgggcgggcgctacgattggtctaaacaagcgaccaccgtacgtagtgacaatggttatattgagcgtaatgaccaccaatttacctggcgtgggggaatcaactatctgtttgataacggaatatcgccgtacgttagttacagccagtccttcgaaccgaatgcttttagcttgtatagtactccacgtgttgcctatgagccttctaaaggtgagcagtacgaagcgggggtgaaatatgtgccgaaagatatgcccgttgttgttactggtgccgtttaccagctaactaagtcagatacattgatggcggatcctaacaatgcacttaatcaggttccggcaggtgaaattcgttctcggggtgttgagctagaggcgaaagcggctttgaatgccaatatcaatatgaccgcttcatatacctacacggatgctatctataccaaagatactaatctgaaaggaaatacggttgttcaagtacctaaacacatggcttcgttgtggggggattacaccttctacgatgggcccttgtctggcttaacccttggtactggtggtcgttttatcggctccagttatggagatccagcaaatacctttaaggtaggaagtgctgcggtgatggatgctgttgtcaaatatgatctggcgcgctttggtatggctggttcaaatatcgcggtgaacgttaataatttgctcgatcgtgaatatgttgccagctgctttgaaacatatggttgtttctggggcgcagaacgtcaggttgttgctaccgcaaccttccgcttctaa

SEQ ID NO: 95304 - DNA, 486 bp, Enterobacter aerogenes; identical to SEQ ID NO: 86909

SEQ ID NO: 95305 - DNA, 1221 bp, Enterobacter aerogenes; identical to SEQ ID NO: 92113

SEQ ID NO: 95306 - DNA, 1401 bp, Enterobacter aerogenes
atgatttttaccaaaatcattaggggattcatcagcactaaaccttgttcagttccactcacctcctatgaagcaaaacgagttgctattactggagtaggcgctgtatcggctataggtcacactctaaatgagattcttcactatatccatgaaggcgacagctcagtagaactcagcggtgttgtctttcctgatgacacgcttaacgaggcgaaagagctgttgggtgtattggccaaaaccaatcagtttgcggatatatttggtggtgaatatcaggaagaggagtacaagcagccggagacagaagagaattttaaaacttatcaggtgaaaggcctggaaccacgcaaacatctacgtcgatacgacccgcgtaaggcaactcgcggcggtacgtttgctctacttgcactttcagaaactttgcatatggctaaacgcaagatcaaacgagatggagatgatttgggtatggttctgggaatggcgcgagggccgcaagaaacaacctataagtatttgcaaagtttgaaacctgacccgcggaaagttcggacttcggaatttcccggctctctaatgaactcaattacaacattttgcgggatctcagaaggggtcaaaggatatacaacaacgttggctaccggtgaaaatgctgcgcttggcgcattgacctatggctatgaaattgttcgccaacaactccaaccgcaggttgtaattggcggggctgatgaatactttccttctatgtcgctttatatggatgcggtgacaaataaaattcatatgatgtccgatccggctgattatcagatatatggcaaagaagcacagggctacgtaccaggtgaaggcgcatgcatgatgctcctggaagatccacagtcagcagtggcccgcggcgctgaggtattagctgaaatcgctggttatggtaaggcatgtagcaatacctattttgacgtgacacaggttgaggagaagtccgcagcaatgtctatggcaattactcgcgcgcttgcggatgcgggtattacctcgaaagaaattgatttagtttgcgggaccagtaatggtagcgaagtaaattcaatgatagaaacgaatgcgatatatacgtcatttaattgccttaatcctcatgtaccggttgtgaattacaatgcattctttggttttgtcgcctcttctgcaggtctgctaaacctggcggttcttcttgattgtattcgcagacaatcggttcctgctattccttatactcgacaattttctgatgagagagtcaactttgtgaaccaatcacttaatctaactattagatacgctcttttaattggagcgactgaaggcggaaactattacgctattgtgataaaaggattataa

SEQ ID NO: 95307 - DNA, 387 bp, Enterobacter aerogenes
atgagaaaacgggaacgtagtaatattgtcagaatagaaaaagcagcacgagcaacaaaacgtaaattcaccaccacgttaaaagattatgcacgggaatcaatcccaggcgagctaataactaccgttcgagaatatcccgcagcagtgccaaccggatcagagtttgaactattgcaggacgttctatcgtcaacggataacgtttattataaaccacgccgccgccgtgaataccaagttgattcttcaaatctccagcattggcaggtgttgggcttccagcattacgccgattatgttggatattcacaaactaatggcctgagcggtcacaccgccgattttgattttattttccatgacgaaaaggaaattcacgactga

SEQ ID NO: 95308 - DNA, 663 bp, Enterobacter aerogenes
atgtcagaagcgcctataacagagtcagaacctctcacttttactcttcctgatggctctctgaagcacgtcagaaaaggggcaactttgcagaacgttgcagaaagcatcggttcttccgtcgcgaaaagcgctgtgtacgcggaaattgatggtaaatgtgtggatctgcttgagaaagcaaagaacagtggaaagctcaatatcattacagtttttgatgaagaagcgttgggcccgattcgccgaggttgtcttctccttctcgcagcgtctgtaaaacagctgtttccctcggccaggatggttgaagggcaactgactaaggaagggttttattacgatttcgcggtagataaaccttttactcgcgatgacctggggatgattgagcagcacatgacaagtctgatcgctgaaaacccgccgattattaaagagcaggtcacgcgggcacaggctattgactgttttgagcagcggggcgagaaattcaaatcaacggagttgatggaaatactggcagataagtcggtgacactatgccatctcaggcagttcacggacggctttaatggcccattggttccggatcttcgttttctaaaaaatatgaagttgcttaacgctgagagatcccctcataatttccccaaagcgtaa

SEQ ID NO: 95309 - DNA, 198 bp, Enterobacter aerogenes
atgcggcctatcattattaggccaatcaatacccgccagggcgagagtcagcagagcgaccgccgcaacgtgaaccatctgctgcggtatcattgtcatgctggcagtttccagcaaaagcctgtgtggcagtcccaagagacagtaaaacgaaaagtactgcaaatgcttttttcattattcaatatccatgtgtag

SEQ ID NO: 95310 - DNA, 276 bp, Enterobacter aerogenes
atggtatcaactgcatctccagcgccattcttcatggctatcgagcaggaaattcaggccaaagaatcatcagctattgagtaccttgagtctttaattgcccatgatacttatgcgaggatggttattgcggcgctcagtaatggtgcgattactgaacaacaggccatcgttcagtacatgagcattcagaaacaaagagcagatcattacgaaagtgagataattaaagctatccaaagaacggcatctgtgccgccagtttttaagttgtga

SEQ ID NO: 95311 - DNA, 381 bp, Enterobacter aerogenes
atggcaaaaatcaaatggcctaaggtaccaagattctttgtaccgctgttccattgcgccaatgtctatctctgccgaagcaaagaggaatgggtacaggccgaaagtgcacttggtgttccgctggctgacatttccatgctcaatggtatatgccagcatttcgtcaatgaagccgcaggcgagaatctttacctgattggcgtcttcgataaccgcatttcgacgctggtccatgagtgtgcacatgcaacgttctactgctgccacgatgttggtgtgaccgtcgatactggcgaagcaaacgaaacctattgctatctcctggaccgaatggttagcgaattcctgcctcatatcggggacgcggcccctgaatag

SEQ ID NO: 95312 - DNA, 168 bp, Enterobacter aerogenes
atgaaaaaatcaaaagccatagagctggcgggcagcaaagctaaacttgcccgactgctgaaagtgtcgaaaggtgccgtatcacagtggggtgatgagatccccgaactgcgcgccttacagcttgaaaaattgcttaaaaaatctgtctcaaaacaaaaggcgtaa

SEQ ID NO: 95313 - DNA, 693 bp, Enterobacter aerogenes
atgattaacgaacgtattcgcaaagcccgccgtgaaataaaaatgacgcaggaagctcttgctaagcgtataggtctgactaaagccacgatttcgatgtgggagtctggtaacaccgcgccaaacggtaagaacttgattaacctagcggaagctttaaacgtctcacctgaatggcttctgacaggaaaagaaactgataaaaagcctgtggagtctaacgctagagtggaaggcggtttttctgggtgggattctaatacaccactcgaggctgatgaggtggaaatacctttcttcaaggaagttgagttgtcggcgggcaacggtacctatgtcgatttagatcggtccggttgtaaattacgttttgcaaagtctacattgcgcaaagctggtgtagatatcgagtccgctgcatgtgttagcgttagcggaaatagcatggagccggtgctcccggacggtgcggttgtgggggtggatatggcaaaatcgtcgatcaaagacggtaaagtctatgccattgaccaggacggactactaagagtgaaactactctacagattgcctgacggtatccgcatccgttcgtataaccgtgacgaatacgctgatgaagagtatttcaaccatgatgccaataagattaaaattattgggcaagtattctggtattcagttcttctctaa

SEQ ID NO: 95314 - DNA, 570 bp, Enterobacter aerogenes
atgtctgaagaaaaaggaattctttcccggataactgaatctttatccggcgtgggaggcgcaattaaaggcgcggttggagcagcaagagaaattcagaatctgactgtcgactatgcagttaaagagaagacgcacaccctactcgataagctaatggatgttcagatgcagcaaatgtcgcttcaggagttgctgattgcggctaaggagaaaattgttgaactggaaaatgagaaagtaaagcaagagaactgggccgctgaagcggcgagctatgaactttaccagcctatgcgaggtactctggtctatcgcagcaagctttctgcagatgttgaccaaactccggtttatatttgtcccaattgctacgagcaaaagagaaaatctatattgcaagcggaaggtctggttactaagccaggtcttgggcgagccgttaatatggtttgttcgcactgtagggcttcctatttgttcaaccgaaatgctttagaggcccgactgccttctgaagatgaaaatccagggaaggcaatcacggattacgatccttacaaccagtaa

SEQ ID NO: 95315 - DNA, 933 bp, Enterobacter aerogenes
atgagccttgaacaaaatctcgaactgaacaaccagctgctgaccaagcaaaactcgctgtacgaacgcaatatcgcactgctcgaacgtctggtgcagtcgctggcgtcaggcgttgcgcttaaagccgacaccgtggcgcaggtgcaggagtaccgcgaaacagttaccgaatcgaaaaccgcactcacgctcgacgatctgcagttcggcgacgttatcgcgctggcagcgttctacccggtaccgcagcaaatcaccgaagaaatgctgcagcgcgccattgattaccgcgacgccgaagccgacgccagagtagtgcaaattgatgctctggacagcgccctgcagggcgtgaagcgcgctaaagcgttactgaaacctgccctgctcgacctgtcccgcaacgttcttaagtattgggacgacctgccaaccatcggcgagcgccgcagctttgccgagcgccttctcgacgccgcaccaaccgagcgcgacgcagtgaagccgaagaaaggcagcgatagtgataaggctgaagaacgcaccggaccgttctattgcaagaacgtcgatggctccgccgccagcgagctccataccttacgcaagctgaacgaactgcttaaaaagggccatatcgagatcaaccgcgttgaatacctccaactgcaggaagatttcgcacgtaaaaacgcagcaaaagtcggcaccgaaactggtgatgatgccggggctaatgctggcgaagagactgattttgcggcgctgcgtaaacaggccgaagagtgcattaaaacgctgtgcaaaggcggttatcgcgctgaggccgtcggcatactggacagcttcggcgcgaaaaagctgggcgaagtggaagacaaagacctcgctgatctgatcgccaaagccgaaaaagctctggagggctga

SEQ ID NO: 95316 - DNA, 1299 bp, Enterobacter aerogenes
atgccagacgctcacgcaagattagcaccatcatcagcgcatcggtggatgcgctgcctcggtagcctggcgcttgagtcaacgcagccggataaaagttccgccttcgccgaggaaggcaccgcagcgcatgcgttggcggaaaaagtattacgcaaccgccaaacccacccggatcactacgctggctgcaatgttgaaatgttccttggttcgtatccactcagtgaagaaccagacgacgaaaaagggccgcaggtcgacgacgagatggtcgaatccgttggccgctatgtcgatacagtctggacgctggcaaacggtaacgaacttatggtcgagcagcgcgtcgacttctcgcatattgtcggcgtggaaaactcattcggtaccgccgacgccgttatcattgtcggcaacgagctgcagatccacgatcttaaatatggccgcggcgtgcaggttgacgccaagcagaacgagcagctgcagctgtatgcccttggcgcgctggagcagttcaacctgctgtacgactttgacagcgtacgcctgttcatccatcagccgcggctgaaccatgtatcagaatgggctttatctgtggaagagctggaggcattcggccagcgggcgcaggaagcagcggcaaacgtgatcgtgatgttcaacatcgcggaatgcgaaggcgtgaataccctgccgctggagaacttcacgcccggcgagaagcaatgccggttctgtaaagccagcgccatttgtaccgcgcgcgagcagttccatatgcaaaccgtcgccggtgacttcgacgacctgacagcaccaatcggcgagctggtcaccagtgctatagcgcgcgtgccgatgctcaccaacgaacaactggctgaaatctacgggcaagcggattttctcgaatcctggctaaaggccatccgcgaccgggtaaacagcgaacttaacgccgggcacccggtgccggggttcaagctggtaaccggtaagcagggcaaccgcgcatggcgcaatgaagtcgaagccgaagagctgctgaaatctttcaggctgaaacaggatcagatgtacagccagaaggtgataagcccgacgcaggccgaaaagctgctgaagaaagaaagcccacgccgctggacgaaagtcgaagcgctgataacccgctctgatggtaagcccaccatcgcgccagaatccgacccgcgccccgcgctcaacgttaaccctgtaaacgattttgacgacgtgtccgaagatgcgctcgccgacgacctcatttga

SEQ ID NO: 95317 - DNA, 600 bp, Enterobacter aerogenes
atggagataaaagatattctcacatttgctgggcttgttattacttcgataaccgcagcagtcggtgtttataaattatttaaagatgtgagttggtttctaccaaaagcgacacgatattcacatatttttgaaaaatactctgaatatattgatcctctcgaaattgaatttatgaaagcagaaataaaaagggatgttaaaaaaagtgtgttgggaatgaaaaacaaaaagctcaggcagttaattctgtatgtaagaactcattctgaattggatatgccatcatggcgatgggggcacttagcaccccacattcagcagaaatacggcaagttctttatacgttataaaggtaagtatagccgctatcgcttatatgctaaatttgctgccattttctatgttgtttttggtcttgtgtttccatctacgctattgaatgatggtacgggttatatgattgttggaattatcttgatgctgtcttgtttatatatggcggtaaccttttggtcgcttttgccaagtcgcaaattaattactaaatacaatactgaattgttgaaaattgatgcgagtaagtatcaggctagctga

SEQ ID NO: 95318 - DNA, 144 bp, Enterobacter aerogenes
atgtcagagactaagaaaacttataaggaagatgggtacaccccaattgaaaaaggttatcaacccaaaaatgacttggctaataatggatttcaacctgtcaagcagacttcccagccagccccgccaccaaaaaaaccttaa

SEQ ID NO: 95319 - DNA, 612 bp, Enterobacter aerogenes
atggatatctgggataagagtaagataataatttttctactatttgttatacctggcttcataagcatgaaggtgtatagtgttcttaggccgaatgctatttttgatacatctaaagcaattattgaaattgtgtcctatagttgtatgaactatgctatatggtttttccctatttactgtatagagtccagtgagttttatttaacacatccagttttatattttttaatttatttgtccattttgtttatcagcccaatattattaacaatatttttctcgtggatgcgtacatggaattggctgcgtacattcatgccgcaccctaccggaaaagcttgggattatttctttggcctgcgagttccttgttgggtgattgttacccttaaagacgggaagaaaattgctggtaagtatggtgctaattcctttgcttccagtgcacccgagcctgaacaaatttatcttgaggaacattgggtgttgagcaatgatggcgggttagagcgtcctcgtgtttctacgctaggaatcctaattttaagtaaggatattgaacatttagagtttttccgttttgaatcgcaaaccactaccaacccgtga

SEQ ID NO: 95320 - DNA, 2424 bp, Enterobacter aerogenes; identical to SEQ ID NO: 92008

SEQ ID NO: 95321 - DNA, 540 bp, Enterobacter aerogenes
gtgttgaatatcacttcgcttaaactatccgcactgattcttctgccgttcatgctggcgggttgtgggctaacacagaaaatcagcgacggcgcttcgtccgccgtaaagtcagtattttatcgccaggtgaaaacgctgcgtctggattttagcgcgcgcaatgcgttaaacaccgataaccgcgaggataacagcgcctcccagccggtgatggtgcgggtctatgtgctgaaggatcgcaagactttcgataagacggtttaccagcagctggcggcggagggggaggagatattaaaagacgaccaactggccagccgcagcctggtgctcaaaccgggaacggcgatgagtctcaccatgccgctggatgaacaggcgcagtatgttgccgtggtggcgctgtttcgggcgccggatctgacgaaaaacgactggaagctggtgcttgcccgtgaggatcttgacccggaccgcgcgcgcgtcattgaggccagccatcatcaacttgttctgcaaccgcggaaggagaagtga

SEQ ID NO: 95322 - DNA, 1485 bp, Enterobacter aerogenes
atgtacggagaggagaagtcggactcgctcatagtagcggcgaagcaggcgaacaacccgaaaggagcggagtcagtggagcgaaggagcggggccaaggggaacgcggaacagccacacatgcgccggacacagagccgggaaagcatgtcacagaggctgtcacgcgtgcgggaagctgcgaagcagcggaagaaagaacggtttacagcattgttccacctgctgacagtcgaagcactggaagccgcattcctctccctgagcaggaaagcggccgccggagtggatggcatcaggtggatggactacgccggaaacatgaagaacaacataacagatctgcaccggaggctacatcagggcagctacagggcgcagcccggcaggcgtcactacatcccaaaagcggatggaaaacaacgcccgctcggcatcgcctcgctggaggacaagatcgtccagtatgcgctggtgaaaatcctgaacgcagtctatgaaaacgactttatggggttctcatacgggttcagacccgggcgaagccagcacgatgcactggacgcactggccacagggctggtacgcactaacgtaaactgggtactggatgccgacatcagtcagttcttcgacagggtgagccacgaatggctgatcaggttcacagagcatcggatcggcgaccggagggtaatcaggctcatacgtaagtggctcacagccgggacgtcggaggagggtcaatggcgagcaacggaggaaggcaccccacagggtgcggtcatctcaccgctgctggcaaacatatacctccactacgtcttcgatctgtgggcgcatcagtggcgacgtcgctatgccacaggcaatgtggtaatggtcagatacgccgatgacatcgtcatcgggttcgacaaacgatacgatgcccggcgcttccgtatagccatgcagcgcagactgagggagttcggactcacggttcacccggagaaaacccgtctgatggagttcggccgcttcgctgccgaaaaccgtgccatcaggggaaaaggcaaaccagaaacgttcaacttcctcgggttcacgcacatcagcgggaaagatcgcaacggcaggttcatgctgatacgaaagacccgccgggatcggatgacggcaactctgaaagccatcaaagacggtctgcgaaggcgctggcattactcaatccccgaacagggaaaatggctcaggagagtggttcagggatacctgaactatcactcggtaccgggcaacttccccaccatgcagaagttcaggacacacgtaacaaacctctggcgccgggcgctcaggcgcaggagccagaaggatgatacgacctggacgaaagcaaacaaactggcagccgcatggctaccaagggttcgggttcttcatccatggcctgtggagcggttcaccgccagacacccgaggcaggagcccggtgcgtaa

SEQ ID NO: 95323 - DNA, 4104 bp, Enterobacter aerogenes
atgcactccggggctcacttcgacccgcagcttggcctggatatccatacttatccctggccgctgccgacgccgcatatcggcatcgttttcgacgtgtttgattatctgccgctgctgggcactaccgtacacgtcaacagcatcaaacgcgccagcgcggggaccggcggtattgcggtacatattccggtcggcggcgtgtgggtgccgccgctgcgcgcgcccggcggcccgcagatggaagacgagctgtttatgggcagcaaaaccgtcgccgtcgatggcgaaccgttttcccgcatcggcatgccggtactgagctgtaacatcctcggaatggtgccgccgttccgcctgaagcggctgagcaaaccaaagccgctctcgctgacgctgccgctgacgtttaacctcgcgattcccaacaacgtgattgtcggcgggccgccaaccatcaacctgatggcgctgctgatgcgcgccgggttaagcgggttgggcaaggggttgaagaaagttaaaaaaacgccgcagtggcggctgtttatgcggcggtttaaaaagctgcgccagaagctgtttcgcaacatggatcccggcgtcctgaaatgccgggtgctacgcgccgaaccggttgatatccgcgacggtagcgtgagcctggagcatgaggattttctgttacccggccgcctgccgctggcgtggacgcgaagctactcgtcggcggatctcgatgaagaagggctgtgcggttacggctggtcaaccccggcggacacccgccttgaaatactggccgatgaaggcgtcgcggtgctgactcagccggaagggatgacgctgtttgcggcgctgccgcagtccgacgggcgcgagcagggtattgtcggcctgccggacggcagccgcctgtggcgggaaacccgcaatggcgaatgtttctggcatgttgagcaggaagggagcgcgcggctgcaatttcgcggtaagtgcgggcggctggcgatttaccggctggcggaccgtaacggtaacggctggcagttcgactggcaggggcgcgaccttgagcgtattcgcgagttcagcacgtgcggcatgagcggcagggagatcctcgtcacctggcagaatagccgcctgcgggcgctacgcctgcgcaacgcgctggatgacgagatcacgccgctgacccgctatgaatacgatagcgataatcaattgagcgcggagatcgatgcgctttcgcatccgcggcgcttctactatcaacagcgccatatgaccagccatgtcgaccgtaacggccagggctttcattaccagttcaatgacgagtggcgggtggttcacgcctggggcgacggcggcgtatgggattaccatttcgcctggcacgacttgctcaacgaagtggaaatcaccgattccaacggccatgtaacgtctgtcagctttgatgataacggcctgccggtttcggagatcgatccgaccggcggcaataccgtcttccactacgatgattttggccgcaccgtcgaactcattgagccggacggcagcacgcgtcgttgggagtatgatgaacaggggcgaatgatcgccgaacatctgccggacggtagccagattcaggcggcctacaatgaagacggcgatctgctgacgctgattgatgagaaaggcgcctgctggcgttcggactacgacgaacgcggcaacctgctggcgggaacggaccctaccggcgtcacctcgcgctatcagtatgatgagtacgggcagctgagcgcggcggacgtgccgggttccgggcagagtcgctatcgctatgatcggtttggttttttgcaggcgctgagccaggccggcgcgggaaccactcaactgcggcattccgcgcgcggcaccctgctggagcgtattgacgccggcggcggcagcagccgtttccactgggacagcaaggatcggctggtggcgatggtcaatccgcagggcggcgaaattcgcgtcgcttacgaccgggaagattcaccgcttcacttcaccgatgaagccggccagataacccgttttcgttataaccgcaccggaatgctggccgcctgcgagacgccggatggcgcgacgcttggctatcagtacgacctggaagatcgcctgctggcggtgatcaaccagaacggtcagcgctggcagctggaccgcgacgcgctggggcgcatcgccgcggagaccgattactggggacaggtaacccgttatggctgggataaaggcaaccggctgatcagccgtgaggatccgctggggcggctggtgcgctacggttacgaccgcggcgggcggctaagcgagcggcgcagcggcgataccctgcaggcgaagtatcattacgatccctgcggacggatggtgctgtgtgagaatccgtggcggcggctggcgtggcgctatgatgacgccgggcgggtgctgctggaggagcaggacggttttcagctgcattatggctataacgagcgcggcctgctggtctcccggcgcagcgacagcggtcatcaggtgcgttacgccatggatgagtatgaccggctgagccagatccagctgaatgacgatgcgccaatcgtgctgggttacgatgaggccgggcggcgggtcagcgagcagctgtcggcggaggtgacgcgtcatttcacctacgaccggctcggccaactgacgtcgcagcaggtgttgcagaatgatttaccgctgttcgccagcggcttcagctgggataggctgggtaacctgacccggcgcgatgacagcctgtggggcagcgatcgttacgcttacgatccggtggggcgcttgacggcccataccgcgccggacggtacgctgcggcagtttgtgcaggatgcggcgggcagccacctgcagacgcagacccgggcggtgaatgagagcgccggaggctggttccgcgaggggcagcagcgcggggtgcgttatgtattcgatcgcgcaggcgagctgcgacagcggcgcgatgtccggcataacggcgagaaagaggatttcagctgggacgataaccgccaactggtggcggtgcgcaagggcgagcggctggtgcgttacggctatgacgggctggggcgccgggtgttcaagcagacggcggaagagacgcgctggttctactggcagggcgacgcgctggcgggggaaacggtcactatcacccgcgaaccgctggcggcacagagcatttttgataccggcagccggctgcagcggcagaaagcgcaggccgcgctgttcggcagtatgcgcgagtacgtgtactatccgggaagttttcagccgctggcgctgctgacgcaggaagcgggcaggaaggagagctggcactatcattgtgacccgaacggcgcgccggtccgcctgacgtcattacagggcgagatagtgtggtcagagaagacgggcgtatggggagagaaaggggaggtctacgccgatcgtatcagcaacccgctgcgttttcagggccagtattttgacgctgaaacggggctgcactataatcgacatcgttactatgatcctgaaattgcgggatttattagccaggatccgattggattagccggcgggctgaatgtttatcagtatgcgccgaacccgctgggatgggtggatccgtggggattagctaagtcatgtggtggaacaacaaaattttatcgttcaatgagtcatgaagatttcgagtatttacgcactacaggtaaattaagaggaacatctgaaacattcatttcaccaagaagagcattctctgagaattacgatggagttttagtgaggttttaccttaaaaacgatgcattatcagaactaaaatcaattggggttaaagattcagcagtacttaccagtattacttatccggacatgccagatgtagggaagggatggaaggagacaagtgcattctttaaagctgaaggggaacagattaatattggattaggtaaaggtaaggcattagatatattcaatcaagggattcagcgattcgagaggttaaattaa

SEQ ID NO: 95324 - DNA, 2481 bp, Enterobacter aerogenes; identical to SEQ ID NO: 92650

SEQ ID NO: 95325 - DNA, 483 bp, Enterobacter aerogenes
atgcaacgcacatctacttcaatagctctgacgatagcggcattagcggtgagttccgccgtgaatgcgaaaacactggtttattgctctgaaggctcgccggaaaactttaatccgcagctttatacttccgggaccagcgtcgatgccagcgcggtaccgatatataaccggctggtggactttaaagttggcaccacggaattgcagcccagcctggcggaaagctgggaggtgagcgaagatggtaaagtttatacttttcacttacgcaaaggcgttaaattccaaagtaataaatattttaaaccgacccgtgattttaatgctgatgacgttattttttcgtttatgcggcaaaaagatccgaataacccctatcataatgtctctaatggcaactactccaattttgaaagcctggagtttggttcgttaattaccgcaattgataaaccggatgaatatacggtgcgttggtga

SEQ ID NO: 95326 - DNA, 231 bp, Enterobacter aerogenes
atgatgcgtagcctcctcaatttgattgctacaatatttcttgttatagcggtgactaccattgggatttttattgttcgtagtctattcagtattattgaaatgagaggttttaatattccgctctttgatatattgaaggttagcgttaaggcaggtacagcaggaggattagtcggtgggataggaatatattttatccattattttcctaaaagaaatctggactga

SEQ ID NO: 95327 - DNA, 939 bp, Enterobacter aerogenes
atgaatactattccgctccctaaaactcagcacctggttgtattccaggaggtgatcagaagtggttcgattggttcggcagcgaaagagttaggattaactcaacctgcagtcagtaaaacgattaatgatattgaagactatttcggcactgagcttattgtccgtaaaaataccggtgttacgttgacggaggccggacaggtgctgttgagctggtcggagtcgattacccgcgaaatgaaaaatatggttaacgaaatgaacagcatgacctgcagtaccgtcgttgacgtctctttcggtttcccgtcgctgatcggcttcacttttatgtcggatatgatccataaattcaaaaagttatttcccaaagcacaggtctcgatgtacgaagcgcagctttcatcgttcctgccggcgattcgcgatggccgtctcgatttcgccattggcacgttgagtgatgagatgaagctgcacgatctgcatgtcgaaccgctatttgaatcggagttcgtgctggtggccagcaaatcgcgaacgcggagcggcagtgccacgctggcatcgttacagcacgaacagtgggtattgccgcaaactaatatgggttactacagtgaactcctcgccacgcttcaacgcagcggcatcaacaatgaaaacatcgttaaaacagactctgtcgttactatttataatcttgttctcaatgctgatttcctgacggttattccttgtgatatgaccgcaccttttggctctaatcaatttattaccattcctgtcgaggatgcgttaccggtggcgcattatgctgcggtgtggtcgaaaaattatcgcattaaaagcgcggcctcggcgttagttgaattagcgaaagaatattcagcccatagcggctgccgacgacgacaattaattaccgtggactaa

SEQ ID NO: 95328 - DNA, 1362 bp, Enterobacter aerogenes
atgagtacaacaacaaagttatcggcaagctatgtggtcatcggcgtaaaagaaaagataggctatggcttaggcgatttcgcctctaatttatcgttcggttttgtctcgttattcttactgtttttttatactaatgtttatggcatcagcgcggtacaggcgagtctgatctttgtgattgcccgggtgattgacgcaatttttaatatcctgattggctttgcaattgataaaacgcagagtaaatatggcaaattgcgtccctggctattatatggtgcgataccgttaggctttttaaccgtgttgtgttttgtgccatttggcggggaagctaaattttatttcgcgctggcctcctataccatctattgcctggcctatacggcggttaacacaccttattcggcattgaccaaccgcttgacgcagcatgaggcctcgcgttcgtcgctgtcggtatatcgctttgtgttggctattgtcgggtatctgattgtttccacaacggcagactggctgatttcgccctttaacgacaaacaaatgggctatgtctttgccgtttcctgctttgcgctgttagcgacttttatgtttcttgcctgttttggcatgaccaaagaacgcgttggtgaagaggataaaatgaatgcgccgacgcttcgcgaaatgttccgtgcggtattaggtaatgcaccactgattcatctttcattatttaccgtgtttttctatatcgcctataccgtatggatggcgatcgctatttactttattaaatacattatcggtagcgaagggtttaccgctactttcttcatgattcagtctggcgcttatattattggaaccattatctctgagaaagtgattgcgttaatggggaaaaagaaaatggcgcttctggcgttgttaattggcgtgctgggggtactgatgcaatatttcatcgctggtaataacctgtggctgataatgatcggcgtgtgtctttacagcattacgcttggcatgggctttgtcgccatgtggtcgatgattgccgacaccgtcgaatatgctgaatggcatcacggtgtacgctctgagggggccatctacggtttctttaacttcatcactaaaattgcgatggcgattggcggcggctgcgcgggctggatgctggatctttatcactatgatgcgggtaatgtgaccagcgatgcgattaatggcatcaatattctgatgacgcttttccccggcgcaatgttcgccatcagcgccatcttcgtggcctgctatgcgttagatgaaaatacctatcgcgatatcgtgcagaaaatcagcctgcgtaagcaaaacgcgctttaa

SEQ ID NO: 95329 - DNA, 822 bp, Enterobacter aerogenes
atgattgcgccacaagcgggacttatcgtcgaccaggtcacggtgacctatcgcaacggccacaccgccctgcgcgatgcctcgttcagcgtaccgcgcggatcgattgccgcgctggtgggggtcaacggctccggtaaatcgacgttgttcaaagcgctgatgggcttcgtgcgcgtcggccacggcgatatcgccattctcggccagccggtcaaccgcgcgcttcggcaaaatcttgttgcctacgtaccgcaatcggaagaggtggactggtcttttccggtgctggtggaagatgtagtaatgatgggccgctatggccatatgggctggctgcggcgggcgaagccccgcgaccggcagattgttgatgccgcgctggcccgcgtagggatgagcgaataccgcaaaagacaaattggcgagctctccggcgggcagaaaaagcgcgtgttcctcgcccgcgccattgctcaggaaggcaaagtgatcctgctcgatgagccgtttaccggcgtcgatgtgcagaccgaggcgcggatcattgccctgctgcgagaactgcgcgacgaaggctgtaccatgctggtttctacccataacctcggttcagtcagcgaattttgcgattatacggtgatggtgaaaggcaccgtgctggccagcggcccgacggagaccaccttcaccgccgacaacctggagctggccttcagcggcgtattgcgccacgtcacgctcaccggcgcggaagagcgcattattaccgacgatgagcggccgtttatcagccatcgcgcggcggggggccaacgatga

SEQ ID NO: 95330 - DNA, 720 bp, Enterobacter aerogenes
atgggttacatttacagggcaggtggtgtcgctaatgattccagtgcgtatggtagtcttgcattgattcttggcgtggcatcgcttattggtcttcgtcataccagcaaaagcaaaatactttacattttgatactgcttggtcttttgtttaacatctatatttcacttactcgaactttggtttttgcgctggccgtatatgtattctttgatttaataagaacaagaagccttagcgtattcaagatgctgtttttcgcagctatcggtgccggtgttatcatttacggcattagtaatgattatatcattgccttgttggataggattaccggctctggacagattgatatcacgtctggcagacttgctacctgggcctctgttcctgatattcttggggaaaatccaatatttggcgttggttatcgcatggctactgataagtacggcatcgtgcctgataacgtgttcatatcatcattgctggaaacaggcgttattggtttagctttgtacgtggggatgcttgtgtctctgtgctactgcgtttacaagaacaattcagaaagtcttccgcttctccttgcgtttatagcatcagggatgtttgttgatatctctacgttctggattagtattcctgcactaatattttttgttgcagttaacagtcagcgcgatgacgatgatggtcgccatcgcgctatagaatga

SEQ ID NO: 95331 - DNA, 927 bp, Enterobacter aerogenes
atggagctgcgccagctacgctattttgtccgcatcgtggaaacaggcagtatgggccgcgccgcgctcgatctgaatattggcgtctctgcgctcagccagcaaatggcgcgtctggaaaatgaactcgctatccgcctgctgcaacggacttcgcgcggcgtaatgcccaccagcgccggcctcgccttttactcgcaggcgcaactggcgctgcgccatgctgacgatgccattctcgcagcgcgtgaagcacgcctttccggtcacgtcagcgtcggtatggcgccgagcaccgcttctgtgctgggcgtaccttttatcaacgccatgcgcgaaagctacgccgacgtccgcctgcacctggtggaaagcctctccggcaatctggaacggatgatcaacacccgccagctcgatttagccatcgttttccagaaagagaagatcctgcgctggagcgcccgacccattcttgaggaacgtctgttcctgattggcgcccatgacgtgctggcgccgctgcccggcgatagcatctctccggaccagcttgccgccatcccgctgattatgccaagccagggacatggcctgcgcggcaggctggacgctatttgccaggagcacgccatcaacgttgacgtggtggctgaaatcgatggcctggccctgctgatgcgcgccgtccgtgacgggctcggcgccacgctgcagccgggcgcggcgatttctcatctcgacagcgaggcgctaagagtgatcggcgtcgataatccggtactaagccgacctaattttctggtcagtctctcagatgacgaactcaccccggcaggccttgccgcgcgcgtgatactgaccaaagtcatgcgtcagcttgtagaaactggctgctggccgggcgccagcctttacacttcctaa

SEQ ID NO: 95332 - DNA, 717 bp, Enterobacter aerogenes
atggttacgctttggggaaattatgaggggatctctcagggctatgcaggcgcgatcctgaaagccgagctcgccgatgcggggatcacctacagcggtactcttctgcgccagacgctggccaacgatccgggtaccgtgctggcgacgactcaatcggcgccgttgcacgatcttctgcgtatcatgttgaagaaatccgacaacatgattgccgatacggtgtttcgtactatcggccacgcgcgaatgggcgtgccgggaacctggcgcgccggttccgacgcggtgcggcaaattctgcgccagcaggcgggtattgacctcggtaacacgattatcgccgatggctcaggcctgtcccggcacaacctgatcgcgccggcaaccatgatgcaggtattgcagtacatcgctcagcacgataacgagctcaactttatctcgatgttgccgcttgccggacacgatggttcgctgcagtatcgcgccggtcttcatcaggcgggcgttgacggtaaggtttcggcgaagaccggttcgctgcagggggtatataacctggcaggtttcattaccaccgccagcgggcaaaagatggccttcgtgcagtatctctccggctatgcggtgccgccgggcgaccagcgcaaccgccgcataccattggtgcgcttcgaaagtcgactgtataaagatttgtaccagaacaactaa

SEQ ID NO: 95333 - DNA, 1359 bp, Enterobacter aerogenes
atggacgataaaaaatatcaggtttttgtcagctcaacgtatgttgatttaatagaagcacgtaaaaaaataattgaaacagtattgagcctctatcatttccccgttggcatggaaatgtttagtgcggatgattccgaacagtgggatattattaaggaaacgattgatgcaagcgattattatataattattattggtcataaatatggttcgatatctgcgaaaggaattagctatacagagatggagtatgactatgcgaagtcgttaaatatacctgtgttagcttttattcgtaatagagatgtactaaccaaaccaaatgagagagaaaccgaacatgctaaagcagaaaggttggaggtattcattgaaaaggctaaagctaataaaatgtgtgacttttgggaatcaattgaagacttggcaactaaagttgcaatcgctctacccaaggttatgcgaagaaatccacgtataggatgggttagaggggatcaggccacaccgaaagaagtatccaacgagttggctgagttatcaacggaaaacagaaagctaagggaacgtttgcgggaatatgaaagtaagttactttcagagcagccattgttaaaattatcatcattccctgaagatttagtattaaaattttctcacctccccaatccacaagaacacataaaaccttttaatatttctgatattccatcgaaattggaacagtatatttcaagtgaggacgtggaaagctacaacaaaaaaataccatcaaacaacaaggtggatgaatacaatagaaaagcttctatgcttcattactataataatcactctatgtatgttaagcctgtgttagagaatcacgggagaaaggttgcaactgatatttttattgatattacgctccctggttttattgttgcagttgacgaatatgatactgagagattttcaacgggagtgccggagttaaatataccgataagcccaattgaaatggcagaaagaaaaattagagctaaaactagcatggatattctgagggacaggattttaagtggagggaattatttgggtggttctttctcagctccaaaatatgatcttccagccattaatggaatcatcagtagagtgcagccgtttaataaaagtgaatgggttgagtgtaaaaaaaatagagtattgcttaggtcaaagaaattaatccaaagccgctctatcacctttgagaaaattattcttattcccattgctccaggggaaggaaacattgaattcaaaattgtttgtgaagaattaaaggaacctattatttatcaacaaaaagttactgttgaactcgaaatttag

SEQ ID NO: 95334 - DNA, 387 bp, Enterobacter aerogenes
atggcggctgatattgcgaaaaagctgcgcaccagccagcaacagcggattaagcgacagcaggcacccgacggcaccccgtatgccgcgcgaaagcgccagccggtgcggggtaagaaaggccgcattaagcgtgaaatgttctccaaactgcgcactaaccgctttatgaaagtgaccggtaacgatagcgcggcggtggtggaatttaccggaaaagtgcagcgcatcgcccgtgtgcatcagctcggattaaaggacaggccaacccaaagaagcgctgcagtcgaatacccacagcgccagcttttaggtttttcgtcgtatgacaggatatcagttgagactgctattttcgatgaaatcgttcatcacataaaaggctag

SEQ ID NO: 95335 - DNA, 1068 bp, Enterobacter aerogenes
atgcgtcaggaaacccgttttaaattcaatgcctatctgagccagctcgccaaactgaacggcatcagcgttgaagacgtcagcaaaaaattcaccgtcgaaccgtccgttacgcaaacactgatgaacaccgtgcaggcgtcatccgcgtttctgaagatgattaacatttttccggttgatgaactgaaaggtgaaaaaatcggtgtgggagtagatggcactattgccagtacgaccgacacctctggcgacgatgagcgcgaaacatctgactttgtcgcgcttgagtccaataagtatgagtgcgatcaggtcaactttgacttccacctgcgctataaaacgctcgacctgtgggcgcgttttcaggacttccagcgccgcattcgcgacgccattatccagcgtcaggcactggatttcatcatggccggttttaacggcactcatcgtgcaccgacctcgaatcgcaaaatcaacccaatgctgcaggatgtggcggtcggctggctgcagaagtaccgtaatgaagccccggcacgcgtgatgagcaaaatcaccgatgctgacggcaaggtcgtttccgatgtgattcgtgttggcaaaaacggcgactacgagaacctcgacgcgctggtaatggatgcgacaggtaccctgattgatgaggtttatcaggactcaaccaaactggttgctattgttggtcgcaagctactggccgataaatatttcccgctggttaataaacagcaggaaaacagcgaatcgcttgcggcagacgtcattatcagccagaagcgaatcggcaacctgccagccgtgcgcgtgccctacttcccggcgaatgcggtgttagtgaccacgctggaaaacctctctatctacttcatggatgatagtcatcgccgttcagtcatcgaaaaccccaaacgcgaccgcgtggaaaactacgagtcgatgaacatcgattatgtggtcgaggcgtatgcagccgggtgcctgctggaaaatatcactctgggcgaattcaccgctcctgcagcaccggaaagcggagagtaa

SEQ ID NO: 95336 - DNA, 1092 bp, Enterobacter aerogenes
atgggatacgagattgactttttagccgttggcgaaaaaaaaagtggggatgcaatatgtatcagatggggaaatcttcacggaactcgggacgaacaaaaagtagttgtgatcgatgccgggtatgcaagtacaggccctcagatcatcgagcatttagagaaatattataatacaaatactattgaccttctcatctccacccatcctgatagtgatcatgttggtgggttaactcatgttattgaaaatgcagaagtaaaagagttctggatccacaagccgtgggagcataacgagaacctagcgcaggagtttgctgacgggaggataacagatgagagtatcgccagacgtatgcaagaaaacctgcagaaagcttatgatgcagttaaattagcagaaaaaaagaagattgaaattgaagagccttttcagggaaaaacatgggacaacgcaacattggtggtcgttggacctacacaagcttactatgagactctaatccctgattttgcaagaatgcctgaaaaagcagttgctacatcgggcacggaaagtattaaaagtgcctataattattttgttgagaaagctaaggaattggttaaatatgttgccgattggttctctgacgaaggaattgatgataaagatactacttccgcacaaaataactcaagcgtaattataaagcttgaaattgatgggaagactcttttgtttaccggggatgcagggattactgcattagatatggctgctgaccatgtaactagttcatcgctagcatttattcaggtgcctcaccacgggagtcgaagaaatattgggccagaagtgctaaataaacttgtcggaaatattgttagcgagggggggactcgaaatatttgcgcgtttatttcttgtgcgcccggttcggaaaaacacccacatcaatcagttattaatgcgtttactaggcgtggcgtaaaagtaattacaacagaaggaagcaataaacgccattctaacaatgctccggcaagggaggggtggactactgcagcccctcgctcatatttagctaattataatgtggaagaataa

SEQ ID NO: 95337 - DNA, 495 bp, Enterobacter aerogenes
atgaagatggatggtttatgggaaaaaatctcatcatacaatatatttaacaatcttttccccggggctctatttgtctatttacttgagcgctccactaaagtaatgttatctactgatgatattataaaaaacattgtattatattattttgccggattaatcattggtagaattggttcaatcattgtcgaaccattattaaaaacaattaaattagtgaagttcaccccttacccagaatatatctctgcatgtcaaaaagacaataaaatagagacccttcaagaaacggcaaacatgtatagaacattgctgtctatgtctctgcttttacttgcagcctcatactttatttcaaaaataacagggggtagcttcgaggcatcgaaatacctatcaatatttctaatttttgttttcattatctcctacatcaagcaagtcaaatatattgttaaaagaattaacaaagcaaataacaagctgccctag

SEQ ID NO: 95338 - DNA, 183 bp, Enterobacter aerogenes
atggttggcgaacatttcagccggatacagcaaaagtgggcttgtgtgcaattcattgcagaggtgtcattgattgcaaactgtaagccgtcagaccttaagcttgccctgactcttattgctgatcttgctcacagcgaaaatcacgaagcagaagaagagattttctataaagctgaatag

SEQ ID NO: 95339 - DNA, 2151 bp, Enterobacter aerogenes
atgttcgcggctttgctgcatgcgagaaagatgctttctctccagcctgagtgcgtgcgttttgacgtttatcgcaccgctacggtgctggagcaaaatcagggcagtcaacgagccaatgcttttttaatcagtttctgcaaaaaggcattgccacgtcttgaactggtcgcaaaaaaatacgagagcgcgggtatcaacagcaatgtatcaaccgccgttttcggtggtcattttgacactcgactaatgcaatatctggcttcacgtatggttaatctggtcgccagatataaccgcctccctgacatgtcgcgcgcagatgttgacttgctggccggtgacattgctaatttcattcgttctgagctggcaaatattgatgattcaggttttggtgagctcaaaacgctatacacctggtacatgcacgctggttttatttctctgcaattcaatgtcacccctccccattgggagcgcgtggcaaataaatacttcaacaaagatgatatcgcccccgcagtaatccgtatgtttactgagtcatggtggcgtaatcgcctgcgtcgtgtcgcgtcggcatggcgcgaacacatacaaattgcagtcggcaacgtcagcaagaaaaagcacgcctacgcgagtaaaaactgcgtaacagactggcgcgagcagaagcgccgaacgcgtgagtttctcaagggactggatctcgaagacgaagacggcaaccgcatcagcctgattgaaaaatacgacggttcggtcgctaatcctgcgatacgccgctgcgaactgatgacccgcatccgtgggtttgaaaatatctgcaatgaactcggttatgtcggggagttttacaccctgactgcaccgtctaaatatcacgccacgactaaagcgggataccgtaacagcaaatggaatggtgccagcccatcggacacgcagagctatctaactggcctttgggcgcgcatacgcgccaagctgcatcgggaagaaatacgcattttcggcatccgtgttgccgagcctcatcacgacggaacgccgcactggcacatgctgatgttcatgttgccagaggacgtcgagcgcgtgcgccttatcatccgtgattatgcgtgggaggaagaccaccacgaactgagaagcgataaagccaaaaaagcgcgctttcatgccgaggccattgacccggaaaagggcagcgctaccggctatgttgctaaatacatttcgaaaaatatcgacggttatgctctcgatggtgaaaccgatgacgaaagcggtgagctgctcaaagagaccgcccctgccgtatctgcatgggcggctcgctggcacatccgtcaatttcagtttatcggtggcgcaccggtgacggtatatcgtgagttacgtcgtctcgctgataccgagaccgcgcacggtttaagcgttgagtttgccgccgttcatgatgccgctgacgccggtgactgggctggttacgttaatgcgcagggtggtccgtttgttcgtcgcgatgatttgcaggtgcgcacgctgtatgaaccgcgcgccgagtttaaccagtacggtgaggaaaccgtctgcatccgtggtgtgtacgattctgctgtcggtgctggcaccccgattttaacccggctaacgcagtggaaaattgtgccgaagcgtgccgttgatttggccgttgacgttaagggcgctcctgcgccctctcggagttctgtcaataactgtacggggagagaaagcgagccaccggtactggatttgacaaaaccgctgagtcggcgtgaaaagcgcgagctagtaaaccgactcaggaagaaaaaaccagcaacaaggcaaaaattcagccatggaacagagaagcagagtacggctattgacagagtagtagacaatattcatgcctgcactgacataaacatcagccgaggagagggtctgcatctcataatggggggtaaaagctctattaacggtaagtggtatcacgctttatcatctggcgaattattacgagccgcgccaacttatgagtttaaggtgaaaaagcatcacgcaaaagggcgtgaaatacttgatcgtgtggcggcactggctaaatgcgcatccaagaagatagattaa

SEQ ID NO: 95340 - DNA, 282 bp, Enterobacter aerogenes
atgaacctccgcatagaaatcggtgataaatgggttattaccagcgaccagtatcaattcattctgaatgaaaagaaagtcgttaagtccggtaaaaaagctggtgaggaatggctcgacactatcggctattacccgaagattaaccagcttatttccggcctgatgcaccatcatattcatgggtcggatattaccgccattgacgctatggcggcagaaattgagcgtgtagggcaactatgcattgcagccattgaaggggctagcgctgatgcatag

SEQ ID NO: 95341 - DNA, 297 bp, Enterobacter aerogenes
atgagtacagttcatagtttaaaaattggaccgatgttttttgcagatgttttatctggtcataaaaaagctgaattcagaatcaatgaccgtgattttaaatgtggtgatttcctgttattgcgtgaatgggagggcgaatacactggtaataaactccttgtaaaaatcactcacatcttaccaattgataacttaattagtggttgtggtaattgggtgatgttatctatcactacaatcagtactaccgacatattatcgataattgaagcaatggcaggaggtgagttatga

SEQ ID NO: 95342 - DNA, 222 bp, Enterobacter aerogenes
atggccgacgcaatggatatcgcacaacagcgcgaacaggcagaacgtgagcgccttatcaacaacgcgcgcagccgtattgctgcgccatctcgttttacctgcgaggtatgtgatgcaccaatcccggaagctcgccgcgttgcgattccgggcgtggccttttgcgtgacctgtcagcaaatcaacgaacttaaatcaaaacattacaggggcgtttaa

SEQ ID NO: 95343 - DNA, 234 bp, Enterobacter aerogenes
atgagtcgagttatttatttttcaacaccgagtagtgctgacgatgatgcattagcagctttatttaaagcagccaaaaaagaagaacacaaagaccgcgctttagccgtttcaatccgccttgaggcactagctacccatatcactaacaaaggtttaaacgctatcgaagcggctgagttgttgcgccgcgaagccacccgctatgaaaacgaatctcaggagttgcactaa

SEQ ID NO: 95344 - DNA, 372 bp, Enterobacter aerogenes
atgaacgaaagaatttcagctcatgatacccaggcgagcaagctttttagcaatgctgattgtattacagagcaaccgaagactatgaccggcgaggagtgtttcgcacggtttcatcaaaagctgaaagcaacagaaaataaggcgctgcgtaatttcaataagcttgatgaagattttaagtttgtggttttaacgcttgctaaccgaaataatccgggcgcgtttcgctctgatgaagtcggtaaaccatatgagtattttgatatggaacgccgcaagctgattattgcgtcaatgaataaaatttcccgctggggtgggattttgccacggcatatttccatccatgaatgctttttagctaattaa

SEQ ID NO: 95345 - DNA, 201 bp, Enterobacter aerogenes
atgttgaatactgaaccgtcatttgcatccctgcttaaaaagcaaagcgccggcatgcactacggccacggctggatctccggtaaggacggaaagtgctggcacccttgcaactctcagtccgaattgttgaacggcttaacagcaaaaaaagtctctgcggttaagcggcttttaaatgcattaatgggggcaaaatga

SEQ ID NO: 95346 - DNA, 510 bp, Enterobacter aerogenes
atgttagattttcgcgtttcgtcacatgcacactttgacgacgcctgcaaaaaattcgcagccactcataacgtgaaagagctggcggataaagcaggcatcaagccgcatacgctttacaacaaattaaacccggaacaaccgcaccagttaacgccgcgcgaaatctggacactgacagacctgaccgaagactctacccttgtcgatggttttctggctcagatccattgcctgccgtgcgtgccagtcaacgaacttgcaaaagagaaactgcaatcctatgtcatgcgcgccatgagtgaactcggtgaactggcaagcggcgcagtttcaggcgaccgccttacccctgcacgcaaacaaaatatgattgctagtgttaatgctggtattcgcatgttgtcactgtcggcaatggctttacaggcacggcttcaggctaacccggcaatgacaagcgttgtagacaccatgagcggcctcggtgcctcattcggtctgatgtga

SEQ ID NO: 95347 - DNA, 228 bp, Enterobacter aerogenes
atgaatcttcaaattgcaatccccaatggcccggacttcctctcatatgaggagtttgcaaagcagtacggatgcagcctgaacaccgttaaagagatggtaaagcgcggcgagctgctactggtgccccgtactcgagagggtggcctcggccgtatcaacatgattgccttccgtacgcgattactcgctcaggcgattaattcgcgctatgccgtattccagtaa

SEQ ID NO: 95348 - DNA, 858 bp, Enterobacter aerogenes
atggataaagaagagcaatccgtcagagatgtcattgatagaatccttgtttcttatggagttagaacaagacaggcttactctgacctcgcaaaaattccattgcccacgattagtaattgggtcaagcggggtaaggttcctggagactacatagtccaatgtgctctcgatactggcgcagaccttaaatggcttatggaaggtggtgaacttacaaatgtaagatttgagcccggtcattaccctatgcagggaatacgactgatggaggcaatgcaaagctcaggtgggaaagagattttgcagcgcatcatgcaggcttatggctttaccatgcaaaaagagctgggcgaccatctcgatataccatccggcacgatgagcgcttgggttcgccgtgagcacttccccggggatgttgttatcgtttgtgctttagatacgggagcatctttatactggcttgccacaggtaacggtggactttatgaaagtaatgtgaccttacccacagagcaaacggcattagccacaattagaaaataccgccttgaaaacggtgaattaaaaaaaacaggtaactggttggctgacccttcaatgattccagataatcatgatggtctgatgtttgttgagggtatgggtaaatcttggctggttgatatttctgcgaagaatattgctaacggccgctggctcatcagtattgatggtgcaatggatgtgttcaatgtgattcggctacccggaaataaagttcggttgtccaatggttctgctgagtttgaatgcaatttatctgatattacaccgtcaggtacggttatttttacaattgagaaacatatataa

SEQ ID NO: 95349 - DNA, 339 bp, Enterobacter aerogenes
atgatgcgctcattatttgctattggattacttgttctctgttcatctgcgttcgcagccgagaaaacgcaggcgttagatggagcatcatttggtaatacatggcctctgacttttgaaaaggctacggtttcctgtgttaatggtgcatatgcttttgtatatgataccgctacagataaccgttatccgcttaacggtatggcttccagcgctgttaagtccggaaaaatggaaggttacgatttagatacagtgtggaaagatgaccctaattattccggtgtaaaaatgtcaatatctccggttttagattcagccctgaatctctgtaaataa

SEQ ID NO: 95350 - DNA, 501 bp, Enterobacter aerogenes
atgaaagaaaacaaacatgttgaaaaatttaagttaagccatctgaattcaggtgagtctgtcattgcgtgggcggaaggatatatcggtaaaatgatgggtagtggaaaaaatacccagcataatggcgcgttaattgtgacggaaaccagagttgctttttatcgtaagggatttattggtgaggtaattgaaactatacctttaaaatctatcacctctattgagcgaaagtcgacgcttggtcatagggttataagggtgcacacatcccatgatgaccttgaatttaaaacattcagcaaagagtcagagcttgccctcgttgaagcaattgaaagcgggcgagggttgagaagtgaaacagtagcctccgaaaaaaataaggccagtagcgaccctttcgaacaactcaaaaaattatcagagcttaaagaggctggggtgatttctgatgaggagtttcaggctaaaaaaagcaagttgatggatctgatttaa

SEQ ID NO: 95351 - DNA, 1032 bp, Enterobacter aerogenes
ttgactgttaaaaagctttcatccggtgagtggctatgtgattttcgcgttaatgggagagaaagccgtcgcgtgcgtaaacgcttcaccaccaaaggtgaggcagtggcttatgagcaatattaccgcgatgaggccaaagataagccgtggatgtcagagaaagaagaccggcgcaaactcagcgaaattattcagctctggcataatctgcatgggcaggcgctggttgccagcaaatcccgtctggctaaactgcaaattgtctgcaacggactaggcgacccgatagcatcacaacttacagctaaggactgggcgcattatcgtgaccagcgtctaagtggcaagattgacaatggttatcataaagacccggccaagtgggtagcaaagccgataacggtcaatcgggagcagcaatatttggaggccgtatttaacgagttaaagcggttaggggagtggagtttaccaaaccctctggatagcattcgtgtcttcaaagaggctgaaaaagagatgtcctggctgacgttagagcaaattccgcagctcatgctggcatgtcagaagtacggacatgaagaccttgcacagattgccgaaatttgtctggcaactggtgcgcgctggggggaggcagagcggctaactcgcccccaactttcgccatacaaactgacgtttacaaagaccaaaggcaaaaagaatcgcactgttcccatcccaaaatggctctacgaaaaattagctacccgtcaagggaggatgtttaagccctgctatcaggaattcaagaaaatgcttttgctcacagatattgagctgacggaagggcaaaagacccacgtcctgcgtcatacttttggtgcgcattttatgatgaatggcggcaacattctcgtacttcaaaagatactcgggcacgcaaacattcgtgaaacaatgaaatacgcacacttcgctcctgaccatcttgagcaggctgtcgagctgaatcctctgagcttgataatgtccaccgaatga

SEQ ID NO: 95352 - DNA, 639 bp, Enterobacter aerogenes
atgaaaatcgcactgatgatggaaaacagccaggccagcaaaaacgccatcattctcaacgagttgaaaaccgttgctgatgagaaaggctttccggtttacaacgtaggaatgagcgatgagcacgatcatcatcttacctatatccatctgggcatcatggccagcatcctgctgaacgctaaagcggtcgatttcgtggtgaccggttgcggcaccggccagggggcgctgatgtccttgaacatccatcccggagtggtctgtggttattgtattgaccctgcggatgccttcctgtttgcccaaatcaacaatggtaacgcgttgtcgctgccttttgctaaaggctttggctggggggcggagctgaacgtacgctttatcttcgagaaggcctttacgggccgtaatggcgagggttatccgccggaacgtaaagagccgcaggtccgcaatgccgggatcctgaataaagtgaaagcggcggtggtgaaagaaaattatcttgataccctgcgggcgatcgatccggaactggtaaaaaccgccgtatccgggccgcggttccagcaatgcttcttcgaaaactgccaggataaagaaatcgaagctttcgtacgccagattattggctaa

SEQ ID NO: 95353 - DNA, 1248 bp, Enterobacter aerogenes
atgagcatattagatgatattcgtactatcggcctaaagatgaaaaatgaacaagcaagcctcaaggaaataatcttggagtcgagtcgggttgatgtttccgatgaacaagtcgatggcttagatcgtcttatctataaccattgtttaaataaaaaaactctttcggacttctttggtaaatcaagaaacacttttagtagaattcttgctgaactacatgagaaaaaagtgatcggtgaacctatcttccagaataagagtcacctgtatacacgttgggatgttcaaaaaataatggaagcgatgggcactattcaatatcgtgaaatgtatttgccccgagttattgttacggaaaaccataaaggtgggacaggtaaaagtacaacaacagcaacacttgctaccgcggccgctttggatcttaatctgaatgcaaaaatctgcgtaattgatcttgacccccaaggctcgttaggcaataaccttatccactcaactagtgaagatagtgtttacctaaccataaccgatgttctgcttagtgaaattgaagataatgactttacacaatatataaaacagggatatacggaagcacaaattattggtgctatggcattttcaacccatctccctaacatggatgttataactgcattcccgacagatgatagatttactgataaatattggagcctcgataaggaggcaagactcaaacttctgacacgttttcgtgatgtggttatacctgtattaaaggaaaaatatgaccttatatttatagatactccgccacaagattctccaattatttggtcaacaaacgaagcagctgatgcaatacttgttcccattacaccacgagaatatgattttgcatcaaccacaaactatatgattacgatttcagaccgacttgagcagcttccatctaagggaacaaatattaaatggataaatgttcttgcagtaaacgtagatgatagaagtcaacatgagattcgtactttaaataaactagtaagaactgtacgtgatcggttcatgacaactaatattaaacattcagaggctttcgttgcagcggctgaaaaaggtcgtactgtactcgatattaaaaaatcagaagaactttgttcttcaaaacaatatgatattgctgaaatgtcggttcagtcggtgtatcaacaacttatcaatgaaattaaaagcttctcagttagggaggagggtaaataa

SEQ ID NO: 95354 - DNA, 1011 bp, Enterobacter aerogenes; identical to SEQ ID NO: 23317

SEQ ID NO: 95355 - DNA, 2406 bp, Enterobacter aerogenes
atgaaaattaatttacagactactttaatactaattgccctctccgctttttcactcccctcatatgctcgtgtgtatgaatatgtattcaaggatgtctatggaacggataaatcagtcagtgcggaagcaggtatcctaaatacaaatgaaaaaattcaggtaagaataatatcgggactcgacagaaaaattcaggtaaccgtaaagaaagacaatgttggagtatatagctttactactgagagcgtgacggtcaatgaccgtataaaggcatcaactggtgaagaattttatggtaaaacgctgacattgccaccactgagtgatggaagttatgtaataacgtcagatatcctgaatactcaaaacactgttatcgacagcacgtctcacaattttattattgatactgtagggcctttgtcagataacctgagcgtggaccaaaaccccggatatgatatggtcttaacaggtgagcgttgggaactaggcctcggggctgaagcaaagctgtacctgaatgtgaaaaacgtcaaatctgccaccggttttgataaagcgactattcaggtgataaaacctgatgatactgttttttcaactacagatatggtttatgacagtggatcagcatccctttcaataccgtggacaaaagggaatatgagtcggtcatcatggatgcctgtatcaaacgctgatgtggaatatcgtttccgtgtgacgctctatgataaagcgggaaaccataaagttttgccggatcagaagttcatatttgactcagatcttggtgaatatactttatttgctgtttatgacccgacttctaaaacaagcgtagttccgggatttagtgaaggttacatagcatataagccgggaatgaccgttaaccaaaaccctttaacactcgtgtacagggttccatcgaataatcgaagggaatacagtaaagctggtttgaaatttgggacgattatttccgaagcgaatggatacagttatgtatccgcgaaaacggcctataaggtagcttacgtcatccataacggatatcaatggggtggaggctcactctcctataatatcaatttaggaagtgaggctccggccagcccggcagcacctgaagtatggttaacatcagatataaaaggtgaaatgaatgcaggcagctatctttgggattccaaagatctacccgtgaaattcagctctgtaaagatcactgcgtctccgcgaaattatggtcagagagcgatgagtggaaatactgagatttgtcagatacctgctggtgagactgagtgtactggtgcggtatcatggtctattccgaaatcagggaatggtattacaacatacttcttcagattgactgatatggataaaacactttcatcagtcactgtagaaaaaagacatcactggaacactgatctgttacccaagataactggatatagttaccaggaggaaaacaaaactgtactcttatttgtgacgcaaccagggcgcggaaaattccgcgatttgttgcaactcaaatctgctgctctgattgattcagataccggggaccaactactgtcaggtatccaaacagctctatctggcgaggattacacatacagttttgatctcagcaaactggccgaaggtaaatacaatttaggctttctggcaaaggacagctttaacaatgaaacttcatcaccattcataaatctgattaacgacaagacacctcctgttgttaattttaaatatgaaaatgcgccgctatcccccggtgctactgttttcgggcttgagaacatcagtataacgctaaatgatgagttaacagcacccagccttgtcagacttgaacttaaaggaggaccagcgtcggatagcgttatcttggggtttaaccagaatacggacggtagttatacacctgattaccctcgtctcttccccagtctggatgcaaatacggacaaatatacactaaccgcatatgctaccgacgcgaaaggtaacactactcaaaaaagcattcagttcgcctattacccaaaaaacctggtcacccttgagaagctgaaaactttgggtgttgtaaaggcgctaaaaaccagtgacaacacaccgttggccgtcatgcggacgggacagctacgacgtaacgatggctcactggctaagggtatacaaacggcaaacatcacggtcaggaaggacgcagattatgcgataaatatccttgggaacgttattcaccccggggagacaaaagaaattcagatagaccttggaaccggtgaaaactcaactgttcctattttcacagcagaaaacggttctacaggggaaagcaatttcataatcgaatttccgcaaatcaagtaa

SEQ ID NO: 95356 - DNA, 2406 bp, Enterobacter aerogenes
atgaataccaagataaaactgctgacaacgataatccttgcgacgatgtccttttcatcgcattcacgggtctatgagtacaccattaaggatatctacggtgcggagaaatcagtcagtgcggaaaccggcattcttaacactaacgaaaaaattcagttgagcctgatttccggcctagatcgcaaagtacacgtatctgtccggaagtcaggaacggaggtttacagcacgacaaccgatagcattaaggtaagtgatcgaattaaggcatcaacaggtgaagagttctacgggaaaatcatcacgcttcctccccttagtgatggaccgtatcaggttatctctgaaatacttaacacacagggtgctctggtagactccaccacacaggatttcaccatagatagtgtgggccctacagcggacgatttgagcattttacagaaaccggggtatgaaatggtcacccagggagaaaggtgggaactgggccttggagccgaccaaaaactatatgtgaacgttaacaacgttaaagcagtcgctggtttcgataaagctacattacaggttattaatcccgataatagcgtctattccattactgctatggactatgatagcgggtcttcctccctgtctgctgcatggactttagggaatcggaaaaaggcctcctggatgcctacatcaaatgctgatgtagagtatcgtttccgggttacactctttgacaaagcaggctcccgaaaagtattaccggaacagaaatttgtatttgatgaccaactgggtgaatacactcttattgctatacgggaccccgaagcgcaaacaagcgttgttccagggttcacttcgggttatatagcttataaagcgggtatgacagttaatcaaaacccgattaccttaatctatcgtatccccatcaacaatgtaaggaaatacaacaaagctggtttaagttttggctctatcatttcagaagctaacggttacgcctatgtggcggcaacaacagcatataacaacaggtacgatatacataacgggtaccaatggggcggcgctactgcaaactataaccttaaactgggtcccgacacgcctgtcggaccggaaatgcctagtagcgtttggctcacgacggacacaaaaggtgaaattaattcttttaactatttatggaaaacaagcgatctaccggtgaaatttatttcagcgaggatccgtgcttctgcgagaaattatatccaaagagcatttacaggtaacctggaaatctgtcaaatccaaccaggtgagactgagtgcagcgggccggtaccgtggtcaattgctaaaagtggcaatggaggcgtgacatattcttttaaaatgtataatgaggacaagacactttcatcaattaatcaggaaaggaggaactactggaacacaaaccttctaccgaggataaagggatatgactatcaggaagataagaaaaaagtacttttatttgttacccaacccggtaatggtaccttcagagatcaacttcagcttaagtccgctgaactgattgatgctaattcaggtatgcaggtgctgaatggagccaaaatagcgctttctggtgaagattatacttatgcgtttgacttaagtaagttggctgaaggaagatacgacttaaactttctggcaaaagataccttcgaaaatgaaacatcttctccattcatcacgttagtgcatgatatgactccccctgagatcagctttaactacgacaatgccccgctcacctccggcaacacggtctatggtctggagaatatatccattaaactaaacgatgagctgactaaacctactcttctccgcctggaactacgaggggggcctgcatctgatagcgtagtccttggtttcaaccagaatgttgatggtagctacacacctgattacccacggctgtttcctactctggatacgtcgacggataaatacactctcactgcatatgccacagatgctaaaggtaatacgtcccaaaaaagtattcagttcgcctacttccctaaaaatctcgttaccctggagaaactgaaaacactgggcgtggttaaagcactcaaaaccagtgacaacacacctctggcagtcatgcgtaccggccagttgagaaggaacgatggctctcttgcccagggtatgcagacggcaaatatcacggtcagaagcgacgctgagtatgccatcaacattctgggaacggtgatccatcccggggaaactaaagaaatacagcttgacctcggaactggtgaaaactctacggttccgatttttccggctatcaacgggtctacgggtcaaagcaacttcatcatcgagttcccacaacttaactaa

SEQ ID NO: 95357 - DNA, 2406 bp, Enterobacter aerogenes
atgaaattcaaactcaaacttctggcggcattaatcctcggcaccctttcattgccgggccattcccgtgtttatgagtacacaataaaagatatctacggtgtggagaaatccgttagcgccgattcagcgaagctgaacaccacggagaaaatccagcttagcctgatttcagggctggacaggaaaatccgtgtgacggtgaaaaaaggcgacgcgaatgtctacagcacgacgacagaaagcgtgaaagttgccgatcgcatcaaatcatcatcagatgaagagttttacgggaaagttataaccatgccaccgttaagtgaagggctgtataccattacctcggaaatattgaatacccaggatgcccttattgattcgacaactcaatcattcctgattgatacgtctggccccacagccgataacatgaggattgaccagcgtccgggatatgacatggtgcttaccggaaacctctgggaactggggttgggggcagaagcaaaactatatgtcaccgtcaaaaatgtgaaagcgacggccggttttgataaagctactatccagatcttaaatcccgataataccgtctattccaaaatggacatggtttacgacagcggttctacatcgctttctgttccgtggactaaggggagcgcggttaaagccgactggatgccggtgtccaatgcggatacagaatatcgctttcgtgtcacgctatacgacaaggcaggtacccgaaaagtcctgccggatcagaagttcctctttgactcggatttaggcgaatacacgctagtcgcggtgtatgaccctacagctgaaaccagtgttatacccggattcagtaaagggtatgttgaatataaatcggggatgacggtcaatctgaatcccattacttttgtctaccgtgtcccttctacgaaccgcagggagtacagaaaaggtgggctggccttcgggaacataatttctgaggctaacggctacagctatgtgtcggtcacgaccccttaccagacgctctctgttatccataacggttatcagtgggggggggccagtgttacctacaatattaaaatgggtgcagatgcgccggtaagcccgactactcctgacgtgtggattacctcggacaagaaaagctcggtaagctcatatgatttcctctggaaaacatccgatctcccggtgacatttcttactgcccgcgtgaaagcgtcggcacgaaattacattcaaaaggctatgtctaataccggaggtttcttatgtaacattcctgtcggcgagctggagtgtgaagggaaaattgttgggaatattcaaaaaagtggtaacggccatatggggtttttcttcaagatgaccaactcagatggcacccttttctcacaatatgctgaaaggcggcaatactggaatgctgaccagttgcccagaattactggttatgattatcaggaagacaagaaaaaggttctgctatttgtgaatctaccggggaacggcagtttacggtacaaattgcagctcaagtctgcggttctgattaatgcggattcaaatgtccaggtgttaaccggtaccaatacagcgattgctggtgatgattacacctacacgtttgatttgggagctctcccggaaggcaaatataacctttccttccttgccaaagacaccttcgataatgaatcgtcatcgccgttcatcacgctggtgaacgatatgacccccccagacgtcatatttaattatgaaaatgccccgcttgcttccggttctaccgtgtatgggctggagaacatcgcgattagcctgaatgacgcgctgacaaagcctgttctcgaacgccttgagctgaaaggtggccccgcatctgatagcgtgattcttggtttcaaccagaatgccgatggctcctatacgccagattatccacgtctgttccctacccttgtcgaaaataccgataaatacaccctgacggcgtatgcaacggataccaaagggaacgccactcagaaaagcattcagttcgcctactatccgaaaaatcttgtgaccctggaaaaactcaaaacgctgggtgtggtgaaggcgctgaaaaccagcgacaacactccgctggccgtcatgcgtaccgggcagttgaggcggaacgatggctccttggttcagggtgtacaaactgccaacatcacgctcaggactgacgctaattatgcgatcaacatactgggtactgtcattcagccgggcgaaaccaaaaacatccagatagacctcggcgctggtgttaacacaacggtcccaattttcccggcaacaaacggcgctaccgggcaaagcgatttcatcattgagtttccgcaaattaaatag

SEQ ID NO: 95358 - DNA, 678 bp, Enterobacter aerogenes; identical to SEQ ID NO: 23322

SEQ ID NO: 95359 - DNA, 420 bp, Enterobacter aerogenes
atgatgagctcgaaacacgtggtcattagcacgaagcatccggttgccggatacctgtacctggaaatgatccccgatagcgaggtcgggttttcagatatctatcagataacagacagtctttttcgtgcagacgttctgccctgtgactggcgagagcataaacggcagtggggtaaggactttttgggccatggctcatgggatgtgtactacatcaaacagcatgtgaaccgaattaactggtttggcaatgacagcattaagaaaattaagttcagatacagcctgtcccttaaagagctgattgactgggtatccgaccccgaccattggatagatattgccgtagaggtagatgataccagtggttccagaccaatggccgtagccatgtttaatcagaaccagcacgtttag

SEQ ID NO: 95360 - DNA, 354 bp, Enterobacter aerogenes
atgcatgcaactcatctgacgaaaaaatttaatgttttggcggtcgtctatttcacaatcattgcttgtggtcagattgttctgttccctcattctcagcccattttcctgttcctcgtgactatggctatggcggttcgcttatttaccctgcggcctcaatataaaaatttacgatttctggttttgtccatcatctcacaccaccttgtttttaccattctttcactcatccaactctatatcgatgccaggtatagcagggcaagtttcattgagtatcaaatggtttatgcgcctttgctcatcgggatgggatatgtgtatttcaacgtctggagagcgcgtacctaa

SEQ ID NO: 95361 - DNA, 507 bp, Enterobacter aerogenes; identical to SEQ ID NO: 23325

SEQ ID NO: 95362 - DNA, 579 bp, Enterobacter aerogenes; identical to SEQ ID NO: 23326

SEQ ID NO: 95363 - DNA, 315 bp, Enterobacter aerogenes; identical to SEQ ID NO: 23327

SEQ ID NO: 95364 - DNA, 411 bp, Enterobacter aerogenes
atgccatctcagctcccccttgacccaaaacttccggccaattttgatgacacccctaatagtgaacgaagcaaagaactgctagatgaatggtgggatcatccttatgggatcactaaaccagacggctcatttactgacagatgtcttaacggtggagcgagggaccgctcatcggtgcttggaaaggtaagaacttacgaagaggcttgtgtcctggctcacgacgcccaggcaaaatgggtcaaaacccgtctgaaacctatcttcatgtactctaacgaaccgcccttcaggctagtggttcagtcccagcgaccagattacgaagaaagcatcattggggagttcaatactattgatgaaattaatttgttcttgttaaagcagcaccccacccgaactacttga

SEQ ID NO: 95365 - DNA, 360 bp, Enterobacter aerogenes; identical to SEQ ID NO: 23329

SEQ ID NO: 95366 - DNA, 444 bp, Enterobacter aerogenes; identical to SEQ ID NO: 23330

SEQ ID NO: 95367 - DNA, 204 bp, Enterobacter aerogenes
atgaaacttgaagatttaacaggtgacgaccgtactctggttgtagtcgctctccaggctcttttccgggagcgaagtaactcatatcatgcagactgcaccgcctgccagcttgcaggcgagaaaccaccagctgagaatctttttggcgtggaggaaagtatttcggcaattcgccggatgggagctctcccgcagagatga

SEQ ID NO: 95368 - DNA, 273 bp, Enterobacter aerogenes
atgaagccagatatgaaatcaaccaatgagaacgaaaacagacgcggattgctcatcagtgcaggtcagttgctgtttggtgagcgctggcaaacagaactcgccagagcccttggactgtcggacggcagacgcatccgtcagtggctttctggtgacagaccaatacctgtcggtatatgggatgacctgcgtgaactactggaggacagaagctccaaaatggagctgatagttaaacagattcaagccagtaagaaagataaaatgtag

SEQ ID NO: 95369 - DNA, 435 bp, Enterobacter aerogenes
atgacgcaacaattttctcctccgcatgaggtggtggaaatgtcccggcgtatttttgaaaatttaatctccagtactcttaagacatctgataccacaggaacctgcatgtatggttcgattctggtttccatgctactggagaaattttctggggtcaggacgcgtatcgccggtggtgatggtgttggtgatggcggaattgtcacccctgaaggcatgaaagggcattactgggttgtcgctaacgttcatggcatgcactttattgtagatataactgccgatcagttcggtatggacagtatcatatacaaaggtcttaaggatgccccggagtacgtggaagggcaccaggctgtagtagatgagcatgttgctgatagttttcagaagctttttcaaagctactcttcagaggatacccggctatga

SEQ ID NO: 95370 - DNA, 744 bp, Enterobacter aerogenes
atgagccctgtcaaaaatggcgacatcatgaaacgcctcagaaaaatgatgcccaagaccgttgagcctgcattcaattcacctgaggagttgttgcaatggcagcgggaacagggacagcttcgctcggaggcccttgagcgcgagaatagagctatgaaaatgcaaaggacttttaaccggtcagggatacgtcctctgcatcagaattgttcatttgataactacttagttgaatgtgagggacaaatgaaagcactcatgctcgcccgccaatatgtagaagaatttgaggggaacatcgccagttttattttctctggaaaaccaggcactggcaaaaaccatttggcagcagcaatctgtaatgacctcttgttgcggggaaagtcagttttaatcataacggttgcagacatcatgtcgtccatgaaagataccttcggcaacaggaataccagtgaagaacaactactgaacgatctcagtaaagttgaccttctggtcattgatgaaattggagtgcaaacagaatcacgctatgaaaaagttatcatcaaccagattgttgatcgcaggtcatcatcaaaacgccctacggggatgctcactaacagcaatatggaagagatgaacaaacttgtaggtgagcgcgtgatggaccgcatgcgtctcggaaacagcctatgggtagtgtttaactgggaaagctaccgacatcgtgtttctggaaaagaatactga

SEQ ID NO: 95371 - DNA, 1416 bp, Enterobacter aerogenes
atgtctgaatttgattcccttgcggaagagctggtggaagaggcacgtaatgaagaggccagacaacagcaaagggacctgtccctgatagggaaagtccttgaaatctatgatcagaagtttgttgccgaacttttgcgtaagctgggaaattcagactggaccagggagaccctgaaccgctggattaacgggaaatgtgggccacgttcacttaccgtaactgaggcatcgcttcttgaaagactgctcccgcagccgccagcaaaccatcccaattatgcttttcgcttcatcgatctcttcgccggtatcggcggtatccgtcatggttttgaagccattggcggccaatgtgttttcacaagtgaatggaacagctattcagtcaaaacttataaagcaaactggtactgcgatcccgaagcgcatatcttcaattcggacatccgcgatgtgacactcagtcataaggaagatgtcagcgaagaagatgcctacgcccatatcgataaatcgatacccgatcatgatgttctgctggctggtttcccgtgtcagccctttagccttgcaggtgtgagcaaaaaaaactcacttggccgtaaacacggttttgaatgtgacacccaggggaccctattctttgatgtggctcgtatcatcatggcaaaaaaaccggccatctttgtactcgagaacgtcaagaacctcaaaagccatgataaagggaaaactttccgtgtcattatggataccctgaatgagctcggttacgacgttgctgatgctgaagctacaggtgcggatgatccaaaagttatagatggtaagcatttcatccctcagcaccgggagcgtattgttctggtgggcttcagacgtgacctgaatttaagtcagggatttagccttgctgacatttcttcgctgtttcctgaaagaaaagtgctgttcagagaactccttgacagtgatgttgatgataaatacacactaacgccaaagctgtgggattatctctataaatacgccaaaaaacaccaagagaaaggtaatggctttggctttggcctggttaaaccagacgatgataaagcgatttccagaacaatatcagcaaggtatcacaaagatggcagtgaatcgcttgttgatcgtggttgggatagcgaactcggtgaaaaaaactttaatgaccctgataacatggccagacgtcctcggcgtctaacaccgcgtgagtgtgcccggctaatgggatttgagcagccagggaaagtaacttttcgaatccccgtatccgatactcaagcttaccgccagttcggaaattccgtcatcgtgccggtctttgatgcagtagcgaaattgctggagtcacggatcatcgaggctgtaaaggcccggaaataa

SEQ ID NO: 95372 - DNA, 1203 bp, Enterobacter aerogenes
atgagccttctggcggagtggttgcaaacaaagtgttctgcgaatgtttgggtatacgttaagcgcttatccgcgaacgataccggtgctacaagatcccaccagtctggtctttacatgccgggagccgtcattgatgagctgtttccttccctccgtgatactcagttaagaaatcctgaagctcttttttctgttcacgtgtcatctcatcctgattgccctgaccttgatgatgtaagggccatttactacaacaataaatttttcgggggcacccgtgatgaaaagcgtctgacgggctttggtagacaaaatcctctccagaatccggagaataccggcgctctggcacttctcgccttcgaccatgtgcctggaacatcatccagttattgtgatgtctgggtctgcaaggacctgaccgaggaagatattcttgaaccaattattggtgaagttatcccgggagcaacgatatttggtccgggagataaaataattggagggttcgttacagaaacttctcctggcagaacaaagtataagcttccacccgaatggactcaccacttcccttcaggaagggagattattagttttgccgcatgtcattacgatagaacaactgacgacccggactcacaactgacgcggaggaggaaaattgagtttgaaatttttcttgccgttgaggaactgcacgtgctgggtcagatagccgaaggctttgctacggtgaatgattttattacgcttgctaattcagtgagtaaccggaggaagtctcgtgccgggaaaagtcttgagctccatcttgaatctcttttcaaagaacacggtgcaacgagctttgaaacccaggctatcacggaaggtaagaaaaaacccgatttcatctttccttccggtgctgcctatcacgatcctgattacccagctgaacggttacgcatgttgggggttaaaaccacctgtaaggaccgctggcggcaggtactgaatgaggctgacagaattgatacagtacacctgttcaccgtacagcagggcgtctctgtggcccagttcagggaaatgcagtctgaggggatacggctcgttgtaccggtagggttgcataaggcctttcctgaggaaatcaggggtgagttaatgtcactatctgcgtttattgatgaaatcaaaaaactctattggtga

SEQ ID NO: 95373 - DNA, 249 bp, Enterobacter aerogenes
atgataatccgtgacaagattaccgcagaattgaattaccaggcatctgtagaaggagagacgggtaatataaaaatgtgtcgtattattctggagtctgtgaacaacatggttgtttacaatacaatggtaaaggtaaaaaaagcaccaggctctgactcaaaaaccgacgatgagcagtatttccactatgtaaagtcctgggtggttccgttcattgaaaaaatgcatgcagtcaatgacaaatga

SEQ ID NO: 95374 - DNA, 318 bp, Enterobacter aerogenes
atggcattactgatatcagcagacgatcgcattacaaggctatcccctctggacctggaaggtagccgtgataatgacggtgcattctcgcttgcagatatgcaacaactggtcggtggttacattgaagctgtgaagctcaaccctgtaatcgttcatgaaaacattcgatattgctggttggttattaatgaagaaggaaagcttctatccttaccagtaaacaaaaatgcaactattctggtgaaaagtgttatcggccctgacgactatatagtcggaaatgcgttgatgctcgaagaaaccgaatttcaatag

SEQ ID NO: 95375 - DNA, 294 bp, Enterobacter aerogenes
atgagtatgcataacaaaaaaagtgattcttactttagtcgaaaccaaaaatggttgagcccgcttgttattctagctttttgcctgttaagctcacaggtcggcaagattataggcgaaagcaatgtatttccaggttacattataaaaactgttgcaaccattgcgcttttcatctgcgcatttaatgcaaggatgacaccaaccgtgtctgccagaatcattgttgctacgttctattttagtgtatttggtgtgtttggcttgctaatttttaactattttaatgggtag

SEQ ID NO: 95376 - DNA, 663 bp, Enterobacter aerogenes
atgaaatcctctatattttcaaacttctttcggtcatccctgccagtcattcttctgactgcattcatgagccctgttagctttgccagcagttttgatgaaccagccaatgataaatttgagtctagcgatttacggggtttgaaccacttaactgacctgattaatgaacgaaacactacttctgagaaaatatctgagcacaatgtgcttaataaaagtcaggaggaactgaccaataaaatatccgtgcaactgaagcacaaacttgaacaagaaaaaatcgatcaactaatctcatcattgaacaaaaataactcatccagcgaagagttgaattctagcattcagcatctgatctctatacttgaaagccaaaaacaaagccatgatgcggtcatctctaaaaatagaactgacgagggcaatatttcaaaatcaacaaaaaacgacatgattgagttaatggtaaaagatttgggtgcagacgctcaaaagcaacaagtcgcgattgagaacaacgatcttcatagaacttcggcgttatacgattctcaatcaatggattatctcaggagccaatggcaagcgttattcttcacaatttgtgtggttgctctgcttgtttttatcgcatgcaagaacacgactcgcaaaaagtaa

SEQ ID NO: 95377 - DNA, 309 bp, Enterobacter aerogenes
atgggcaacttttattgggcaatttgccatcactgtgatggccacggtagcatggacaaccctgcattttcagatggttttaccaactctgaactttacgatattgagccagaggaacggcaaaggatcgttaacggtgcctatgatgtcctttgcactacctgtaaaggcagcgggaaagtgaaagttccaaatatccgcgagatgtctttcggcgaaaaaagagcattagtggaaagacggcgtgagcagcgtgaactcgatgagctgagccaaatggagaaaatggaacggatgatgggatgctga

SEQ ID NO: 95378 - DNA, 621 bp, Enterobacter aerogenes
atgtccgaccatgtgaagttttatgattactatattgtggaagggccagaggttcaggctctaattgagtccttcgagccgatttcacagaagcggtcagaattaattaaagaagccatgacactcgttgaagccgtaggctgggtcgactcccagagttttggtgataagggggataaaatacagtcattcgtctggaaagcagatcacaaattcccgtgcgaaatcacgatcaaaagacgaagctatatggataaggtaccggtgattgtagcccgggggaaaggaaatacatcggatgggcgggagttcaacaaaaaactcgatgtaattattaaaagtgttaataacaaactcggtcctttcccatgctggtcttcatacataattaatcattttggcatcatgcacagcgcccacggtggaccagtggccaatcgccctttcgctacagctatcctgacaacttacggtggtacaatctctggaaggcaggatgcattagctttcgccatacctaacaggaatgatgggtataataaaccagttatcatccccccaaacttcaagaaactaacttatggacagttttacgacataacacacccccatcttgtttag

SEQ ID NO: 95379 - DNA, 981 bp, Enterobacter aerogenes
atgagccatcaactcaccttcgccgatagtgaattcagcactaagcgccgtcagacccgaaaagagattttcctctcccgcatggagcagattctgccatggcaaaacatggtggaagtcatcgagccgttttatcccaaggcgggcaatggccgacggccctatccgctggagaccatgctgcgtattcactgcatgcagcattggtacaacctgagcgacggtgccatggaagatgccctgtacgaaatcgcctccatgcgcctgtttgcccgattatccctggatagcgccctgccggatcgcaccaccatcatgaatttccgccacctgctcgagcagcatcaactggcccgtcaattgttcaagaccatcaatcgctggctggccgaagcaggcgtcatgatgacccaaggcactttggtggatgccaccatcattgaggcacccagctctaccaagaacaaagagcagcaacgcgatccggagatgcatcagaccaagaaaggcaatcagtggcactttggcatgaaggcccacattggtgtcgatgccaagagtggcctgacccacagcctagtcaccaccgcggccaacgagcatgacctcaatcagctgggtaatctgcttcatggagaggagcaatttgtctcagccgatgccggctaccaaggagcgccacagcgcgaggagctggccgaggtggatgtggactggctgatcgccgagcgtcccggcaaggtaaaaaccttgaagcagcatccgcgcaagaacaaaacggccatcaacatcgaatacatgaaagccagcatccgtgccagggtggagcacccgtttcgcatcatcaagcggcagttcggcttcgtgaaagccagatacaaagggctgctgaaaaacgataaccaactggcgatgttattcaccctggccaacctgtttcgggtggaccaaatgatacgtcagtgggagagatctcagtaa

SEQ ID NO: 95380 - DNA, 1245 bp, Enterobacter aerogenes
atgtctcttctgaatctggatttaattgaagccatttactctgatgccgagcgtgaactcaccaatgatgagttatatagggaggtacagtctcgcctttcaatttcagataatgatttcaataaaaaagaaaaattcggtttggccggtgtgccgcataacaaaataaaacaccgtatccgttggttccaacagacgctaaaagctatgaacgtcattgagcgtataagctcaggccgttctctatggcgccactgtcggaaaaacaagtcagggctttccgaagtcagggaaggggcttgtttagtggcattcagtacagatctcggcgtagcgattttaggaaattcaacaatggtgttaccgggcaataccgagccggttcatctctgcctgacttcaccaccttatccgctcagaaagcagcgggattatgctgcagccttcaaaaacgactgtgactatattgatttcatcgtagaagccattcggccaattgcccaccagctggttgacggtggttctgtcgtgctgaatatcggacaggatatttttaatccggggcggccttctcgttccctctatcctgagcgcctgttactggccttgtgcgaaaagcttgacctctacctgatggaccgggtgccatgggttaatatgagcaaaccaccttctccgacatattgggcctgccgcaagaaaattcacctgctggccgggcatgaaatgattttctggctgaccaataatccagatgctgtccgctcctgtaaccaacgtgttttgcagccccacaccgagagccatagcgcgttgatttccagaggcggagagatgcgcaagacaatttacggtgacggcgctcatggcgtgaaaccaggggcctttgcgcaccacactaatggggctattcccaaaaatgtgatgatcagaggccatgcatgtgctgacactcgtcggtttcatcaggaggctaaacgcttagggcttcctgctcatggggcgatgttccctacggccatccccgattttttcatacggttcctgacggaggaaaacgagcttgttgttgatccttttgccggttctctcaagacaggcctggccgccgagcggctcaaccgcagatggatgtgttttgatagtattctggaatggttacgaatttcagccaccggctttttttctgacttcccgggatttgagatgaacccgattattgataacggtgagttgttcgcgtaa

SEQ ID NO: 95381 - DNA, 3381 bp, Enterobacter aerogenes
atgcctgacattatcccgcaccaacaacagccggaacgtcttcataaatttcactccctcaagggagggcaatactggcgcgcaaaaaacgatattcctgagcaatgtattgaacaggatgaagtgttgctgattgagtcgctccgctgggttgataatgcactccatactgtgatcctccgcacccatccgtcaaaatacggcaaagactttgttttcaaatttaccgatgctgctggccgtagctgccgcaccacgaaatcgtttaaagagcatcgatttctgtttaatgactttctggataaatttgaatttgcagatgatgggcaggatatccggagccaggaactgcttgcagctcaaaaccgggttagccagctgactcagcaaatgaccgaaaccatgtctgatcctgaagcactgcgtacggaactcctcggcagggttgaagcaaagaaagccagttcatcgacgccaggcgatgacaaaaagcaacttcctatggttatggagctgtcttcatcaactgagatagcgtctcttggcacagctctgtcatcaggtatcgatgaagccaaaatagcacagctccagcaggctgttgagttcagacatgaaatcgcacaggcgcaaatcgactggattaaagaaaagaataatgcgatttcgagagccgtcatggctattactccctatctggaagagtcggctgccgcccagcttgccattgccgaagaaagtcgcgaaacgctgaataaactgatggacggtataaagtcccttgacctctacatcgggaaagatgtggtggtgaacactatcagggagggtgaatcagcaccgccacacattcccttgacgttcgtacagcgtaagctggccgtcgatgaggaaacggctgtttttctcgatataggagaatggtttgattttgaaaagttgccactttttttccatgcattaaacaaccatccagggctggtggagcagatcttcccgtcacagcgctgcgtggtatgtatgaccactacccgtcgctatattgattatcaggaccgttgggctaactgggagctcaatgcaaaaaaccagacggtctttctgatggttagggacggcgaacggctgttccaggtttactctggagtagagtctcacctcggcgctcatacactttttccaaccaccgatgaacagggaaatatctttcgaggcattgacggttcgcaggttacgttcaatgacgtgtcatacactgacaagcttaaagcgcatgagatggttgctctgcattattaccggtttcttatcctgtgctgcgggctcgaccaccggcttaagctgtttggcgagttctacgaccctcaggaccgcttaagtttcgtctctatggcgttccaggagaagtattgtcgattcatttatgatcatgatggtactggccttctggacgatcctgatgcgaaagtgcgcccctctattgaggagtatataacccaggccaatagccatttgcgctcaggttcaagggtgttctgcgagtggagagctgtttgtacaccaaataccgcgccgggcgttgtgaaagtcgatactggtaccagttaccgatcctattattttaccgccgatttcatcaatgatgagggaatggcggtggcctttacccgcaacaatgagatttgcgtggaggttccggtcaaaaaagatatctaccgtcgcactcgggctaatgatgtacgtgaatttaatgcgaaagtatccctcacgaattttcagcgtgatccgtgggatgacgccagcagcgtgggattcctctgtctggacgctgtaaaagccgatgatcttgattattacatccacagccgctccagtcgtaggaattttatgtactacataaagctcttcaaacgcctttcagctgtcctgagaacggaagaagtgcaggagatgccctatcggcaaaagctcatcagagcgctggtggatggcaatataggcactaaagctaaccgtgctgaaatcgtcgacaagacagtcatcacctggcgggcggacaaaaaaggtcagccgcttagtgaaggaatagacaacgagaaaagctggaaagcattacttggcatgatggacctgatcgcctggcgcggtttgagccataaagaggctgcagtggagatggctatctcccggggtagcaaaccgttacgtcttatagtcacgacaaatgccagactggctctgtatgttacccctacagccgaggaacgtgacgatcgcgtggaaaaacataagtgggccatgctgctgacctttaaaatgtcagcaaaagggctgactcttgattccagcaaacctgcgttgctaagcaaaaatagtgtttgcgaaacaaccctctatgaatggccggaggccaatgagtggaaagggttgaaatcagtgttctccagctttcacgaaaagcaaagagcgtttgaatatattgagacaggcaaagaggacctccgaaaactgtctccggctaacccctcagaattcgaggctggggtacgtgaatggatgacggcctactgcgaaatgaatgattaccgcaaaaccgggggccaggtgcagcagccgagattgatgataccggtaggcatctacattaaccggggagactggcagtatatctacgtcacaacagaaagtgaggccgctgggtatttttatcacaacagcagcgaacgcctgaaaaaggaactttatcaggaatatgtttcacgctttgctcacccggaaggaaagctcgaaaggcttgaaactcgggggaacaggctggcattgggcatgacgaacagaactcccgacatcggcatgttctgtgcagatcgcaatgttgaaatggatagcgtgaattatggacctttatcttacagcgcctacagtcagcttcagcgaattgaaaaccgattgttttttgtcctcgctgaagcggaacgtgggttacatcgcaggatttatattgccgataaccttaaaagcgataatggtgagtttatcatagataaactccttggttcttcacatctacaggtgcagtctgccgttgatgtattcgaagtcattctacctaagtcgttgtcagaagggccgctgccggtaatcaaatcgagtggtgaaatctaccgtattcaccactggtttgatatctgtccaaaaggcgctgaggctaatatttcattgagcaatatcgaggcaccagtaaataaggttaccagacacagtttcgatagcagggaggcggcaatcatgcatatcctgatgcagaaggaaaccgttaagaaaagtgtctccggagacagatccaacacgccagaaggcgttgtcgaaaggtggtattag

SEQ ID NO: 95382 - DNA, 354 bp, Enterobacter aerogenes
atgtttagctcgttctttgttttgaccagtattgttgtttggattatgccggtgatgactatcgctggcgcaattttccgtaaggacctgttaacccgaaaagaatggatttttctcgtattctttagcattgtcggtgcatcctacgtttcttattccagctggcaggacaggaacataggcctggtgccaatagggaaagaatatttatcttgccagttaaaatcgcgtaatgaacccgaccccgaaactttcaggactgtgacccttgattgtggcggagaagaaaaaatggctaaagaggaattgtatgatgcagctgtaaaagccgccataaaatacggttacgagtaa

SEQ ID NO: 95383 - DNA, 792 bp, Enterobacter aerogenes
atgaatgcttttaataatctgtttaaccgtcactgtcaaaacactctgctggctcgcggatggcctgccgatatggaactgaactattcattagcttactgccagggagatggtgtggcattttacggcgtgctgcatgacaaagaaatattgtccttactggctggtctggtgaaatataatcatatcactacaaaactggcagaagaggttgccgaattaatcaaagacagcgaaacaaaactcatccttgaacgcaacggttttgggtaccgatattctcatgcaaataccatccgagtcctgttagaaaattacccggaagatatcggatatgaagatcgcttttatgacgttctggatagtatccaggggagcattgaggagatatgtagcacgcttgaaaatgacggttataaaatccatgaaaatatgagcccttcctatgcaggcgaccttgttatgtcacgtgccacagctaatttcgaaatcattgtaaccgaaagcgaagaggaattttgggacacatcagatgcatgggatgatgaatgtaaagatttatacatagctgatcttcttaccgggagatatgaactgaagaatcttgaaataatcgtgaggggaaaaacgacaggaaaggtatacggacaacattacgccgaactggtttcaattaacaaaaatagtccggtgcgacgttggtttgaccgcgaatggttaaggttagcatttgaggaagcgcgggtaaaaattaaagatagccgtaaggaacttacaaacataaggttatag

SEQ ID NO: 95384 - DNA, 1089 bp, Enterobacter aerogenes
atgactgtgaacaagaaaacggaaaaaattaacaatgaaatcaaagaacaagccgcattctcattcaatgtcgtagggggtacgggtaaagttactaactttacccctggtaacaatggtaccgttcaacctgttgctttgttgaggcttggggtatttgtcccggcccctccgggcgtagcaaagaaaaacctcccagagggtttggttacgatggatgtgtcccgcgatttacagcatatgcagatcgcatccagtgaaggctacaaagaaatatcgctatccagccctcgtcttgatatggggacagatttccgtgtatggcttggtatagtccgttcattacatgaccacggccattactcaggaaggattaagcttccttttagcaccttccttaaaaattgtgggtttgacccctcgaggtcgaataagcccatgaaacaacgtatcgatgcttcgatgattaaactgaaaatggtcacttttcagttccgcaatgaagattcaaccctcacgaccggcctcattaactgggcacggtacaacataaaaaccaatgagattgagatagagggagatccccggattcaggagctctatcagattgactataaggtttatcttcgccttaaggctcttgataatctgcaaaggaaagagtccgcccaggccttgtatacctacctcgccagcctacctaaagaccctgcaccaatctcaatgaaacgctttcgcgaccgtttacggctaacgtccccagtagcctctcagaacatgatcattcgccgttcgttgaaggagcttgagcaaatcggttacttgcaatacagagaagagaagattggtcggtcaataaagttccacatacttaaacgaagtccctcgctggatgccaaaaagaccatcctggtcccggctgcacataacccagctgatgacgatgcactgatacataaacttaaaatgctgaaggctgcaggttactcagaaactgagattgctggcgttctggatgccctcgataagttgcagagggaaggaaaaccggaatccgaagtcgaagatgccgattttgaggagctttaa

SEQ ID NO: 95385 - DNA, 795 bp, Enterobacter aerogenes
atgaatattgatttatcggggaaagtcgcgctggtgacggcatccacggccggcatcggttatgccattgccaaagggctggcggccagcggcgcggaagtgattatcaacggccgcagcgaacatagcgttaatgcggcgatggcgcggctgcaacaggaggtgccgggattccggccctatcccgcggtggccgatctcagtgacgccgcgggcgtcagccaactgctgcaggcggtgaatgaagtcgatatcctggtgaataacgccggtatttacggcccgcaggatttttacgccaccgatgacgccacctgggaaaactactggcaaaccaacgtgatgtccggcgttcgcctgtcacgcgcgctgttgcccgccatggtgcgtaaaggctggggtcgggtggtctttatctcctccgaatcggcacgcaatattcccgccgacatgatccactacggcgtaaccaaaaccgcgcaactgtcgctggcgcgcggactggcgaaatacgtcgccggcagcggcgtcaccgtaaacagcgtgctgcccggcccaaccctttctgacggttttgccgaaatgatgaaagatgaggtcacgcgaaccggtaagccgctggaacaactggcgaaagagtttgttatggcgcagcgccccgcttcagttattcagcgcgcggcctcggtggatgaggtggccaatatggtggtctacgtctgttcgccgcaggcatccgccacctccggcgccgcgctacgggtcgatggcggcgtagtcgatgatattgtctga

SEQ ID NO: 95386 - DNA, 579 bp, Enterobacter aerogenes
atgtggcatgacaacgagacaactgtcgattatttaaattttggtgttgttgctgatgcatgtgcaagcctgctgaagcaggctaatggggaacctatttctataggcgtctcaggtggctggggagcaggtaaatcttctctggtgaaaatgattgcatcacgcttggaaggcccttcatcagaagagtcgtgtagggaggaaaacaatctagaaaagcattcatttgtcgtgctcacttttaatccatggctttaccaagattttgagtccgccaggagtgcattgttacaaattgtgggagacgagattgttcggcttactgatgaaaataaaactatcgccgacaaagtatctgaactgtggcgaaggataaatcttctccgagtcgctcaattaagtggtgaagctgcattgactttaactactggcattcctatcggttctcttggaaaaaccgttagtaaattggctggttggtttacgtcggatgacaaatcgagcaatgaatcatcagatacagatagtctcgagctaagtgctgatgaatcccctaatgattttggtaaaaatcattaa

SEQ ID NO: 95387 - DNA, 279 bp, Enterobacter aerogenes
atgaaacctgaagttcgtgaagctccgattagtatccgagccaaaaaatcacagcgtgacctgatcgacatggccgcaagcctggtctcaaaatcactgactgattttatgcttgaggtcgcctgcagggaagcacaggacattctgcttgatcaacgcctgtttctcctcaatcacaaccagtttaaggcgtttatagaggagcttgacgccccaataacgccggagcgcaagacgcgaatcgataacctgatgaaccgcaaatcacaatgggaatga

SEQ ID NO: 95388 - DNA, 213 bp, Enterobacter aerogenes
gtgaacatcgaagcgaagcagtttcttaccggcagcggcagaagagtactgacaaatgagggcagacagggtatgggtggagttgctggtgtaggctcttcaaccgagaaaatgctgggctacgtcgctgaagctgtttttgaaaactgcggccaactggataaccaacagctcgatgaaattatcagctggatacaactttataagtcctga

SEQ ID NO: 95389 - DNA, 243 bp, Enterobacter aerogenes
atggccgcgaccgcgtcttcaatgccgatgcgctttttgccaaatgcgatcggttttttccagacgaaatttccgggtatcccccgtcgcttccggccggaattaccgtgcaaatcgacaagtcaggaagccgttttgatacagaaaaattgggtgtatagccactttagcttcaagttaatgtatgcgtacattagcattaagcttatggtatttacccttctctcttcccgggtgccttaa

SEQ ID NO: 95390 - DNA, 519 bp, Enterobacter aerogenes
atgagcaccggcagcggatccgtttacccgccagcgttgaggatgagcaccggcagcggccccgcttacccgccagcgttgaggatgagcaccggcagcggcccactttccccgccagcgttgaggatagccaccgacagcggccacgcttacccgccagcgttgaggatagccaccgtcagcggccccgtatgcccgccagcgttgaggatgatcaccggcaacggccccgtttacccgccagcgttgaggatagccaccgtcagcggccccgcttacccgccagcgttgaggatagctaccgtcagcggccacgcttacccgccagcgttgaggatgagcaccggcaacggccacgtttacccgccagcgttgaggataagcaccgtcagcggccccgcttacccgccagcgttgaggatagctaccgtcagcggccccgcttacccgccagcgttgaggataaggggtctgacgctcagtggaacgaaaactcacgttaagggattttggtcatga

SEQ ID NO: 95391 - DNA, 558 bp, Enterobacter aerogenes; identical to SEQ ID NO: 25303

SEQ ID NO: 95392 - DNA, 333 bp, Enterobacter aerogenes
atgctcacggcgggtattttccctctgaccgtattctgcaagaacggtgatatcacgaatcccgagctgtctggcggtaaaatgccggacgccggaaggaatatgattcatgtcagtaagaaaagtgcccagaaaacgcacacacccgatttgcagggcaataccaagtcgattgtgatcaccccggcttttcccgataaattctttatccgcttcatcaagatgaaaataacgcgccagctgaagttcatcgggttcgccagtgaacctgccataactctcaacctgctcagtggtcaaaaaatcaacgggcatatcggcctccctgcctga

SEQ ID NO: 95393 - DNA, 1809 bp, Enterobacter aerogenes
gtgggtaaaaacggctgcggtaaatctacgttgctttcgcttttgaaaaacgagataagcgccgacggcggctccatggccttcccgagcaactggcagctggcgtgggttaatcaggaaacgccggccctgccgcaaccggctattgattatgttattgatggcgatcgcgagttccgcaagctggaagccgatttacagcaggccaatgagcgtgacgacggccacgccatcgctaccgtccacggtaagctggatgccattgacgcctggacgattcgttcccgcgccgccagcctgctacacggccttggtttcagtaacgagcagcttgagcgctcggtcagtgatttctccggcggctggcgtatgcgcttaaacctcgcgcaggcgctgatctgccgttccgacctgctgctgctcgacgaaccgaccaaccacctcgatcttgatgcggtgatctggctggaaaaatggctgaaaggctataccggtacgctgatcctgatttcccacgatcgtgatttcctcgatccgatcgtcgataaaattattcatatcgaacagcaaacgatgttcgaatacaccggtaactacagctcgtttgaaatccagcgcgcgacccgtctgtcgcaacagcaggccatgtatgaaagccagcagcagcgcgtagcccacttgcagagctatatcgaccgcttccgcgccaaggccaccaaagcgaagcaggcgcagagccgtatcaaaatgcttgagcgcatggagcttatcgctccggcgcacgtcgataacccgttccacttcagcttccgcgcgccggaaagcctgccgaacccgttactcaagatggaaaaagtcagcgccggctacggcgaacggattattctcgactccatcaagctgaacctggtgcccggttcgcgtatcggtctgctggggcgcaacggcgccggtaaatcaacgctgattaagctactggccggtgaattacagccgctgtccggtgaaattggcctggcgaaagggattaagctcggttacttcgcccagcatcagctcgaattcctgcgcgccgatgagtcgccgatacagcatctggcccgcctggcgccgcaggagctggaacaaaaactgcgcgactacctcggcggctttggattccagggggataaagtcagcgaagagacccgccgtttctccggcggtgaaaaagcgcgcctggtgctggcgttaatcgtctggcagcgccctaacctactgctgctcgatgaaccgaccaaccaccttgatcttgatatgcgtcaggccttaaccgaagcgctgatcgacttcgaaggggcgctggtcgtggtctcgcacgatcgtcacctgatccgctccaccactgacgatctgtacctcgtacacgacggtaaagttgaaccgtttgatggcgatctggaagattatcagcagtggctgagtgattcgcagaagcaggaaaaccaggcctctgaagcgccgaaggataacggcaatagcgcgcaggcgcgtaaggatcaaaaacgccgcgaagccgaactgcgcacgcaaacgcaaccgctgcgtaaagagatcgcccggctggaaaaagagatggataaactcaacgcgcagctggcgcaggcggaagagaaactgggcgacagcgagttatatgacgcctcgcgcaaagcggaattaaccgcgtgcctgcagcagcaggcgagcgccaaatcagggctcgaagagtgtgaaatggcgtggctggacgcgcaggaacagctggagcggatgctgcaggaaggttaa

SEQ ID NO: 95394 - DNA, 315 bp, Enterobacter aerogenes
atgaatgtccataagagttatcaaactatcacccactaccattttgattggttgaccccagctggcgactaccccaagtctgctattatggtagttgaatgcaaggatggccgttggatgatagttcaggagtttggggaagattacggctgcttcgaaggtgtgctgaagaatgaatgcgatcttatcactaagcctactttttatcccgacttgcgaagtgcagctatgtccggttttggtatgatgaagcaattatacccactgtacgatgataatctctttaatgaattcctctcagaaattccggaatag

SEQ ID NO: 95395 - DNA, 510 bp, Enterobacter aerogenes
atggccaatatccttatgcccgattgtcttgtgaagttaaacaatctcttacaggctattgagaatgcacccgttgagtgcgatggtcatacattaatgataagcagtgctctaaatcatgcaggcatttctcatcaacgaatgtgcggggtagttaaaaaccccaaaacgtattttgagttatatccacatttctggattgagataggtgaattcactctggattaccgactcaggatatgggttgagttatattcaggtggaaaactatcagagggtgccgctcacggcatatttgatgcgcgtgggcttgagtatctttacacttctggaagcatttgcccaccacctgccctggactttaatttattaaacttaatcagtgatggttattacgaaaaaattaactttaccgagctaacaacactggcacattctgtagatattagtttaatcagtgatgttaagaatgttacaaacaccggggttgcagagtacaatgataattaa

SEQ ID NO: 95396 - DNA, 480 bp, Enterobacter aerogenes
atgttaagaatgttacaaacaccggggttgcagagtacaatgataattaatcaaaaaatattagaagctgatattacaaatataatcaatacatttgaaaggctaatggatgaaagtaataaaagtattataccagtaaaatccagacatgttgatggcttggccttgttcgaaaacatgtatatacgtgcacgtagcaaacatgcatctttgctgggtaaacctgttctggttgtttcatcagtttctgtatttatcactaatcaaggctgcttcagtacacttctttctcacttaaaagcccattgtaagaacaagagttacctgttaaaaattgagagcgtaatctctcaggaactcaggagatatcttgccagtcaaatgttcgtattcattggagaagaatgggagtgcgggtctggttattgggtgcctgaagatgatccagtatacccatctttaaatacactaccttattga

SEQ ID NO: 95397 - DNA, 657 bp, Enterobacter aerogenes
atgtcgactattcatctcattacaacatgcgcgaaaaagaaagcaggacctgtacatgacactgtgtttccctaccatacgacagatactgagattgcctatcagcaatggaaaagtcttgtgcagtcccgattcactacatgtaatgatgatattaaggaaacggaaaacatatactgtagtgctcactggagtacagctaagtctattgcaaactctaattctcatatctgtttatgggttatttctgcaggtctgggcctacgacacagttctgaccccgcgatcccttatgatgctacgtttacaaagataggaagaaagagcgccagcatatggggtatgctgacttctgaccccatactgcctggaaaagtcccttcccttgcggaactgtttagtatgtaccggcatgatatctttatcattgcggcctctcccgtttacctgaacgctgttgaggacgatctcgttaaaggagtggcttatcttccctgtccgataaagcagcttaaaatcgcttccagcgctgcctacaatggaagattaagagaatatgtgcgatgcggcggaaccagaatgatgaaagaccttaatgcaaacatgacgactctaaacattaaacatgctggcatgctgattcatgagctggagtaa

SEQ ID NO: 95398 - DNA, 603 bp, Enterobacter aerogenes
atggcaggggcattgttttcactttctgctggtggggtgatgtttgcaacagctgttgttattatcatctttagtgctatgctatatgacagtatagttaaaagacgttctaaaaatattaacccaccagagtttacaggatcacctcaactagcatcttgcaattgttcaggtggtactgtcctgctttatcttgattttgatggagtcctccatcgaaggatgaatgagacatttgaaagaatgcctctactggaaaaaattttaaaacaatgtccagaattacatatagtcgtgtccagcagttggagggaaacaatgactttagaagggcttaaatacctttttccggtagcattcagacacagaataataggtgttacaccttcacttcaggaagtaaaggataccgaatatgttcggtacagagagtgccttttacatgccagacatatgggggtcaacaagtttattatcattgatgatgaatcacaccgttttccacctgggtgcgaaaatctggtgtcaacgaattacagtgaggggatgactgaccaaacagtagcatctgtcattatgaaatattgtcagtacttaacatga

SEQ ID NO: 95399 - DNA, 516 bp, Enterobacter aerogenes
atgttcgaacataacattgcttttaacggcatgatgattgtgattgttatcttatcttatctgctatttaaaagtcttaagtcaaagaaaaggcttcagcataagtatgatgaggtgtttaaggcttttcatattgcgaattcagagtacaccggcggcctaaaagaagtttacaaaaacttatctttaagcaatgctcagttgcagttccttgctgtttacttaaatcaagacactgtccagtttgatggcagaaatattgtgtgcgaaaaagaggatgatgttcagtatattctttcacttatatcagacagccatttttggttggacaaatccatgaaaggaataaatgaagtggtaaataatacggacgtaataaaagatattaaattatctctatcaccgttcgcttcgttgggtgagctgaatgttatagatgatgagtttaaactgaaaaataaagagtttgatgggtttgctaaacttaaagttaagtatgatgtaaaaagggggtga

SEQ ID NO: 95400 - DNA, 957 bp, Enterobacter aerogenes
atgaacaccaatgtacatcatgtccaagaaaatttttatatatcattgcaggattgtataaataaagaagagaaaacaaaaaaaacatgcattgagtactggcgacgtgaagctgagagggcgaaggaagaaagcgcaagacgtagagcactgtctataaagataattaccgaaaaaagcatgattcttgaaacgttatttctaaatatacaaaaaacaaatgcgctcaaagaacagtatgaaagaaacctgatagctaaatggggtggcgttattgatgacgataagacaaaggattatggtatattcctccctagtttggaacatttatctgcttatgtatcatgtgcaaagaacgatgaatatagcagggaagtgctttataacagacccgaattatcaaggggtatcaagtatgacaatagttattactgcccgcaggaaaaaaaattcatctatatgaggaatgacaaatttcgtccagatcttgaacttctgacaaatcctccttatcctgatttttgtaagaatttactttacttttatgtcaggtcattttcgctgcatctcaaaaaaggagagcctgggaaaccattggagataggtattcgcaattcagtgagcaaaaacacttatgaagacttgtgtataggtctggaaatacttatgccatacatgtgcaaaactgaaagcggcaaagtgattattaatgatgaaggatacttatcatgtgatagctattatagaagcatactggttaacccgaaaacagggggtgctgagttagttatatacagaaaggggcgctttgaccatcgacagaaaccgaatacacgagaacctcgtaagtggttgaatgaagatataataattaaagaatttcctaacatacgaattgtttttctatatatcatatcgtgtcggtatcagcagcacttcaaaaacagggatatatag

SEQ ID NO: 95401 - DNA, 957 bp, Enterobacter aerogenes
atggaaaataaacaaagcactaaaaaacaaactctgattcacatcgccttggtagtaggtggttttgttgctggttcggtaatttgggggaatggcagtaatattatgaactcaaatgactcggctaatgagtctgtcaaaaaacagcaaatcgaactggcaaatagattcaatgcattagctcaaacagcgaaccaggtaaataagccagccggtttagtcctgactgagcaggacaaggaacttattggaaaaactgcggcacagtatttgatcgaacatccagagaacctggtggaagctggtaagcgccttgaagccaaccgagatggtgaaaaaacctcagacgttgtgaatacaaaagacgtattgcttgaaacaaaattcacgccaaactacggcccagataacgcagatgtagctgttattgaatttttcgattacatgtgtcatttctgtcagcagtccagtcccgtgcttgaaaaggcgattgcagaaaataaaaatgttcggactttctttaaagacttcaccatttttgctgaccgcacacctatctccgggatgggggcaaaaattggtctctacatctttaataagtacgggcaggaaaaatactacgagttccataataagctcatgagtgaagcgggtagggcaatgaaggacaggaaggactatacaccttctaatctggcggccctggtcaatggtttaggatataaagaaatactggatcagcaaggtaacttcttgcttactgtcgaaatgcgcgatcagcttcagaatgttcttgatgcaaatatgatgctggcggataaactcaattatagcggcacgccagtgtttattgttatgaacatgaagaacccgcaaaacaaaaccacaaccattatgcccggtgcgcctgatttttatcgcttgcaacaggcaattgataaggcaaaagggaactaa

SEQ ID NO: 95402 - DNA, 342 bp, Enterobacter aerogenes
atgggattaatcagaacagtggtatacgtgggtatcattggaggcatctttgcctatacacaaacaaaagatagccttgaaaatatttcggttccggatgcggagtttccatcgtcaatctccaggaataactttatacaatcgacatgggtgaacgagcattacacttcactgaagaatggcccgattgctgacggtatatccagtattctggatgatgctcaggatatcagggggtctgtcaataatgttgtcatgacggccggtaatgtcgatatccagaaggctattcaggatgcagtggatgaactagacagcaatagccgtaaatccagtaagtaa

SEQ ID NO: 95403 - DNA, 312 bp, Enterobacter aerogenes
atgaagaaattaattgcagtggcagcggtagtggttgtttcatttgccgcccaatccagcgtttgcgggccagttgcgtgcaaagttactttcgtcgatgtcgacggctcgcaaaagccgatcatgcttctcgatgacaaagtttcaacgcggaagagctcaatgaaccgtgtatttgatgatgtgtactcgcacggccgtaaggtccagactgacctgaaatcaaccactccagctgccgggcatcctgataaatcatcacccgtgcaaatgagcagggaattaagtcctgtggtcatctacagcgcataa

SEQ ID NO: 95404 - DNA, 729 bp, Enterobacter aerogenes
atgattaaacccattgcagttgctctgatattgttaactccatcggcctatgctgatgttgatttacctgcagaattaaaggacaaaattgaagccgttggtatcaaccccgtctctgcagagaaatctccggtaagtggtatttactcagtcttttcaaaagaagggacgagttacgtcacgtctgacggtgaatacatcttcaccggaaatttattcaaagtgaaagggacagaagtggaaaacaccacggacgagtttatcagtaaagggatgcgatcctatattgagaagctcgatactatcacctacaaagcaccagatgagaaatatgtcatcggtgtttttactgatatcacctgtggcttttgccagaaactacatagcgacctgcaatcctatctggataaaggcatcactattaaattcatcgcatacccacgtgccgggatgaactccatgatagcccgaaacatggcatctgtctggtgtgcagatgacaaacctgcagctttaaccagagcaatgaaaggggatggtttacctgaaaagcaaccgacaaaggcctgcatggactccattcagagccaatttaatgcagggaacatgttcaaactctcaggcacgcctagcggtttaagcctgaaaggtgagccgatggtatttgcggggttacgtgaccctgaccagatgctgaacagcctgaaaacggccaatcagaaaaaataa

SEQ ID NO: 95405 - DNA, 615 bp, Enterobacter aerogenes
atgactagattattttttggagcggtgctgttcgccactttaaccgtcaatgcaaatgcagcattcaatcccccaccggatcgacctaagccccaaaatgtacccgaaacggttaaaaacgaatgtttaactgacgccgcgcgtttcttcgggattgaccgtgaccttgtctttactctttttgataacgaaggtggaaagattggctctttcgtccttaacaccaatggcacatgggatattggcccaatgcagattaactcatcaaatctggctgaggtgaaatcccacttccccgcaattacctggcgtgagctcgcttatgacgcctgtgcttctttttgggttgggacatggtggctgcaccggaaaattattgaccgtaaagggaacgtgtttgaaggtattgctgactacaacagtaaaacgcctcgcgtaagagccaactatattttcaaatttatggaacgttataaccggcgtctgcagcgtaacggcaaaatgatgcagctcaatgcatggaccggtcttgatcgtgtaaagcagaatcctcccgaggtaacaggtaagctcgctaacaactctcatcagcaatcctggcaatcctatagataa

SEQ ID NO: 95406 - DNA, 3342 bp, Enterobacter aerogenes
gtgaatgaatcatcaataaaaaccgaaaatgtgttcctcttctggagagccattgaagccttaacccctcaggatattgataaggaaaatgcccgcgacaaactcaacccggtttacaaagtaggcgcaggaaccatgcttccctgggatgacccggaacatacccgtaaggatattgcgcctggcaaagtgtggcgctactccgctcaggcgggggtttatcatcttagcgagatttccaaaatgctggaggataaaatcggtgcccatgaagcggtacctgaagaacgtaaatcagggaaatgcaggctttttgatattggtttcaatgaagaaggcatcccccagccagccacgttcatgttatccctgtcagcatggtcggcggctcagatactcaggcatgatcgcggcgtttttgctcttcatgctcccctttgctccgatgtgtccgacctgcccgcaccaaacgacagcctcccgctggtggatagcggtttttacgattttgataatctgacccttcatctcatgcagtgggtggacaatgaggcttatcgattacaggaggagggacagaaggccgatacaggatggttgaagacgcttgagaaactggtcatcgcaaaactgtatttcccggaagaagccatggatacgacgatcgtcagtgtggttaagtgttccctgaccaggaaggcgaaagttatccaggaagacagtgcaaagaaagacaataaaaagaaagaagcggtgcccgatgacctcattaacagttttttcattcaggaactgcgaaagctcgacgcggagtggaggcaaggagggggtggggccggttttaaagactttatcatggcgataacccgggataaccaacagcgcctcgatatacgcactgaagaaggcctggattttgcttttgagaaactgttgcccacacagccaccagctggctcctggccttcaaagtacccgctggcattcagccagcagctggccgtcaatgaaatctggaccagaaatcacactgaaccgggtatttttgctgtaaatggtcctccgggaacggggaagacaacactcctgcgtgatgtggtggccgcagtcgtcaccgatcgggcgagtaaactggttaaactcggagactctgcatttaaagccaaagacagcctcaaatacaatgacaggctgataccctattattcgcttcacccgtccctggcggggagtgccatcgtgattgcatcgtccaataacggagccgtggagaatatctcacttgagctccccgggatggaagcggtaccggaggatgtgtcagatcgcagcgattactttggcgggctggctaccgtaatacttaacaggcctgcctggggacttctggcggcaagactgggcaataaaagtaacagagagcagttcgttaacacactgtggtggggaaatctgcagaaaagtgaaaaaggcgatgaagcacctccggagaagttttcacccgaacgtggggaggggctgaaataccatctgaatttactgcgaccgccccggaaagtcagagagcctgcactgacctggactgaggctgtcacacgttttgaacaggcacaggcggtggaggaagccgagcgtcagcaactggtcaccagttcagggctaacgcataaaattgagtggctcgaagaacaacgaagagtgtgggaagaaaggaagcaaaccgcaacgcttcagattgaggaatgccggaacgcgctacagacgctctctgacagactcgccgctatggaaatgaccctgaccctgtccagtggagatcgggacgaactcgatcagcgcatccaccagcatgaaaaaaataaacccggccttctggctaatctcttttcgctggggaggatatcgaaggcatggtgggatcgttatcaacggctgacagacgaatcagattctttgcggacgacgttgactcagcaacggcaggaactgcagctggcgcaatcagaaaaacataatgcagacaatgaactcaggagccttgagcgtgagctcactcaggtgatcagcaacggtcaggcggtctgtaaagagcaggaacagaataataccttgctgaagcaggctatatccgatctgggagcctcctggccggagcggactgcaacagatgaacgaagggagttgtcagcaccatggcttcatgagcgctggagaaaggcgagggaagatgtgtttatcgcagcattagacgttcaccgggcgtttattgaaaataatcctgtaaaaatggccgctaatatagggcttgcaatggactggttaaaagggcgaaaactgaccgaaaaacaggcgggtctggctctcgactccttatctctggtcgtcccggttatatcaagcacctttgcgtccatgccccggatgttcagggatacaggtcaggaagcgataggctggttgctgattgatgaagccggacaggcacaacctcagcatgcgattggggctatctggagagcaaaacgcacggttctggtaggtgacccaaaacaactggagccggtcagcggtattccgtccactgtagagggggcgctgggaaaacattataagatcccgtcctgctggtggcccggaaaagtctcagcacagatactggcagaccagacgatggacgttggcacctatctacccgacccggagtcagaacagatttgggtgggctgtccgttacgggttcaccggcgctgtgatgacccaatgttcagtatcagtaaccatattgcctatgacgggctcatggtccacgggaaaaagccgggcctggtggatttccctgaaagcggatggctggatgtgaaagggaggacatgcgagggaaactgggtagtggaggaaggggcggcagtggaaaagttacttttggcgttgcgtcaccagtattcactgacacctgacgacgtgtttctgatctcgccattcaaggactgcgctaagcagcttaaccggatcgcaaagaggctgggattcaggatggacagaacggggaccgtacataaaacacagggcaaggaagctactgtggttatcctcgtgctgggaggcaacataaaaagtcagggggcgaaagcctgggcggcggaaaaacccaatcttctgaacgtcgcggtaagcagggcgaaacaacgcatttatgtcatcggcgagcgtgcattatgggagaagcaaccttacttttccacgctgtcccgggcactgggaaggctggatgtgccggtgagcaacagcaacccgcgtgcgatgtcatatatggaagagtacttaaccactgaatggcgctga

SEQ ID NO: 95407 - DNA, 288 bp, Enterobacter aerogenes
atgatggacgaactgtttggttttgaacttgccgactttagagagctcttctatgtcttttgcctgggtgtgcttgtctaccgctactgcactgtcgggcacaaatacccgcttttcagttgccgtaagaaagagcctgatacggctgaaagggttgaaaccggggaatcccgtgaaacggattatgataatgagtttcctggctacagacaatcagatatcaatgacccccgttcaactgaatattatttttttgaacaagaaattaatgaaagacatcaccactaa

SEQ ID NO: 95408 - DNA, 3915 bp, Enterobacter aerogenes
atgagtaattacactatttataccattggtgatatcgattttgtttatacggcttttaacgggatcgcgctgattttttcctctcatggttccaatgaatggctcagatttgctgcctatgcagcagcaattggactcttctataaatcaatgaaatgggttcttgctcccacaaaaaatgatgtcccgatcttctcctggatcatggggctattgttctattccatcgcggtcattaaagccgatgtcacactggaatcggttaaaacgggggaagtcaggaacatagacgatgttccgttatttatcgcgtcaaccggtgaactgactaccggattactgcacgggctcattacggactggcgagcagcgtttgacccgcttacgccggtgggccaggtcactgacacgctcgatgacagcctgacgctgggtccaatgaccaaaatggtcaaatatatggagtggggtggggaatccagtggattctgtcaggctttcccgaatacgatgagcgggagcgaaaaacctgtcacctttgatgtctgcagaatcatccagtctattgcacgcgattgtattaaaacgacccaagactcagaggtcaatacaccactcagaggggtggcgttgaatgaaatctatgccacagatcttgcgtcagtaatgaacgtgatggattcaatgacggccaacagcctgaagacggccagcgtccccatggtgacatctacaggtttgcagtatgcgtcgtgtacagatgcctgggcggcggttaaagccgcattcgactcgcctcagggcgcgtcaattatgcgtaatttgggtcagatgaatcagtttgtagcaccgcagcaggaggatagcggccaacaaaccgattttatcggaggtgcagccaccacgctttttggaagtgccggtcaggctcacaatatcacgactgctgcatttgtcctcaaccaaatagataaaggtgtgttgcagtatcgtaaatcgttgggtatagcggctgactaccagcttttcgaagcgagcatgaaacgtaccaacgccatggtcagtcaggggcaactctggctgaacatctcaggcgctgcaatatcgtttctggaaatgttcagctacatggttgccccctttgctctgattgcgatcctcttcctgggaggtgaaggcataacttcagctgcaaaataccttcaactgatagtcttcgttaacatgtggccgataacggcggtcatggtcaacgcatacgtaaaaatggtgttaaatcagcagtttgacacatggtcatcactgggtgtacagaccactatgaactgggcgaatatggggagtattcaggagacgtacggcagttacctgtcagtagcttcagcgctgtattgcatggtaccgatgctgacgctgttcctgttgaccaccagcatccacccgatgatgggggcgttgaaaaatgtgacgccggatgctcctgccaatactggtcatgtcacaccagaagtgtggtcggcgggtaatgcgggtaaacagtcctttggtgaccagacacacacagcagccactgcaaccggtggaggtatgtcatctggcgggcttctggattctccgaccaggatgatgccaacgcttgggttggggtcatcgttaagtgataccgttaacgcagcagggcagcactcgatagggaccgaccgattatcgacactcagctccagtgaggcatttaatgaaacctggaccagaggaatgcaaggcagtcggacacaaactgcgggtacgacaaaccagggaagtatgagggctatggaagatttcgtgaccgggcttaccggtaacatttctaaagatgtaggaatatcagcagatgctcttaaatcaaacgttttctctgctgtactcggtgcgaatggtgatcttggaatgaaatttggtgggggtaaaggtgggggcaagcctgcgcttggggacgttatgggggcgtttgttgcaaatttaagcgctcgtttacagaacaactctcaactttcggacggggcaaaaaaaggtctcctggatagcctctctaatatgtccaaaaccggaagcggtttttcaaaggacatatcaaagatagcgtcaaatggtatagagaataacttctccgattctgacagctaccagaaaatggcccagaggatgcagcaacatgcccaggctgtcactaataaagagagtaatgcattcagtaagacaggtgggcaggcttcccagctttcaatgagtagcaacctcaacatcgacggggctaaactatcagacaccctgagtaaaccagcaaccgcacaatctgtaggtgactgggcacaggcctcgggattatcccgtgaagctacagttggcaaatgggaggcgatgaaagcgacattaaacagcagtaacacgctgggagaccagagaaacggtaatgatgcctttgttaaaatgatgtttaacgaagcagagaaactgactcatatggatgcaggggagacggttgcacataatctgggcgatatccagaaaacatcccagatgctcaaaaatgcagtcagtatcatgggggccaatgccggtatgattgcgcccgcgacggaaaaactggatcagtttgtcgcactgggctccggtggaaactatgccagcggacatgaacagcagcaaatcgcacctgacacgtccgcagtgcctactgccggacaggtttctggtaatgttgcgaatcagcaagggacggtaactggtggactcgctcagcgggagcaggctgcgcaagcacaaccaacaacacaagttggcggcatgacagctaacaaacttaatgaagaagaagccagaggaaatgtagctaatacctacggggctaatatcagaaatgtccatacagacaatgatactaaaaaccttaaagccgtcgatgattcgctgccaatgggaaatacagcagagaccattaacaaggcgaaacaaacggcagatacagatgcagctattcccaaggcagtttcaaaaattcaaagcatagctcttggcgatcctgaaaccagcgatatcaatgccccgactcagcaagcaatgagggacatgcaatcgcatgatatgccgagaagtgctgagagtttccgcccgtccgggaataaagaaaaagatgcgaaagacgccttaagccagtcggcgttacacgcggaagttgcccgcaatcagaccggagaggccagagaaaacagtcttaaagaagctgattcatggcgttctgcattcaaccagatttcaggtaataattattcaccatccgatgtagaccgtgttgctcggttagccgtggatggtaaaaataatggttatgaaaacggactttcggacgtcgttaaaaacgcggtcagcaaggcgggcactacggccagcagagtaccgactggctctgctgattatgagctgggtggaggtatgcgcgacagcaacagcagaagtccgaatctgttagataaagggcaggcagccagagaacaggtgtttgatggtaaccgtacagtagcaaaaacgttaaccggagccggttcagaccgttatgtcggtgattctatgaagttagaaaacggttcatccggtcaaacgctcatcggcaacatgagcaataatatgcagttacgacaggcgctcaatttagctgacaacagccctggtatgacggacgagaaattaacccgtcttcaggacgcgcaggacaccgcaatgaggactgtccagagtaaattagctgacgacccacgatatgggccagaagcggccgccgcttaccctgcgtttatcgcaagcctaccggaaaggctcggtaccacagaaggcaaggattatgcgaaagccttcctggacaagtaccgaaaacactaa

SEQ ID NO: 95409 - DNA, 1356 bp, Enterobacter aerogenes
atgttctttggtgtgttctccatgcagcaggtccatgctgctaacgtcatggagggcatatttaaaggcatggtggcttcaacagatcccgcttccgtaagaacggcatcacgtgtcggagctgttggggggagtttctcataccgccagcctcaggtgaataccaacctcgtcaatgtcagtttcccgaaagccagcgtcgggtgtaacggcatcgatattttcctcggcagtttcagcatgatcaatggtgatcagcttgtgcagattggacgcggtattgcgcaggggtcagcggtatatgcttttaacacggcagtatcggcaatctgtgccgactgcgcagcaatcattgccaacattcaggacaagctcgcagcactgaacaaatttgccaaagacagctgtaacgcaacctatgagtttttgcaaaacgggctgggtacacctcaggagtttactgagaaaatagggctcggcggtggcgctgttgactccatggtatcaggtatattcccagattttggtagcaccatgagtcagcctgccagtgaagtcaacaaaaagaactatgcaaaagatcctgatgcctttaaagagaaatatgcagggaatattgtttaccagggattcatgagcattgataacggcaatatgaatgtggggggcgtgactgaattaacaggtttcaaacttgcagaacaaataatgtcgcttacaggaacacttatcgtcagctgggatagtaatggagaaaattcagcgataacaccgatcccacctacgatgaaagccgctgatttcataaaggggacaggatccggcaacgttaaattaaatgtttgtaacccaacacctgatttacgtagtaacagaaaagcacagtgtcttgaaatgcgtcaggactctatacaatttaaaggtctttctgaaaccattattgaaacattactcgaaattcagcgggctgtcaggaatgacactgagttgacgcaagaccaacgtaaacttatcagtatgttaggtgttaataacatcattccgactcttcagaccttgtcagctgctgagggggttcaatacatcaatgatatcagtacgatcgcggccaaaaacttcacaatagagttgctgagtagtgtgcagaataaaatgacgaatatgactttgccttcagaggcaatggcatcgtttaaggaccaactagaaaaaataaaccaaaccttcagaaaccagatccgcagcgcttcagaggttcagtccatacagaacactgaggaaaaaacggtcctggcttactgggatatggcatacgttaaaaaacggacctatggcgatagcgggaatggtggctga

SEQ ID NO: 95410 - DNA, 2127 bp, Enterobacter aerogenes
atgaaacgtagaagccgtaacaatctccatacgcaggaaatgctctaccgccctgcccttgaatttcgttcagcgctaatactcatacttttttctgcttacgtgcttatagactcatggaccagtaagtacggtatcagtgaaatacccttctattgctctctggggttaatagcgatggcaggatggagggtatggcacggggtaccggtcttcatagctcactggcgattatttcatcgcacgatggattttttatcactagaagattttcgaatgattaataatgcacatttttttgctgatgaccgtaaatatcagaaactggtcagtttgcaggagtctggtggagcaccatcgaagaaaagtgtttacaagctccttcgtaagaaagaaaagattgtgatcccccagcgtacaacgtttctgtgcaatggtttcaaatggggaccggagcactctgaacgtacctaccaggtgcacaacctttccagtgatatgcatgaggtgcagttaccgtttatattgaatcccgttacccgtcactatcgaaaacttgccttcgacctgggcgggaattatgcgattttcggcgttgataaaaaaatcccgatattcgtcaatgaagaaaatttctttggccatactcttattacaggaaacgtaggtaccgggaaaacggttctccagcgccttctttccagttcaatgctacaccttggacacatcgttctcgttgttgaccctaaaaacgactatcagtggcaggaagggttaaaggaagaatgtgaaagtcttggtaagccttttatgcattttcacgcaggcaatccttcaacgtctgtatcttatgatgtcagcgctaactatgttaaggatacagacctttccgcccgtattatgagcattatttcaggtactgaaggaggtgaagatccgttcgtgcgtattgcagaggggcttgtcacaacggcgataggtgccctgaaactgagtggtacaaaaccgactatccagaatatttactacgccatacgctctaaacaggatctcattgttaccactcgtaacgctctcaggggtttttatacttaccatctcggggctgactggcatttaactgttcaggtatctccaaatcttacttttgcagacgaaatcgaaaagctgaaagaatatttccactgcaactactttgaagacaattctcccaaaaacatgcatggcatggatacggttctggaatgttttaaatacatctccggcgatgaatcgcactattacaaaatcactgccagcctgatgcctatgctcaagcgattgtcccagacccctatggatatattgctttcggcgaacgatgtcgagaaccctgagcgtaacatcgttaacagccatggactctttaacagcggtggcgtgctttacatttcgctggacggcctgtctgatccggcaacagcacgggacctctcccagctgattacttcggatatcgccgctgaggcgggtagtcgctataacacagcatctgatttgtccactgtgcccagggtttccatattcattgatgaggctcatcaggcagttaatatgcaactgattaaccttctcgcccagggacgcgcggccaagatcgcattgttcatctctacgcagaccatttctgattttgtatcggccaccagcgccgatactgctgaccgtttaacgggcctttgcaacaactacatttccacacgtgttactgacgcgaagactcaggagcttgttctgaccaaagtcggccagactaatgtctcaatgaaccaggtcacttacaccaccagtgctggtacaaaacagtcacatacagatttcaatggttccatttccgagcgaaagtcgacaacgatggtaaatgctataccacaggaattactgtcgatgatcccaacccttcacttcatcgcctgcttacaggacgggcgtaaaattgtgggccagatgcctataaccgtgccgggcaaatcaatgcgtaggtcaacaaccgtctttgatatggtaacgacttcgccctacaaactaaaaatgagacgcaatctcaatgtggaagaaatacttagcaaatcacagaaggtgggctaa

SEQ ID NO: 95411 - DNA, 1098 bp, Enterobacter aerogenes
atggaatgcaaacaggtatcaagggaatcgttattcggtatgaattcctcccagcccaaatacatttcacgtgcaaccaagacactgaaactgtatggcatagatgttgatgatgaaggcctgccggaactactgtcacgttatgcgaagaagcttactggtgacatttccaaggtctacgcccaatacacggttgatagtctcgacgtgctggcccgcacgctggcggagttttttattatccgttatgcggtgactatcgttacgcacgatgatacagaggtcacctgcaactggtctgtatcccagggcccttttaccgagtggctcaaggagcagctgagtaactgcatggcgaagacccacacggttgaagtgcagattgataaaaatcaggaacgcatggctttcatccagctcaatgccgagcggcttggctggtacctgctgcctgagtttattgatattgcaggcttcctccctgttttccttgagatgcctgaacaggttgaataccaggtaatgcggcgcaagcgacacggtaaggtgccatacatccaccagcacgatctggggattttcgaagaggatgctttgatatccggtttgaaagaaaagttacttttctggagtggcaacctgagcgatccacatgatgaatacacgtctcttttcaaccgtgttatagatctttccattctgggtaaccgccaccagcccgcgatgtaccgtaaaagcagcattattcagtcgttccttgatgaattttccgcctcggtgctgactcttcccgttcgctttaacgacgatacccttatcgcactctggacgccatgggcagagccctttagtcagttctcgcgcttgcggccggttgaagaagatatggtatacacgccaaccccgggacaggtgcgctggaaaaatgaagatgttcgcagaaaagtaactttttctctcatctcccggttaatcgcgtcggatgacctggcgtgttcgggaattcttcacggctggaaaaatcattacctcaacagagaaagcaacattcgcctggcagccctttgggcagagctgttcactaataaaactgactga

SEQ ID NO: 95412 - DNA, 675 bp, Enterobacter aerogenes; identical to SEQ ID NO: 23426

SEQ ID NO: 95413 - DNA, 1137 bp, Enterobacter aerogenes
atgtttaaaaaaagaccatcgaaacctgaaacaggctcggttcaggacgtggtatcgcgtgaaagtaagaagttttaccgtttgtataaatcgcatgtgttatcaaaaataaccctgacgattattggtattgggtttgcaggttttagcggctggtccatgtatcaggataaacagaaaaacggtaaaggggcagaccatatcgcggttatccgtatccatggtgaaatgggtactggctcgcctacaggcgacggtgtcattattgcccgcgctttacgtgaagcatgggataacccgcacgcaaaagcgatcctgattgaggccgaatctggcggcggtggtccgtctgacgctattaatatttatcgtgagataaacgagcttcgcgacaccctccatggagtaccggggctcacaattgaaaactccgaccccacaacatccccgaataaaaaggacatgccaccagcgccctctgaagcggttaaacaggcgttgctgaaagccgtgggtactgggcatggcaaactgccagccgccgcccgggacgtccgccccatcatcgtcagtattaaaaatatgtgcgcctccgcctgttattacgcagcctcaccggctgatgcgatctatgcggatcccaacgccatcattggcagtattggcgtacgtatggaccactgggatgtgtctaggattatggaccgtctcggtgtggctaacgaaccgttgacggccggagcctggaaggcctcgcttgacccctggcgtccgattgatgacgaaaccaaggcctttctgcatagtgagttactcaacaaaatgcatgatcagtttatcaatgatgtcgaagccggtcgtaaaggaaagttactttcgcgtgaacaggcggacaaagaacagctctacacggggcgtttctggctgggtgaccgtgcgaagcagtttggccttatcgatgatacagccaccagcacagaggtgcgtgaacgcctgagtattgtctacggcaccacgcgttttcgcgactacaacgcgccaaaagcatcgttaagcagcatgttaggattgtcactggacgtgaaccttaaagaggctttatccagtgcgcttcacaccaccagcacagtgaggtag

SEQ ID NO: 95414 - DNA, 534 bp, Enterobacter aerogenes
atggacctgaccatgttgtcgaccatttttcttgtgttcgtcatgctgatcctgtcatgcatcatcctgtgcatctggccgcttatcagtaacatgttcagcgagcagcgcacacgaaatgctttaaagggggtgttagcagaccttgaagggacgcttttatctgacattaccctaccgctcaacgcctcccagacaacgcagatagaccatatctttatcagcacgaagggtattttcattatcgaagagaaaaactataccggtgacatttatggtgctctcgatgataaaacgtggacggttgtatacggtttcggtaaagcgaaacataagatgttaaacccgtttgttcagaacaaaacccacatatccggagtgtgtcgggccataaagcggggtgatgagggtattgttaatgttgtgttactgacgggctccagtaagtttatggtagacccagtaccggagtggttgtgccgtaattgtgatgacctcggtaacaagttcactgcgtacgatgctgagccctga

SEQ ID NO: 95415 - DNA, 2997 bp, Enterobacter aerogenes
gtgtacttcctgaatgagatcgttattgctgcattccagggcgaagagggtgttgccgacatcaagagcgttgtcattgataacgtcatggcttcatacactcccacaaacgtcaaagggatctaccggttaaagccgatgccgtcactcgaaacaaacaaagtccatactttgacggttgttgctgagaatgttaacggtatatccaaaacctattcaatcgattttacctatatgccgatgactttcactctgaagtccatcgaatcagcgtctacgatttacggttacgtccgtccttacacttcgctggttactcagcaatcagggaatacctgtaagattttctctactgaagaagacgctcaggcgtttcttagccagttcggaactgcggtttatggaacggcctgttatgttcagtggaacaacgttccatctggtctcgaattttactcgaagtctaaagttcctggcctgacgggttacttctctaaagttggcgataacgtccttgactacaacgtctatgtgattaatacaaaaggctctaaagccattgccactcataaccgtaaaaccgttaaagccgttgaaccgtttgcacctgaaatttcatacaagatgagtaaaacggtagagactcttggtaaggatacagcactggtttatatcactggtggggacgcagctaaggtgcttgcaaaatcagtaccggctaacgttgtccttacaactaaggttgaaggccaggacgctgaaactaaaacctacaagaataaatcaggtggtgatacgccggtaacttattctgagcgtataaaagtacctgcagcgccattgtggacgcaaacgaatgtaaacatcgaagcttcctacgaaaatgaagccagtataaagtcatccagtgtgctcaaagtttatactgttccaaacttcagtattcgtgcctatatgaaagttgcagagcgtaaatcagcaacgagtttgaaagtaccggtatcggtaaacatcggccaatggaataacagctgtaactgtacattgtacgatgcctccacaatggggcagtgggatgtggtggtttacaaagttacctctaaatgggttacggatgaagaaaccggtaaagatgtttcggtaactgagcgaactcctctgaccggtgatctgcccgttaactctgaggggattgcgaccggtgagctcaacatggacgatctgactctgggtagtcaccgcatcatcgcagtagctacggtacgcagtccgtttaaagattttgtactcaaacgtgagacatcaacaacaagtatcagggtgtataaaggggccaacctcgaaggtgggctgtctaaatcgcttattgtaggccgagttcctctgtcagcaatggtctcattcagaacgaaaagtaccgatgattatgattccctgagtccgactgaatggcagatgtccagtaacaatggatcaacctggaatacgcttgaagatatgaccggacttcgaagcgtaagcatcaaacaaaaagaagtaggtaagtggctttaccgcgccaaactgaccaacaaatacacaggtaaggtctcatataccgataatctcacggtggttgcttaccgggaacctaaacctgttatctcggttggaaaggttcttgaggggcacagcatcccggtgacactgactgataacaatgaagatgtacaaggtagtgcagttgaagtccagtggtcagaggatggagaggaatggactgaggggggggttaaatacatgattacgtcctcggaggtgcccaagtatatctttgcaaaagtacggtataccgaaaccgacgaaatggccgggaaatcggcatggaaagaaactcgtgctcgtgtcactgtcattaagcataagaaattgtcggttaaggttgaggggaactcgcaggtagaggtaggtaaaaaagttactttgcagggtacctacacgaaccctaatatcgagtactcatctgatgctaaagttgtccaggagtgggtgctccctgatggaagcgtaaaacagggggggctgcttgataccgtcctgaccgaagacatgttagatgaacgtgggtatgcaacgtttacgtatcaggcctacatgccggaggcaaaagacagaaccatagcaaaacggaaaatcagcgtaaaatcttgggtatacaaattcccggagccacgcctgaatacaaaactgaaatacaccatgataccttcggaactcaccgtatcagtctctggtgtggatgtttcttatcctggagttgtgttcacccaggactggcaatacgacaaaaatgtgatgacgctgtccagcgacaataacgggacgaaagtgttccaggtaacaaaatcgggtacacatacgttgacgtatgtcctgaaggataacaggaacaatgaagcccgggttgattacacttttatcgtgaacgaacagagtccgatggaaattagcgttactcccaaatactctaacaagttcatgagggccccgctggacctgtccttgaggtccagtgttaagctggcccactcggcagactcaattgacaatgtgacgtttaagctgaatggtaagcctgtcgatggtggcaaaaattactggtcacagacgtttgagaacatcatggaaggtagttataaactggaaatggacgttgtcagtacgcagggtcagagaggggttgttgtggttgattttgacgtgataccgaacacgcctcctacatgtaacctgacatacactgaaacgcaactgagctgggcatttactgcaaaatgcagtgatcctgacggcaagatttccagttatgtttggaaggtgaatgatcaggttcgtggtgtgttcggaagtactgcaacactgtccaaagctcaaaataagggtaagctggtggtgtctataactgcttacgatgacagcggtgattcagcgacaagtttcattacgttgaataactga

SEQ ID NO: 95416 - DNA, 525 bp, Enterobacter aerogenes
atgttgatgtcccttagatatctttctccgcacagaagaggtgttttacgagttgataaatcactgattctgcacctggtgatcatctcggtattaatgcatctgttcttttcccgcttcactctggggcatggactcctgcatggctgtattccagctgattattacatggtggataaatatgataagagctatgaaattggggatatgattaacttcaccatggacagagatgttcgattcattaaacctggggagaaggtaataaaaatcgttgctggtaagggtggggacaaaatccagattacagaaacatacgttaaaaacggcgaccgtattttcagggttgacggaaggcgtattgccaaaaaataccatattgaaccgcaaattctgaaccgtgaaatcacggttccagctggacacattttcgtagttggccagaccgattactcatgggattcccgtttttggggaacaataccagaaacgacaatcacaggaaaagcatatgccatcttctga

SEQ ID NO: 95417 - DNA, 1362 bp, Enterobacter aerogenes
atgccatcttctgaatgtattaaaaagttactttttagctgcctgttagctacatctctgtcatatgccgatgactctattgatcatgcaaagactcaaagcatagagtcgattgtcggcacaccccggtacaatcccagctctgtctccgacagtgtgcgtgcggtgatagaacacacaggtaagctgcgtgaagcggaagcgatgagtgatattgcgcaggacataaaaaagaatcagtctacagaggccttctctgaagaggcagacacaattaacaagtcaaaaaacgagtcaatgcgtacccagtcttccaacgttgaaaaaatgtttgggaagtcggggattactgcacaggacttcgaacgtaaattagataacaacaaaaatgaagaactatcgactgataatggcttgacaatatttgcatcattcagcatgccagactatgttttgatagacctgattaaaacagcatcggaaaacaatgcgcgcgtggtgttcagggggcttaaggaaggtgtagaaaaccttattcagatgcaggtagtgctgcgtgattatatatctaaagcaaaaataaaaaaagaacctttagtcaccctcgatccggaaagttttacccagtatagcgtaaaagaagttccaacgatggtgtacagaaaagatgataaaacctacaagattagtggatctattaacattaagtatttcatgaaacagatcttggaaaacccagaaaaaacaaccttcccggtttcagcccaaacattccctataaaagagaaaagtattgtacaggaacttgaggagagaagtaataaatatgactgggaggcggccaaaaagaacgcaataaaatcaacttggcaaaatcagtggatggcgtcccttcccgtatctgacgagaataaaatctggtatatcgacccaacaattcaggtaaaccaagatattagagataaccaaggtaacctcattgctgccgccgggcagaagggaaatcctcttgctcaatttccgcagaaactgacaatgatcgtttttgacccaatgaattccgagcagctgacatgggccaaaatacagtttcgtcaccgttttggcgaaggaaaagtgatgcccatttttacgcggatcaaacgtgatgatggctggaagcatttagaggagttgcgcggccagttctatgggcagatgtacaaaatcaatcctgaaataattagccggttcctgattaagtctactcctacgatcatatcggttgaaggaacctacttcaaagtacagcagtttgctcaggcagatgtacgcgagtatacgcgtataaatcagcaatcagaaaaagaggccgctcaatga

SEQ ID NO: 95418 - DNA, 1038 bp, Enterobacter aerogenes
atgattcgaaagttacttttgtcagcattcactgctgtcatgctcagcctggctttaccaggaatggcgattggggctgagacgggtagcggaatctgtcaatcggctggtgtttggaaaggtttgattaaaaacatctgttggagctgtatttttccaatgcgcattatgggagtaggctcatcaccagaaggggcagcaccatctcagccagtatgttattgcacagatcaaaatggggtcccagaggtaggatggcagctgtcgtttttccaaccagtaaaaatagtagaggttgtacagtcaccatggtgttcgccattccttgaaggggttagtcttcagtcttcaagcttcgatatggggaaaggcgcaactaacaggcccaaagggggtaatgaggcagggttttatgatgttcacttatgggagtttccgatcctagtgatgcttaagctcctcattatgggggattgtaccgctgagccttatattgacccgtctcttacctacattagcgaagttgatccgctctgggaaaatgacctgcttacactcgtattgaatcctgaggcagttgttttcgcaaatcctattgcttcaatgtggtgcgcagctgactgtgtgaaggttacagctggggctgacaatctgagtgcccacttttgtgcaggttgtgatggtaacctctatccgctaaccggccatgtttttgcgaatgacgattcagtccgggtttcctcattattaactcaacgaatgattaccaagttgcacaggcaaggaatgttgatgaaaaccatgggccaggacgctatgtgcgaacgcaggttcagttatttcatgcctagatcacagtacaggctatcgatgctgtatcccgtaccggaagcagaaggaccggaatgttgtcatagacttggagattctgttcatgactggtcgacacggaagggcggacgaaaacgtataggtgtaaataactatgtatacatgctttggcgttataacgattgctgcgtaaggtggcttggttaa

SEQ ID NO: 95419 - DNA, 3183 bp, Enterobacter aerogenes
atgatatttaaaagggctgtttccttagccgtagctgtgtcaatcgtaactaatacgctcagttgggcgtattatgtcacgcttatcaatattgtgatggcaccgaaagtatatgcggcaaacgaaatttatgagcaactggaaaacaattttgatctttctaatcctgcagcgaacagaacttcaacagtaaccgcagaggacattttagaaaaatataagaatagtgaaaacccttcttataccgacaaaataaatggttttgatagtaccaacagttcgtcaatggatctgagtaaatatggtggaaaaacattcacaaatgatgatgttttgaattatgccaaaaccgatggttcggacatagctggtacggtatcgctacccaacatgagcggtaatagtataaacataaaagggtcagaaaacggtggaaagttactttcacgtaatgaagatggtagtataacaataagtaacaaccccaatcctggaggcgcaatcactggcaccaatacagctgaaatgtatagttctgagcaaaataatgctgatgttcagtttaatgctggtgatagttatggtgacgagaaagggttcataaacgatataaaaactcgcaagagtcaattattcaccgcaaatagttatgatgggcaagcatatcgttcgctggtggctgcaacaaaatccaatccagctccaaatatttcgccaaatgatccaatgtttacaagtggcagaaatgaaatagcgaacgctgcagctggaacgggtcaatggctgcaaaactgttcaacacagacaactaccacaacaaaagaaaaacatattccagattataaggaatattactgcaatgcacctaaaaaagataattatggtagttgcactattactcgcgacttcagtgtaccagtttacatctctggtggtaatggtgacctaagcgtatgtggcgataattgcatacgtgtatggttcggaaagcgtggtaatgattactggtctgctggtgtttatgacaacagcatgacccttcatttccaccaggacgctatcttaaaatcagcaagcatagtaaatgctgagtgggatgaccacatgcaagtcaatcttgatggtaagcagatttttgctcatatcgatggtgaatatcgcgagcctggctatggccccccacgtaatggtatggaaagaaataaatcgaataaattaagtgaacctattgatataacgagccaagtttcagaatccgtgtacaaagaaagtgaccacgaagttgaaatgtcatcgactgtatgggtcgggggtaacggtgaagggtactttgaagtagaactaatttttgaaaatatcaagcttgaagataaacatatacaggacccaccaggctgctacgatgttgttaaacaaacaggttcattttgtaggtttgaccgttttgccgatcttgatgtaggcactaagcgtttaccacaatcgatattgcaatatgcatcacctttatatgaaggagaccaaggtaacttaacctggaaaactaatttagaaggatatttttgcgatcctttagggaaagaaaaattatgtcagtatgatgcatcaggaaatattctaaaagatgtgaatggcaatgaggcttgttacaactatgaccagataaagaatatgcctgatgcatgttcaaaatactcgacaaactctgcatgcactatgtccagccaaacatgcgctgagggatggttcgattctgctactaatcagtgttacatgtacgaacaaaagtggacctgtgatgaaggaatcacaaggactgtgacagtaacaaacgaagcaaacacctgcgttggtatgatcccatgttcaggaggtacttgtaataccggtgcgaatgaacaaaacagtgatttcggtaaggtcgcagcctatagcagcatggtccagaacatgcagggtgatgctatgtgtagtgaccctaacgaccccaacagttgcattgtgttctccggagagaagcaatggtgtggccgttctgtaggcttcgtaaacgggttggcaaaaacagattgctgcgaagctcctaaaggtgcagccggaaaactagaggcaattatcttagccgggacaatgctcagaaacacaaactgggaaaaaatttcagccaagctgacaacctggactggtggtgagtcaggtacgtgggcatcgatgacgaacgctgtcggacaatggacctccggtgtatcttcaagcgtgggccaaatgtggcaacgtgtgacagaaccactaacttctgcttatgaatcaatagcaggaaacgtctcgagacttattggctcctccacaattgaaggaggaggatctgcggccgctactgagcttacgaaagacggcttacagacaggaggccttgctgcaattaagcaacagctaatgaataaggcctacgatatgctgccagatgctgtaagagacttcgtttttgatcaaaccagaagtgcagctggtcaagctgtattctcatcgacagtgacaaactttatgctggcactgaacgtaatcggatggatatatacagcatatcaaataactaaaatgttattagagatgctattggcatgtgaccaaaaagaaatggaagcatcaattcacaaaaaccaaggtgcatgtttcgttattgatacagatcgttgtgttaaatatctcaacgttggtttcactaagaagtgcattaagaaagcaaccgacatgtgctgttataattctttattgtcaagagtaataatgcaacaggcatatccacagttaggaattaatccagttgaaagtggttgtgtgggattaactatctcacaggtgcagcaacttgactgggaaaaaatagatatgactgaatatattgaatcagcagttgtagcgggagaagtccctgatgaatacgcggcattcacagaaaactctgtagccactatggggccttataaaaatgataatgctcagttaccctctgagagagctttagattcaatgggcggtagtgtcaatatgacaaaagcaagagaggagaatgtacaggcacttaaagcagagaatgttgactgttcatatctaccaagacctgctatatgtgaagtagggtctgtatattcggaccctacgacaggtaatgtaataaactaa

SEQ ID NO: 95420 - DNA, 852 bp, Enterobacter aerogenes
atgaaaagaaccctgacagctgtactggcctgctctctccttgcaggatgcgcgacacaaccatcaagtccagaaaaccgtatgttcaccaagatgcacgaagtatactggcacgctgatcctcagaaatctgttgctgttaatgcgtattctcttgccggtgtacaagtcaacgtagaagaggctgagaatgcgtctggaggcgtcgatgagggtatggcttcgaaaatgcttctgaacactgcgacaggtgctatcactggtggtctcaaggcagggattggaatgttcacagcttcattgtatagcgaaggtgatgcggaatatattcaggtcatgcaatatgtggtctttgtacctaacgaaaaaaacttaccgatcaacgatgattcattggtaaaagcgggtgctaaaactatcattgagtcattaaaagataaacctcaaatcggtggcgctacctatgaagctcaaatgaaagcattgagcgaatgtaagattagcaaagctattgttggtaagtgggatagttgcgagacagcaaaaaatatacctggttctggtagcaataaaacgcgctttttcgatttccaggttattagacctgctactggtgatgaattgaaagagatgaaactgaataaaggcaattattcagtgattcgttatattgactttttccctttagggcttgaatttgatacaaccaatttcccgggatttactttgatgccacaaacacctaaaacagcacctggttatgcaagtgtatcgataaatgggggcgagtattattttatcaaaggcaatatggggcataaagcattcccattgaaaaaagcagttaaataa

SEQ ID NO: 95421 - DNA, 1800 bp, Enterobacter aerogenes
atgtcatcaagtactgaagaacaagaacgtgttatacggagtatggataaaaacacgatggtgattgcttgccctggtagtggcaaatctttcactatgaaggaggggacaaaagccatttttcaacgtcatcctttggccagagtatcccttgtgacctttacccgagcggccacagactctttaaaaaatagcctccaaaaaatgatagaaccaaggtttatcaaccgtatagaagtcgacacatttcatgggtttataaaaaaaatggtaacccagaccggttggaatggggggcttttgataggtcacaagcagatggctatggtatcacgtgtacaaaagcatctgaactatcatgaaagtgtgaacgacatcatgccattcattgacggcataggccgtgagctgaacccggacattatcaggattaaatatactcgtgaccaggtggctttctacaacgagtacatgagattttgcaaaaaggataatgttgcagattttaactcgctttcaaagtacgtagtgggcatgttgagtgcagataaaatgaggcctttaagtattacccatctgattgttgatgaagtacaggacactgatggtattcagttcacatggatatctgagcacgcgaagaggggcattaacaccactatcgttggagatgatgaccagacaatctacagcttcagagatgcagggggagttaaaatctttcgtcaattcgataaaacgtataacccaaacgtttttcacctgaccaaatgtttcaggtgcgcaccattgatactaaaatttgctgatactgtgatcaggaagaacaaagcccgctatgaaaagagtcttgtatcaggcaggcatggggaaaaaggaaaagtaacttttataagatcggataacgctgacgaccaatttgaagtgatcaaggggttggtagagaaaaacccacatgattgggctattttaagccgaaacaacaccacgctcgacaaaatggaaagttatcttgaagtgccggtttcgaggataggggggaaatccttctgggaagcattagaaccaagcaacatccttcacctcttctcctttttccgacagccaagtaacatcggccttatgaaacgagttctatctttcctcaatgaagatgagcaaattctggacactgtttggaagcagatgagttccagaaaagtaacttttcaacaaattgatttaccccctgatgtatcagttcttaccaaaacgcttcacaagcacatggcaatgatgatgactgatacacgtatcaaagaagaaattgaaaaccgatttaaaaaaatcagagaatggttagaaatggccgggtataagatgtccaatacgaaaggtgaaccgtcagtaacccggatctcattaatgtcatgttaccgttgggcaatgaaagatggatggcttaagatgctaaatattgcagctggcatgaccatgggtaacaagaaggaatcaagtgaaacagagcaaagcggcatatgtctctgcacgctccatggttccaaggggctagaatggaaaaaagtactaatcattaactgcaaccatgatcaaataccctcaccaaaagttatcggtgatgaaggtatagaagaggaacgacgtttattttttgttggtatgacaagagcagagcttgaactttacataacctggcatggaaaaccatcagcgttcatcacggagtcgttccctaaagtagttgaattatcagaagaaaacccatgtattgatggatgtgaagatatgtgtttacaatga

SEQ ID NO: 95422 - DNA, 981 bp, Enterobacter aerogenes
atgactactgctaaaactaacgctacaactgctactcgtgctaaaacatccacatcagctaaaccatcacgcccggcggctagaaaaattgataaagattcaattttgatggctcatgccaaagcattttatggtgaagaaattccaccatcaaatactggtagtgatatctctaaaatagaaaagggcaccgataacgataagacctacgtctggtatatgactgagtctgtaagccgcgtaatcgagttaaaggcgcttgaagaaagttctaaactgaagcatttagttggttgtgaacgttctgtaatctacagcgttaatgtcggtgatgttttcattaaggagatcaacctcgatgaggctgaacaacttcttgaagagtttcccgatattccacgtgaaaaaacgctcgatgcttttttatcatctcttgatgaaaagtttattgagttgaatattagctccattgttacgtcagaaactcttaacttcggaaaagataagttgatgaaactaggagctgttaaagtaagcaaatggcttgatctggttattgatgaggtgcatgttttttataaacgtgagcactttgttgaaacagttgaatctcgtcatcatgacctcaatgatctgtatggtaaattgaagcctttgatgaaggagtttggccttaaagataagcattatgacttaacttttaaagaaatgatgattcacaaagttaatggatttgattttgtagttgctgatttaatgccacgattgcttaagcttgaagcatcattgaaagatgatgaattgaaagccaaagcagtcatggaaacaaatcaagcgcaagaaattaaaactgttgaaaataatagcattggaaagaggttagatgttacggtatcaagagtgctcaagggtgctgcttgtcttgcttttctctatatcggatttgccagtgttatgaatttcattagctattacagatga

SEQ ID NO: 95423 - DNA, 354 bp, Enterobacter aerogenes
atgtttacaaatcacataaatactgtttgcgtttccggcgaggttaataaggttattgttcgtaatgaatatgacactattatgctaatactggataacaaacaggaaatggaaagaaatggtaaaatagaaatggtagtttcatcgatccaagtgaaaatacctcaagacctgtatgataaggagtttaaagagattattcgaggcgataacctgatgataactggttgtctggtgactgataaagttcactctggtgaattgacggttgttagagtccaggcccagaaattgattcaccgagctcctaagcctattgaaggtttcggcggttcaaggttcttaacacgttaa

SEQ ID NO: 95424 - DNA, 822 bp, Enterobacter aerogenes
atgcatttaagtagtaaattaagaaagattgagaatgaaaaccaacttagtttcagattcttctttgaggatgagggaattaaagaaaaggtatatatacctgtggaatcaaactcaatcgttgaagatcatggtaacaaagtaccgaaccatgattatcaagagctagatgatttcatttggacagatgaacatatatgtacgttcttctataaaataatggagtcatcttttgtaaccgttcagtaccatatagaccaatcgatggtctataaaattgatgccaatgggtttcgatatctaacaccgaaattaaaattggagttagattggtattgtactaaacaatttcaaattgtgtgtcatcgcttcggatatgacccagatgaaattattgattttattaagtcaagacttcttcttgcaatacgttcaagagagtcaaggcaagatcttattaaatctttagaaactgacaacttaacattttctcatcctattataggcccgattaaatggtcagatttcttagatgatagatattgttatacaaggagatcattgatcattaaatggtcaatagctgacagattgaaactctttaaaaagattttcgatgagcaaatgattatccttgaaaatctaagtgaaaatggtgcctggactttggatcagaataccgattcttatgttcttaaaaccgaagctgtggattatgttgagtggttatattccgatgcatgtaaggtaatatctcatgtatacggttttgattacggattacttttcagcacttcgaaagccattatcaaaaacctttaa

SEQ ID NO: 95425 - DNA, 1053 bp, Enterobacter aerogenes
atgacacccgctactactgctaacaacaatgcaaatattctaactttgaatgttaactctgacttagaaattaaatatttcgaacctcatgagttaaccaaggctatagaatatcaagatgaagaggaatacattattgtccgtgcaaacgagcactttgatgttgactgttttggagaaaatgacgttatacctattttcaaaagagttactccttttcgtgctccgttaaacagtaaatatcgtccaaatccgatcactctacgccgtatggtgaagttacttttgaataatgaagtaactgctggcatctgcctgcaaggagaatctggatctggtaaaacggagttagcattatatatcagccatatgctgaactggcctatcaccatcaaacaaatcaacaatgagttatcgattgatgatcttgaaggtatgagaacgctagaaaatggaaatacacggtatgtttatagtgaccttgtgcaaggctatcgtgatgggcatatcattcttcttgatgagatagataaaataaacccagatacggcagctaagcttcatatgccgcttgagcgtaaaccgtgggcaaccggtaaagaaggtggcgagttgatttatgcaaatcgctacacccgctttattggcacagctaacactaacatgagtggagaggatatgcgtttcgcttcatcacagtcccaagactctgcatttattaagcgttttttaatattgccgatgattcgacctgatgaacaagctatgtattgtgcagctgaggctcattttcctgatttgaaaccttcatgtttaagaatgtttgcaaaagttgcttttgaacttaacaatctgaaagatgacgaactggtgatggatattcgtgaattgatttcatggatttctacctcaaaagtccttgatgaagaaatttctgttgggtttaaaattgcattcacgtctaagttatcttctgaagcatgtagtaaagctgaaattttgcttgagcaacttttcccggaagaagtatcacgttcaatttcacaattgtaa

SEQ ID NO: 95426 - DNA, 1077 bp, Enterobacter aerogenes
atggctaatatcaaaatcgctgctattgctgataccactcaaatcagtaacactgtaaaaagtttcatcgaccgcaatcctgaattacaagatggtgccgttattattaaggtagatgtcgaaggatgtcagggtcgccgtagaacgaatgaaattcgacagtttcttgatgaagatgaagtatcggaccaatcgagtgtgagtaaggttgaagtccaatggatttctactaaggctttgaactttaaaagcgctgttcatacaagattgagtaatctcaaacgtaaatactgcattcctttcagctccatgaatatactgccaacctctaagttggaagagtatttgattgaagtagaggccgtccgagaatatttcaaggaaggcattcagaatgctctagagcgttatgaagaatacattcagatggaaaaagacagaagtcctaaattggcagaattaattgaaaaattaagaatgactaaagatgacttcgaaaaatcgtttcttttccagattagccatccaatccctttcacaccaatgtcaattgatggagaggatttaggagaccgctattcagttggtttaatacaggatattgctctgactgctgaatctatctatgcttcctgcacaaaacctaaaattgatcagactttcgtagaaaaactgtcaaatttaaaagataaggttgtgagttttatgtttttggatgatcgtgcaactaaaattgctgactctatccaaagcgtactaaaccatcttccttctggtaatttggattccccccttcacatgagtttgtttcgcgaatggttattactgctaagtgatacgaatcgtttgaacagaattatggatggtgacgatcttgtaacaggttttattgccgaaattaaaaatcgttttaacgatttagatgataatttggctaataatactggttccattttcgttgatccttttactggaaatggtattcctgctaagacatctaattcttcgataactccggtctcaaataatgatgtagtccagaaaaaagtaactttctcgactccatttaatttttga

SEQ ID NO: 95427 - DNA, 372 bp, Enterobacter aerogenes
atgactctgatgactctgacggtactgatgactctgacggctctgatgactctgacggctctgatgactctgacggctctgatgactctgatgactctgatgactctgatgactctgatgactctgatgactctgacggctctgacggctctgatgactctgacggctctgatgactctgatggctctgatggttctgatggctctgatggctctgatggctctgatggctctgatggctctgatggctctgatggctctgatggctctgatggctctgatggctctgacggttctgatggctctgatgaccctgacggctctgacggttctgatggctctgatgactctgacgtctctgatggttctgtaa

SEQ ID NO: 95428 - DNA, 231 bp, Enterobacter aerogenes; identical to SEQ ID NO: 23431

SEQ ID NO: 95429 - DNA, 1245 bp, Enterobacter aerogenes
atgagtcattctactaattataattcaccggctaaaacccctatgcagtacgcgcaagaaacttttgaccttgtcaaatctcatgtgcagcagctgggtggatggcgtaatgtattaacgtactatcctgagtttcaggaggctttagaaaaagctccacgttctgtcaaatgcccgtttactggtagtggcaaaacgaaattcagatttaaagataggacgctagaaagtgttcatgctattcatgaggattatccccataatacttttattgatggcattgacttaattgctgaactaaaaagcattagtaaaacgcaggctgcaaaaagcattcttgaaatgcttggtgtttccaaggatagaaagttaactgaagccgaccgtgttaatattgttctttatgacaaaaaagctcaatctttttcagatattggtgaggaagagagacttagtcgtataaataagttagaagccgtgtataaatacacaaaatttgtgacacccgattcattggttgctcgatatctatcagggcgcggtataaaacggatgctcacaaaaattccagctagtcttgggtttaatgctaagatgagatactggcccggttctaataagccagccagttttcatccaacgatggttgctatttttaacgataaattcggtcgcaattgcactatccataaaactcatctttctgatgatggacttaaaaaagctgatgttgaaaacccaaagttaatgatgaaaccggtctaccagatgaatggtggttcgatgcagttatttaaaccaacttactgtgatgaaacaaaatcatggtttttgggggttagtgaaggtattgagaatgcgctatcagtaactgaggcgacttcaattccatgctgggcatcttcaagttcaacatttatggaaatgctggaaatacctgagtatttaatgccaccttctgattgccaatttattgaattgtcgatttgggcagataaagatcgggtaaatccgaacaccggtaattcagctggtgagtccgctgcacgtgttctcaagagccgtatggagcccttacttgctgaacgctatcctgaagcaacagtccgggttgagattcatttgcctgaactggatatacctgatggtgcgaaaggtgtcgattggaatgatgtattaatgctcaagggtcatgaagctttcccaggcaaactggaagaaagattttttgacttgattaaataa

SEQ ID NO: 95430 - DNA, 540 bp, Enterobacter aerogenes
atgaacgtttattatgattatgatatcgaatcggtttttaactgggttaaggaacacttcattctgaagcattccgcttctcttgttaatagcccttggtatgactacgacatagagatagatttgcgcttagttaagcaagcgttgataaatggtaattttgaatttttatatgttgttcgtgatcatggcacaatgttgcttttgctttctgagtttcactcctccaggtctctagactgggaaggtagtgaaagctttgagtactatcattgtaagatgataagtaaacaaggtattaagttgaccaaaaaagcagcaggtgaacttttagatcgtgggcctttactcaactccttcagtgccggaagtaaaaactcctatctgaaagagattttagagtttgttaataataaaggctttaacttttcccctgcaaagtcactttttgactgtaaacgcataggagacgagttaaaccttccctcaatgagtaacttcatagcaagagttgagaaccatatgctccgtatgaactaa

SEQ ID NO: 95431 - DNA, 219 bp, Enterobacter aerogenes
atggactacaaacacgagtgctatgacctagaaaagttacttttggctgatgatgagtttctgctctaccttttggggggggagaatgcagaagctttacgtagtgacttacaaatacgctttaacgccggtgagcgacttataactactcaagaatgccctgaattttcacctgtcaagggctgccctgggcacgattgcgagactatcgatgagtaa

SEQ ID NO: 95432 - DNA, 210 bp, Enterobacter aerogenes
atggcgctgggctacgccggcgtagcgctcgccgtactggcgctaatgctgccatcattgctggtgatgaagagccgtaaactgcacacacaggcgacatggcgtgtaccgggcggctcaattgcgctgtggctggtattgggctgtggtgtagcgatagtcgtcattcaattctgcattgtggcgggattattacccgctgtggggtaa

SEQ ID NO: 95433 - DNA, 216 bp, Enterobacter aerogenes
ttgcagcactctattaccctcaatgagacgctgccagattgcagaaacataccgggcctggtgtatagcatcggcaagggcgttgtgccgttctccctcaaatgggatggttttcttcgggtcgattccaattgctttaccgagctctacaattgttcgaacatcgcgatcattccagtattcccatgggtattcttcagcgatgaaatcaaatga

SEQ ID NO: 95434 - DNA, 456 bp, Enterobacter aerogenes
ttggttgaacttgtacgccgcgtacacgttcatgtttttgttgaagtagtaccaggtacccagttctacgtatttaaccaggtccgcatcgccgccgccgaagccaccgcgagcctgcaggtttttacctttagtctgcacgtagcccagggacggacgcagaccgaaatcgaactggtattgaactacggcttcgaagttctgagttttgcccgcgaagtggtcatcttcttccggcgtcatgttgtaagtctgggagtacataactgcggcatagatgttgttagcatcgtacttggcagaggttgcccatgcttcagctttgtcaccgttgccgtcacgtttctggtcaacgctacggttggagttagcgtaacctgcagacagcgcgataccgttatcaaacgcgtaggttgccgcggtgctgaaaccgtcgccattctgtttgcgaattga

SEQ ID NO: 95435 - DNA, 1962 bp, Enterobacter aerogenes
atgcgcctgcaaaaccatcatcttgaacttcttagtcctgcccgcgatgccgggatcgcccgtgaagcgattttacacggcgccgacgcggtctatatcggcgggccgggcttcggcgcgcgccataatgccagcaatagcctgagcgatatcgccaacctggtgccgtttgcgcatcgctttggcgctaaggtgtttgtgacgctgaataccattcttcatgatgatgaactggaaccggcgcaacgtctgattaccgatctgtacgagaccggcgttgatgcattgatcgtgcaggatatggggataatggagctggatctgccgccgattgagctgcatgcgagcacccagtgcgatatccgcagcgttgagaaagcgaagtttctctctgatgcgggcttcagccagattgttctggcccgcgaactcaacctcgatcaaattaaagcgatctacgataataccgacgcgactatcgagttctttattcacggcgccttatgcgtagcctattccggtcagtgctatatttctcacgcgcaaaccggacgtagcgccaaccgcggcgactgctctcaggcttgccgcctgccttacaccctgaaagacgatcaggggcgcgttgtggcctatgaaaaacatctgttgtcgatgaaagataacgatcagaccgccaacctggcggcattgatcgacgccggcgtgcgctcctttaaaattgaagggcgctataaagatatgagttatgtgaaaaatatcaccgctcactatcgtcagatgctggatcgtattattgaagatcgcggcgatctcgcgcgttcttccgccgggcgcacagaacacttcttcgtgccgtcgaccgataaaacgttccatcgcggcagcaccgactattttgttaacgcgcgtaagggcgatatcggcgcgtttgattcgccgaaatttatcggcctgccggtaggcgaagtattaaaagtcggaaaagattatctcgatgttgaagtgaccgacgcattgacgaatggtgacggcctcaatgtgatgatcaaacgtgaagttgtcggcttccgcgccaatacggtggagaaaacgggggaaaatcgttatcgcgtctggccaaacgaaatgccggcagacctgcataaagtgcgtccgcacgaggcgcttaatcgtaacctcgaccataactggcagcaggcgctactgaaaacttccagcgagcgccgcattgcggttgatatcgcgctgagcggctggcaggaacagctggtgctgaccatgacctgcgaagacggcgtcagcgtcacgcatacactggatggcgaattcgccgaagcgacccaggcggaaaaagcgctggccaatttacgtgatggcgtggcgaagctcggccagaccatttattacccgcgtgatgtgcagattaatctgccggcgctgtttgttccgaacagtatgcttaaccaactgcgccgtgaaaccgcagagatgctcgatcaggcgcgcctcgatgcctggcagcgcggaacgcgtaaaccggtctccgtaccaccgccggtgtatccggaaacgcatctgtcgttcctggcgaacgtttataaccacaaagcgcgcgctttctaccagcgctatggcgttcagctgatcgatgcggcgtatgaagctcatgaagagaaaggcgacgtgccggtgatgattaccaagcattgcctgcgattcgccttcaacttgtgtccgaagcaggccaaaggttcgataaagagctggaaggcgacgccgatgcagctgattcacggtgacgaagtgttaaccctgaaatttgattgccgtccatgcgaaatgcacgtagtgggtaaaatcaaaaatcatattctcaaaatgccccatccgggcagcatcgtcgcctccgtcagtcctgacgaactgatgaaaacgctgcccaagcgtaagggcgcgtaa

SEQ ID NO: 95436 - DNA, 1167 bp, Enterobacter aerogenes
atgcgctcctttacccttcccatccccacgctgctcgcgggatttgtcgccgtgctggtaggctatgccagttctgccgccattatctggcaagcggccgccgccgctggcgccgatgccgggcaaatagccggctggatgaccgcccttggcctggcgatgggcgtcagcacgctggtattaacgctatggcgtaaagtccccatcctcaccgcatggtcaactccaggcgcggctttactggtcagtggattacagggagcgacgctagcgcaggcggtgggaatatttgttttcgccaacgcgctgatcctgctatgcggcgtgacgggactgtttgcccgcctcatgaagatcattccgcattcgctggcggcggcaatgctggcggggatcctgttgcgttttggtctgcaggcatttagcagtttgcaggataatctcccgctatgcggcgggatgttcgccgcctggctgttatgcaaagcgctctacccacgttttgcggtcgttgcggcgttagcggcaggcgggatcattgccctgctaaccggcgcgctgtcgccagtggcaaacgatatggtttttgttgctccgcagtggattacgccgcagttcaccccttcgctactgctcagcgtcggtgtaccgtttttccttgtcaccatggcgtcacagaatgcgccggggctggcgaccattcaggcatcaggctatcgggttccggtctcgccgcttatcgtatttaccggcgcgctggcgttgttattctcaccatttggcgtctattccgtgtgtatcgccgccattaccgccgcgatctgtcaaagcccggatgcgcatccggatgcggataagcgctggctcgccgcagcggcggccggtgtgttttatctgttggcggggctatttggcggttcgataaccgcgcttatggcggcgctaccgccggtgtggatccagatgctggcggggctggcattgttaggaaccattagcggcagcctctatcaagcgctggggcaagaaaacgagcgcgatgccgcagtggtaacctttttagtcaccgccagcggcgtctctctggcaggagtcggctcggccttttgggggctggtcctcggcggtatcagctatatgctgttaaccacgctgcgccgcacgtag

SEQ ID NO: 95437 - DNA, 654 bp, Enterobacter aerogenes
atgaaaaatataaatgtgacagcaaaagatacaggtgttaaatacaccgttgatggcaatcaagttaacttaaacacgcagtcggtggtggtattacatattaagcgagaggatattagttcctacgccaggcaaggtaatgatcttgttctgaaaataaatgacggtagcacccttacgctaaaaaacttttttgttaatgatgctaatgggcatcatagtgatttagtgctacaggatgatgacactggcgcattgtggtggcttgacggggctggaaccagcgatgcacattattctctcatcagtgatatttcaggacttctagccgcaggaagctctggcggcagtatcgcgccatgggtaatggcgggtgcggctttgcttggtgtaggggcgatgattgcgggatcttccgataaagatcactcctcgcattcttcgaacgatgatactgactctgatgccgacagtgactcggactctgacagtgactccgatcttggcggccacgaaagtgatgctgatgcggactccgacagcgattccgattctgacagtgactccgactctgacagcgactcggattcggacagcgactccgactccgactctgacagtgattccgactctgacagtagactggccccctga

SEQ ID NO: 95438 - DNA, 378 bp, Enterobacter aerogenes
atggatgcgctcgataagattaacaacctgccgattaacccgctgctggagcaggcgaccagtaccctggcgcagagccagaaaaccatgcagcgtgtccagactacgctcgacaacttgaataagatcacttcaagccagtcgatgcagcagcttcctgctgatatgcagagcacgttgcgcgagttgaaccgcagtatgcagggcttccagccgggctcggcagcctacaataagatggttgcggatatgcagcgactggatcaggtacttcgtgaactgcagccggtactgaaaaccctcaacgacaagagcaatgcgctggtatttgaggccaaggataaaaaagatccgcagccgaagggagcgaaacaatga

SEQ ID NO: 95439 - DNA, 354 bp, Enterobacter aerogenes
atgtcaaaatcggcagcgggtacggtagacgagccggggcgcaacgttgcggcaaaatcaggtcttaaccgggcgatactggatcagggctggtacgaaatgcgccgccagctcgaatataagcagcgctggcgcggcggggaagtgcagaccgtaaacccggcatataccagccagaaatgctcctgctgtggtcataccgcgaagaaaaaccgtcaatcgcaggcagtatttgtctgtgtggcgtgtggttacgaagcgaacgccgacataaacggcgctcgaaatattctcgcggcaggacatgccgtgttgtccgggattaaccccggacgcgcccgtaaggcggcgtaa

SEQ ID NO: 95440 - DNA, 423 bp, Enterobacter aerogenes
atgttcttaattccaatggaaaatcctgagaaaatcgccatccctttatttctcgagcggtgtgcagctggcttccccagccctgcccaggattatacttccagtgagctagacctgaacgattattgcatcaggcatccatccgcaacatatttcgtgcgagctcagggaaacagcatgcaggatgtcggtatgcgtgatggagatttgctggtggtggaccgttctctgcgtcctcaacatcgcgatatcgtgatcgccgaggtggacggcggcttcactgttaaacagctccagaccactcccagactggccctgttgcctatgaacaatgcttattcaccaatttacccagaccccgatgaactgacaatttttggcgtggtgactcattgggttcatcgtgcccggggtaatctgtaa

SEQ ID NO: 95441 - DNA, 1182 bp, Enterobacter aerogenes
atgttgatgcagcatatcggtgtcggctattttgggtattaccgagcaactgcttatgcgatgaaacactctcttatgcccgagattgcgaagttaagaatgaaggccctgaacttctgggataagcatggtatccgtgccgcagctgatgcttttggcgtatcaacacgaacgctctactggtggcgccggttactgcgcaccggtggtccagaagcactaattccaagaagcaaagcccctctggttcgccgttcaaggcactggcatcctgatgtactcaaggagatcaggcgtctgagaactgagttacccaatctcggcaaagagcagatttttgtcaggctgaaaccatggtgtgaagcgcggcattttacctgtcccagcacgtcaaccattggaagaatcattgctggtgctcacgataaaatgcggatgatccccgtacgcctcagcgccaggggcaaagcccggttgataaaaaaacgctcagtgaagcccagaagaccaaaacaataccgcccggtaaaaacaggcgaactcatagggatggacgcgattgaactcaggatgggggacctacgccgctatatcattaccatgatcgacgagcacagcgactatgcgctggccctggcggtcccttcactcaacagcgatattaccagccatttcttcagcaaggccacaaagctctttcctgtcgctatcagacaagttgtcactgacaacggtaaggagttcctcggtaactttgataaaacgctacaggaagcctcgattaaacacatctggacctatccgtacacaccgaaaatgaatgcgacctgtgagcgatttaaccggacacttagagaacaatttattgaattcaatgaattgttgctttttgaggacctgaatttgtttaatcaaagaatggctgaatatctggtgctgtataacagcaaaaggccacataaatcactcgaactgatgacgccagtggactatattttacgtgagagtaaaaattgcaatatgtggtggacccatacatctccttgccttacggcagctaagaggctactctgttggtgtctagtcaagcagatggcctcgtgtggttggttaatgaaaattaacgtcctacggggctttcttctttctgcctcacaacatcaaaacactcaaacatcatga

SEQ ID NO: 95442 - DNA, 159 bp, Enterobacter aerogenes; identical to SEQ ID NO: 23262

SEQ ID NO: 95443 - DNA, 1068 bp, Enterobacter aerogenes
atgcgcagcaaaatcagcaaaacctcgatctcactaatctgtttgatgctggtggccacctctgcggaagcagggtatcaatccaatcggtcttcctacaaatcatccttccgcccatcgaccatcaccaagtcgtacaactcttcaaccagaagccaggcaagccgcacggttaacgatacgccagcaccagctggcaccaaaccactgaccaccagccagaaagcgatgattgcaggttctggagccgcattaacggtcggggcagtttccgcgtcctcagggaataaaccgtcagagagcacctccgggaaggtggagaaccaggctggagggtatgctgttgtcagtagtcgatctcaggccaagggagataacgaaggcgctgctgcaggcactacgccaaagaaatcagtgagcgggtcggagctggtggctaagaaagggactatacctgcatcaagtccaacatccgaaaaatcgtcgtctctcccgtcgtctcagagcattccaggaagttctgagcggggctcttcatctgtaaaattcatccctccttcacagaaccttgtaagtaacatcatagagaaagataaaagtaatcatttcggtttctcgcatcttgcgatgctgtactggataacgagcagcaacaacagccatgcatcctcgcttacatccagcgacaaagagtggattcagcaacagattgaagagcaggaaagtaacggtgcaagccgggtagctgcgatcaatgagctgaaagcggccggaatagatacctcatcgatgacggttgcggataacagccaacacgcgtcgactgtctccttctcctacgatatgccgacagaattaaaggcgggtcaggtctggacgttcgttgttaatgccacatggaatgataaaaaacaggctccgtcatgcgagttgcaaggcgcgaaatttatagcagacaaagacaagttatacggcatgtggaaagcacctgaaactgtcgggcagaaaacgcaaatgaagtgtaaagcgtttggtgtggaagaaattaaaacgctggtgtcttcctga

SEQ ID NO: 95444 - DNA, 870 bp, Enterobacter aerogenes
atgtccatcgaaaatacattgattgatgaattaaatacatcagagaacacaggagatattattccttctgtacctattgatttaatcattgctcaacgtactgctggcattgcggcgtttatggaaggtttagagaaactcagagaagcagaattgttgttcgcagctgctgctgaaaaggattggttctcggggctggatgagattgtggcgtcaggtaggcgttgccgcaaagaaaatgaaatagaggctttacgccgcagggtggctcgttgtgttgatagcagtatctggacgcgcctgatgacccagacagggatgtttacatttatgagtagtgagcaacatgataaatggactgaccaggtatacagtgaagaatgccctgaagttactctggacaatgtcatcagtacgtttcagcatcttcatgcctcaaagaacgaaacatttgtaactggtattattgacgttttccgtaagctgtcctgggactacaaaacaaataatccttgccgtctgggcaagaaaattatcctcgaaggtgttttatccataaatatctcgcgaaaccgatacgcttcggtcaggactaatgcacagaactggattaatgatctcgcccgtgctttctgccttatcgacaataaaaacgttccagattcacggatagcggaaggaagccagtacagggattttatcaacttaaacagttatacgttaaacggtgtgtttacctgtgagtggttcactattaaatctttctggaaagggtccgctcatgtgacgttcacacgtccagacctcgttgacaaaattaatgagattgtggccagtagataccctgatgctttaccatccagagtatga

SEQ ID NO: 95445 - DNA, 321 bp, Enterobacter aerogenes
atggctattgaaattaaagaacgctataccaccgctgttatcagcacagctcacatttctaaagatgatgcagtgttattaactgaagccagttataatcctcgttctgaaagtggtcgtaactggattcacgcaaatgaatatggttacattattcggataacttgtgataatcaggaatggaaacaacatttacgtgatgatggtatatcctggcctacaatcgaaaatatcgaaaaagtacttaacgcagggttcgaatgtgttcactttgatcgtgacgcagatattgtggatgaacttattgcgtgggactggtaa

SEQ ID NO: 95446 - DNA, 315 bp, Enterobacter aerogenes
atgggcatagaaaatggaaatagttctgtacagcaagatgttcctgcaaccgacaatgacgttcgacatgaagtgattgtcaccggctgtgtgacaaaatatggcagagggattcatttctgtaatgatgagctactaagtggcgctaatcataatctctggttcccgttgagctctgaggaagactggttttctggcattgagcgcgtgctgatgatgaatggactggcggaaaatgtcgtcaaacttagccctcttaatgacgggaaagattatcacgactggaaagtgacgtataaccgccggaacgtctga

SEQ ID NO: 95447 - DNA, 252 bp, Enterobacter aerogenes; identical to SEQ ID NO: 23302

SEQ ID NO: 95448 - DNA, 219 bp, Enterobacter aerogenes; identical to SEQ ID NO: 23301

SEQ ID NO: 95449 - DNA, 498 bp, Enterobacter aerogenes
atgaaattttccagattctttgagctgataactgccatatgggcaaacaaaatcaaccagcgccgcgatcctgaagtcacgatcatcatccactctccgggaagtgtcggagttactccatcagtagaagtcgagtccatcgaggccgggttcgactggagtgccggtcaggtgttgatttacccggcacagccattgaccacgcttacgccagaccaggtagcagacataaccaccagcgtgcgcaaaggccagtcctggcatgcctatgaggcttacaagaagcataaagccgaaatggctaccgccgcgactgagtatttgaaagtagcaggacagcgtgatgaattattgacagcccttgaagcactttctgctgcttgtgacactggagaacgtgaccgggatggaaagcaaagcggagtagttattcctgacaaacatgctgtatgggctgcgcgtgaagccatcgcccgcgtcaaaggtggtatagtatga

SEQ ID NO: 95450 - DNA, 228 bp, Enterobacter aerogenes; identical to SEQ ID NO: 23298

SEQ ID NO: 95451 - DNA, 645 bp, Enterobacter aerogenes
atgacaacagaaaccttaagcagagagtggttacagcatcaaatttcagcaattgaaggcgctggcatcactgacagcaacacattggctgctttcaagctggcgctggccgcgatgagtagcaagccggtagtggcggatgaggtcgagcatgttgccgctgtattagagcttatcggtagctttgaggctactgatattgatagcgacacagtagatttacgttttgagatcgctgatgtcgacactggctctgacgtatccattactgaatatgccgcacgcggttccgccattatccgcatgctgactggcatctcatcggaattaccagatggttacgttctggaggcgctgaagaacacgcaaaccgagaatgaactggcacgaggccagttattcatagcccagcgaacgctattaaatcagcagcgaaagattgcagagctggagtcccgcaccgtgcagctgccgaaacctaaagattctgacccgggttggaaaattgatccagaatttatcagcaaagttcagaacgcaatagggtacgatgaccaatgcgaatgttgggagggtacaccgtccatggaggtagtagaggccgttttgctggccgccgctggcatcaagatggaggttgaatag

SEQ ID NO: 95452 - DNA, 387 bp, Enterobacter aerogenes
atgagtagagacgaaaatattcaggctgtatttgatctaaaagctggttatacacttgggctcgccgacatcgagattcttaagagagtggcccgcatggcgctgaccgcaatggacggcgagccggtagtgtttacagacgaacgaaaccttcatcatattgccatgggccgagaaacctctctgatttggggaaagcagaactcagagacaggggatataccgctctatcggcacgcaaagctagtgccggatgcattgatacaagctgtagcattttatgagcaggttaagcgtgaaaatccgccagtagaaacgggagcttataaagatgccgttgagtgggtactgcgagaagcgtgccgggctgtcataaaggatgaatga

SEQ ID NO: 95453 - DNA, 336 bp, Enterobacter aerogenes
atgagtaatgtatctgtaccaaaaattcctctatcaaattttgagtgcgttcattgcggtcgcatttattatgacgcagacctttgttcttcagacgattgccctggtaatgacatagctatgccagaacttctgaaccactggacagtggatgaagtagctgaatgtctcgatggggtggggcaagaactttacagaaaattatggtcatatattgaagcaacaactgatggcgaagcgccactggctaaagttgcatggggtgatttaactcgtgagcataaggttgaactggtccatgccatccagcaagagtttcctgacgacgatatttaa

SEQ ID NO: 95454 - DNA, 198 bp, Enterobacter aerogenes; identical to SEQ ID NO: 23291

SEQ ID NO: 95455 - DNA, 207 bp, Enterobacter aerogenes
atgagcaatttacttgaaaaagctttaatggaactttctgacggctcgcgagagaaaatgacagatttaactagtataaccaagcgcatgacagatttagctagtataataaccaagcgcatgactccttgccccaactgccgtgtcttacttcctcctgatgctacacagcatgtttgtgttatggaggttattacctttgagtag

SEQ ID NO: 95456 - DNA, 273 bp, Enterobacter aerogenes; identical to SEQ ID NO: 23289

SEQ ID NO: 95457 - DNA, 177 bp, Enterobacter aerogenes
atgtttaggtggaagatgaaagtcactgtaaaatcaatgaaagtgttacttgccagcaccggaaaaaaaatgaagttaacgggcagtaataaaaacggggaccgcttctatgttgtgacagggtggagcggtgaatacaccattcggggcatcgcctggcaactgggattggtgtga

SEQ ID NO: 95458 - DNA, 288 bp, Enterobacter aerogenes; identical to SEQ ID NO: 23287

SEQ ID NO: 95459 - DNA, 525 bp, Enterobacter aerogenes; identical to SEQ ID NO: 23286

SEQ ID NO: 95460 - DNA, 768 bp, Enterobacter aerogenes; identical to SEQ ID NO: 23285

SEQ ID NO: 95461 - DNA, 660 bp, Enterobacter aerogenes
atggcaggctctcagctccagctaagttctgatgttatggttgaccagaaaatgaaaaacattgttgtccaaacaagttattttaaaaacaaaattgacaacacaaaatttattcgaattagcaatcacacaagatcattcccattaatcctctccttaccggaaattaaatactctgtcatcataaaaaatggacacagtacgcttctctcagaagatgatggcatgatttgggtagaacctgggagtaacgtcatactaaaaattaaagaagctgaaaaactctacgatttcattccaatagtctacattacagggaaaaagaaaccaaatgtacttactgttttacccggtaaagcaattagtgctgcaaaagagacaaagctaattgaatataaagtttcaccaaatcaaaaaagaatgtcacatgatgacaaggttgttaagctatcaggctttggtaatataaataaactgaagaaaggtttttatgaagtacaggtcgacaaatttacttctgtgagctttgataaggaggcttttataattacccgaaataatatgcttgcgggatcacaatattacactaaaaatcttgttgcctatccacatgaaaaaataataatgaacattagcggagaaactcatgttgaaaaatag

SEQ ID NO: 95462 - DNA, 501 bp, Enterobacter aerogenes
atgttgaaaaatagtctgatgttccttgtaataattttactaacagcttgtcagcaccccccaggatggcataaaacgctacccgcgattaactttagccctgttaaaacagttgaaatgccagggaaggttacaggggaatattctgttcgcgtagtcaatgcaggtatcgacgtatatataataattgacaatggttataatgagtttatgactgtagataaactttccttatacgggaatcgttgcggatatgagtctcagggggagttgctcattcctcccgctgcagtcagtacatatatggttcctaatgtagcattattaggtctgtgctatacagatgatataaagttgattttcattaacaatacattcaatggtttgtccaaggataagaaggatacaactgtccctattgaagtgatgatgcagtttaagcttacttctgctaaagaaaaagaggaatttaatgatgttatttatagctcgtggaattaa

SEQ ID NO: 95463 - DNA, 2718 bp, Enterobacter aerogenes
atgaacaattcacgtctcgcaaaagaacttgaaagatataacttagggcacttcattcccgtggtcgacagaatggtggatgccccttattttttgctggaagataacgcggtaggtttcttttttgtctgcaacccttctcctggattgtatgataaccaacaaaacctattgacggatctgtttaaaatggattttcctgcggagtccattatgcaaatgacactggctgctttaccggatgtcaacatatcattgtcccgttggttacgtcgcagaggtaacaggatgggaggtagggataatgaaaaagcggatcttcttaccgtatactcactggattacctgacaaaaagtcaatatgagcctttgaaagaagctgatggcattaagatcacgcaagctgatgatttgaagcttaggaatttcgagttgtgggtaacggttaggatacctattaaaggtttttctcctaatgaatccgaatccatgcgactggatggcctttttaaagaccttctatctaaactagaaggtttaaccttgtcaccaattgttggtaatgctgacacatggttgtacagtgttgataaaatattaaaccccggaaaagactccagatggaaatatggtggacttgaagctagtacattaatgccattaaataatcaggtcaacattccaggaaggaaatatgaggtgggggaggattatttcgcgtcattgtctgctgatgatgatgagacagctcaacgatattttaagcatttgtcgatgacaaaattccctgaatatgtcaactttggtgctgtttacgagttggttgttgactggatgactggaagcaaaaccattttctctccttttattatcaacttctgtatacaattcccacatcaaaagaaaatacagaaagagtatcttcgttataaagcgataacagataatcagtcaaaaatacctattgttttaaaatatcttcctcgccttgccgatatggacaaggattactcggcattgactagagagttggaggataaagctaaactactacaaacttacatgacatttatcgtcatggataatacactggaaaaagtgaaaatagctgcaaaaagtctaattaactattacagcgagaaaaaaatcgttgtggccgatgatagttatatttgtttttcaggtgtcatgtcggctttacctttatgtaatgatccggcgacttttagagatatggatcgtggtgatgtaatgactaatacgggtgcggctcacctagctcctatctttggcccgtggaaaggaaactccacaaatccagtcattccatttgtaacccgcgagggacagttggttatgattgatattttcgaaacttcagccagttacaacgtatgcgttggggctacctcaggggcaggtaaatcatttgcagcaaacaacattattctcaactatctttgttctggcgagcatataaatccgctttatcattttgatgatattagagatctgcttacggcagataaatacgatccgcccctggacctgaatggcaaatttaatgcgtcaccagatggtgctcaggtgtttgttgttgatatcggacgttcatatcaagggcttgctgagcaatttgaggactctcaatttattgattttggagttgacgctaccttttctcttaaccctttcgctttcctggtgagaaaatatacaggagatgaatcattggagggattaacgggaaattcaggcgaagaaagtaaagaatcagacattattgctcaaacaatcatggttctgaatcaactaaaactaatggcttcaagtaatggtaacattagttctttacaggaagcagtaatgcttcgtcttattgctgaggaatcaaatagccctgaagatggatatcttccttcagttactggcttcgctaaaaaatgcatgaagcatgagaaacaagaaattaaagatataggcattcaacttggaccttggtgtgaaggcggcatttacggtaggaggtttacaacatcattgccacccattaattttaatagccgcttcattgtacttgaacttgaagaactcaaacctacaccacatcttcagtgggttgtgttaatgtcgataatccaggcagcacagcatgctatgtttattaaaaaggatggtcgtcgtcgtttgtttatacttgatgaggcctgggagtatatcggcgaaagtaatggtgatgatgctgctgttaacttttttactaaattccttgaagcagcatggcgtcgtttccgtaaaacaaactgtgcagggatctgtattacacagagcttcgaagacttctacaagtcgccaatcggtgtagcgatagccaacaactcaccatggaaatttattatgaagcagagcccagaggcgattgattcaatggagaaaaataaatatatttcagcatcagcatcagaatatgaacggatgaagatgatcaggactgtaaagtatgttttttcagagattatgattcgttttgagaacgtgcaacaaatcgtccgtctttatgttgatcgtaaaatggaactttgttttactacagacccgtctgaccgacgtaaaatatggaaccttgttaatgacggatatacgtatgccgaagcaattgacagggtttatgaagaagagctagtacagttaggcatgaaaacaaggcaggttgcttaa

SEQ ID NO: 95464 - DNA, 738 bp, Enterobacter aerogenes
atgaacaacatcacgaaatttctcatgtctgttgctgcggtgtcttctttatcagggtgcataggtcaatctgagagcagctgcccaggtattgaaaaaggtgtgctgtgtatggggccacgggcaattatggaagcaactaacaatcatgacgatctcaaatatttaaaaaaggaaggtgatgagggaaagcaggatattgcagatagcaaatatccaacgtcgttgactccgccaccgggcgtgcagtacccaaagaaaccggtagtaagtgctggccctaaacccttgttcaccggaacttctaagccggtgaagccgctgacaacagcgagttatgtgtcgcagcagcgcgtaccagcaggaaagggactgtattcagaatttgatggcaagccggtaaacccaacgctgagttcatatcaagagcgtcagtatcaggtacagggtacgagacaagctgttatcgctcctgagccgctggctgtgttaagacaaggcaaagttatgcgtgtgcttatcgcgccttacacagacgataacgacgctttgaacctccctggctatgtatatgtcaatgttaagcctcaaacgtgggtggcaggtgattcagcattaaaaaatccggcgcgaattgtcccactggaaattcaggaacgcgctcgtgacaacatgcagcagcagcaacgtagtactaaaggcgtaacggcgaatggggttaccggtagttctttctag

SEQ ID NO: 95465 - DNA, 858 bp, Enterobacter aerogenes
gtgattatgagaaagttacttatcaagttgctcgtgtgtatagcactactcaattcaactcattctgctgcagctgataagtatgatgcagaagctgcggcgttaacacgcgctgctgctgaaaatggtctcgctttaaatcagtcgtcaaggggattagttagcaagcttagtccttaccagccaaaggatgctgtctacttaccgacgggtgggatttttttatttgaggatcagcgaagtggcctcaccctagttaccacaacgggtcgctactctttttcagaaggtaaagtttatgatgttctcaggaaaaaacaagttcaatcgatatcagatatccgagaaagttactttttaccattgaacgaagcaccgttcaaacctgaggatgcctttactatccagttcgggaatccgtccctcaaacgacaggcagttatattcatttctcttgattgtcaagattgtattgactttcttaaaaagatgaatgaagaaagggaacttgttcgctttgatattgttattttacccagccctggcgaatcagctaaacgggtaaaacaaatgtggtgctctgttaaagctggtaaaattaccaattacgatattcttcagtcgttattaggaaaatcaaaagatataaacaaccggcttattcctcatgaaaatctgaaagattgttcagtagaacctattgttacaggtctatacctggcatccatttataacgttcaaggcatcccatctgtagttcgtgaagatggagtgttgggcaatggattaccgactgattataaaaactggttaaaactgaatttacaacctttgcttaaaaatccctttaacaaataa

SEQ ID NO: 95466 - DNA, 465 bp, Enterobacter aerogenes
atgactcaaccagttaaagatgaagaccaacatgacgctgattttgaaaaggtgtcaagcgaacagaaaagcctgacattctcactgtcttattctttagtcgaaaaggctgttaaaatcatcattgtcgtcgctatcctggtatgtatttcagtgtatattgggaagagaatgaatgaaggagtaggactgtttcataagagcgtaaaaattgccgttcttaacccttctgctttaaatgaacagtatttaaaagcacacaatggaaaaggtgaaggttatctcccttatattcgcaagttgatggcactttaccgggcacgtgatttcctggtgctcgatatgaattatgtcattacacgaccatcaacagtaaatgaagtagcttacatagatgaatcagaagtagaaagcgaactgactgaatatggtatagaccctaaatattttgagggtaaacagtga

SEQ ID NO: 95467 - DNA, 1182 bp, Enterobacter aerogenes
atggatgaagaaggtcagaaaaggtttttgcaaacagttcagcaggaaaaccgtaaagatcaacaaaacatgttggatcaggtaaagcaaatggaaaaatataaggccgaaaattccagtgagctgactgaacttaaaatccaaattaagcaactgaaccaacagatctctgatatgcagaatggaaagggacctgcgagcaatcgtagtcttgataaccgcgtaggccagccggtctatgaaaatcagcagcaaaatccagcctatcagctaaaccgtaatgcagaagggaatcgcaatcaggaaataccagttgcaggagggattgcgcctctacgcactcagttggtacgcactataaccagcaacagcattaccacggccaataacggtgttcttgaagtcacaccaattgttgaaaagaacattactaacgcgaatcaaaagcgggtcgttaaagctggacctggagctgctatcgcaggagatggtactaagccggttgatagcaatgctcgccactcaaagcgtgctgaagaccagtatttgcctgctacgtctcaactgtatgcagttctggtgacaggtgttgaagcgccgacctcattgtcgtctcaagaagaacctttgggagtaacgttcagggttaaacgcgatgtgtttttacccaataactacagaatggatctacgtgactgcaacctcttaggtactgctcgtggagatatggcttctgaacgagtctatatccgcacaactagtctgagctgtgttaattctaaaggcaaaagctttgatatcaaattggaggcatacgctgttagtgaaatcgatggtaaagccggtatcaaaggtacgcttatctccagaaacggtaacgccattatgggtagtgcttttgcaggtggacttagtgcgctggcgcagggactgagcccaagcaaagttagccagttgaatatcgaccctaactcacaagcacaataccagggacctaatattggtgctcttggcgctgtgggtgcaagcggtatggtctcaggaggattaaacaagctgacagactggtatacccacatgattgatcagcagtggccagttgtagagctttctccgggtattaatgcgacttttgtcgttcttagtggtgcatccatcccaaccaatttatcggcgaaataa

SEQ ID NO: 95468 - DNA, 780 bp, Enterobacter aerogenes; identical to SEQ ID NO: 16904

SEQ ID NO: 95469 - DNA, 348 bp, Enterobacter aerogenes; identical to SEQ ID NO: 6026

SEQ ID NO: 95470 - DNA, 840 bp, Enterobacter aerogenes; identical to SEQ ID NO: 6027

SEQ ID NO: 95471 - DNA, 786 bp, Enterobacter aerogenes; identical to SEQ ID NO: 16905

SEQ ID NO: 95472 - DNA, 1515 bp, Enterobacter aerogenes; identical to SEQ ID NO: 52478

SEQ ID NO: 95473 - DNA, 606 bp, Enterobacter aerogenes
atgtattcgtatgaagatcgccttcgagccgtgaggttgtacctgaagcttgggcgccggatgagcgccacactacggcagctgggataccccaccaagaactcgctgaaggcctggttggcagaattcgaacggaatcaggatcttcgccgaggctatcaacggataaaacggcagtacaccgatgagcaaaagcaacgggcagtagatcactatatcgaacaaggctactgcctgagtcacacaatccgaagcctgggctacccaagccgcgaggccttgcgtgcctggatccgtgatttacgccctgaattcgctaggacggtcgtcggcagcagcgctcccacagtcgcccgctctcgcctcgagaagcagcaagccgtcattgcactgaacctgcgcgtaggttcggcaaaggatgtggccgacactgtcggtgtatcgcgaccaacgttgtataactggcagcatcgattacttggcaaagtgcccctaaaacccatgacaaagaagaaaggtgacacctcgctcgagcagcggcatgaggcactactcagggaactggccgaactggagagccagaaccagcggcactgttgcaaatag

SEQ ID NO: 95474 - DNA, 213 bp, Enterobacter aerogenes
atgaaaactttgaagctgaaggaattgtgggaagaaaataaagcaattcgaattgcttttttgcttgtcctagcattagcggctcttgtgatggtaaccatcacgcttatgggcggagatgattcgagcaagaaagctaaaaaaattaagcctgtgactaacttgcttgacacttcttccatggctttgttgaataaatcgaacttttgctga

SEQ ID NO: 95475 - DNA, 519 bp, Enterobacter aerogenes
atgacaaaaaaaagtaacttttcaattttcacttggggcattttgttcagtgtcggtctagggatggggttttttatagggaatttagcaaaggaacgcaccgcgatagttcaaattgtgccatcggaatatacagtgcaagaatcagcgccccctggctttgatgattttaaggtatatgactctgacaaattgctatctgataaggatttcactcgaaagggtagctttgattcaaaaccggatgaaagttttgatgaaaaaagcatcaccacacttgatcagaaaaccaatgaacaggcaatagagttgcctcacattgaactggatagtgatagtcagttctatgagcaactcgaaaataacgttttcaaaaatttacgggctgagcctccttactctgtaccgcagatagatgaaaaggtcaggtcattgagggtaaagagatatttaccaccaagtaataaaggtcaatataatgaaaactttgaagctgaaggaattgtgggaagaaaataa

SEQ ID NO: 95476 - DNA, 1170 bp, Enterobacter aerogenes
atgaaaagaaaactcttaggtatactaatcacattaaacgtgctggctccatttgttcatgcagatgaaccgttcagtattccggcgtcggcagtgaatacacaagctttcgatgaaccaccagattccgccgaagctatgaatattgtaactaatgcagttaaacaagttccggggacagtggctgttaatcaaccaccaattgacagcaatcagccgcctgttaattcgaaccgcccgacaactgcactacctgctgcccccggactttcaccagcgagtgcttcttcaccagcggttcggtcaatgaccgattccctgttgaacaataccccttctgaggggcctgggcagaaagcggtaaacgaagcaaaaaaacggtatcagccaatgcaaaacgtcacggtgccgccgggtggaaacattgttctccctgtttcattaggtttacaaaaccgtatccagacgacttttaagaacgtaagcgtttctacaactgcaccgtcagaagatacaaccatctatgtagaaggtggcagtgtctttataacaactgtaaaagatgcgcctataggtatcatgttgtccgaagaaggggttcctgaatcaacatataacctgacattgatccccatcgatgtaccgggagctatgattcgtgttcaaacacagttaacgcgaaacatggccattgaacgtgatcgccatatcgctgaaaacacaaataaagaacttcttgaaaaagcgcaatcgggtgagcttgacgaaaaagctattgctcaggatgaccgcaaacaaaggataatagatattctttatcccgttgctaacggtgaggtacctaccggttttgcactccaactagataaactttcggttatacctaataacgaaaaatccccttgccggtttaatttttacgcaaaacttgggcaacgtcttattggggctcgtgaactggttgatgtcattcttgtgcaaaacacactgacatatccatcggttgttgatgaccaaaaatgcataacaccaggtgtgattgctacagcaatctttgataaagcattcttacaaccgggtgaaaaaactgagctgtatatccttcgtgacaagctttaccaggaacgggagtcacgtgtaactaaacgaccaagtctgattaatgaatga

SEQ ID NO: 95477 - DNA, 861 bp, Enterobacter aerogenes
atgaacgagaaaaagtcacttttagaaaacgtcatgaacttcttcaggtttgtaccgaagaagaagacagttgataaatcaaaggatgatgaggctgacgacgtccagtatgaaaaaactgaaagttacagcaatgataaaattcagcgtcataagtccatcctgaatttgtcaaaagaactcgagcctcctaaaaaagggaagaaaacgggtgctgaacttacctacagtcagttaattcagcgtgacaaaaaattaatcttaaacaatggattattgacggtgattgctggccttttggtaattaaagtggtctttttttccacaactgaggtcattgccatccctccggatatgactgaggaagtttccgttgccggaagtaaggcaagtgagtcatataagacgcaatgggggctatttatagcaaccacattggggaacattaaccctaaaaatgttactttcgttaccagttatattcttaagatgtttccggcatctaaacagagcgagttagaagcagaactcaaaaaagcctcggatttaatgcttgcaagaaaggtagatcaaacatttgttgcagaggacgtcaactttttacccagtgataatgttctttatgtatggggtactcgcaaaactaaattcctaaacgtctctgataaggaacaaactgagcgttggacttacgagatggttttgagtgtgaaaagtgggcgacctcgaatactgtatctgaaccagtattcagggacccctaatatcaaaaaagtcacagttaacgggaaggtattggaaaaagagttcactgaaaataccgatatgaacaagcaactgaacgaagcagaagctcaataa

SEQ ID NO: 95478 - DNA, 369 bp, Enterobacter aerogenes; identical to SEQ ID NO: 23366

SEQ ID NO: 95479 - DNA, 315 bp, Enterobacter aerogenes
atgaaaagtcggatggtagaggtcgctgggttaaatcttaaaattaccatacataacaacatgttagctttgagttataatattgacgggctcagtatttacaattcaagtcgtattattcgcaactcaaaactaaccgaatctgagattttcgcaagaattgacgctgatttggttagcaaagttttttctgtaaatatcaagcagataaacaacatcgtacactctaatgtctgcgtaatacctatacagactcaagctaaacaggttaactttgcggctggagtaatggcgtcttgtttcaagaatttctga

SEQ ID NO: 95480 - DNA, 669 bp, Enterobacter aerogenes
atgtgggtcacaaaagataatgaaattatctcagatgctgaaccggattcagacggttttatggaagttcgccgtccatgccctgactgtttaggttcaggtataaactgcctccagtgtgcgggttctggctcattgccggctgttatggaaaaagtatatcctgtgtacgagtgggcttctaaaaactctctacagatgccatttaaatcacctgaacaagcacttattaaaagctttcttaaagttattttagaggcacccaatcagggtaaaagtaatttttactcagcactcatccaaaaattggataaaagttactttcctacaaagttacaatttcgatgtctgaaacctaatggatatagaaaaagttcagtagtcagccttcaagtacggccctttactgccaaaatcggtaccaaactgtatctggctctcaccgtaattaaaattcaggtgctcaccagaaaatgttcttctgagagtttttcatctttacttttggagacctctgaccaccggcattttattgcttatgatacgcacccatcagggtttattcttggtaatataattaattgcaatgtccaagttgttaaacgactctgggttaataatatgagtatattgctggtgaaaatgatttcatcttctctgattaagtga

SEQ ID NO: 95481 - DNA, 765 bp, Enterobacter aerogenes
atgaatagtcataagaattacaaagagttagggttattgcaggatttttttagaaaaaaccataaagctacctttaattgtgatcaaaataaagttgagatcacctctagtgatatcactccacttcttgttaaaggtaaaagtaactttcaacaggctaagttttgtttatccggaccggtgatgcatttacggtatcaacctttatggtttgctattttgctgggactgaacgctagacaaccaatccatcaagaacttcagttcaatatttcacttgttgaacttatagaaaaatcgggacgtgtttgtcaggcactcggaatcaggcaagtcaactatacacttgctgaagtttcttactttttgttgctactcatagagttcagaatcgagatacaaaaaagtaatatctgtcagacctgttcggtttttacagaaatcagtcacgatatagattttcagtctatcagcatggctagtgttactatcaatcctagagtggttgacaaactttgggaactgactaattcggcgtcagtttttttgacaactctcttttttgccaagcgcccggaactatacagcctactgcaaaagttactttcaaaaactgaagaggtttcccttagcgacattgctcctgcaacgtttcaacacgtacagttgttatgccgtcatggcctcgtcacctacactaaaaagcataaaatacttgatattcatagtgttagtgttttaattgaaggcctccacccattgtaa

SEQ ID NO: 95482 - DNA, 672 bp, Enterobacter aerogenes
atgaaacaaacagctgacttttttatctctacagagcggaacgggaggctagtcaaaaatttgcgtgaatttagtgacgcaaatcctgacatttgccacaaagcggttaatggccaaccgtttatgatcgacccaagggcattagtgttagttccaaactggaactgccgtgagatgggtctgggagaggcatactacaaattacctaaacctgccgagcatattcagaatcttaaaaaagcatttctgaatggggcagacattgaccctataactgtagttattgttgacggtaaaccactggttcgacaggggaactgtcgtacaagagctgcgcttttggctcaacaagaatcaggtctccccatcctagttagattgcgtgagttccagggtgacgagatagaacaagaatggcattctctggatggggcgaaatctctccccctttgccccgtaggtcgcggcattgcctatagcagactggtaaatgatgccgggatgtctgttgagcaggttgcacaacgggaaaacatttctgaaatggcagttcgccaaatcatttctcttgcaaccatcgatgacgaattaaagacgttgattagtcaggatgtgatttcgtacacactctgtcctgatgaatcccctaatgattttggtaaaaatcattaa

SEQ ID NO: 95483 - DNA, 891 bp, Enterobacter aerogenes
atgcgcaaggttaattgggtattaaaggatattgaactgaatatccttgcgcttaatggtagtacaaaaatggttcagcagacattgtatccactttatcgaatcagttggcatgctttgattgctgaattagataaacaacatattcccctgccagcctcatttcataaggccagcaacatcagagaacgccagaattatattttgattattgatgaagttaatcgcgggaatatttcccgtatttttggggagttgattacattgctggaaccggataagcgattgggcggctatgatgagcgctcagttattctgccttattctaaagaattgttctctgttcctgacaacctgtatgtcattggtactatgaacacggcagataaatcattggctcaacttgatctggcattacgtcgtcgctttgagtttgtagaaatcatgccgcagccagctttactgtccgacctctcagtatttggcgttaatatcggtgatctgctgacagtaatgaatcaacgcatcgaagtcttactcgatcgtgatcataccctggggcacgcatacttctggccgctgaagactgccacaactgaggatgaaaagtgcaaactgatagctgatatttttgcgaaacgtatcattccgctactgcaagagtatttttttgcagactgggaacgtatcggttgggtactcaatgatagcgaaaaagcacctgaaaacagatttatccagacagatattatagaacatggaattaaaagcttattccccgagtctattgcgagccaattaaatgatcgcagataccggattaatcaaagtgctttctcaaatgcagccgcttaccaagggattttgcccaatgagggggctgtcaactga

SEQ ID NO: 95484 - DNA, 264 bp, Enterobacter aerogenes
atgcccttcatcacaactgaatgctttcaacacatccctaacccgaccagcaaacaattttgtacgccctgcttcgaatttaccgaagaacaaccgctcaattgcagaaacgtatttcactatactcgaatgtgcatttggatctgtaaccgcgtccccaaaccaattgatagcgtcaataaggcgctggtgaaggtgagtagtttctactggattgactatgggtatcaaagggctttgttgaataaatcgaacttttgctga

SEQ ID NO: 95485 - DNA, 321 bp, Enterobacter aerogenes; identical to SEQ ID NO: 67344

SEQ ID NO: 95486 - DNA, 1206 bp, Enterobacter aerogenes; identical to SEQ ID NO: 19666

SEQ ID NO: 95487 - DNA, 195 bp, Enterobacter aerogenes; identical to SEQ ID NO: 36234

SEQ ID NO: 95488 - DNA, 699 bp, Enterobacter aerogenes
gtggccaacatctgcacctcctttatcggcggcatggcgggctgcgcgatgattggccagtcggtgatcaacgtcaaatcgggcgggcgcgggcggctttccacgctcaccgccggcgtggtgctgctgctgatggtggtgttcctgcgcgactgggtgtcccggatacccatggcggctctggtggcggtgatgatcatggtctccatcggcaccttctcctggcgctccatcagcaacctgcgcagccatccgctgtcaaccagcgtggtgatgctggccaccgtggtggtggtggtggcgaccgataacctggcgtttggcgtgctcaccggcgtgctgattgcctcgctgaacttcgccaccaaggtcgcccgctttatggcggtctcctctgagctgaaggacgacacccgcacctataccgtagccggccaggtattctttgcctcatccgatcgctttatgagccacttcgacttccgtgaagcggtggagcgcgtggtgattgacgtaacgcacgcccacttctgggatatcacctccgtgagcgcgctggaccgggtggttatcaagttccgtcgcgaaggcacggaagtggagatcaagggtatgaatgacgcgacccgcaccctcgttgaccgcttcggagtgcatgacaagcctgaagaagtggaaaagctgatgggtggccattaa

SEQ ID NO: 95489 - DNA, 828 bp, Enterobacter aerogenes
atgaataacaccgttattgcctgcgttgacggctcgccgtcaacccggccggtctgtgagtatgctgcctgggcagccggtaaacttggcgcgccgctggcgctgctgcacgtgctcgaaaagagtgagactcccgccgtgtctgacctgaccgggagcattggtattgacagccgggagcagctgaccgaagcgctggtccgcgtcgagggtgagcgcagccggctgctgatggcgcagggcaaggccgtgctggccggctgtgcggagctcctgaagcagaccggacagccggacgcacagctgctgcaaaagcacggcgcactggacgaaatcctggcggagctgggcgaagtccggctgatggtgctggggcgccgcgggacgcagaatcaggtaggcagccatctggaaagcgtcattcgcctgcagaaaaacccggtgctgattgtgccggagacgtttacgccgccggcgcgggtgatgtttgcgtacgacggcagcagtgagagccgtaaaaacctgacgcgcctgacggtcagcccgctgctgcacggcctgagctgtcatatcgtgatggtcaacggtgacatgtcagccctgcaggatgcgcaggctgttcttcaggaagccggtatcacgaccgagacacgcctgctggaagacgagtccgtaaccggggcgctgtgccgctacgcggacgcccatgatatcgacctcacggtaatgggggcctgcgggcactcccggttacggcgattctttattggcagccacaccacggaaatgctgtctgaaagccgtcagcccctgctgatgctgcgatga

SEQ ID NO: 95490 - DNA, 1197 bp, Enterobacter aerogenes
atgcgtcagctttttcggtttatgtttcatcacgcctctcaccttacgttcggtgcgatgctgatggccatgtccagctttggacagacctattttgtctcactttacgggcaggattttcgtgaggcctttgggctcaccgacggcggactgggcggcctgtacgcaatcggaacggtgatgagcgccatcacgctgacctgggccggacggctgattgactacaccacgacccgccgcttcacgctggcggtcacccttttgctgctcacggcctgcctgctggtttccggcgcacaggcggcgtggatgctgtgcatcgggttttactttctgcgcctcggcggccagggactgatggtgcatactgcgctgaccgcaacggcgcgccagttcccccttgatgcaggcaaggcgctcggcgccatcgcgctggggctctcgctggcgcaggccgtttttcctgtgattgcggtgcagataagcgcgctgacgggatggcgcgctgcctggggcatcaatgccggaatgcttgttgccggcgtgggggtcgcgctgatgtttttgccccgcgggaaagagaagccgctgcgtacgttcagaaagcggggtgaggagaaagaaaaagaggcgccggtatggcgaaaccgcaacctgctgctggcgctgcctgtcgtgctggcctccccctttatcaccaccggcttcttcttccaccaggcgaggctggcacaggagaaaggctgggagctgtcgtgggtggcggtatggtttattgcctatgccattacccaggcggtatcgctgctgtcgtttggcccgctgattgaccggctctcaccacgcaggctgctgccgtggtttctgatgccacaggccctggccatgctggcgctatggctcagcaacggtcagtgggtgacgcctttttacctgattatgaccggcgtatcgtcggccattgcctcaacgcttgccaccgcgctctgggtacagctgtttggtccggcgcagctggccagggtgcgctcggcggttgaggcagggacggtgattgccagcggggcatccccggtaatcatgggcgtgctgatagataaccatgtcaccctgcatcttcaggccctgttctgcctggtctacattcttggcgccagcctgctggccaccggtatcaggacggatgcgccgcaataa

SEQ ID NO: 95491 - DNA, 375 bp, Enterobacter aerogenes
gtgaaatcttatctggccattatcattggtggatccgctggctgcctgatccgctggctgcttggcgcacgcctgaacagcctgtttcctgacctgccaccgggcacgctggtagtgaaccttgcgggcggatttatcattggtgcgtcgctggcctggttcatgcgccatcctgacctggatccggcctggcgattacttgttatcaccgggctgtgcggtgggctgaccacgttttccacgttttccctggaaatattctcacagctgcagtccggtaattatttctgggcgtttacttcactgctggtacacgtaaccggctccattctgatgactgccctgggtttttttgtcgtcacatggctgctgtga

SEQ ID NO: 95492 - DNA, 1182 bp, Enterobacter aerogenes
gtgtcagaaatcccagacagaaataaaaagaggatgtcagaagtgccatctgcatttttcagctcgcccgcagccggcggcatcgtgctcatcatcgcctcagcagccgctatcatcgtggctaactctccgctcagggagggatatgaggtattcctgaaatacaacgccgccggcctctccgttgagcactggataaacgacgccctgatggccgtgttcttcatgatggtcggcctggaaatcaagcgcgagcttctcaccggtcagcttgccacctggggccagcgcgcgctgccgggatttgccgcgctgggcgggatggccgtgcctgcggccatttacgtatggtttaatgcgggcagcgatgaaaccctcgctggctgggcaattcctgccgccacggacattgcctttgcgctcggggtactggcactgctgggcagtcgcgtacctgcctcgctgaaaattttcctgtcggcgctggctattctggacgacatgggcgcagtggctattattgcgctcttctataccagtaatatttcgtttctgatgctggccggtgcggcggtcacggttgctctgctgtttatcatgaaccgtgccgggattacccggctgtttccctatctgctggcggggggcgtgctgtggtttttcatgcttcagtccggggtgcacgccaccatcgcgggtatcctgctggcgctctttatcccgctgcgggtaaccgatccggataaacaatcccctcttgcccggctggagcacggcatcaatccgtgggtgacgtttctgatactgccgctgtttggcttcgcaaatgcgggggtcgcgctctccggtatgacggctgatgacctgatgtcgccggtaccggtcggcgttgcgctgggcctgtttgttggcaagcaggcgggcattttcggcctgtcgctgctggccgtcagcctgggcctggcaaaacggcctgaaaaaagtacctggctgcaggtttacggcgtatcggtcctgtgcggaatagggtttaccatgagcctgtttatcggcaacctggcgtttgcagaaagccccctgttggtggacgaggtcaaggtgggggtacttgccggctctgtactggcagcactggcgggtatgctgatactgcgcttttctccttcgcatccttcccggtaa

SEQ ID NO: 95493 - DNA, 195 bp, Enterobacter aerogenes; identical to SEQ ID NO: 36234

SEQ ID NO: 95494 - DNA, 495 bp, Enterobacter aerogenes
atgataaacatccggacaactagattagccatttttccactggctgttatccttttatattacccactaacttcaattgccaaaactttctcggcgaaagtggtgcgtgttattgatggtgatacagtccaggcttatgacggtgcaaaaaatacaagaatacggctctatgggattgatgcccctgaaagtaagcaagccttcgggcagaaggcaaagcaaacaatgattcagttagtagcaaatcaggttgttaatattcaggaccatgggcaggacgtctatggtcgtatgcttggcacaatctatcttaacaacaacgatgttaacgccatcatggtcgcaaacggtatggcctgggcatatcggtatcagggcaggttgattgttcctgaatatggacctcttgaacaaaacgctcgaaatgaagggaaaggtctgtggtctgatccgcactcaattgaaccacgtcaatggcgaaaagcgaaaaattaa

SEQ ID NO: 95495 - DNA, 819 bp, Enterobacter aerogenes
atggtccagattcttaatacaacaggtttaaactatcatgtagagcaaaccatcgctaatgccgaagagcgcattattttgataagcccttatctgaaacttagcgcaagaattaaggagctcattgaagacaaaaaccgtatgaaggttgatattcgtatcatctacggtaaatctgaacttaaccctaaagaccatgaatggcttgtcagtttaccttatgttcgtttgagtttttgccagaaccttcatgctaagttttatgctaatgaaaatcaaagcctgatatgcagcctaaatctatatgattttagtcaaatcaacaatcatgaacttggggtgttaattgtaaaggatgatgaccgtgacgctttcaacgcttctatcacagaggcccagcggttaatcaggatcagtacagaaaatattccttcaccaatatcattacaatcgggtagatctgagttgcaaaaaactcatgagcagaagagtgaacatacaagaacatctcaaaaaaatgatgaaaaacatagtatgttaacagatcctgtctcaaccgagtcagaggagagaacaagtaaagagggggatactaacccagaaccctcaaataaattaacctcaactaatttagctaaacaacataaaatgggtttatctgaaatgtatgcggaattaatgaaatcaggatacctcatagagaaagacggaaaatatgagttaacccctttaggtatttccatcggaggtgagagtaaacccaatcgttataaaaaaggtgagttttattttttatggccttctgatatttctctctaa

SEQ ID NO: 95496 - DNA, 399 bp, Enterobacter aerogenes
atgagcgagacattacaggttctcaataacatccgtacacttcgcgctcaggcacgagagctaccattagaagtgcttgaagaagtattagaaaagttcactattgtcgtcgctgaacgcagtgaagaagaaaaggcggccgaagcggctaaccgtgagcgtttagaaaaactctctcattaccgggaaatgatgatcgctgatggtataaatccgagcgaactgatggacgcggccgtcaacattaaagtacgcaaaaaacgtgaacctcgtcctgcgaaatatgcttacatagacgatgccggtgagcaaaaaacctggacaggtcagggacgtactccggcaccaattaaagctcagctggatgcaggaaaaactctcgaagatttcctgatctaa

SEQ ID NO: 95497 - DNA, 267 bp, Enterobacter aerogenes
atggatttgtttaacggatccagacatctaatcattgctggtattgttctaatttatctggtgttgatatgccgtatagtcagtcattatgaggtttatgcggtaatgaaccgtagacagacatcatccagggctggtaagtatgaagatgaggactcggatttagctaaccttctcataagcaagagtatggtttctctgtggttaaacgtcattacattagtattgattacatttttcactgtaatgatgtatgtgtcagcctga

SEQ ID NO: 95498 - DNA, 633 bp, Enterobacter aerogenes
atgcttcgatacgagttaacgccgaacaatgcaggttttatactgtggggagattcagaagccctgaatgaattacatgaactcattcattacatcgtggatgaaagcccactgattaaagttaaagacggatttatgttatcccttgcctatgatattcgtaaagcacgggaaggtaatcgtcgtgttgagcaacatcagtatgatcaacatgatacatataagctttatggtgttgagcttttatggcctctggtcctggtacagtcctcaatactcagaaactcaatgggttatattcagacagacaaaaaccagttgtctgtcatgtatgcctttgaatacctgatagaatcagcattaacagagtctgagagaacaacgtcgaatgatattatgctaacagtaaaatatgcatcagactctgattttaatttcatagaggataatattgacagcaggtgctgctattttatcagcttatctccggagcaaagaaaaaagcagttaatcagtattgttcgttcttttcattcattatggggtaagtatgcccgtgaaaagcaggacataaagatgctgaacgaaatgaataatacatcatgggtctggccggacaatatcaactggtga

SEQ ID NO: 95499 - DNA, 1404 bp, Enterobacter aerogenes
atgagcgcagaaagctcaggagtgtttactttgaaagagatcaaccggatcaagattatacaggacgtcattgaacgtcgcatcacaacgcgccgtgcggccgagcacctcggtatcagcgacaggcaatgccgcagacttcttgcccgttaccgtgaagggggaccgcttggtatggccagcagacgatgtggcatgcgtggtaaccgccagttgccacccgggctcgcagatcaggctctggaactgatcaagacgcgttatgctgatttcggtccgactctggcgcgtgaaaagctcgaagaactccacggactgtttcttggcaaagaaactgtccggcgcatcatggtgcgggctggcttatgggttccccgtaaacaacgtgccgcaaggatccctcaaccacggtaccggcgtccgtgtactggtgagctgatacaaatagatggctgtgatcacgactggtttgaaggccgtggcccggcctgcaccgcgctggtctatgttgatgatgcaaccagcaaactgatggaactgttgtttgttaaatcggagtccacgttttcttacttcgaagccacgcggcgctatatcgataagcatggtaaaccgctggcactgtacagcgataaagccggtgtttttcgtgttaacaataaacacgccacaggcggagacgggcatactcagtttgggcgagccatgcatgaactgaacatccagactatctgtgcagaaaccagtcccgccaaagggcgtgtagaacgagctcacctcactttacaggatcgtctggtcaaagagctgcggttacagggcatttgttcaatggaggctgcaaatgacttcgctgaggcctatatggctgactataaccgccgttttggcaaagtaccgcgacatgattttgacgtacaccgtgctgtagaacatgatgaggacctggggcttattttcactgttcgtgaaaaacgtaaagtctcaaaatcgttgacgatacaatatgataaaatgttgtacctgattgaagacagcgaactgagtcgccgtgcaataggtaaatatatcgatgtgtatcactatcctgatggcagaaaagagctgcgcctgaacggtacgctacttccctactctacctacgaccgactgtcagaaatcgaccagggcgcgattgtcgataacaagcgtcttggccgaaccctggagtttatcagtctggtgcagagcaagcgggataacacgcgctctcagtcaattcccgctggagatggcccttcccgacgacggccaaagcaggaagggaagaaatcccagcgctcactggataatgatgacatgctcgaagcactcaaacagcttcagtcacgttcagaggacatttttggtaaaagagcccgctga

SEQ ID NO: 95500 - DNA, 915 bp, Enterobacter aerogenes
atgcattcatacgaggaccggattcgggccgtcgaactctattaccggtacggaaagaaagcctccgttgtcgtcatggagctgggatatccttccacaaaacagctgggccgttgggttcggatttatgaagagaagggcgatttacccagggaattaaaaccaagagaacgctattcacgtacacagaaaattgctgctgttgagcattatcttactcacggtggttgcctgtcgtacactcgccgagccatcggctaccccagtaacgaaattctaaagcgctggattgaagagttttacccaaatgcgcgtcccctggtcattcgctcaggcacaagcaaatgcttcagcccgcaagagaggtctcaggccgtccgggagctctgtaaccgacgtggaaccgcgcgtaaagttgcacaaagcataggcgtcagcgtcccggtcctgtacaaatggaagaaagaccttatcagtgacgaggcttatcaatccatgcgcaaacgaaaggcagcccctcaggataaaaatcaggatgctttactcggtgaaatccagcatctcaggaagcaggttcatcagctgcagctcgaacgtgacatactgacaaaggcgaatgaactgataaaaaaagatctgggcatcagctttctgaaactgaaaaacagggagaaaaccctgatagttgatgcccttaagaaaaagtaccccgttgctgagttgctaagcgttctgcaacttgcccgcagctgttatttttaccacaaagccagcaaacgtctgtacgataagtatgcggaaatacgcgtgatcatggccgatatctttgaggagaattaccgctgttacggctaccggcgccttcacgcgatgcttcgcagtaacaacggcactgttgcaaatagtcggtggtga

SEQ ID NO: 95501 - DNA, 252 bp, Enterobacter aerogenes
atgaatcttgataaaaacttacctgctttagtaatgaaaaatgttgaggataacatgggggttattaccaaatatctcaagcaaacagaagataacgctcttgtatttattattggagaaacagggtctggtaaatcctgtttggctgaacttgagtttccggatgctctctacccgactgctcaacaatttgaagaatgtgatcacatttcggaaatgttcacaggttttgatgtagtgaggctttgttga

SEQ ID NO: 95502 - DNA, 411 bp, Enterobacter aerogenes
atgacgcagagtgaaattactgttaattccttttgggattggggaacgtcattattaacaagtaacggagcagtaattttttatgccttgcttgtggtattggttcttggcgctgttttgtttaaggacttttctttactgacaacatttgcttccggactggctggcattgcactcctgtgtggagttatgtccgtgctggtggttttggtgttggcaagcgaccagaaggaacaggactggcaagactttgctgctgagcattgcaaagttatagaaaaaagagaaggtgctaccacgacgggagtgggtgtttcactaaaaggtcaggcaggtgtttttattggaggtgaacctgaccagacagggtatctctgtgacgatggtgtaacgtactggaagaatgaataa

SEQ ID NO: 95503 - DNA, 408 bp, Enterobacter aerogenes
atgaaaggtatcaatcaatcaaatggtaaccacttaaagtttctgtatggagttacctctacagatcgtcttattcagcacgagcatgccgatgacttcattgatagctgcatttcaaatattggcagcattcataaaatgtccctgacttgttatcgggctggtggaccattaactgagctggtgcttttttacggttcggataagacattctcaatcaccattggcgttggcgatgtagatgtttccatggttaatgaagacgatatccgaatttctcacaaacaaataactttgcctgatacgaccgatacattaatactcgttactcgcattgcaagacgttgtgggctgaagccgatgttacctgaagcagaacaattcagcacagttttagactttgtttga

SEQ ID NO: 95504 - DNA, 396 bp, Enterobacter aerogenes
atggcatttataaagggttttcttttttttattattatggcgctattggtctacggagtcacgggattaaccgccaaagaatcaattgtgtttactgcatttggttttgggatttcagcgatattatgttcattcattggcattatggttgtgttggttgtgactatgtgtttgtttgcattcgaagaacttggcgcgttgcctagattatttggtgcccagataattttaattgctttgtggaaccttatatttaccgtggttttgccggatgaaaaagcacgcaccatactcggttttgatctctacaatatttcatcgtatttgctttacggtatgaccgtccttttaggtataggctcagtggcaatgctttttaacaaaaataactcctaa

SEQ ID NO: 95505 - DNA, 183 bp, Enterobacter aerogenes
atggttctttttttaaattatcttacaaatatcatgcgaagattttttgatattgttctgggtaaagacccatatcgctttatcgtggtgttaatcctgagccttacactcggctttgtttttaatttactcataagatatatttcaccgctggttgcgtcgcaggggtttaattgcgcgtaa

SEQ ID NO: 95506 - DNA, 1242 bp, Enterobacter aerogenes
atgactactgcaactatggcaactccagctaaagccaaaaacgaaaatgtttctctgcgtaccttcttagaaaaaaatggtatcggtggtcgtctgggcaatggtcttgttatggacccgacgcatctgaacatcatccctggctttaacacacgtaccgctggcctgggtgaggcttactgggaactcccggaagttaaggaccacctggcgcgtctggctcagcaatatgccgatagccctctggaaatggcccctatggttgtccaggttcgtgatggtcaggttgtcattcgtcagggacactgccgtcaccgtgcaattccactggctaataaaattcgcgcagaacggggtgagggcccggttgataaaattcgtgttgacgaattccgtggctctgacagtaaagcagaactttttaatcttaaaggaaacgatcaacttccggtctcgatcgttgctcaggctgagtccatgtatcgcatgcacaacagcgcagaagagcctatgagcatcgaagagctggccgcagaccgtaaagtctccgtaacccatgtccgtaaattgctcaaagttcacaccgccccggaggcgttaaaaggtctgatcgttaaaggtgtagtagcatactacgcagcactcgacgtgatggagaaatacccggataactgtgtcgctatcattcaggaagcgtttgataagtttggcaaagctaccgacaaaaccattggtcaggtccttcttgctaagcgtacaggtgaaaacgacactaatggtgaatctgatggcaatgtgacaaccattacaacgactgatgcaggtaacggatctaatagtgcctctgacgcggctgctggtgtcattgaaagctctgcaggcaatgatgcaggcgttgcgggtggcggttcagaagaaggggaaggcggtgaaaaatccgaaccgaaacggacccctgcggcgaaacgcgaacctaaacaaaatatcaaatctcagccgtcggtgttcgacgtgctgccgaaaaaaatctccaaagagattgtagataactctcttgatgttattaaccgtatcgttaccgaagcgaaagaaattccctttatggaagacggtgcagaggttctcgctaaagcccagtatcaactgacgttaacctatgaagagtttttgcagctgactgcagccaaagacagctacgataagcatctggaaaaaatccagaaaaaaaactcagagcaataa

SEQ ID NO: 95507 - DNA, 165 bp, Enterobacter aerogenes; identical to SEQ ID NO: 23280

SEQ ID NO: 95508 - DNA, 456 bp, Enterobacter aerogenes
atgaacattcaggattctttagaaattcttcttcgctggctcgaagataatgttgaaatggaaaccgatattttattttccgataacgtagattccgctgccatgatacccgccgttcaggcagctatcgcgttagcggaaaatgcaaaacacggcaccgctaatgccgatgagccagtatctgtcctcgataacgactgtcagacaaccagtgggatagacgaccagggcaacagcattgatggaggcaaagcattacagatagccgatcacgagcgcaagttagtggcggttacccatggacaggtcattaaagaagctctgaacgccacctctgactttctggatacggattgcgtcatggaccgcctcgggatatcgtacgaggacgctgagcttcgttcttccggcgcgatggaactgcataatgcgcttatcgagtggtctaaagattga

SEQ ID NO: 95509 - DNA, 609 bp, Enterobacter aerogenes; identical to SEQ ID NO: 23282

SEQ ID NO: 95510 - DNA, 450 bp, Enterobacter aerogenes
atggtaacggaaaaggagttgattgaatttgaccttctcagaaaggtcggcagtcgctggaaataccgttattccatcggcgcaaattatctctttgccagcagtaaagaaagtgctgtcgaacaagcaacacaagcattcaggaaagctcggccaagtgagcttttaacccgtgacgaacggtatgagaaagcaaatcaggaggaaatcaggttgtcagacgttcgctggaaacacctcagcctcgacgatttgtacgcgctcctgaaccggatgaatggcgataggacaacgctacaggacgcatcctcccgcgagttcacaggaaatggtggacggcgtacgtcagctgccgtggctgctcagggagcccgagatacggccatcatgtgcggctgtcttgaacgttacattgtgtggcggcggcaaaagacacatttcagcgactga

SEQ ID NO: 95511 - DNA, 333 bp, Enterobacter aerogenes
gtgaaaacctacgagcttgttcgctcactgcgggtcagtctgagtgccgacgcaatttatacctgtgccgatcaactactgacccggcagaacgaagtcctttacatgctggatttaacaaaggctaaagaactccatcaggaaataaaaaactactccaaaaaagagatagacatctttatcagaacagtaaccctgctggcctattcgcggataactcctgaagctgcctcgaatgagtttaagaaaaacaacctcattccgttactgctgcttctgccgactgatccccatcaacgcctgagcattttgcacctcttgaaaaaggtataa

SEQ ID NO: 95512 - DNA, 567 bp, Enterobacter aerogenes
atgatttactacgataatgcgtttcggttgcgtatccgtcacacaagtgtttaccagatccaccagcacctggattttttcatgcaggaacgcaagggagagaagctgccgtactcttttaaaatttttcccggtaccggggatgattcgttactcctggtccgcacagccacagctctggagttgccaggggagaaaaaaagagagcttattctctctgagggccatgaaatcaagttcattacgtcaatggccatctttcataaaggaacaaagtcagaaggccgtggccgacgccagtttgctccatccgaagaggctagttatcagttggccctcaccaaattagcgaaggctggttttaaacccggtcaaatcgtcgtcagtggcccgaaattcgtccatatcgtcaaaggaaatgctggacgcggttttacgctacccgtattcacggtacagggtaccgccataatcagcaatcaacaggaagctgaagttggaatcgtttatggcgtaggccctaaacgcgtatttggttgcggtttcatgcatctggcggggcagtag

SEQ ID NO: 95513 - DNA, 1875 bp, Enterobacter aerogenes
atgaatacatcagcggtatttgagtctgccggattgtcgttacgtaaggtccaacaggattatatcgaggctgcagctggtgcactgactcaggatcataaagttgcactgattagtgctgaaacaggtgtaggaaaaacgctgggctatctggtaccggcgcttctgattctgctgaaaaaccctgaggcaaaatttgtgatagccacgaattctcatgccctgatgcaccagatattcagaagcgatcgtcctctccttgaacagatagctgaacaatgcggcataaaagttactttttcccggcttatggggaaagcaaattacgtatccctggagaaagtacgtggactgttactcatggacgaatttaccgatctggatacggttaaggtccttgaaaaactcgctaactggtcaaaacctctggttgagtttgaagaagagtatggtgaactgccagcgcagatcacaccagagatggtcacctactccatctgggatgatatacaggacattgatgatattcgcctgaatgctctcagtgctaactttatagttacgacccatgcgatggtaatggtcgactgtatgtgtaatcaccgcatcctcggtgacaaagaaaatatgtacctcattattgatgaggcagacatttttgtagatatgcttgaggtctggaaacagcggcgcttcaacctcagagagttgaccagtgcgttcaatgaacatattccacgtaatggcgtgcatgtcatcgaacagttaatgaacgacgtgacttcgatagcgggcgatctgcatttttgtagtacgcctgcagcggttgccttgtttgacaatagctttaacgccttatcaaaggtagggcgggaaataaaaaatgaagcggcccggaaagctttctttgactgtatctacagctgggaaatgctcggattgtccggggggcaaaagggtgtaggcgtttccaataaacgtcgtgaaccagccctgatcgctgtaaacccgtttatcgggatgaatgtgggcagatactgcactcaatggcgtagtgcgttactgacgtcggctacgctctcaattaccagtaccccagagaccggaatggagtggttatgtaaagctctggggttaaccagcgatacgatttcaatcaggaaaatattctccccagacgtctatggctcaatgaagctgaccatcgccggtgctgattttccaaaggtgttcaatgacccgaaagaacagatattttcaggtcaatggttaaaggcagtagttgaacaattgtcctgtattcaggggccagctctggtattaactgccagccattatgaaaccaggatgattgccaatcagctgggtgaggtctcgcaaccagtttatattcagaaagcaggtcaggccctgtccgaaattattaaacagtatcaggagaaaccagggattcttatttctgccggtgcttctgttggtgtgagcccacgaggcgagaatggggaacagattttccaggatttaatcattacccggatacctttcttacctccggacagaatgaaggctgaaagcctttatgggtatctgaaggaacgaggctatagtcgtacctttgaggcagttaaccgtaacatgtacctggataatttgcggaaagttattcgtaaagcaaagcagtctatagggcgggggattcgtagtgaaaatgataccgtcaggataattatcctcgatccgcgtttcccggaacctactgacctttcgtctaaacatcggtcgcttgaacacattattcccgttcgatttcgtcgtgaatatcgttcgtgtgaaattttatctccggcgtattgtgaagaggatatccagtgttaa

SEQ ID NO: 95514 - DNA, 708 bp, Enterobacter aerogenes; identical to SEQ ID NO: 23269

SEQ ID NO: 95515 - DNA, 1032 bp, Enterobacter aerogenes
atgagaactttaaacttcaacggtaaaatttcgactctggaaccactgactgtaacagtaaaaaatgcggtctcaacttccggccatcgcttgcctcgtaacggtggattcaatgcagccccgtactttccaggtaccagcattcggggaactcttcgtcatgctgcgcataaggtcattgtcgatagtgtgggccttaatgcagacggaaaatcacctttcgacctggcagaacatttcatgctggcccagggggtggatatcaatggtgaagccgaaaccttcgcgccaggtgaaatcaatgctggtgctgaactacgtagcaaaaacccgttaatcagcttgtttggtcgttggggattaagcggcaaagttggtatagggaatgctatcccggatggtgataaccagtgggggatgtttggtggtggtgcccgctcaattatgtttcagcgtgacgaaagtctgatggagtttcttgagacagaccaggttgatcgtcttgaacgcctgctcgaggaacaggctgaggcaagtgtggatatctctcagatcaaaacagagcaggatgcactcaaaaaggcgatgaagtcggctgataaagacaccaaagctgagcttcaaatcaaagtacgggagctcgatgaaaaaattcaggcccgcaaagatcagaagcaggaatctcgcgagtcaattcgccgcccgattgacccgtatgaagcgtttatcaccggcgcagaactcagccatcgcatgagtattaaaaatgcgactgatgaggaagcagggcttttcatttctgcattaatccgctttgcagccgaaccacgttttggcggtcatgcgaatcataactgcggtctggtggaggctcactggacagttacgacctggaagccgggtgaactggtaccagttacacttggagaaatcgtcatcacaccgaatggtgttgagattaccggggacgagttgtttgctatggtaaaggcattcaatgaaaatcaatcttttgatttcactgcccgctaa

SEQ ID NO: 95516 - DNA, 279 bp, Enterobacter aerogenes
atgccacgtcgttccatcctgtccgccgccgagcgggaaagcctgctggcgttgccggactccaaggacgacctgatccgacattacacattcaacgataccgacctctcgatcatccgacagcggcgcgggccagccaatcggctgggcttcgcggtgcagctctgttacctgcgctttcccggcgtcatcctgggcgtcgatgaactaccgttcccgcccttgttgaagctggtcgccgaccagctcaaggtcggcgtcgaaagctggaacgagtaa

SEQ ID NO: 95517 - DNA, 195 bp, Enterobacter aerogenes; identical to SEQ ID NO: 36234

SEQ ID NO: 95518 - DNA, 804 bp, Enterobacter aerogenes
atgactattctttcaaatctaagtattgaccttactgattttacaggacgaattcttatcgtcagtgacctttatggacattttgaactgttactcaagggcctttcaaaactgacccagtccggtgatgaagtggttgttataactactggtaatttgtttgactggggcccttccccctgtcagctgcttgaggcagtggtttacaaaaaatttggtgacaggaaagttcattttttcactgtggtaggttttcatgaattacttatgacagatgctattactcaaaagtaccttaaaaccttcaggtactttccggatacacatactcgtaaacactggagaagtttaggtggaagctggcatgactcttacgaccagattttgcttgaacgtgatatttataaaatcgattacccactggtaataaatctcaaaacaaaactaggaacatacataattggttcgtcagatatcccccacgatggtggtgactggaacactctcatggcaaccttgaacaagttggataaccaaaacttacgcattatggcgagtaatataaccagaactaggtattttctagaatcaggaaagacaatggatgatatatcgcttgtagtattaggagtgcatcaacctgatcaattaaaacgaattctctcagggcaaactgaactagctaaatcaaccttgtgtctgttccctaacaactgggatggactctcaaatgcaccactggatttcaaaattagatttcttgacatcactgaaagtgaatatgggagttgctatgagttttaa

SEQ ID NO: 95519 - DNA, 459 bp, Enterobacter aerogenes
atgacagatggcatgatttaccatggggtacgaaagcaggaacttctcaagattattgagcgctctggcttaaacttcgaagaagcaaccagtaattttgggtttgctgacaacacccgcaatccactttctttgatcctggatgggtattttattcagataattcctatggcccgagaggaacacaattgggaaatagctccagtagatactgttatcttatccattattatacccccttcgcttgatgaagacccagatgaaaacacgatgacaataatgtcggattgtggaatagctgagtttgaacttgaagatgcaggcatcagaattaacagaatgataacatttgtaggtggtgctacagcagaaaatttcctacatcaacttagaattctttacattactgcatgccagacccaagggggatttgatgacgatgaagatagtgagtattaa

SEQ ID NO: 95520 - DNA, 405 bp, Enterobacter aerogenes
atgacgatgaagatagtgagtattaaaaaagttagtttcttcatagttccacttattaccctgctaggtatttattctctaactatgaataaaccaagcctgtcgagctttaagcaaaactcggttcatgccgtaagtctggcgggcgctgaaaccagtatgaattttaagatcgttgatgaaaaaacaataatgataaacaacattccttctattgttaaaaaggagtacattaaaagtcttagctctacagaggttccacctggtgctccatcgggagactatctaatgctagagaccagtgcttatatttttgcgatgaagcaatctggagggaatacctacattggtctggtgaaggatttaatcaacgaaggtgaaggacatatttggtggaaaatataa

SEQ ID NO: 95521 - DNA, 1293 bp, Enterobacter aerogenes
atgactaaaattaataaaatctctttcctgatgttctgttctgtgttcagtgctttttcaaacgcagaatcgataatggtttccggtaccctggaaacgtcattaccagatgtcaaattttctaccagttcacaagtaaatacggccttcgtgaaagaaagtacggttacagctattccggtatctgagggatgcgaggtgtcctctgatcctaatgtcaaaagtacggctggtagcctgaaatgtgtgtttgaatggttacctaataattccggtatgccgattgctaatgggttctcactgaagggcatccctgccatcgctggggatatcaaacttccatggcaaatcgtttactactcgggctcagaacgtgaaaaagtcatagtcaaggaaggggagtacaacttcaagactgttgcgcctgtagctcctgtgattacttctataaaaggttcaatgagcaacggttcttccggttcaacactgacgtcatacattaaaaacgagacactctcaaatattgatataaccgttgaaccccgagactacgatatggtcgcgtctgtcggttctgggacatcctgcgccattgctgcaggagcctcaaaatgttctataacgaccggaagcgtaggcatcagtgatgggagttccgatttcggaagcagggatgtaggcgtaaccttaaactcgttcaataattacttctccccaccagtaacctctaaggtgagattaagctgggattaccgcgctccagcgatagacaataccttctggaacgtctctaaagaagctcggtcattcaagatcggagataaagatatctacgttgctccgcagacgatcgctgtagctgtctcggttcctgcccggtcagataccaatgactggtggaaacctgctgcaatgtcgctcacacttgctcctgatggtagcttctctccaatgacaaaagttactttagatgatggtacggagcttaattttaacaaaatttggtcaactccgtcccgtcgaactcttcaacctgtcgccggatatcaggaagttgcgggtaaatttgtttatttttttgatataagcgatctggccagcgcttcttacgttgcaacatattctgtgtctaatacagcgggcaatgattccagttataccgaaccggaatctaaacttatactgtctgatgaaccatctgtttccgttttcaaggacggctcagagcttgttaagcgggaccaggtgctgagagatcccctcataatttccccaaagcgtaaccatgtgtga

SEQ ID NO: 95522 - DNA, 129 bp, Enterobacter aerogenes
atgtctgatagtaaaatcaacgagatgcagggaatccccccttttccagaaaatggagaacctattgcagtattggttcccccggtagcaatgaataattttccgttggctaatccagaagaggattaa

SEQ ID NO: 95523 - DNA, 522 bp, Enterobacter aerogenes
atgtacaagcctttttcatttgatttaattgtgtcatacataacgagatggtggggcctatccatgacacattcgaatgaaagatggtattcagttgacggtcagttaattgataataaacttgttttcaatattaatgaattcaacggcactgctcggtacgaaaaaaattttatctgctcatattgtaaaggctcaggtcgtcatcgtatcagttatgcaaattcttcaggaaaatgttccgcgtgtaaaggtacgggcaaacaaggtaccttaataaaagagtgtttcacgcttcaaatgctttttaaaaagaattatctagctgctaaaaagattgtttcttcacgacactgtcgtgagagtcaaggaaaaaatttatcagcccttgagagacaaatcatgtcttcaagcaacaaaaaccccttccttaaaagccttacgcttacgattcaaagtggtcgtcatctttcaactaagcagattgctgtagcagaaagtatcctttcccaacttagctga

SEQ ID NO: 95524 - DNA, 2439 bp, Enterobacter aerogenes
atgcgcttttcactattcttaaatcattctgctttagctttgagtctctcaatagccacgagcatgttttccaacgcccaggcccgggtatacgagtacacctttacagatatcaatggggcgcaaaaaagtgtccctgaaagtgcgccctatcttaatccacatgggaattttaacgctctcctcattggtggcttggaccaacaaatccgcttaaccgtaactcgcgatgctgataacagtgctgtttacagcacaacaacaagtatcatctctgttgatgacaggatttcttccgctaatggaaatatgttttacggaaagactgtcactattccacctatcagtgatggtcgttacaccataaaatctgagattttagactcaaaatcgaccgttgtttcaacaacatcccatccttttataatagatacggtaggccctacgtctgataacttctctgtaccatggattcctgggtacaacatggttgtaaagggacctcgctgggaacttggccaaggtcaagaatctgccataaatcttgcaattaagaatatcaatgatctatctggttttgataaggctattgttcaaataataaaaccagatggatcaatacaatccagctatacaatggcctacgacgatgggtcaagagctgctacagcccctataactaaaggtggtggagcgatagctaaagctacatggatgccagtgtcggatgccgatgtagagtttcgctttcgagcattcctttatgataaagccggaaatgttactcaagtccccgaccaaaaatttgtatttgattcttctgcaggtgaatatgagctatttgcagttgcagaccccaattcttcaactagtgttgttcccggcatttcgtctggctacattaaatattcagcagggatgactgttaatactaaccctgttactcttgtgtacaagattcccaaacataattatagggcttataacaaagctggtttatccttcggttctttgcttactgaagataatagttatgtatatataaaacaatccaccccagttggtacatcatttactattcataatggataccaatacggaggaggtaacgcttcgtataatgttaagttaagttcaatcgctccgaaatccccatcaataaaatcctactcagcaaacttttcaacaattggcgatttttctgctggcacaatgaaattcacaaacatagatttgccaggtgagtatcaaagtataactgtgtttgtagaccctagggattatgtgcagtcattttataaccttacacaaggctacgaagtttgtactattgagcccggagaaagttcttgcactggtcctttttcatacgcaataaataaggggaatggttacatagctcattattttatagttcgcaatcaagataagacacttacatcaaatcaatttgagattcgtagcatctggaatacggatttaatacctaagatcacagggtatgattacaaagaagagaataaatctgtccttgtttatgtcacacaacccggcaatggcaattggcgtgatgtcttgatgctttctaagctagagatactggatacaatttctaatacggttcttctgacgggcacaaaagccgcgatgtctggagaggactatacttatgcatttgatttatcggctatacctgaagggaagtatgatttaaccttcagggccactgatacttttaacaacagttctcagttgccgttcagatctcttattatagataactcccccccttcaatttcattttcgtatgaagggaaaccactgttatcagaaagtacagtctatggattagaaaacatctcagtagctgtatctgatgctttaagtaagtccaagatctctcaaatggttcttcaaggaggccctgcatcagatgatgtagaattaggatttacccataacacagatggttcatacacaccactttatcctcgtttgtttccttcacttgatgaaaaaactgataaatacacacttgtagttaaagctatagatgatgcaggtaatgagtcatcaaaatctatccgttttgcatattatcctaagaatctcattgttcttgataaacttaatacccttgcggttaacaaacctttaaacctttcttcaggtgaacctctggctgttcttaaagcaagtcagttacgccgtaatgatggttccttagcaaaaggcgtacagacagctttaattactgttaggggtgactcagcattcccaattagtgttattggaaaccttgtttctccaggtgaaacgaaagaaattcaaatagatttaggttctgtaggaaatgacgttgttgtccctatattcccaggagtatctggcgttgtcggtgcctccggttttattgttgaattccctcaactaaaataa

SEQ ID NO: 95525 - DNA, 474 bp, Enterobacter aerogenes
gtggcttctggtaaccgactgcgaacaacggggttgttttcaccggctgcacattatgagtctgctgtggcttcaggtatcagcctgcgaacaacgggattgttttcaccggctgcacattatgtgtctgctgtggcttctggtatccgactgcgaacaacgtggttgttttcaccagctgcacattatgagtctgctgtgactctggtatccgactgcgaactacggggttgttttcaactgctgcacatcaggagtctgatgaggcttaaggtatctgactgcgaacaagggggttgttttcagctgctgcgcatcaggaatccgctgaggcttaagatatacgactgcgaacagggatcgtactgcatatgtggggcatcatcagaatttagaggcttccgggatgtagctgcgaataacgggatgattttattcatacaggtcttcatgagtaagttaagtcacaagtaa

SEQ ID NO: 95526 - DNA, 345 bp, Enterobacter aerogenes
ttggcagacaaacgcagcaaaatgctcacgatgtgggtaacagaagatgagcaccgccgtctgctggaacgctgcgacggtaaacagctcgcggcctggatgcggcagacgtgcctggacgagaagcccgcccgggccggcaaacttccctcgatctcgccggcgctgcttcgtcagcttgccggcatggggaacaacctcaaccagattgcccgccaggttaacgccggtggcagtagcggtctcgaccgcgtgcaggtcgtcgccgcgctgatggccatcgatgccggactcgagcggctgcggcatgccgtactggaaaagggggctgacgatgatcgttaa

SEQ ID NO: 95527 - DNA, 486 bp, Enterobacter aerogenes
atgaacagtcttttaacgctggcgaaggacttagagcagaaatcgaaagtgcagcagcagactaccggcgagatgctgaaagccgcattcagcgagcacgagaagtctgtcagagcggaactgaacgaaagcgagaagagaatcagcgccgccatccacgaccacgaccggatgctgtcctcagccatgagccagcgtacgaaagggatgctgcgcatggtcagccagacgtggctgaccatcgtcctggtctccgtgctgctgatagcctcaagtgcgggcattctatggtggcaggggcagcagatactcgacaattacacgaccatccgggagcagaagagcacgcaggccatgctgtccgagaggaacagcggcgtgcagctcacgacctgcggagaggaacgacgccgctgcgtgagggtgaacccggacgcgggacggttcggagaggattcgagctggatgatactggcggggaaatag

SEQ ID NO: 95528 - DNA, 228 bp, Enterobacter aerogenes
ttgaaaaagatttttgtttcagtgttcgcagcggcagttgcgctttcagccctaaccggctgcacgcgcacaagctatgccatccacaccaacgacgggcgtacaattgtcagcgacggcaagcctacagaatcagactcaggcctgctgggctataaagacgcaaatggtgtcaaacagcagatcaataaagccgacgttaaagaagtctctgaaattccgcattga

SEQ ID NO: 95529 - DNA, 234 bp, Enterobacter aerogenes
atgaataaaaaaacgctgttggcggccatgatggtcgcgttggtgacctttgccgctgctggatgttcttcaaaccaagaaataaaaaccacagatgatcgcactatcgttacagacggcaaacccaaagttgacagtgatacgggattagtatcctacaaagatgcccatacaggccgaaccgaacagatcaaccgtgacaaaattaccaacatgagtgaactagacaactga

SEQ ID NO: 95530 - DNA, 582 bp, Enterobacter aerogenes
atgcatcttcatcttgttccaacactataccacaccatttcaaataaatgccgacttgaatcagtgacgatcccggaactgaagtttgagattaaaggcgatgcgctttcatgcggaagaccgtttcctaataaacggcttaatgtgggtatgcaaaaaaatcgtaaagcaatgattggcttacttcttgaatatgataaaaaagtaagtcattttacaacacaatataaatggtacatagaagacatcggtattgttcagcacaatattaaaactatagtgctggattgtgattttgatctaatatcacaatatataggcttaaatattgggcttgatgaatttaaaccgaggctccatcattcttatcacaacgccgcgccggttaaaatacaaccaatgatggaatcatatcgaaccggagaaccggtcaataaattacatcatgatgtatgggataataatgttttattgtccaggacggaaacattgctcttgcataccttggaaacagacagactttccgaatacagtttattaaccgacagacttcccgagctaagctctgcaatttgcatctga

SEQ ID NO: 95531 - DNA, 294 bp, Enterobacter aerogenes
atgtgtgacagaactgtttttttgaatttccagtctcaagatacgacaccttttataactgaggtggaaatgcttattggaggagttccacgactcatgtatcccgatggaacagagcagtttgctgatgatgaaaccgattcactcctaatttattctcctcgactgaccgaacttgaacttgaagccttttgcgaagcgaacattgagcattatcggacttttcacgaggccaatttaaagcaactactcaggggagaccgcgtaccattaaccccgttctgggctgaataa

SEQ ID NO: 95532 - DNA, 537 bp, Enterobacter aerogenes
atggtatacacaggcataaccgaccatgccagactcagacttatgcagcgttctcgacttcctctgcatgtactcactgatatgctcgataaaagggaatatgtcgacttgggttccaagcccgggatattaaaagaacaccttctgatttatagtcgtctggatgaaagatggtacgttctaatcagggacataacatcaggaagtatcgttacggtgttaccagagaactatcatgattcttcatttattaaaattaaagagtcagataagcaatcagcatatgatttagcaaataaaggcaggggttcgcgttcggaatttattagtataaatctatgttttaatgatttcgatggttaccggtactcaaagaaaatttattccattccagtttcgcaggttgatttgtcgcaagagtcttttttaaagtcaaaattcatcaaactacttaaaagaaagattagggaaaacattgcacgggggctttcatttgatgacaagacgattggcctggttatacacctctcttcctga

SEQ ID NO: 95533 - DNA, 384 bp, Enterobacter aerogenes; identical to SEQ ID NO: 23309

SEQ ID NO: 95534 - DNA, 480 bp, Enterobacter aerogenes
atgagtaacatgaccgtgtcgttttacagcaaaaaacatcatgacactgtagcaagcgctattaaggcccgtgcaacatcatcgattgagctgctctgttctcctacgctgaatcagcttctggatctgacaaattcaatctgcctgtgcgcaggaattgaaaatcaggttggcatttttgttgcggactcagaaactgacgaatccgctcccggtgaacaggtatctaagacccatgcagtctggctatataaccagaaacagcatagtgctgcccgtgatgcgattgttaagaaagacattacggaagtgaagattgatgagccgctgacgcttaatgaacttctggcgatcatcgatgtggtcagtcgttgtgcaggtattgatgaggacgtagtcggtattgccgagccgatgatgacggttattgatgctgggcatcgcgggcaatctacggctcaggaattgatgctgcactga

SEQ ID NO: 95535 - DNA, 207 bp, Enterobacter aerogenes
atgaaaaacattaaacgggaagcattactggtacccatcatcgggctgttgatcctctcctaccacatgggctatttcctttctgactggcctttctggcaggtatacgccatcctggcgctggcctactttgctggtcgttttggactgaaaaaaagggcgtcttctaaagacgaacctcaggaaggcaaaactaccggtcagtaa

SEQ ID NO: 95536 - DNA, 531 bp, Enterobacter aerogenes
atgaaatcctctattccaccgattctgtatggaagaaatatatccgatatttcggagaagcattttgccccctggttctgtcatgacgatcaataccctgctttggtgctggcttcaacgaagatagttccggagtcaccttcccaggactggttccttggcgaagaacaatgcggaggccacagttgtaaccagttcccggcagcggtattaccattgcagatcatgcctcaaaaacatgggatgctggagagcattgcagatgaggcatttgagccacgctcgctcgattattttaactgcgcgggcgacgaggaacagaagcgcgtacggctgaattatcagtcatacgttatttctctcgggttaacctgctcggacgaaaatgctctcctgttgacacaggcgctataccccctggatgcgactgacgccaatctcagggccttaaccacagaacagaccgatctcagaagccttaatgtcaccactgggctggtgctttttgtagtgggggtgaactgcgactag

SEQ ID NO: 95537 - DNA, 195 bp, Enterobacter aerogenes; identical to SEQ ID NO: 36234

SEQ ID NO: 95538 - DNA, 435 bp, Enterobacter aerogenes; identical to SEQ ID NO: 25497

SEQ ID NO: 95539 - DNA, 1110 bp, Enterobacter aerogenes
atgaaatcacgcgcagcagtcgccttcgggccgggtttaccccttgaaattgttgaaattgatgtggcaccgccgaagaaaggtgaagtgctggtgaaaatcagtcacaccggggtatgccataccgatgcctacacgctttccggtgatgatccggaaggtctgttcccggtggtgctcggccatgaaggtgccggggtggtggttgaggtcggtgagggcgtgaccagtgtgaaaccgggcgaccatgtgatcccgctgtacaccgccgagtgcggcgagtgtgatttctgtacctccggtaaaaccaacctctgtgttgccgtccgcgaaacccagggcaaaggcgtgatgccggacggcaccagccgtttttcgtataacggtcagccgctctatcactatatgggctgctcgacattcagcgaatataccgttgtggcggaagtatcactggcgaaaatcaatccgcaggccaatgcggagcaggtttgcctgctcggctgcggcgtgaccaccgggatcggcgcggtacacaataccgcgaaggtacaggaaggggattctgtggcggtattcggcctcggcggtatcgggctggccgtggtgcagggcgcacgtcaggcaaaagcggggcgcatctttgccatcgataccaatccatccaagtttgagctggcaaaacagttcggcgccacagactgcattaatcccaatgattatgacaaacctgttcagcaggtgctggtcgaaatgaccaaatggggtgtggatcatacctttgaatgtatcggcaatgtcaatgtgatgcggtcggcgctggaaagtgcgcaccgtggctgggggcagtcggtaattatcggggtggcgggtgccggaaaagagatttcaacccgtccgttccagctggtgaccggccgggtctggaaaggcacggcgttcggcggcgtgaaagggcgtacccagttgccgggaatggtggaagatgccatgagcggcaaaatcgagctggcgccgtttgtcacgcacaccatggaactggataaaatcaatgaagcttttgatttgatgcacgacggcaaatccatccgcacagtcattcattactga

SEQ ID NO: 95540 - DNA, 1185 bp, Enterobacter aerogenes; identical to SEQ ID NO: 16006

SEQ ID NO: 95541 - DNA, 657 bp, Enterobacter aerogenes; identical to SEQ ID NO: 16007

SEQ ID NO: 95542 - DNA, 813 bp, Enterobacter aerogenes
atgccccgccgttcgatcctctccgccgccgagcgcgaaagcctgctggcgttgccggacaccaaggatgagttgatccgtcactacacgttcagcgaaagcgacctctccatcatccggcagcggcgcggcccggccaatcggctgggcttcgcggtgcagctctgctacctgcgctttcccggcgtcatccttggcgctgatgagccaccgttcccgccattgctgagactggtcgccaaccagctcaaggtcggcatcgaaagctgggacgagtacgggcagcgtgagcagacccgacgcgagcacctggtcgagctgcaaacggtgttcggcttccagccgttcacgattggccactaccggcaggctgtccagttgctgaccgagctggccatgcaaaccgacaagggcatcgtgctggccagagccttgatcgagcacctgcggcggcagtcggtcattgtgcccgccctcaacgccgtcgagcgggcgagcgccgaagcgattacccgcgccgtgttcttcaaccgcctgggggaaatccgcgaccgcagcttcgagcagcagcgctaccgggccagcggcctcaacctggtgacggcggccatcgtgctatggaacacggtctatctggagcgggccgcgaacgccttgcgtggccacggtcaagccgtcgatgacggcctgttgcagtacctgtcgccgctcggctgggagcacatcaacctgaccggcgattacctctggcgcagcagcgccaagatcggcgcgggcaagttcaggccgctacggccgctgcaaccggcttag

SEQ ID NO: 95543 - DNA, 495 bp, Enterobacter aerogenes
atgatatcctccatgcttgtcccgattaaccctttccagcgatgtgcaatggcttctattgcttctgtggagaatcgcagagctttgggacggaaaacaggagaactggcctacgtcaaagccttttttaaagagcttacaggtaaatcgcaaattaactcgaatgacttgagaaaggtcgattcgacttacgatccatttgttcgtggcgaagcaactaaagttgaatacctgcgtgctatcgatattctgattgaatctcgtggagagtgttttattctccctctttcctggtctctggcagtttccatgttcccggagttacaaaacagggtttttcagcgccgcgaacaccgtgaccggattcatgatcaaagggtggaacgcctgagaaagaaagaatctaacctattgaactatcaatttgaaatcaatgttgcaaaatccaggctttaccctgatgaatcccctaatgattttggtaaaaatcattaa

SEQ ID NO: 95544 - DNA, 603 bp, Enterobacter aerogenes
atgactatcatgaaagttcattattctccaactgacgggatccctttgaactccctttatctcaaggaaacttcaaccactgaacgatcaggttcagtactggggggtggcatttcgggagactctgttattctgggaggcggaggttatgccggttcggaaatgcagaagacgactcgttcttctgtctttgcaccacctgatgaagttactgctgagcctgacaacacaaaaatggtcctccggatttcctgtgttatcggtgtaatgtttttacttataattattaccttattcagtaatgctgttgtagatatttttgacgtaaacgtatctaaaacaatgtcttctttcctggaacatgctcccttctttatcatcggactatctgtcatttgtgctttctttgttataggaatgaccgatcatgattacaccccggtacttgaagagcataaaaggaatgaagcgcgtttgtctgtataccacaggctacgctatgtcgaagctgataatattgtttttgatccgcaatcaatgaaaggatgttatgcagaaagaaaattcattgcttcactagttgaaagttgtatcactaagtaa

SEQ ID NO: 95545 - DNA, 1305 bp, Enterobacter aerogenes
gtgatattggttgtctggagattcagggggccagtctatactgttaatgatgtgattgtatcttatggaggtgacagcaaaaggtattcaagagacttccagacaaaagaagaatttaaaaagagctggtacgccgtattgtcacgggtgcatgcttcggtagaagcgaaggtaagctgtgcctgtaaaggaaaaggaccaaaatcacttgccgtaaaatatcactcaggcggtgatacttatttcctggcacggtacccgaatacgggtagtcaacattcacctgactgtattttctttacgcttgataaagacaattcaggtctaaaatgctatacacaaggtgtcgtcaaagaccttaaagatggaggctacggaattaggttagacgtggcattagcctcatctgactcggagtcgacctcgatcgtaccgatagataacaggaataaatcaggtggtgtttctcagaatagcatgtcattgctgggtcttctccagttcctgtgggatgacagcggtctgaatcgttggtatccgaaaatggccgggaaacgtaatcctggcaaggtgttcaaccttataacccactctgcggaaaaaattaaagtcgcatcacatccgctgtccatgcatttacttgcaggtgcatatccttcgacacctcaggagacaaaaaacataaaaatgacatcagaggcgctgatgaataaagagcgtctgatttgcctcaatgtactatctaaatataaccctgaaagacactcgaatgcatcaaaacgacttccgataaagtttttttcaggtgttccagttgtgctgatgaatactgagaattgggcatcactggagaagagattcagctctgaaatagcaaactggcgttcaggaggtaacgtaatctgtatggctataggtgatctgggtaaatttaaggggaaagatacatactatcttaaaccacttcagatagcattgatgaatgttgatgaaaactggatcccggcagactcgagttatgagctgaccatgctaaattatcttcataagcatgagcggtcatttatcaaacccctgagatacgatgcttctaataatgatgttttcccagatttttgtctgacggatattggggggcatgaactgtttcctattgaggtatttggtatggatactgcttcatatttggcgcgtaaggcgatcaaagaaagttactataatgaacgatatggaaaggatggttgggcatcatgggttgcaccggctggccccctaccccatttgcccgataagggctgcagttaa

SEQ ID NO: 95546 - DNA, 657 bp, Enterobacter aerogenes; identical to SEQ ID NO: 9983

SEQ ID NO: 95547 - DNA, 510 bp, Enterobacter aerogenes; identical to SEQ ID NO: 9982

SEQ ID NO: 95548 - DNA, 195 bp, Enterobacter aerogenes; identical to SEQ ID NO: 36234

SEQ ID NO: 95549 - DNA, 906 bp, Enterobacter aerogenes
gtggatagcgcacgcgcccttattgcccggggatggggagtaagcttcgtcagccgttgtctccgggtgtcgcgtgcgcagttgcacgtcattctcagacgaaccgatgactggaaggacggccgccgcagccgtcacacggatgatacggatgtgcttcgccgtatacaccatgttatcggagagctgcccacatatggttatcgtcgggtatgggcgctgcttcgcagacaaacagaacctgatggtatgcctgcgatcaatgccaaacgtgtttaccggatcatgcgccagaatgcgctgctgcttgagcgaaaacccgctgtaccgccatcgaaacgggcacataccggcagagtggctgtgaaagaaagtaatcagcgatggtgctctgacgggtttgagttccgctgtgataacggagaaaaactgcgggtcacgttcgcgctggactgctgtgaccgtgaggcactgcactgggcggtcacaacgggtggcttcgacagtgaaacagtacaggacgtcatgctgggagcagtggaacgccgctttggcagcgagcttccggcgtctccagtggagtggctgacggataatggttcatgctaccgggcgaatgaaacacgtcagttcgccaggatgttgggacttgaaccgaagaacacggcagtgcggagtccggagagtaacggaatagcagagagcttcgtgaaaacgataaagcgtgactacataagtatcatgcccaaaccagacgggttaacggcagcaaagaaccttgcagaggcgttcgagcattataacgaatggcatccgcatagtgcgctgggttatcgctcgccacgggaatatctgcggcagcgggccagtaatgggttaagtgataaaaggtgtctggaaatatag

SEQ ID NO: 95550 - DNA, 366 bp, Enterobacter aerogenes
atgattgatgtcttagggccggagaaacgcagacggcgtactacacaggaaaagatcgctatcgttcagcagagctttgaaccgggaatgacggtctcccttgttgcccggcaacatggtgtggcagccagccagctatttctctggcgtaagcaataccaggagggaagtcttactgctgtggctgccggagaacaggtcgttcctgcctctgaacttgctgccgccatgaagcagattaaagaactccagcgcctgctcggcaaaaaaacgatggaaaatgaactccttaaagaagccgttgaatatgggcgagcaaaaaagtggatagcgcacgcgcccttattgcccggggatggggagtaa

SEQ ID NO: 95551 - DNA, 195 bp, Enterobacter aerogenes; identical to SEQ ID NO: 36234

SEQ ID NO: 95552 - DNA, 816 bp, Enterobacter aerogenes; identical to SEQ ID NO: 46213

SEQ ID NO: 95553 - DNA, 612 bp, Enterobacter aerogenes
atggcagaagagcagctcgttgttaagcgcaccaggcgacgacgatataactcttactgtggcgaaatcggtccggcaccggaaaatttactcgcccgggattttagttcctgcaggccaaatgagaagtggctgaccgatattacggagttccagcttccggctggaaaagtctatctgtcgccggttatcgactgctttgatggccaggttgtaagctggtcgataggaacacgcccggacgcgacgctggtgaatacgatgctcgatgacgcactcgatacgctcaacgaacatgataaaccagtgatacacagcgatcgtggtggccattaccggtggccgggctggctcgagcgtatcaacacctccggacttataaggtccatgtcgcgcaaaggatgctcgtcggataatgctgcgtgtgaaggcttcttcgggcgtatcaaaaacgaaatgttctatggcagagactgggcgggtatcacgctggaaaaatttatctgcttcctggacaggtacatacgctggtataacgagaaacgtatcaagctatcattaggtgcaatgagtcctgtgaagtaccggcagcatcttgggatcacaacataa

SEQ ID NO: 95554 - DNA, 195 bp, Enterobacter aerogenes; identical to SEQ ID NO: 36234

SEQ ID NO: 95555 - DNA, 924 bp, Enterobacter aerogenes
gtggcaaagcaaaagttcaaaataaccaactggcccacctacaataaagccctcatcaaccgtggctccataactttctggctggatgatgaagctattcaggcctggtatgagtcggcaacgccttcatcacggggaagacctcagcgctattctgatctcgccatcaccaccgttctggtcattaaacgcgtgttcaggttgaccctgcgggctgcacagggttttattgattccatttttacactgatgaatgttccgttgcgctgcccggattacaccagtgtcagcaagcgcgcaaagtcggttaatgtcagtttcaaaacgttcacccggggtgaaatcgcgcatctggtgattgattccaccgggctgaaggtctttggtgaaggcgagtggaaagtcaaaaagcatggccaggaacgccgtcgtatatggcgaaagttgcatctggcagttgacagcaacacacatgaaatcatctgtgcagacctgtcgctgaacaatgtgacggactcagaagccttcccgggtcttatccggcagactcacagaaaaatcagggcagcatcggcagacggcgcttacgacacccggctctgtcacgatgaactgcggcgtaagaaaatcagcgcccttatccctccccgaaaaggtgcgggttactggcccggtgaatatgcagaccgtaaccgtgcagtggctaatcagcgaatgaccgggagtaatgcgcggtggaaatggacaacagattacaaccgtcgctcgatagcggaaacggcgatgtaccgggtaaaacagctgttcgggggttcactgacgctgcgtgactacgatggtcaggttgcggaggctatggccctggtacgagcgctgaacaaaatgacgaaagcaggtatgcctgaaagcgtgcgtattgcctga

SEQ ID NO: 95556 - DNA, 924 bp, Enterobacter aerogenes
gtggcaaagcaaaagttcagaatcaccaactggtccacctacaacaaagctctcatcaaccgtggctccctcactttctggctggatgatggggcgattcaggcctggtatgagtcagcaacaccttcttcacgaggaaggccccagcgctattctgatctcgccatcaccaccgttctggtgattaaacgcgtattccggctgaccctgcgggctgcgcagggttttattgattccatttttgccctgatgaacgttccgttgcgctgcccggattacaccagtgtcagtaagcgggcaaagtcggttaatgtcagtttcaaaacgtccacccggggtgaaatcgcacacctggtgattgattccaccgggctgaaggtctttggtgaaggcgaatggaaagtcagaaagcacggcaaagagcgccgtcgtatctggcgaaagttgcatcttgctgttgacagcaacacacatgaagttgtctgtgcagacctgtcgctgaacaatgtgacggactcagaagccttcccgggccttatccggcagactcacagaaaaatcagggcagccgcggcagacggggcttacgacacccggctctgtcacgatgaactgcgccgcaaaaaaatcagcgcgcttattcctccccgaaaaggagcaggttactggcccggtgagtacgcagaccgcaaccgtgccgttgctaatcagcggctgagcggaagcaatgcacggtggaaatggacaacggaatataaccgtcgctcgatagcggaaacggcaatgtacagaatgaagcagttgttgggagattcactgacgctgcgtgactacgatggtcaggtagcggaagctatggccatggtgcgtgcgttgaacaggatgacaaaggctgggatgccagaaagcgtgcgtattgcctga

SEQ ID NO: 95557 - DNA, 195 bp, Enterobacter aerogenes; identical to SEQ ID NO: 36234

SEQ ID NO: 95558 - DNA, 504 bp, Enterobacter aerogenes; identical to SEQ ID NO: 52325

SEQ ID NO: 95559 - DNA, 126 bp, Enterobacter aerogenes
atgctgtacatcatgagtctgcagtggcttctggtatccgattgcgaacaacggggttgtattcaccggctgcacattatgagtctgctgtggcttctggtatccgactgcgaacatggggtttaa

SEQ ID NO: 95560 - DNA, 375 bp, Enterobacter aerogenes
atgtgtaccaaaatggaccggcttggccgcaacacagcggatatgatccacattgttgatgcctgctataaaaagggaatagccatccggtttctggagaatggactgagtactgaaggcacgatgggtaaaatggtcattcagatccttgctgccgttgctgaagctgagcgggagcggatcctggagcgcacaaacgaaggccgggtcatcgccatggcggcaggcgtcaggtttggacggaaacctcatcacaaatcggccgccgcactggagcttatccggcacgaaacgcccattaaactggtgatggagaaaaccggcatatccagggccacctatttcaggttaaaaaaactgggcccaggcagttaa

SEQ ID NO: 95561 - DNA, 132 bp, Enterobacter aerogenes
atgaatggatggatgtatctggtgattgccggcatagccgaagtcttttatgccgcgtcaatgctccggactgagggatttacccggatctaccccagtatttttggcactgttgcaaatagtcggtggtga

SEQ ID NO: 95562 - DNA, 501 bp, Enterobacter aerogenes
atggttattaatagttccaccgggagtgatacccttcctctgaatgttgccgaaataattaagtctcatggtagtcctaaggctgtcagggtcactaaatcttcactgggagtgcaaccaattcctcgtaaactggcacaaaatctcgcagccagtactaaagaggtttgcaacagattacgagcctcccttccctcttcgtttgatctcaatcagattggacccaacgaaaaaataaatattgaagttgacagacatctaattgaacttatatttaattcagatgactctattcgtggccatgaagctaagctcgagcgtaaaacaacaaagggaaaactttctagttctgccccatcagtaacatcagaggtaaactctaatgcgctgccagctaatgatcctatggaggagcccgcttcagaaagtcaggaaaatgaattttcgctattgaatttacattccgcagtggctttgttgaataaatcgaacttttgctga

SEQ ID NO: 95563 - DNA, 426 bp, Enterobacter aerogenes
atggtgctctcaacggtgcgcgaggtcggccactactcctgccgttcgatgaccggcaactgcgcggccttaaccaggcttgccgatgaaccaggctatgcgcaaatcaacaccgccgacgccgaacggttaggtatcgaggatgacgcgctggtgtgggtcaattcgcgtaagggccgcatcatcacccgcgcgcaggtcagcgatcggccgaataaaggcgcggtgtacatgacctaccagtggtggatcggcgcctgtaacgagctggtgtcagagaacctgagcccgataaccaaaacgccggagtacaagtactgcgcggttaacgttgaacggattgccgatcagcgcgcggcggagcagtacgtgatcgaggagtacaacaagctgaaagcccgcctgcgcgaaagcgcgatgggttaa

SEQ ID NO: 95564 - DNA, 159 bp, Enterobacter aerogenes
atggagatctacggtatcaacggcttcgtgatcgggccgctgatcgccgccctgtttatcgcctgctggaacctgctgtcgggacgagaacatgccggcaataccgatgaaatcgatgaagagtttattgaggaagcgaaaaatagccgtaatgaatag

SEQ ID NO: 95565 - DNA, 126 bp, Enterobacter aerogenes
atgctgtacatcatgagtctgcagtggcttctggtatccgattgcgaacaacggggttgtattcaccggctgcacattatgagtctgctgtggcttcaggtatgcgtctgcgaacaaggggtttaa

SEQ ID NO: 95566 - DNA, 1221 bp, Enterobacter aerogenes
atgtttaaagcttttttccccaaaccggggccgttttttatttctgcctttatctggtcgctgctggcggtgatcttttggcaggcgggcggcggcgactggctgctgcggataaccggcgcatcgcaagatgtcgccatcagcgcggcgcggttctggtcgctcaactatttggtattttacgcgtattacctgttctgcgtcggcgcctttgcgctgttctggtttatctatagcccgcatcgctggcaatactggtcgattctcggcacctcgttgattatttttgtcacctggtttttggtggaagttggggtggcgatcaacgcctggtatgcgccgttctatgatttgattcagagcgcgctggccacgccgcacaaggtcagcatcagtcagttctacaacgagattggcatttttctcggcatcgcgctgattgcggtggtgattggcgtgctgaataacttcttcgtcagccactatgtgttccgctggcgtaccgcgatgaacgaacactatatggaacactggcagcatctgcgccatattgaaggtgcagctcagcgtgtgcaggaagacaccatgcgcttcgccgcgacgcttgaagacatgggcgtaagctttattaatgcggtcatgacgctgatcgccttcctgccggtgctggtttcgctgtcggcgcatgtgccggacctgccgatcgttggtcatttaccgtatggactggtgatcgccgctattgtgtggtcgctaatgggaaccgggctgctggcggtggtcgggatcaagctgccgggcctgcaatttaaaaaccagcgggtagaagccgcctatcgtaaagagctggtgtatggcgaggatgacgccaaccgcgccacgccgccgaccgtgcgcgaactgttcaacgcggtgcgccacaactacttccgtctctatttccactatatgtatttcaatatcgcccgtattctttacctgcaggtggataacgttttcggcttgttcctgctgtttccgtcgattgtcgccggtacgattacgctcggcctgatgacccagatcaccaacgtgttcggccaggtacgcggctcgttccagtatctgataagttcgtggaccacgttggtggaactgatgtccatctataaacgtttgcgcagctttgagcgcgaactggataacaaagggctgcaggaagtctcttcaaccgttaattaa

SEQ ID NO: 95567 - DNA, 315 bp, Enterobacter aerogenes
atggatattggcagcggcgcgttgacctttagcgccaattcggtggtaccgaataagcactttacgaccacttacgccacggtcaatgtctacaatacgcgtggttcggtggtgtatcgccagtcaattaaaggatcgtcgcagcttggcgactatgtagataccgccatcctggatgagggctataccattgaagtcttccatgccgaagcgggaaatcgttccgttattattaatccactcaatggcaatagctggcaacaacccaataccgtcacctggcaagtgaccccccgcgggctgcagcgcctgtaa

SEQ ID NO: 95568 - DNA, 942 bp, Enterobacter aerogenes
atgatggaaaattttaaacatactacggtacttctggatgaagccgttaacggcctgaatattcgtccaaatggtatctacattgatggaacctttggccgcggtggtcactcgcgtctgatcctctcccaactgggggcggaagggcgcctgctggcaatcgatcgcgacccgacggctattgccgttgcgcaaaccatcgatgacccacgcttttccatcgtacatggtcctttctcgcagctggctgactacgtcgccgagcgcaatcttaccggcaagatcgacggtattcttctcgatcttggcgtttcttcaccgcagctggacgacgcggaacgcgggttctcctttatgcgcgatggtccgctggacatgcgcatggatccgactcgcggtcagtccgccgccgaatggttacagaccgccgaagaagccgacatcgcctgggtaatcaaaacctttggcgaggagcgtttcggtaaacgtatcgcgcgcgcgatcgttgagcgtaaccgcattgagccgatgacccgtaccaaagagctggcggaagttatcgcggcggcaacgccggtgaaagataagcacaaacatcccgcgacccgtaccttccaggcggtgcgcatttgggtgaacagtgaactggaggagatagagcaggcgctaaaaagctcgctcggcgtgctggcccccggtggtcggctgtcgattatcagtttccattcgctggaagaccgcattgtgaagcgctttatgcgtgagcaaagccgcggtccgcagcttccagcagggatcccgatgactgaagagcagctcaggaaactgggcggccgtcagttgcgagcactaggcaagttgatgccgggcgaagaagaggtggcagagaatccacgcgcccgtagttcagtgctgcgtatcgcagagaggacgaacgcatga

SEQ ID NO: 95569 - DNA, 135 bp, Enterobacter aerogenes
atggcagaaaatcatccatttttcaccgtcgggttgcgagaacccgcggtgataaacagaataatattctgcttttttaatgtttactcagataagctggcgatttcgccgccgttggtcgataacgtcgattag

SEQ ID NO: 95570 - DNA, 1320 bp, Enterobacter aerogenes
atgataaaaatcctctgctggctcacacttacactgctaagcgcaacggggcttggcgcctggtttcttcaacagcaatatgacgcgcgctccgccgacttccgcatcctgtatcgcgaaatcacggtaaaggtgtcgcagcacgatgccatcatccccctgcttccgtccggtcaaaatgccgccgaagtccagcagatcctgccgcagatcgtgcaatggcggcgctatgattccctggagccgcgacgccccatcgtcgcgcaaagccccgcacgctactggctgaatcttccgggcatctctctgctgattgatttgaacaccctacttaacagtctcaatgagaaaaagacattcaaacatcttgccattcgttgggacggtaccacgttgtttgaggacggtaccgcatctaccaacacctggtggcgctgggagaaaactgtcgccagcccaacacaacctctgctcattagcgcaggtgataacccgcaatggcatcaactgccgtggtggctgatactttcaccggcactgttctgggcggtgattatctatcttgttaatcagtatcgaaccaataaacgccgacgggatatcgccgatctacgcacccgctatggcgaactgactcgccttaacaccatgggcgagctggccgctggtatcgtgcatgagcttaatcaacctttaaccgccattatgagctataaccaggcggcagtgcgcctgattaaaaaaaacgatcccgtaaagatccccgaactgcttgaggcctcagtgttgcagataaaacgcattgacgccctgctcagccagtttcgtcttaagctaaccagcaagcgcgccgaatatcagccggtggaccttccgtcgctgtggctacgcgtgtgcgaattactggataatgagatccgcgccggtaaagttcgtatctccagccattttccgtcggacctacccgcgcttcctgcgccgccgctgtgggtagagcaaatactgcataatatcgttagcaatgccattcaggcacaaagcataaatgttccaggtagcgcgtggattcatctgcaagccgtgcgggtaaataacggtatcgctttaactcttactgatggcggaccagggttatcatctgaagcgctggagcaggtttttataccgttttataccacccgtactgatggtgtgggactcggcatggcccttgcggatacccttgttcagcgtcttaatggcaagatagaagcgagcaatatcaccggacaaggcgcttgcttccggttatggtttccgctgcgcaatgaggagaagtaa

SEQ ID NO: 95571 - DNA, 543 bp, Enterobacter aerogenes
atggcaaatttgcaggaagggggttgtcgtagtcttactatcggcgagatagcattggcacgtttggtttttggcgacgcaataaaatattctgaagttaaagtacataataaaagttacttaccatttaacatgcaatcaaataatgttgcaatgacgcctaatggtgaaatgtatttccgagagccgcattatcgtgatgatttttcaactgagcctcctcgatataagcactggtttatacacgagatggttcatgttttgcagcatcagattggaatgaatgttcgtaccagaggggtattcagttgggcagtgagttataattactctttacctccaaacaagaaattgtcgaactttggtatggaacagcaggcatctataatttcagattattattatctaattaattacggcttgggcgattttgtaaacatcacaggttttgcggggattattggaccagatctaaaagataaatatttacaggcgttatctttgtttattaaaaaccctaaagatcggcgggcatggttatga

SEQ ID NO: 95572 - DNA, 1977 bp, Enterobacter aerogenes
atgaaactgacacccataatgaagggaatggtattagccggtgtgctgtctaccattgcgcttcctgccctggcggacgtcacgccaaaagaagcgacggcggaaaccaaaaagaccaacgacgcgctctataaccaactccccttctccgataacaccgatttcactaacgctcacaaaggttttattgccgcactgcctactgaagtgattaaaggcgagcaaggcaacgtcatctggaaccctgagcagtactccttcattaaagaaggcgaaaaagcaccagataccgttaacccaagcctgtggcgccagtcccagctgatcaacatcagcggtctgtttgaagttaccgacggcgtgtatcagatccgtaaccttgacctttccaacatgaccatcattgaagggaaagaagggattaccgtcgttgacccgctggtttctgctgaaaccgcgaaagtcgggatggatctgtactacaaaaaccgcggtaaaaaaccagtggtcgccgtgatctacacccacagccacgttgaccactatggcggcgtgcgcggggtgattgacgaagccgatgtgaaatccggcaaggtcaaagtttacgcaccgtctggttttatggaggcggccgtagcggaaaacatcatggccggtaacgtcatgagccgtcgcgccagctacatgtacggcaatctcctgaagccggataccaaaggtcaggtaggcgccggtctggggaccaccacctctgccggtacggtgaccctgattgcaccgaccaacatcatcgagaaagatggccagaaagaagtgatcgacggcctgacctacgactttatgctggccccgggatccgaagcaccgtctgaaatgctgtggtttatcgaagagaagaaactcatcgaagcagcagaagatgtgacccacaccctgcataacacctactccctgcgcggtgcgaaaattcgtgaaccgctgccatggtcgaaatatatcaacgaagcgattgtgcgctggggtgataaagctgagatcatcatggctcagcaccactggccgacctggggcaacgagaacgtcgttaagctgctaaaaagccagcgtgacctctatcgttacatcaacgaccagactctgcgcatggcgaacgaaggtctgacccgtgacgaaatcgccgccaaattcaaactgccggacagcctggcacatacctgggccaaccgcggttactacggttccgttagccacgacgtaaaagccacctacgtgctgtatctcggctggttcgacggcaacccggcaaccctcgatgaactgccgccggaagaagcggcgaagaaattcgttgagtacatgggcggcgccgatgccatcatgaagaaagcaaaagaagactactcacagggtaactaccgctgggtagcgcaggttgtcagcaaaattgtcttcgctgacccgaaaaaccaggacgcgcgtaatctggaagcggatgcgctggagcagttgggctaccaggcagaatccggcccgtggcgtaacttctacctgactggtgcgcaggaattgcgtaacggcgtggtgaaaggaccaaccccaaataccgcgagcccggataccgttcgtgcgatgaccccggaaatgttcttcgactatctggcggtacatattaacggtgaaaaagccggtaaggccaaagctgtgtttaacattgaccttggcagcgacggcggcaaatataaactggagttggaaaacggcgtgctaaaccacaccgccaatgccgaagcgaaagacgctgatgcgaccatcgtgcttgaccgtgcgacgctcaacaaaatcatcctgaaagaagaaacgctgaaacaggctgaagataagggcgaagtgaaggtcactggtaacggtgcgaagctcgatgagatgctgggctatatggacaagttcgagttctggttcaatatagtaacaccataa

SEQ ID NO: 95573 - DNA, 678 bp, Enterobacter aerogenes
atgactgcatttaatatgcagaactattacattggggatgtgagcggtacgaatcaggatgccaatcagttctggttccgttatgcacagcctttttcactaggtgatagcaaatggctgttgcgtggttcattaccgattaatacctatcctgttgcacctacaggtgggcataaaacaggtttaggtgatctgaacttatttgcgtcatggcttattgataccggcaatcccgcagtgagttttggtttcggcccgcaaattacggcgccgacagcaaccgaagatgctctgggaacagaaaaatggtctgcgggtctggttaacgtgctcttcgatgccagttcgccaaaattccagtacggttatctcgcctcatggcaacatagctttgcaggggaaaataatcgcagtgacgtgaatctcggcacattccagccattcttgttttatcagttaggtgggggtacctatctgcgcgcagcccctatctgggtatataactttcagaatgatagctatagcgtgccaatgggactaggtattggccaagtgattaaacatcaaaaaacggtgtataacttcttcatcgaaccgcagggttcagtggccgaccatgggccaggacaaccgcgttggcaaatttttgccgggcttaacctgcaattcctaaattaa

SEQ ID NO: 95574 - DNA, 1998 bp, Enterobacter aerogenes
atgagtgaaaatgatacaatcccaaagaagtctacaagccagattaacaaagcggtattctatacatctgctttgctaattttccttcttgttgcttttgccgccgtattcccggatgtcgccgacaaaaattttaaactacttcagcaacaaatcttcacgaacgccagctggttttacatccttgcagtggccctgattttactgagtgtcacgttccttggactctcacgctacggtgatatcaagctgggtccggaccatgcacagcctgatttcagctaccactcatggtttgcgatgcttttttcggcaggtatggggatcggcctgatgttctttggcgttgccgaacctgtaatgcattatctttcgccacccgtcggcaccccagaaaccgttgcggcagccaaggaagcaatgcgtctgaccttcttccactggggactgcacgcatgggcaatttatgccattgtggcgctgattctggcgtttttcagttaccgtcacggtctgcctttaacgctgcgctccgcactctatcccatcattggcgatcgtatttacggtcctgtaggccatgcggttgatattttcgctgttataggcacggtctttggcgttgcgacatcactgggttacggtgttttgcaggtgaatgccggtttgaaccatcttttcggggtacccatcaatgaaacggtgcaggtcattctgatcgtggtcatcacggggttagcgacgatttcagtggtgtccggcctggataagggaatacgtatcctgtctgagctcaatctgggcctggcgttgttgctcctggcgctggttctgtgtctggggccaacagtgcttctgctgaagtcatttgtggaaaatacgggcggttatctttcggaactggtgagtaaaacgttcaacctttacgcgtatgagcctaagtcgagcaactggctggggggctggacattactgtactggggatggtggctttcatggtcgccgtttgtggggatgttcatcgcacgggtctcccgcgggcgaaccattcgcgagtttgtcaccggcgtgctgtttgttcccgcgggttttacgctaatgtggatgacggtgtttggtaacagcgcgatccatctcattatgaaccaggaggccacagatctcgccaatactgttcagcaggatgtcgcgctggccctgtttaatttcctggagcatttcccgttctcttccgtgctgtcattcattgcaatggcgatggtcatcgtcttctttgtaacgtctgctgattcgggggcaatggttgtagatactctggcatcaggtggagtggcaaacacacccgtctggcagcgaatattctgggcctcgctcatgggcattgtcgcaattgcgcttctgcttgcgggagggctaagcgcgctgcaaacggtgacaatagcgagtgcattgcccttctcagtgatcttactgatatccatatacggacttttaaaagctttgcgccgggatttgaccaagcgtgaaagcctgagcatggcgacaattgctcctacggctgcacgtaacccaattccctggcagagaaggttacgcaatatcgcgtatctgccgaagcgatctcttgtgaaacgttttatggacgacgtcatccagcccgccatgacgctggttcaggaagaactgaacaagcaggggacgataagccacattagtgacgcagtcgacgatcgtattcgtcttgaagtcgatttgggcaacgagctgaatttcatttatgaagtgaggctacgcgggtataactcaccgaccttcgcgctcgccgcgatggataatgatgagcagcagactgaacaacatcgatattatcgcgctgaggtttatctcaaagaaggcggacaaaattatgatgtgatgggctggaaccaggaacagctgattaatgacatactggaccagtacgaaaaacacctgcacttcctgcacctggttcgttaa

SEQ ID NO: 95575 - DNA, 1266 bp, Enterobacter aerogenes
atgatttcacgctggaaatggattctgaagcagacatttaaaaaactatggttccgggcaacgttattcgcaattgtcgcgataataacggcccttttatctattctttttaaatcaatgatacctgagtcgatttccgtgaaggtgggtgcggaagcagtcgataacattctgaacatacttgcttcaagtatgctggctgtaacaaccttttctctaagcatcatggtgactgcatatggttcagcaacaacaaacgtaacaccacgtgcaacccgtctcgttgttgaggattcaactactcagaatgttcttgcaacttttattggctctttcttattcagtcttgttgggattattgctctgaatatgggggcatacggggaccgcggaagagtcattctcttcattgttactctgattattattgctttaatccttattacattgttgcgatggatccaacatttaacgtcattagggagagtaggagaaacgactgcaagagttgaaaaagctgcaattgatgcattctcagttcgagctaagactccttaccttggaggttttccatggttagattccgaatccccgccgacagggacttttgctttctacacggcgcaaattggttacatcgaacatatcgatatgagtaagttgaaaaatgctctcgacgataattcactacatatctatctgaatgttcaaccgggcagttttgttcatccatcatcaccgctaatgttccttacagccagagctacaaaagttttaagcgacagtttgatgtctgcatttacaatttcggaagctaggtcattttcacaagacccaaggtttggtctatgcgtgctgtcggaaatcgcaagccgcgccctatcccctgctgtaaatgaccctggtactgcaattgacgtacttggtcgtgcagtcagaattttatctttatatgcacaggaaatgtcaaagtgtgctgagatcatatatccaaacatacatgttgcaccactatcagtagacaatatttttgatgatattttttctcccattgcccgagatggagctaaattacgtgaggttcaaatacggttattaaaatcactgggtatgctgtcaagttcctggcctgagctttattcagagagtgcaaaaaaacatgctaaagaagcattgaattatgtaatacactctcagccattaaattctgatctacgtttattatatagaacctatgaggattgtttaatgaagcagcacctgtga

SEQ ID NO: 95576 - DNA, 1458 bp, Enterobacter aerogenes
atgaccacaagaagacaacacattaacagaatccacgttctctacaaatcgatggtcaaacgatacgtttcaattgatgaaacatttaagactatccttgaagaaggcgttaaagcatttgacctgtctctgggtatagtgagtcaggttgaagatgataagtataaattacttgcagtttcaggcgcccctgatggagtgtacaaaggattaacactggaattaaaaaacacttactgtaaaaaagtcattgatgagaaaaaaattattagcatagaaaatgccggaaagagtaaaaatttcaacacacaccctgtttatataaacatgaatcttgaaagctatatatcggcaccaatatgggtaagagggatgatatggggaaccattaacttctcatctcaagaaatcaaaaaagaaaagttcaccaatgaagatcatgaatttattgggctaatggccgacgggattggagcttcaattgaaattgatttattgaacaaagaaaaagaaacgataattacttctcttagtcgaagtaataaaactttagaaaatatttttgaaaattctactattggcatggcccttgtatcttcctccggtcaatgggtcaaagttaaccattccctagtagacatgcttggttattcaaaaaattatctactatctataactttccaagaaataactcaccatgatgatttagagaaagatttagctctcttaggagcactgtctaaaggttttattccatcttatcaacttgagaaaagatatttaactgcaaaaggggtgtatatttggatattactcagcgtgtccattgtttggagcgccaatggcgaaattcaatattacattgcccaaacacaaaacattaatgaaagaaaaaacatggaaataagtttaaaacagcaacgccagtcactcgctgaaataaacctagaactcgagaagttagcatctcaggactcacttaccgggatagccaaccgacgaaaatttttatcatatctcaacgctgaaatagaaaaatcaatagaccacaatcaaccactatcgcttgccattatagatatcgattattttaaatcatataatgatgaatttggacatgttgaaggggacactgcacttataaatatagcgaaaattctttcagattcacaaacacaggaaagcatggttgcccgattcggtggagaggagtttatcattcttttcccttgcgcaactgaagatgattgcactatgttatgcgaaaattttagagtctccgttgaaaaaaacaaaaaattcaagaggagagtcacagtaagcatcggcgctgttacttattaccctagcaacaacactattctctccttcgatgacttattaaaaattgcggatgcaaaactctacgaagcaaaaagatcaggacgaaacaaagtaaaagccactcgtttacaataa

SEQ ID NO: 95577 - DNA, 573 bp, Enterobacter aerogenes
gtgctgattggctatgcgagagtctcaacggtagaccaaaacctcgatttacagaaaaatgcactaattcgtgcagaatgtgagctaatttttgacgataaatcgagtggtaaaaacacgaaaaggccgggtttaaagagggcattaaaacgcctaaaaaaaggggatactctggtggtatggaaactcgacagacttggtcgccgaatgtgggacctgattaagctggtgggggaactgcaggagaaggggatttactttcgtagtctcacagacagttttgataccggaacgccagctggccggtttgtcttccatgttatgggcgcactggctgaaatggagagagagctaaatatcgaacgtactcgcgcaggcctggccgcagctcgcgaacgaggcaggatcggcggtcggcggaaaataatgacccgcactatcatcaaccgggcggaagaaatgttaatcgctggcgccacccggcagcaggtggctgatgtgatcggggtaggggtgaagacgatttacaaatatttcccagtatcaagtgtaggaaattttgagaatcagtaa

SEQ ID NO: 95578 - DNA, 228 bp, Enterobacter aerogenes
atggatttcaggacaaaacacgatgggaccgaggctgcaactggcttttggctccaaatctatgaagaccttggtgaggataaaggcgttaacatggccgacctggaaatctgggttgatagatttatcgactcgcgcgcagagctgaatgctgaaataaagaaaaatgctctcgaatttcttaagagagccgtcatttcccttgaggctgagctaaaaggcagctga

SEQ ID NO: 95579 - DNA, 378 bp, Enterobacter aerogenes
atggccattggtgcattttggacagagaaagtaccggatatggcggttctaaacttaacaacatatgttaaatatatgaaccttgaaggtgctgaattacgagtcgataacaagatcatcaaacttcagcctgtagatacattaaccaagtttgaacaaatgatgcccggcgataacgtagttaatatgccaacgtcgacgcgaggctttgccctgcctctttcagatttaaaacaagttatggccgcgaaaacgtcaatgattaggcttaccaccctttcagatggggcgattgttggcacgattaaagacgggcagagcgacaccaaagcctattatgctttgcaaaggttcttaaaccagatccctaataaataa

SEQ ID NO: 95580 - DNA, 357 bp, Enterobacter aerogenes
atgaaaaaagtcatcgcattggcgcttggagcgctgttactttcgggttgtactgtgcgtgttgcagatttgactgtagcaagcaccaaaaactacaaccttaatgggggcaagttctacaaaggtaaacgtgtaactgctgaagatagctatccggtcatcatcttccctaccgggatccctaacgtgaaaactgctgcagaccgcgcgattgaaaaagaccgttgtgctgttggcctgactgatgttgttgttactcagcttaaccatgctttcctgttcgggaagattggattgcgtgtagagggtaacctgatcatcgatcgcagcctgccgggttgcgagaacgcaagctga

SEQ ID NO: 95581 - DNA, 282 bp, Enterobacter aerogenes
gtggtaataaatgacccggctgcgctggtcaatgcggtgatatgtgccgtcatagtctgcgcattgatgttttatcaacgacacggtgccaggcatcggcctggtatctcgattcttgcttacctgctggtgttgatttacgcgagcatacctttccaatttatctttggtctttatgttcagtctcactggctggtggtgctggcaaacgtgatgatatgcgccgctgtgctgtgggcacggggtaacgtggcgcgtctggtcgatacattgaggcactaa

SEQ ID NO: 95582 - DNA, 1293 bp, Enterobacter aerogenes
atgagtaatgtattcctaaaagatactcgtctagggactctttatatcaaaaatatatatgagttttttgaaggccccaaactgttttctgtactgaatgaagtcgatggtttgtatgttgtttattggattggagatgaggatgattttgataaatggataatattacccatatctaaaactcgcctggagcatcttgagcgtaaaagattagatattaatagtatgctctcttatcaagagcaaaagttttgcttccaaattaaccttccttatgatgaaagtttggaacctgtatttataaaattaagtacagatgagatgaagcagtcaataaaacttccaaaggttgggctttacataagttcggttactcctatgcttgctactggtaagctaggagaatgtatcgaattttcaacacatgaaattcatgtggaaaaaactgcgacatcaactgaaccgttagtattaaagggtgtatctaaactctttgagtgttttaacgatttatattcatcaattttgagttcttttgatgaaaaagacgcaatgagaccagtatctggacgccctggttcatttgttttgtcttttcaagctgaaaaaatgcagcaaatagaaccgttgctcaaagaattgaacgctttgatattggcaagaggtaatctcgtcgatttcattgaaagaaaaaaaattgatgttcagatgctttctgcattgtttgagagtgtcattgagacaagctctagttttgaactgaaaagtaatgtaactgacgaactagtactggtagtccgtaaaacagacgctgaatattataatgcttcgttagcaaaactgtcgactcaagtagtcggtggttatcaggttcctcaggcaaacttaattgaaaaagtatttaaaatagttgagttgaaatggcaagataagcacttaaacagggttagcactggtttagatgaaaggcatattaattattatatacatgctgccaaaatacttggttttatccaaagcaatggatctgtttctgcgctagggcagcagttagctgaatctgaacctgaaaaaaggcttagaattgccgctcgcagctttgaatccagtcactgtggttgggcatggattatgtggagtcaggtaaaaaacctttcagaactggatccaattacagctgaagccttcttgctggagaagtgtaattcactgagtgctaaaactattaatagaagagcttctacgttacgtcagtggtgtgatgctttgaaaccggcatatcaagagatttaa

SEQ ID NO: 95583 - DNA, 234 bp, Enterobacter aerogenes
atgaaagttgaaatcacgatcgaccgtaagaagaaattgcctgatggagcagagcctgcattagaggctgagttgctgcgacgattaaatcaaaaatatgacaactgcaaattgacgatccgccgtacaggggctgatgggctcagtgtgttcggtgccatggccggcgataaagaagctatcgaagagatccttcaggagacgtgggaaagcgctgacgactggttttactaa

SEQ ID NO: 95584 - DNA, 915 bp, Enterobacter aerogenes
atgatgaaaccgacttttaatcaattaataagcttttgtactgtggcagaagtggggaacattggtcgtgcggcggagaggctgagcatttcacagcctcccttgagcaggcagatcgcacagcttgaaagcaatgtaggggcgaaactttttacccgggatgcgaaaggcgtgaggctgacaattgccggtgaacaatttttaacagacgctcacgcaatcttggcccttatgcaacaggcctgtaataacgtgcgagcagtagcggatggacaacagggatttttgaagcttgcggcgactatgtacgcgtcctacagcgtggtaccgcaggtcgccatgcgacacaaggccagttaccccgacgttaagttgctattcaaagagctggtgccaacggacttaattagcgccttacaggatgggagcattgatgcggcaatctcatttggagagcccaccacatcagatattaattctcttgtgattttgcaggagccattaatagcagctttaccggccaaccaccatttcgctgatagcgaagcgttaaacctggcttgcttggtggacgatcagtttattaccgtgcctcgagctatggcacccatgctgtacgacactattctaagccagtgtcagaaagcgggttttagccctcatatcggattagaggtatcaagtcagcagacgatcgttaatttcgtggctaacggatttggggtagcgcttattccggcaagtatgcagcatgcgcaaatacgaggagtggtttacaaagaactcgcaggagcaaatacggtacagaatgttttaatgtggaatgcgagaaacaaaaacccgagcctaaagcggtttttaagcctgtgccgcgaaatccgtgacgaactgaacgcagcacaggctggagagtaa

SEQ ID NO: 95585 - DNA, 1695 bp, Enterobacter aerogenes
atgtctaatacattaacaaaagtacaggatgcaaacgcacgccgtggtggtgatgtactattagaagttcttgaaagtgaaggcgttgaatacattttcggcaacccgggcaccacggaattaccgttaatggatgcacttttacgccgtcctaaagtgtcctatattctggctctccaggaggctagtgccgtagcaatggctgacggttatgcccaggcatccggcaagcctggtttcctcaacctccacacggcgggcggcttgggtcacggcatgggcgctttacttaatgcggcctgctctcaaactcctttagtggtcacggctggccagcaggatacgcggcactttatgaccgaccccctgctgcttggcgatctgtgtaatatcgcaaaacctgccgttaaatgggcgcgtgaagtgaccagcgcggatcagcttcccgtgttgctgcgtcgtgcatttcatgatgccgacgccgccccgaaaggcgcggccttcctgtcgctgccaatggatgtaatggaggaattgagcactgttaacatcggctctccgtctaatatcgaacataaatctgttgcgagttctctgcctctgctagctgaaaaactcgcggcgtttgcccctggtaaagtggcaatcattgcaggcgacgagatcagtcagtcccaggcggctaaacaggttgtcgatctagctgaaatgctcgcggctgacgtgtacggctcaacgtggcctagccgtattccataccctaccgcccatccattatggcgtgggaacctcacgacgaaagcaacggaacttaataaggcgctctccggatatgatgcgatctttgcgctgggtggaaaatcccttatcactatcctgtattcagaaggtgacgcggtgccagcatcctgtcaggtgttccaactatccgccgattctggcgatctggggcgcacttacgttagtgaattgtctgttgtgggtgatattgcgctttctctcgatgcgctgttacctcacctgcacaaaaccaccgcggatcgtcgctctggttacctgcgccgttttgatgaggccaaggcaaaatttaacgctgacaaagcgaatcatgaggagctggttaacgaacaatacaacgcagctgtaatcactccggtagtggctgcattcgaggctgcgcgtgcaatcggtccagatgtggcgatcgtggatgaagctatttcgacgtcgggaggcttacgtaaagcactgaacagtcctaaagccgatcaatatgctttcatgcgtggcggcggtctgggctggggcatgcctgcagcggttggttactccctgggattaggtaaagctccggtggtgtgttttgtcggcgatggggctgccatgtactccccacaggcgctgtggacagctgcgcatgagaaattacccgtcacgtttatcgtgatgaataatactgaatataacgttcttaaaaacttcatgcgctcgcaggatgaatacacttcagcccagacagatcggttcatcgctatggatttaatcgcacctgccattaattaccaggctctgggcgcttcgatggggctggaaacctgcaaaatccatcgcgcctgtgatatagctcctgcagtcgaagccgcgattgccagcggtaagcccgggttgattgaaatcatgatcagcaaaggttaa

SEQ ID NO: 95586 - DNA, 369 bp, Enterobacter aerogenes
atgactgcgaaaaatcagtttgctgctcatgttggtttggactgggcggataaaaaacaagatacctgcgttcagtttaaaaacggtgatcgcatatttcatatgattgaacatacgcctgaggcacttgatatctggctcaatgagttacaccagagggcgaaaggcaggattgctattgccgttgagctgaagaaaggcccggtggtgtatgcactccagaagtacccatttgtcactgttttccagtacacgcattgtcactggcccgctaccgacaggctttctggcccagttgtgcgaaagatgatccgccagtattggcttataacaaaccaagaccaaactagctacaaagccaattcttga

SEQ ID NO: 95587 - DNA, 642 bp, Enterobacter aerogenes
atgacacacaataaaaaatgggtgttttctgagttagttaaggattcgaacgacctaagccagcttatcgcctatgcgatttataaggctgataaggacggcgtagccattggttaccgagctcagggaaagagtgaggcagagattcaagccaaactagatgattatcatgattctgtagctacgacacctcggctgcagcagagctgccatgaacgggcagcttctctcatttttacgcttgttaatgatattgctgctgagacgcaacaaaaagcagccgagcaaataactgccattaatgccgaatataaaaagtctcttaccaaagaaggcaaaaaggcagtcgaggaatatcataaaaaaataaaacaaaacgttgcagaaaaacaaaccaaatgggaatggttgaaggaattcactgtatctggtttttctggtgtgtgggcgacaatccttcttattctcgctgtctggctactaagcatggcagctgcacctaaaagtgaaagagatcaccttacggggaacttgttccagcggatgtggaactatgtgaattcgtcaccactgcccgaggcagaggctgcgaaaggtgcagatacaccaaaagcaacgttaggccaaccgacgaagccataa

SEQ ID NO: 95588 - DNA, 840 bp, Enterobacter aerogenes
atgcgccgggtatcggatgatgccaggttgctggcgctgtacctgctcaccgggcaacacacgaacatgattgggtgtttccggctgcctgatgggtatgtttcggaagacttagcctggactcctgaaagggtttcgaaagggtttgatgaactatcggctaacggtttcgcaacgcgtgattcgtcatcgaaatgggtgctaattcgtaactttctgacctggaattcagttgaaaacccaaaccagggaattgcagcactgcgtttgtttgatcaggtcccggacacatctacggttaagccagagctggcgcgggttttagcctcggcaatatcccacatcggcatcgcaaaactaaagggttccgaaagggttcttgaaccgttccttaaccaggaacaggatcaggagcaggaacaggatcaggaagaagatagttcggggcatggctccgccacacccccagccgatcagaaccgggacgaaggggataaacctgattcccaaaaaatatacccgaatgatttcgagcaggtctggtcggtttatcccaggcgggcagggggtaacagcaaatccgatgccttcaaagcttggaatgcccgaatcagggatggaaccactacggcggaaatcctcgcaggtgtggagcgttacgcggctttcgttaaagccgagggaatgctgaacacgcagtacgtgaaacaagcgaaaactttttttggccctggtatgcatttcagcgaaccgtgggcgattcagcaggcgccaggaactcgagatcccaatcagatttcggaacctgacaaaaccatcccagcgggattcagggggtag

SEQ ID NO: 95589 - DNA, 795 bp, Enterobacter aerogenes
atggctaaaaattctatcgacgcttatggcgccagcggcaaaagcaatgttctgtttttcgaaccggaaagtttgcatctggttaccgatacaacacacccgctgtacgacgaacgagtacacctaccgcttaatgaagctgtgatcctcaacatcatggagcttggggttctcgaaccgattatcgtgtggaaggacccagagacagggaaaacctgcgtggttgcaggtcggcagcgcgtaaagaacgctatggaagcaaacgccaggagaaagcgggcagggctggaaccctggccggtacccggtatagctaagcgcggctcagcaattcaaatggccaaatacatggtcagcgaaaacgagataacgcaaccagataccccactgggccgggcaaaaaaaatggttcagcagatggaatacggtcatgacgaaaatgacattgccctgctttttggctgcagcgtaaaaacggttcaggcaacagtggctctactggatgctacgcaggccgtccaggcggcggttgaggctggaaacgtcactgtcactcaagcgcgtcagctggtcgatatgccaccggaaaagcaacgggaaacggtcaaacagttagaggcagcggcagagggtgtaactggccacgagaaagctcgccgccagcgcgctgtcctcggagacacaaagccgcgtctcaaatcccgtaaggaaatcacccagcaacttcaaaccgccagcggcgaatacgcagcggctttgcggtgggtgcttggtgatgaaaacacaccagtttaa

SEQ ID NO: 95590 - DNA, 537 bp, Enterobacter aerogenes
atgcaaatactctcctttcaacaaaataccggattcaagaccggcgctttgataaagcgaaatcagccgatagtgacagagcacgacaacattcgctcagccgttcgcgcctgggctgcagctgctgggcaggatgttgtatctgcgtacatcgtcgaggaatggcgacagcagggcggcgaggagatcgcgtttcctgatgacatcagccgtgcccgacagaagctttttcgctacctggacaacccggccgagtctgagcgctatcgcgagtacgttcgccttcttacaccggcgatcatggccgtccttcctctggaataccgacaccgcctattgcccgaagagagttttatgtcccgactggctcgtctggagaaagaaaccagcgaagcgaaggttgccgttgctatgggggcaccacgccatcagaagttgaaagaactgagcgagggaatagtcgagatgttccggatagacccggagttaacagcgccactgatggccattgtcacttcaatgctgggagctctgtaa

SEQ ID NO: 95591 - DNA, 228 bp, Enterobacter aerogenes
atgaatgcattagagaaagctataaaaaatgccggtaacgcaacaaagctagctgaaaaattggacgtctcatcaatgacaattagtcattggaaaaaacgttgtggggggcttgtgcctcagggccgcatttcctctatttttcaggctacaggcgttacacctcacgaacttcgccctgatctttatccaaatccaacagacggcctaccgaaagaggaaggctga

SEQ ID NO: 95592 - DNA, 1608 bp, Enterobacter aerogenes
atgccaaaccaactttttgaattcaaaagctatcctatcgtattcattggttcaggtatatctaaaagatatctaaaaaattaccctacttgggaagatttactaaatgagtattggcaaaaaataaatcctgaaatagatttctacaattatcttctgacaataaaagagaaatttcgagccagcattggcgatgattctgatttagatcataaaatatacaccgaagcagcaactaaaatagagaatgactttaacaagctttttactggcaacgcaattaaacttgaagggctagacgcaaaacgtgtgtttagtgaaaacatttcacctttcaaatactcaatatgtcaacgattctcttctcctacgcttaaggatgaggtagacctagatgaattaaattctttcaaagaactattaaaaaaagcaaaaatgatcattactactaattatgatgcatttatagagcatctacttaatgatcaaggcgtcacccctaaactatatattggaaataatggtttcttcgaagacaccattggatggtgtgagttatacaagatacatggagatatcaaggaaccgaaatcaattgtaattagcgctgaggactatgagaaatatgatgatagtgcaattctcataagtgcaaaaatactatcgaatatgattaaaaatccaattctctttatagggtattcgttaacagatagaaatgtgaaaaaactattgtcagacttctcatcacaattaccaaaagaagatggaaggaaatcagctgaaagaataattcttattcaacacaaaccaaatgaagagcaagtaatcataaagcaaatcactgatcagcaacttcaggttacttacacctctgttgaaacagacaattacaaacagatttatgatgagataagcactgttgatgaaggattgtctccttatgatgtcttacgatatcagagagcaattaagacacttattgttaatgaaggcgaaaaaggcaatctcgacacattactagtatctccatcagacttagataaacttgaagaaagcgttaaacagggaaaaaacctggttgtagctttaggtgataaaaaatacgttttcactcaaataaaagaacttaattatctagaggactatttgtttgagaaaaatgaaatatccaacaagttagcaattgagtttatcattgatgcaaaaaatacaataagattaccattttcaaagattatatccaattgcaacttccgtgatttaaatttgcagcaaaaggcattaactcgacttaatcaaagaatcgagcgccatggtaacctagataatataattaactctatagcattagataaagcaaatgcagaacgaatctttaccacaattacagagataaaaaacgcaggatttagcaagcgaaaagagccagttgtcgttataaaaaacattagacacatagatgtgcgtgaattatctgcctatgtaaaagaagatatattttcacaatttatatcatgtgataatgaaaacttaaagactgtttataggaagttgtttttagcctacgatttgcttataaatggtgatattatgaaacctctctga

SEQ ID NO: 95593 - DNA, 273 bp, Enterobacter aerogenes
gtgaatccgtactggcgcaagcgtgacctgcgcggatacatccgcgaagctgcgcttaccaccgcttacagcatggtcgagagcatggctgaacgtaacgccaaagttgactatgacggcgcgcctaatagctggagctatgagttttctctctggtaccgcttacgccgggaaaaatatctcaaagaagcgcgcgactacctgaatgaagaagctaccaacgacgaaatcgacgacgaaatagagaacgaactggaggcctggaatgactga

SEQ ID NO: 95594 - DNA, 753 bp, Enterobacter aerogenes
atgactgatattactgataccgggtcattgattgaatctggcgcgctgtttgtctccaaccattctggcggcaaagacagccaggcgatgctcatcaaactgcttgaggtcatcccgccgaagcagcttgtcgtcgtacatgcgtcgcttggcgcgatggaatggccaggagcgctggagctggcccagaagcaggcagaggtcgcaggcatacctttcatcgtcgcccgtgcacataagaccctgctggagatggtagagcgtcgatttgagaaccgcccagaggtgccaagctggccgtcagccagcacgcgtcaatgcacaagtgatctgaaacgtggccccatccagcgcgaggttcgccggtatgcaaaagccaacgggtttagaaccatcgttaattgccttggcctgcgtgctcaggagtcaccgggtcgagccaagcggaaggtgttcagcaaaatgggaatcagtaactcggttaacacctggtacgaatggcttccgatccatgagttgcttaccgaagaagtgttcaccgtcattcgactggctgggcaagagccgcattacgcatattcccttggcaatgagcgccttagctgcgtgttatgcatcatggcgagccgtaacgacctgaagaatggtgcaactcaccatcctaagttgttggaacaatatgcggagctggagacccgcaccggctacaccatgcacatgaataggatcccgattaaggagcttgcagcatga

SEQ ID NO: 95595 - DNA, 1407 bp, Enterobacter aerogenes
atgttactggaaaaaaagcaacgtgagctagagattgcggaaaaagaatatgaaactcaagtaggtaaacttgctcgttttgataagacaacaattgatgaacaacttaagcttcgcaaacagaaaacagagttacttagtgactacgcacggcagcataagcagttcctgtctgaaaaaatctcaaaaacacctgactgggcattgacgacatttagccaaaagcttgcttcgttcgatgtttcagcaattaatactgaagagctcaataagtcattacgttatactgtagacaggcaattgttacgtgagattgtacacaataacgaatgtatttgcggcactcatattgaaaaagacagctcagcggcacggcttttagaggaactcggtaaacatgccgttgaccctgatcttaagcaccgttgggtgagagcgaccaagctacaacaaagaattagcagccagcaactaccaaaagctagtatggaaaaattattagctgatattgatgactacgaagttggtatgcaggaacttgaacacagtataaaagagttaagttttacgattgtcgagtctgacattgatgatattaagattatcgaacgtgccaaagatttggctaaatctcagtgtgaccaacttaaaggacagattcctcagttagagcagaatatccgtaaaaaagatatcgatattaaagaaattgatcgccgagtgagcagtttgtcatcgactcagcccaaggcccagaaagtccgcaacctgattctagcgacagacaagataatcgagttatatgaggaagctatgaattcctcgcaaaatggagttgagcaattattattgaaaaagatgcaatcattgtttagtcaagttgcttttaatggctacacggttcaaaaggacaccaacggaaaatcagggagctttacatgggcaattgttgataataaaggcaaacgtgcagccgctggtaacggatatcaagctatgcttgctatatcttttatcgtcgcattaattgagttctcgaaggttcgcgcatataacaagcagcatcttcttacccctggtactattgccccatttattgcagactctattcttgcctttatcggtccagataacggtcgagagcttgttcgttacatcgcggagaaagttgagcagtcaatctttttgttttctcaagctcagtggactgaaacacataccgacaaaggaatacggcataaaataggtaaggagtataatcttgttcaacatacagtgcttaccaaggaagaatttaaaggccagtatccgacgcaacttacggtgaatggcgttaattacgaagttgttcgttttggtagtgattttgacaaagtaactatcgaggagattcctacctatggctga

SEQ ID NO: 95596 - DNA, 453 bp, Enterobacter aerogenes
atggctgaaattttagactggcgtaagttacaggttcaccgggattctcgtttcgaatctttagaagaacgattttgctcgacaaaaggagctaacaatgactcccggatgtttagtacagtcaaagaactaatggtttttgctgcgttagtgggatatcaactagatgaatatcaaccacttgaacctaagattaaaaccacgccgatcctgttggatacttatgcaacaacaggacatgatgcttatatctatcttcttgcgttaacaaaagcgtcatctctagacattctcaaagatgaaaatttaagacaagcaattgatatttttgagggatattgcaatagtggtctcaaaatcattgatagttggataatgaataatattggtgagccactagtgactaatattatatttaatcaaacattagagtacttagttgaaaatgaataa

SEQ ID NO: 95597 - DNA, 1062 bp, Enterobacter aerogenes
atgaataattactacgactatgctgcatctacaccagtttctccgcgagttctagaggcgatgagcccttgggggaccgaaaattttgcgaatgcttcttctgcgcatcaagcaggaaggctgagctctcaagcaatccaacaagcaagagagctaattgcagataaaataggttcacttcctagtgagattatttttaccagtggcgctagtgaagctaacaacttggctttaaaaggagtagctttcaaacatcttactaccaaaggccacattattacctcagctatagagcacaaatgtattctcaatacttgtgcatttctggagtcgattggcttcgaagtgacttatctcccccctgacaggagaggctgcatatcgccatcctcactcgctgcggagataagagaaaatactatccttatttcaatccatcatgtaaataatgagctagggacaattcagcccattaaagactttggtgcgatagcttttgagcacaacattccttttcacactgatgcagcacagagcttctgcaaatgcgatattaatgtcgatgatatggatatcgatatgctttcactgtctggccataaaatttatggacctaaagggattggtgcactttatgtgcgtaatgctagaaacgcagaattagttccccttattcatggcgggggacaagaggctgggttacgtggcggcacatcgcctactcccttgatagtagggcttgcagctgcagtagagtgctaccctactcaagcaagcccaatcgaaaagcagtttctagatcttatggtgcaatatgatttcataagaaacggtagcgaggcagtggtaccgacaatctggagtgtaacctttccctccgatgaggaggtaaaacgttttacgaatgattgtccatggttcatatctcaaggttcagcgtgcaatgctctttcaaatgtagcttcccatgttttaacagcaatggggatgtcggaacaagtagcgcgtcgcacttaccgcattagtcttccgccgtataagattagtgacaaattagcctaa

SEQ ID NO: 95598 - DNA, 1941 bp, Enterobacter aerogenes
atgcatgagcttccatctgaattgcaaaaatttataccagctgtggcccgggcggtgaacttaccggatgaacaatggaacctaatcaagttgtttaagaacgaatttcgcttatcattactcaactaccccaacttttatagcgactcgtacccagtcttagaacaaagtctcaacgtagatttgagcaaactcagtcataaagtaacttgctaccgttcttctgataacccacctattttacaccgaaaggaaaccatgattttgccggggagtgactactatgaacacttcactacattgacagaagaaggggagaaggccgggttgtacgaaaacacccgtactataggattcaaacgttcttggctaaatttgattcacaaaaaaggttaccagctagttgaagggcggttactcagagcagatagcgcacctccgagtattggcgtttcggaacctggcatcgatcgctacaagactgctattgtccgctatgagttatccgggccgatgaaaacgttagctaagcaaggctatctagatggccgtttttctatttttgactatgggtgcggtcgaggagatgacctaagggagcttgaggcaaatggtcttgatgctttaggttgggaccctgtattttctcctgataacgacaaagtaaagtctgatattgtgaacttaggttttgttctaaatgttatcgaagatcaagatgaacgcctcgaagctctcttgagtgcttgggatctagcggacaaaatacttgtcgtatcagtaatgttagctaacgaggcgtatatcgagcagtttcagccttataaagatggcgtaattacttctcgaaataccttccaaaagtattatgcgcaatcggagttcaaagagtacttagaacgttccttgcaagatgatgctattgcagtcgcgcctggtattttttacttgttcaaagataagttagaagaacaacgttatcttcagagtaagtatcaaagacgttataattggcaacaactcacttctcctcaacccattgagagtaaagatcgagcaaaacttgttattacccaaaatagggagatctttgataatttttggaatgtttgtctagagcttggtcgtataccggcaaacgatgagttcaagagttctgaagaggtgagaaacttgattggatctcacaaaaaagtctttggcctgcttcaggaaatgtttggtgctcatgaatttgctaatgcacaaaaatcccataaggaagatctactagtatattttgctatgggattatttgagaaaaggaaaccatatactcatcaccctgaaaatctaaaacgtgacatcaaagctttatttggtgattaccgaacggcgaataatcttgcgaaagaattactttttgcgattgcagatacgcatttaattgaagaagaatgcataaaagcacacgagcaattgcctgcaagtattcttaataatggacactctttgattctccataaagactatattgaggcgctgccactcttattgcgtgtttatgtcggtgctgcattgcaactttacggagaactagacgacaccgttgaactagttaaaatacatattaactctggtaaactcacgttgacacgctacgatgatttcagcaaatctgttccttatttgatagagagaaccaaaataaaaatggttaatcaaaatatagatttctttgactatctagatgaaagtcgccgcccgccactgctcaataagcatttgctactaagtaataaacacgaacaatatgaaaaacaaaagaactttgatgaacgattgtcaaagctcttgggaacaacagccacgggcgaggttatcttgaacaggcagatatttgaggaacggttagcgcttaccggaaagcacgtggctggctttaggctaatttgtcactaa

SEQ ID NO: 95599 - DNA, 1827 bp, Enterobacter aerogenes
atgcaactttacctgtgcgaaaaaccctctcaggcgcgcgatatcgcccgtgttcttgacgcccgtaaccgcagcgacggctacctgcataacgccaccgtgaccatcacctggtgcttcggccatctgctgagcatggccgcgccggaggattacgatccggcgctgaaacactggcgggcagagcatctgccgtttattcccccggcatggcggctggtgatccgcccggaggtgcgcaagcagttccgtatcatcgaaaagctgctgaaacaggcggatgcaatggtgatcgccaccgacgccgaccgcgaaggcgaaaccattgcccgtgaaattctggaacaatgccgctggcgcggtccggtccaaaggctatggctgtcggcgctggatgacgccagtatccacaaggcgcttgctgccctgcgacccggcgacagcacgtttccgctttaccaggccggactggcgcgcgcccgcgccgactggctggtcggcatcaacatgacccgcgcctgcacgctaatgaaccggcggcacaagggcgtgctctccgtgggccgggtgcaaacgccgaccttacgcctggtggtggaacgcgaccgggagatctcccgcttcacgccccgcccctggtggcgggtggatgcccgcttgcatgcggagggttgttcctttctggcgcagtggcagccggatagtgcgtactgtgacgacgaaggccgctgtatccgagaatccgccgcccgcgaagccactgcgcgcctgcaacaggccggaaccgcgctggtactggatgtgaccacccggcgggagaaagcgccgccaccgcaggccttcaccctcagcgccctgcagcaggcctgctcaaaacagtggggcatgggcgcgcaggaggtactggatatcgcccagcgcctgtatgaaacccataaagccaccacctatccgcgcaccgactgtggctggctgccgctctcgatgcacgctgaagcgccgcaggtgctggcggcactggttgccagcgacgcctcactccagcccctcgccacgcaactgaatctgcaacatcgctcacgactgtgggacgacagcaaaatcactgcccaccatggcatcatcccgactcgtaaaacggtagatctggcgcagatgaacgacagcgagcgcaaggtctacggcctggtacgtagccattttctggcgcagtttctgccggaccatgaagtggacaaaaccgacctgcgcctgaactgcgccggggaaacgctgactgcccgtggctcagtcgtgattgtcagcggctggcggcaactgtttttgcgcgagatggcaacgcactcaccggaagaaacgcaggcacttcccgccctgcaacaggggcaaacctgccaggtggaacaggtagacgttcgtgcccgtcagacgcaaccgccggagcactacacggaagggacactgattgccgcgatgaaaaatgccgcccgttttgtcagcgatgagcgactgaagcagcggctgaaagagaacgccggtattggcaccgaggccacccgcgccgggattatccagacgctgcttaagcgcggttatctgattaagcagcgccgctttctgctggcaacggataccgccagcacgctgattgacgccctaccggaagcgctgaaagatccgggcaccactgcgctatgggagcaaatgctggatgacatcgcgacggggaaaatggggctggaggcgttcctggtgctgcagcaagaggccgttacagcgctcacggctcaaatagtcagaggccagaaaaacgcctcatcaaattag

SEQ ID NO: 95600 - DNA, 705 bp, Enterobacter aerogenes
atggatgtggcattggtttccagtatgattagtggtttggttgctatcgtagcggttgtcattcccgcctttaatcagaatcgaataaacaaaataaatcagatgcaagagtcaagtaaaaaacataagttttatcttgagccattaataaaaacttcagcagatctacaaagtagaatatataatataaccgaaggtggatttcttgatggttattatcatggtggtaaccagagacaacgggactatgtcatactgcacacaacgtatttattttcacagttttttgcttggtcagaggcaacccgtcaggatgttcagtttctcaatcttgaaaatgatgaaagaacacgaaggttgtcagaattacaagatgtaatatattcacttattcagaccgaccgcttgggtaagtattttgttattttttctggagagcagcgtgcaattggtgaacgtatgcttgttaaatcagtcaatggttatggttgtattggttatggtgagtttataaaaatggacttggttaatcatgaaccttttttaaatcagttgaaacaagaagtggttcatatggctgatgattttattcattatcaatccaaatttataaaattacagcatgcgcttatagatctgattgattaccttgatccgaaatatatcagagttactgagaataagcgtagaaaaatactactataa

SEQ ID NO: 95601 - DNA, 669 bp, Enterobacter aerogenes
atgaaactgctgctattcacaatgttggcgtttatattgatagcagtcaacaacacttctactgcatccagagctacgcctttcgtagtgcgctacgaccgctatctgctggtcagcacgtcaccgcaacagccgccactcgaacagcttaccgccctgtccgttccgcccggttttcacccgacggtaggggaagcgctgcagtacctgctgcgcgatagcggctggtctctgtgtcttgccaatgcgcgccgggcgcagctttatgggctcccgttaccgctgagtcagtacaacaccggccccctgcgcctgaaggccgccctgcaactgctggcgggcccggtgtggcggatgagcgctgacgaaaatcgtcgcgagatttgttttgccagtgacagttcccttcccccgacggtggcttaccgtcatcccgtgtccctccgccctttggggccgttaacggccccattttttctcgccgggagcatacagcgtggcgatatccgactggcggtaatcgtgccgccggaagccgtttacctccatcaggtggtgtggctacgcaagggagaacagtggtatggctggcggctggagcggtttgatgagcgccgggccgtgttccgtcacggcaaacgccagctgacgctgaagatgccggagtaa

SEQ ID NO: 95602 - DNA, 2019 bp, Enterobacter aerogenes
atgagccgctacgcgctggaggcgctgctgcgcccacccgtggagttttacagcaccgtcaccgccagttgtggcgcgttaatctgcctgacgcaggccccgctgctgatgctgacgccgtggcaggcccgcctaatggcctgcgccctgatgctgctggccctgcggcgcggcgtccaggggtggcacatcgtgagctaccaccgcaacctcctgcgcctgccgcgctatgcgctcaccagccggaaaatcccggtcagccgccagcggctgtttctcggcaaaggcttccgctggctccccatccacacccaacggctctacgactgcctgcaaccggaagccacacgctggctgcgcccgggatggtgttaccgcctggcaagacacatcgaaaaacgcagcgagcatactatgcccggtcttagccgcctgctcagcgccgatcgctggctgaacccggtccgcccgctgccgcccgtcggcggtaatccgtggttacacggggtggaactgcaagagtgcgacgtcaccctgccgctcagcgaacgccccggccacacgctggtgctcggcaccacccgcgtcggcaaaacccggctggcggaactgcttgccactcaggacatccgccgtggtgaggtggtgatcgtatttgatccgaaaggcgatgccgatttgctcaagcgtctgtggacagaagcgcagcgcgccggacgcggtgaccgctttatcctgttccacttggcgtatccggagatctccgcccgctacaacgctatcgggcgctttggtcgcatctcggaggtggcgtcgcgcctcaccggacaactttccggcgaaggcaactcggcggcctttcgcgagtttgcctggcgctttgtcaatatcatcgcccgcgccctggtggcgctcggccagcgccctgactaccagctgatctcccgccacgtcgtcaatatcgatgccctgtttatcgactatgcccgcatcgtgctgccgcgccataacgcgcgggcgtgggaagtggtggcgcaactggcggagcgcgttaacgacaaaaacacgccgcgccatatgctgggccgcgatcctcacgtggtagcgctggagcagtacctcaacgcggagaaattatacgatccgatcctcgacggcctgctctcagcggtgcgctatgacaaaacctacttcgacaagattgtcgcctcgctgctgccgctgctggaaaagctgaccaccggcacgcttgccgccctgctcgccccggactatcacgatctggatgatgcgcgcccgatcctcgactggcagcaggcgatccgccagaaggcggtggtctatgtcgggctggacgcactctccgatgcggtagtcgctgtcgccgtcggcaactcgatgtttgccgatctggtgagcgtcgccgggcatctctacaagtttggcctgaatgatgggctgcccggcaatagcgaaaaaccgctgcccatcaacctgcactgcgatgagtttaacgaactgatgggcgaagagtttatcccgctggtcaacaagggcggcggtgcgggcattcaggtcaccgcctacacccagacgctgagcgatattcaggcccgcatcggcagcgcgcccaaggcaggccaggtggtcggcaacttcaacaacctgattatgctgcgggtacgcgaaaccgccacagccgaactgctgacgaagcaactgccacaggtcgaagtgcgcagccgccaggtcagctccagcgtcaccgacacgccgggcggcaccaacagctttaccagcaacacccgcgagcaggtaaccaccagtaaagtgccgttacttgataccgccgcgctgatccaactgcccaaagggcaggcctttgccctgctcgaaggtggtcagttgtggaaaatccgtctaccgctgcccgtggcggataaacactgcccgctgccggagtccgtcgcgcaactggcggcgtggatgcaggcgcgccagcaggggctgccggaatga

SEQ ID NO: 95603 - DNA, 633 bp, Enterobacter aerogenes
atgagtgaacaacgacctcctccgtcacgcccggcacagggaccggttggctggctactgtctctgaccgggcggcttatcgggctggttatcggcgcgctggtgcttcgggtagtgctggagctggcagggctatatttctggtggccgcaggaggggagcaggcacgcttttcaggtgatgaagcaggagcaggctgaactggttattgcgttgcagccgcaccctctggggaatgaaattctggtgctgctggaaaaaggggcaactcgcatacttatggtcaataagctcctgcgaaagccgttcaccgccctggcttacacgctggtgagttttatgcagcgcctgatatggctggccgccatgctccccctgctctgcctgtgtgttttaatcgggctgacagaaggtctggtgcggcgagatttacggcggtttggctccgggctggaatccgtttttctccatcgttatatcatcaggtccggcagttcagtctccaccacgctgtgggtgttttatctggcgcagccgctgtttctacctgtgacgctggttttgctgcctgcaaccttattagctggggttacggtatggatggtggcaggtagctttaagcgctggttataa

SEQ ID NO: 95604 - DNA, 1689 bp, Enterobacter aerogenes
atgaatataatgcttcaaagctattttgataattttatcgaaagcaatcaactcgacgaaaatactaaagatgaaaactttgaaaagttttgcaattactatttaatcaatcaatattatccccaagactttgatttggatttatgtagtattggcggaggagatgattctggaatcgatggagtatgtataattgctgacgacatatgcatacatagtaaagaagatctaaaaaatttatataactccccgcgaaaaatagaagttaaatttctgtttaaccaagtaaagaactcagaaaaattcgatttgggtggaatcttaaagtttttggctggagttactgcattctttaaaaataaaaacgagtataccaatgaagatcttagtaattattgtgagattaaggacgatatttataaaaatataattaaatttaaacgaccggagattattttaaattatgctacgactgggaaatgggaggaacctgaggcaataaaaaaaagtgccactgtgttagttcgtaatttagatgacctgaatatcggtgatataaaagtcaattatatagactcaaaaaaactagaattaatacataatgaagtggaaaataaagttgaaaagcaaattgattttagaactcacttgacactaccaagcattaaggatgtgaggcaatctcatatattatcagtcccaataaaagagttcgtgaaattaattacaaatgacagtggaaatatattaaagaatctatttcttgataatgtcagagattttcaaggtaataactctgtaaatgaaggcataagaaaaactttaacatcagaatctcaagaagcattaccaatgttcaataacggtataaccatcattgccaagcaccttgagattataaatcagagaattgtattgactgactttcagattgtaaatggatgtcagacaagtcatgtcatatgggaaagcaggaatgaattaaatagcaacaccgacattatagttaaagttatagaaacaacatcgtcagaattatctgagagtataattaaggcaactaacaagcaaacagaagtgaaggatgaagcatttgaatcattgtctgatttccataagggtttagaaaattactttaatgcatatgctaaaaaaagaacaataccaattttttatgagagaagatctaagcaatatcaaggtgatcacacaaaaaaacctcaccaaataataaatctttcaaagctaactcgcgcaagtgtggcatgtatcctatctcaaccacagagcactcatagatattatggtgagttattgaatagcaatagggataaaattttcaagaatcaggactctaattacaataagtattacttggctacatccatatcttgtaaggttgatacttttttaagaagaaaggaattttcaaagtataaatcaatgaaatatcaattttccatgatgatatacaaactctttgaagcaaaaagaattagtgtggaaaaaacataccaaacaattgattcagataaggattttagactcatattaaatatggtaattggtttctttaatgggttaccaagtgaaggtaagtcatactcgtatttgtccagaaataaagacttcactgcattaattgtaagttcgatcaatggattaacacaaaaagaattaaaactatag

SEQ ID NO: 95605 - DNA, 309 bp, Enterobacter aerogenes
atgcgacatagccaattatttctgttactaactttgcctatgtggtcgctggcctgggcttccccggaatccacccaactctccctagtgctgaagcaactcggcagcgtaaaaaactcgctggaacgcgcccggagcagcgccagcacagacccacagtcgcgctactttttcgactacttacaggcgcagcaggacatctcaaccattgaacaaggcatccgccgctaccttaccccggcaagggcgcagccgcgcgccgttcagcccctgagcgctagctaccagcgggagaaccccgatgactga

SEQ ID NO: 95606 - DNA, 924 bp, Enterobacter aerogenes
atgatgaatagaaaaataatagcgttgccaagttatgctcctacaacttctaatttaaaagatattagctttaatccgatagaaatcaggcaccttcttttttattttgatgaaatcatttacccgtcatggaatatggcagagccttcatataatgaagactcagaaattactttgttaacagaacaagggattattgaaagggtagatataaatactcctattcaagattattctttaatgggtaaaggtgaaaattacctgcttaaccttttaaatcatctggtttttagaactgaatgtggtatgttgggaaattatgatttatatgatggtattaatgaactatttcatgaaagattaaatttatcatctagtgatgacattatatttttatcttcgaactgtttaaaaatgtctaaaccagatattggtgatgatctcggattaaatgctaacctgataggtcttctcccagtcccttcattggaagtgaatattaatgaaattattgaattcaaggataaatataggaaagaatatgtaagattgcataattcaattgatagtgcagtccaagatgttttatctcgtaatacaatatcgggtatgaaactaaaaattgaagaaattaccgataatgtaaatgagttgatttctctatctagaggtggtttttttgggaagctcaggattaattttaccttgaaatttccaatccaaactcttaaggatgtattcgatttgtctaagtctgctttagatattaatgaaggtaatggtatgggtggttttttgagccatttattgggtagctctattggtatgagcattgagaggagtagtatccccaaagatctagagaaatatatgtatgtttcacatatgaaggattatttcggtttattaaataaaagtaagtaa

SEQ ID NO: 95607 - DNA, 522 bp, Enterobacter aerogenes
atgtttctggtctccctggctgaaggctttatccacctgttccaggccgcaggcaaaatctttctcgatatgatgacggggcttatcccgatgctcatctgcctgctgctggccatcaacttcctgatgaagctggtcggcaccgtgcggatggagaaggtcgctgccctgctcggccgctcgcgtattctcacctacggcgtgctgccggtgctcggctggttctttatgagcagccccggcgcgctcactttaggcaaactcctgcccgaaaagagcaagcctggttatgaagatgccctcggcaccactgctcatcccctcaccagcctgtttccccacgtggtgccctcagagctgttcgtctggctcggcgtcgccgccggggttaaggcgctcggcctgcccgtcacctcgctggcgctgcgctatatcgccgccgccatgctgattggcctgatacgcgggattatcaccgagtacctgttcctgcggctcagcaagcgggggaatgcgccatga

SEQ ID NO: 95608 - DNA, 375 bp, Enterobacter aerogenes
atgatgatttactgcgcgcgtatcgtcgccatcgggctgtttgtcgccgacggcctcaccgacaagatgctcatcaccttcgacagcaacgggccaaaggactgcctcgattactcgctgtcgctggagccgtcgttccgggaagagagcctgatgatactccccggcgaccgcctgatgctggcagggcatgattatctggtgactgccgtcggcaagggtgcacagcaggcactgtttgaactcggccacctgacgctggtgttcaatagtgacctgaatccctgccatgtcggggcggttcatctctccggcccggtgccgaacctgcgcgacctccacggcaatctggtgattgaggaggggcggccatga

SEQ ID NO: 95609 - DNA, 738 bp, Enterobacter aerogenes
atgtcgcaggaaattttaggtctccctgggagatgcccctctgatgtttatccaagaactaaaaagcttgtggaggaagctgacaagcacttaatttctctggttacaaaatggacatttcttaaatcagtaccccagattgagatcaagcgatttgatggggaggaaatccgcatcggcggcgttgcttttaagggaactgtggttgatgttttttggtctgggtttattgagccttatatagaacatgaaagcgtaaagatactggaagctgcgggacaacttgccaccgattgccaactctcacatgacattgttattgatgaagcacggatgctgttacatgtgatggttcgcagagtatattccaagatggccgatgttgatcagacgctacgtggagacggtttcactttccctgagaaaagagacgtgacttcccgtatcgctgctatgtctgcatatgttgatgctgaatcaaaaattgtgatgcttaaagccagaaacatgcaaggtaacttgcagcctacagtgcacatttcggggcatgccaacgcacagattcagatagggcatgataacaatcaagtgatgcagataaccttgcagcaacttgtagaacaggtagcaaagagtaatgataaagatgctaaatctcttattcaaaaaattctggaaaataataccgtagcatcaattattggagctgctgcaggagcactgttaactaaactttga

SEQ ID NO: 95610 - DNA, 654 bp, Enterobacter aerogenes
atgaagaagaaactgccagatcttataccaagggaatgtattattgcagctatgcgtgcctatgatgagggaatcactcatccgtttagtgagtctcggttatatgacgtggtatttgaaggccggggctacccaccgaaagcaataataggcatcgcggtgttaaatattaccggtgttatgcttaaacccgaaaattttaatggcggtctaaattctaaatgctttaggttactaattgatcaagggtttgagattgttcagaaagaagaagataatgaacagcctgccatcaccatttttcctgatgaactgccaccgcagagcgtatttactgaaggtgccgctacgcaggtaacggttaaccgctatgaacgcgaccgtaaggcccggcaggccgcattagcctggcatggttgcctgtgcaaagtatgcggcattgatatgatgagggtgtatggtgagatagcaaaaggttttatccatatacaccacctgattccgctatcagacatcaaagataattactctctggatcccaaaaaagatcttattcccgtctgccctaattgccacgccatgttgcatcggcgtaatccgcctttttcgcctgaagaactgaaatcaattattgaatatcatgcggctctttag

SEQ ID NO: 95611 - DNA, 264 bp, Enterobacter aerogenes
atgggggataaaatgaacgttacttcacccaaaatgttggctcatgcagtgaggaatgctcgcaagcaatgtaagctgtctcaacgcgaaactgcagaaagtataggcattaaacaatcaacggtttcagagtttgagaaccatcctgaggggacccgcttgggtatgctctttaagatgcttgccgctctggaccttaagcttcaggtcgtaagccgtaggggcgaatataaatcgtctgatagctgggaccaggagtggtga

SEQ ID NO: 95612 - DNA, 462 bp, Enterobacter aerogenes
atgaagaatctaggcgtctggattaaagctatagcgctattcatattatgcttagcgttatcgtcaactgataaacaggtttataccctgcttgagcaggcatcggcaggggtgatcggctcaattcttggagggattactgcagggatctctgtaatttttggcattctggcggtcatcaataaggggcaaaaacgctcaagttttacaagttacttgggaagtttagaagctgatctgaaattacttgtgatctgtttaggcgcaacaatttttttgccgtaccttcgaaattatgacttacctctaatgaattatcccaagcatgagttgattccttctaaggataagttatttactgcggcagagctgtttgccgtagtgctgtctctcaatctcattgtcgaagtgataagttgcatgattttagtagttaaacaaagtctgaaaacggaagattga

SEQ ID NO: 95613 - DNA, 897 bp, Enterobacter aerogenes
atgcaattgttcgccttacgtgtgttaatgagaccacgcgaccctgatcttttttcaaagggatctgttcaaaaagacattgtgcattttgaaaatgccatagtattcagcgcgcaaaagttacatctgacatcatcaacaccatccgttcataagaaaaccagctacaccctgaagctgagtataaaacccactgaaggcgtcatggctggggtcatatcaaaacagcaaaaaattaaagggcatgataaggattttcgcgaattcgatgtagacaattatccacctatcgtatggatctgggatagagaagagcaagtgttattggtcgagaagaaaacagcggtattcaaggatgcgcatcaagttgctaaggcatttgaagatcttgccaacaacgactatttggcccaattggggctaagagtatttatcgaagcttgccttgaaatggaagatttttggtctgaatatcatagacttcagtttattgataaagttagttttacgttgattactccgaatattttcggaagtagcaagcaggccttaactgacgatttgcgaaagctcgaggcagatactaatgcaaacgctgtaaccacaacatttgaaaacacagatggtaatttaaagcttaaaggttctcattgggcatctgtttttgttgattgggtaaaagatggtggtggttcttggttaattaaaggtcgaaaaacactcaaatcaaaacctacaactgtatccagtaatcaaacggccaagatagtccttatcgaaggtgagatttcagaaattcagttagatggttactcaccgagtgatatcaaagaaatcatagcattacatcaaaaaaggtacacatacaaaaatgaagaatctaggcgtctggattaa

SEQ ID NO: 95614 - DNA, 570 bp, Enterobacter aerogenes
atgataaagcatatccgtattttgcccggcgggctggcggtgctggccgccgttttgttctgcctgctgacggcctgccgcgaccacagtcgtgacggcatgagcggcgccgatttaaacctctacaatcacggtccggatgccatcgtttcggtgcaggtgaatggctacggcgggccaggcgctaactcctacggcggcggcggcggcttctgctgtgtgatggtgcctgatgtctggcgcccggggctgacggcaaaaattacctggacctccgatcccaattactggatgaaatccagtgagatgccggatgattatgaaactcactatcagcgccatgggccgattattgtacctattgaacgttgggaaaagggacaggcttgcggctttgacgtgcatattttcccctgcgataaggtgcggatagtgcgttcctgctatggtcgagcggcccctgaatatccgatacagcctgagactgacggactaaaaaaagcgcaaaacgtgtttataaaacatatcaaggaggagatcgtatgtccgataacgcagactccacgctga

SEQ ID NO: 95615 - DNA, 2427 bp, Enterobacter aerogenes
atgtccgacaccgcagactccacgctgaatgccctgaaggcgcttattgcggcctttcagaccggtgccactccggtcgcggtcaaaacctccaccgcagaagcggccagcctaccgccaaagtttcccgggccggatgacaaaaagcccgcggataactctgcgcggcagaaaaccgaatacaacgagcgcgggcgcctgccggcgagcagaacgcagaccgaaggcaactacgccaggcagtacctggagggatatgtcggggagtccgaagatccctcggacaaaaaaacggaaccgggctgcccggccagcctgcatatcagcctgttcttcgacggtacctgttgtaatgaagaagatggtgatgaagtgtacggctcgcgaaacccgccgctgaccaatatcggccgcctctaccatgcggcaaactggttagataaggcggaggatgatggttacttcagttattactttcccggctgtggagcgcgctttccggagattggtgaagagcactactcgctggacggcgagctgtttgccaacggcggtgaggaccgtatcaaccaggcgctgcttaaaacctacagcagcatctgctatgcggtgaataaaaaggcaattgaggacagcgaactggatatctttcggcctcagatggccaccgtctggcccttctcgcggctgacccagaagttcaaccgtaaaagcgcgcttgacaaattctgcgacgaccatctgggggctgtggtcaaccagtggccgaggcagccgacgcggctgcatatccagcgctcgcagcggcgcatcgccaaaatcaagctctttgtctacggctactgccggggggcctccaccgcccgcgccttcgcccgcgggctggagtcgctgctcgatgatgcaaagatgccgctcgatgcgacaaatatgctgccggcgggcaccgtggtacccggcggcccgaccctgatgggcatccccatcagtatcgagtttatggggctgctggattcggtctccgcggttggcgtgccgcatatcctgccgtcggccaccggtcatctgggctgggcggccaacagcctgcggctgccggccaccaaaggcttcttaaaaagctgctaccactttgtcgccggccacgagcagcacggcgacctgccgctggattccatccgcggtccggacggtaaatatcctgccggggcggtggaggtggtctaccccgggatgcatgccgatatcggcggcgactgtaaacccacagaactcggtaaggtgcagaccgatgccgccagcctgctgtcaaagattgtgctgcacgatatgtatgccgccgccttcgatgccggagcgccgctgagcgtacctgaggaggtattgcccggcggcgccaaaggtaaaaaatatcgggtaatgcaaggggatgtcgcagatcaattcaaaatctccgcccaggcgatcgccctgtttaacgcctggcagcaggccggggcgcagcaggcgggggcgaagagcgaaacgccggccgtcaacgaagcagaggtggtggccatcgccgtagctcagggccgggatccggtcgccgcgctgaaggcggctcacgacaaggcggatggcgataaggcgaaagccgcggccgccgccgcgaagccgccggagaacggcccgctgggcaagctgccggatccggtgtatgtgccgctgaaggccaaagcgctggaggtgatgctggcggaccagctgagctggattaccgcctggcgcaccgagcgctttgccagcccgcaatacgccgataagtattatcagcgtaagcctttttatcagcaggcgctgaatgagcagaccggcgcgctgccgtcggcggcggcgcccgcggaaagcgaagggccgcgtgaagtgccgtttatcgataaggatcggctggaccgcgcggcgtggggctatgactttgcccataccggtatcgtggcgctgctggcccaggtgctgctggatgtgatccccaccacgcagaccaaccagctcggtggtccgctggtggcggcgcaggagtcggaatatatccagatcaagaaaagcggcgatgcccggcgggcggcgctgatgggctcgccgacgatgctggatttttacgataactacgtgcatgacacgctggctaaatataatcacgacccgctgcactcctcgttttcacacggttattttgcgtcgcggacgatttacgataacgatgacgatacgtgggattcggtgaaacaatttggccagcgggtaaaagcgattatagatattaatgttggcgatatattagtgcaggcgcgaacggatatgaaagatctgaatacggtatcgggcgtgttgggtaaaatatatcgcgatataaaaagcgaggcttttaaaatactgctgccttaa

SEQ ID NO: 95616 - DNA, 1191 bp, Enterobacter aerogenes
gtgagcctcacagacgtaagaatcagaaacgcccggccaacgggcaaaacttttaaactgagtgatagcgacggcctatatctggaggtgcgcacgacgggcgcgaagatctggcgctatcgcttttatctgccgaacgggaaagatagccggtacacaatcggagaatatccgggcgtgagcctatccgacgcccgggccgaacgtgaccgcgtgcgcgagctggtgcgaaaaggtgtcaacccgacggccgcccgtcgcgaggacgtgataaaggcccaggctgaagcggccaacacgtttaaaacggtggcgttggagtggatcgagaagaagcggccaacgtggacgccgggaacgtgtcagcaggttgagagctttcttgcgattaactgctacccggcctttggtgataaaccgattcgagatgtaacagcccacgaaattctcgccgtgctgcgcggcatggaggaacggggatctgtatcgtctgcgttgaagattcggcaatggtgtagcgccattttctgctatgccgtcgccacgctgcgcgccgaggcggatccggccgccgcgctcaaaggtgcggttatccctcacaaggtgcaaaactcccgatgcctgacgcatgacgagctgagaaagtattttgccgccgccagcgcctacacaggccacccacaaacgcgcctttgccttttgctgctgccgttcttattcgtgcgccagggcgagctacggcgcggcaggtgggaggaaatggacttgcaggggaacctatggacgatccccggccagcgtatgaagatgaagcgcccgcactccgtgccgcttaccccgattacgcgccagctattcgagaagctccacgcgctgacgggcgacaagccgctaatgttccccggcataaaaaagcctacggaaccgctatccgactcaaccgttaaccgggcgatcgaatacctcggctttccgtccaagcagataacgagccatgattttagggcgacggcatcaaccacgctttacgaggcgggattcaggcgggaagtgatcgagaaacagctggcgcattcagagagtaatcgtgtagtggcggcctataaccacgctgagtatttgccagagcggcgagaaatgatggctttctatgagggatggttagcgggtttcatgcctggcggagagtaa

SEQ ID NO: 95617 - DNA, 186 bp, Enterobacter aerogenes
atgagccaagcagaacaattttacaaagcgccggaaatttgccgccttttgaagatctcccgcgctacactctatcgtcgaattgagcgtaacgagtttgatcctcctctgaaagatggtgcgatggctcgctggcccgagtcctcaatcatcaaatatcaggagcgcttaagggcgcaagcgtag

SEQ ID NO: 95618 - DNA, 384 bp, Enterobacter aerogenes
gtgagcaattttaccaaagaacaattgatcgaggtggcaaaagccgagctagaggatcgccgcgctatggcgatggcattccctggcgtagcacgtcagcaaattagattacggctggcagaggtcacgctggcctcgcttattggcgagccagtaacggataacaccgcgccgcagtttgaggcgctggcggaaaacacggagccttgcgttatctgcggcatcgtttccagtcacccggagggctggcactactgcaagggagagccgccgatcttcacctgccccgcgtgcggtgagcaaagttacgaagatttaggctatggggcgctgcgctgcgcagattgcggggaacacttcacaaaatcaacgggggcaaaatga

SEQ ID NO: 95619 - DNA, 300 bp, Enterobacter aerogenes
atgggtaaagcgacttatttagatgatctgctccaggcgtgggcgaaagagaatcaccacaaggccaaacgctgcgccagcgccgcaggtaaaaccccgtggaagcgcatcgcagaaaagcataacgcccgcgttatccgtgccggaaaccttaatcccgccgcccgcgttgcgtccaaactgaaagcgcttgatttctggactcacgttatcggcgcgaacgtagcaagcgacgctggcgagcctgtggccgtgtgtggcgtggccgtgcaaatcagcgtcggagaactagcagagtga

SEQ ID NO: 95620 - DNA, 216 bp, Enterobacter aerogenes
atgataacggaagttgaaaacgcggtacgccagcaggcgaaattgtgtaccgatgaaattaaagcggcgctggcggaaaaaccccggcgcggctggaacgaagtaaccccgcccattttgcggaagtatcaccagaaggttgagccgctgggcgtggggtttgtcgagtttatttcttttattggccggatgaatggccgttacgggaagggttag

SEQ ID NO: 95621 - DNA, 675 bp, Enterobacter aerogenes
atgaaatactcccttatctactgcgatccggcttggtcttacgataacaagggctctcgcgccgctgctgataaccattacagcaccatgacgatcaccgatttaaaacggctccccgtgtgggagctggccgcagatgatgccgttttagttatgtggtgggttccacccatgccgctggaggccatagaactggccgaggcgtggggattcaaggtcaaaaacatgtgcctctttacgtgggcaaagctcaacgagagggcgctggataatctggatcgggagctggccgggcatcatgagaacgtgggcgcgctggatagtctggacttcctcgaattgcttaacggacaaacgaggatggggctcggcaactatacgcggggcaattcagagtcggcgctggtggccgtcaaggggcgcgggcttgagcgccaagcggggaacgttaagcaaatgatttacgcgccgctgggcgcacatagcgctaaacctgccgaggctcgccaccgcttagaacggctttacggcgacgtgccgcgcattgagttattcagccgctgcgctgcgcccggttggcatcattggggcaatcaaagcggatccgatgttgtccagctcataccgggcggagtgattcacccggagcgctggagccatgataacggaagttga

SEQ ID NO: 95622 - DNA, 309 bp, Enterobacter aerogenes
atgaaactcaccgggaaacctacaccagaacaaatagcgcgcctgatggagaatccagtagatccagacgaaaaaatcaggggccgtctgcgcaaggaattgcaccgccttgtaaatcacgccgccctgttcggcgtggagatacccgccccactccccacggaggaggagcaaattagagcttgtcagggagttatgccgtatcggttccgcaaggcctgggcggatgttaaaaccagcagcgaggggcaaaacccttatggcgaattacgccagcacgggctcggcggctcctggcggggggattga

SEQ ID NO: 95623 - DNA, 537 bp, Enterobacter aerogenes
atggcgcaacgtggcgtaaacaaggtaattctggtcggcaaccttggacaagatccagaagtccgttatctcccctctggcggtgcggtggctaacttctctctggcgacttctgaaacctggcgagataaaacgaccggcgaacaaaaggagatcaccgaatggcaccgcgtcgtaattttcggaaagctcgccgagattgcgggcgagtacctgcgcaaaggctctcaagtctacatcgagggccagcttaaaacgcgcaagtggcaagatcagagtggcgcggatcgttactccacagaggttaacgtgggcatgaacggcgttatgcaaatgctcggcggcggtggtcagggtggcggccagggtcagcaacagggccaccagggcggccagcagcagtttagcggcggcggccagggtcagcagcagcgccagcagcaggcgcagcaaggcggccagcctggcggatggggggcacctcagcagccgggcaacgtccctccgatggattttgacgacgatattcctttctga

SEQ ID NO: 95624 - DNA, 747 bp, Enterobacter aerogenes
atgacccgaaccgaatttaccgcacaagtcgccacaatccaggcgaaccttaacgccccgaaaggccaatataacagttttggcggttatcactaccgcagcgccgaggacattcttaacgccgttaagcctctgctgggcggcctgtttctctcaatttctgacgacattatccagcttggcgatcgcttctatgtgaaggccaccgccacgatcaccgatggcgaacacgcccacaccgttagcgcgatggcgcgcgaaccgatcaccaaaaagggcatggatgaaagccagatcaccggggcgacaagctcctatgcccgcaaatacgcgcttaacggtctctttggtatcgacgatgcaaaagacgctgacacggacgctcacgcacaccagaccgggcaacagccacgcaataaccggcagcagcaaggcggccagcgtcaacaacagcagcgcccgcagaaccagcagcgcggccagcagcaacaaggcgggcagcgtaaccaccagaacggcggccagcgccagcaggggaatcagcaacaaaggccgccagcaacgccgaatcagattgtcgcggcgttaaaaacccagctcgccaaagtctcaacgcgccaggaggttgacaatctctactcccgtgcatggaaggcattagacggtaacggagaggctcagtctctggcgcatagcgtgagaaattcacgcctcgcagcaattaaacaagctcaacaagcggcctaa

SEQ ID NO: 95625 - DNA, 204 bp, Enterobacter aerogenes
atgtactgcggaacgacaatcatcaagcgcaagcacgtaaagccgggaatgttggttaagcacgcgggcaaaacatggcgcgcatcggcaaacgtcgagcgcggcctgtatctcgactccctggccgttaagacgcgaatcaatgacgaatcggtagaagtgtttttgaactacaaaggcgagccgagcggcgcaaggcactaa

SEQ ID NO: 95626 - DNA, 171 bp, Enterobacter aerogenes
atgaaaaaacagagcgttaattttgttttctccggcgtcgcaggtctggcgctggtggaggggaaaaacgtgtttatccagtgggccgggcgtcgtttcagtctcgctacagcagcccaggcgctgcgcacttacgttattcaacagctctcgattgctggggctttataa

SEQ ID NO: 95627 - DNA, 768 bp, Enterobacter aerogenes
atgatctacgtaaagccaatcgcattagagcaagttcgctgggcaatccgtgcctgtgaagagaagcgcggcatcgagtttatcgtcaattgctttaacgcctgcatcgaccgcggcgaaatgaatgaggcattccatctgcccgctggtgaatatcgccgttatgcggttctgctggctgacctggtgaagattgagcgccagatcgagagcatcctgcaaggtatcgagcatgaccacgccgagtcgctggcaatgaacgacgcgcgtaacactctctatgtttacgctcctggtgatgcggctcgcgacgtttgggagcacatgaccccgatcgagcaagctgtttccgtggagctgcgccacgccgaggcgctggcgtttaatgcggaagttgacgaggtggcggcggctgatcagtgggatgagtgggcgaatcagcacgatagccgtaagaccaaagcgcaaatgatcgagagtgaccacgccgaggcgctggagattgacgcggtaatagctcacggtagcaagctcaagctctcagcaatgcaaacgattcaaaacgagctgatggaatcgccatacctcccggcgctggtgaaagtctgtcacgccgaagccctggatatcaacgccacctatgaccgcgcaagcctccggttttgtgagtttcatctcttattcagcatggccgagcaagccgagcaaatcgacctggcgcaccttgaggcgcttgcaatggacgcagaacggagcgcagcacaatga

SEQ ID NO: 95628 - DNA, 594 bp, Enterobacter aerogenes
atgaaaacactgaaagagcgcctcaagtacgccatgaatgaaaccgggttccatagccagacggcattagctaaagccgcagggatccgtcagtcggcagtatcaaaaatccttaacggcacaacagaggtttcgcgctcaacgggcaaactggccgccgctatgggcatcagtgccgattggctgataaatgggagcgggagcctttacggcaccacagaagaaccagcgccgcgcgttgatgtctcgcacatggtcaaactgtacgatgcgaacggatataccggggaaagcattgcgtggcctagagagttaccgggaacatgctgcgcttatgcaatacagcgagatactggcattgcacaagcgcccggtggatcaattgttattgttgatacagcaataaagcccgcagctaacagcctcgtagctgtaaaagaggatggagccgttacggtttacaggtctaacaaggtagggcagaaaatatttttatcagttgactctgatcggctcccaatgattgaggccggggaaggagtggatattttaggggtaataacgcagctatttgtaacaaacgtatcaagataa

SEQ ID NO: 95629 - DNA, 345 bp, Enterobacter aerogenes
atgacagcagcacataaaaacacagacaccaccgccttaaaattcgaaacccttatccgcagcggaatagcgtcgcacggcgtagcggcaaccgccaagaaaatgggtgttcaccattcgcagatcagccgcatgcagaccgggcgcaattgctttgtagagcgcgcggccaaactgctggccgtgattggtttcgaccagtcagaagggacgttgattatcaaaggagagcagacggcgcagcttgcccaggcgctgatctcaatgctgggcagcgtaaagagcgacgccccggactgcgcgaacagtgccgaggcgtctatgtgcaaaaccactgagcagtaa

SEQ ID NO: 95630 - DNA, 297 bp, Enterobacter aerogenes
atgacaaaacagacacaagaaatccacgcgcaacagcgcaccgcattttattgggcgcgtggcttagcgctatccccgtcacagcagttgatcgcgctggctctcgcttttggcgatggcccgctgactgctgacgtattggccgacgtcaccgagctgagcaaaaagacgctgtataaggcgatccgggtcatgactgacggcggaataatttccgtggccgggaagaagggtaacgcgcgcctgtttcgtctaaatgtcggtgccaagtggagccgcacagggaggatgaaatga

SEQ ID NO: 95631 - DNA, 1071 bp, Enterobacter aerogenes
atgagcttagccgcgttaagcaacgtaacaccgatcagacctaacctggaggccgtggaggctccaggttgggagctgaggagcaaccggatggaaaaccagaaaactggctacgtcccgttgtaccggagcgttttaaagcaatcctgggcaaaagatgttttcctgcgcacgctatgggagaacctccttttaatggccgcccgtctgccatacacggctaactttaaggggctggagtgggatcttaaacccggtcaactggtgacgaccgccgacgatttagcactgcaactttgcgaccgaaaaggaaagccatcaagccgccaggccgttgagcgaatgctcgccttttttgtgcgagaagggatgatcagcacggaaagcacgcaccgaaaggggcgcattgtgacgattaataactattcagaatacgctcaaaaagcgagcgactttgtcattttacccggacacaatggcgaacacagccgcgaacacaataccggacgcaacgaagccagtaatggcgcggcttgcggggtggatgccggacacaacggcgaacactgccgcgaacacaacaccggacaccatgaacaagaatataataacaagaatataaataataatacgtccgaaaactctaacgagctttccgacaccgcccctaaaaaatcccttccagtggttcgccctggatcagcagttcaatcaccaaacgggcagaagtggggaaccgacgacgacctgcgcgccgcgaaatggatttacggcaaggtgcaggaagtcgccccggcaactgctgcgccaaattgggcgagctgggctaacgatattcgcctgacacgtaacgccctgaatgtgacgcaccgcgagatctgcgaggttttcgcctgggcgaacgctgatcacttctggcaaacaaacatcctctcacctgcgaagctccgccagaagtggccgacgctggccgcccaaatggcgcagccgtcgcgccagcgccagcagcaacagcagcaggagcccgcgccgcactggaatagcgccgaagcctgggaggagttcatttga

SEQ ID NO: 95632 - DNA, 714 bp, Enterobacter aerogenes
ttgagtaccgaattgatccaagccatcgcgaaccgcgacgctggcgcgctttcccgcatcgctggcaaggctcccgaccgccgcccggctggtggtgtgctgagtggcgaggttgagcgccttgttgatgccctgtttagacaactgcggcaggttttcccggctgccagtgcaacgaacctgcgcacgccgcaggacgaggccgccgcaaagcagcagtggatcgccgcctttgcagagaacggcatcactaataaacaccagctttccgcagggatgaagcacgcccgcgccagcttgtcaccgttctggccgtcgccggggcagtttatcggctggtgcaaagagggcgaactccaggccgctgggctgccgtctgcggagcaactggcgggcatggtgcgcgattactgcgcccggcgcggattgtacgacgatccgaccgagtacccctgggaggctcccgcccattactggatggtaacaagtttgtattccggtatgcgttacgggaactggacgccgggcgagctgctgacgcacgcaaaggccgagcttgcaaagatggttaagcgcatcgccgctggggaggctatccccgaaccggtacagctgatcgagaagccaaaacacacgccagtttcacaggagcgcgggcgggaaatcatcgccgagatccgccgcaagatgaaacgcccggttaggaaagattga

SEQ ID NO: 95633 - DNA, 303 bp, Enterobacter aerogenes
atgagcacaagagaagtgattttgcagtacctggagaacaacgagagttttacagtcgaggcgctggcgcaatgtactggcctaaagcgtgacacgctatcgagcatggcgcgcaagatggtaagagcgggtgagctggagtctaccgcccgcgctggtaactggctggtgtacagccgccaagcgtatttactgacgcgagaaggcaatacgattttttcagagtgtcgccagagtccgtacatgcagcgcgttttattcgtgcatggccgacgaataacgacagaccgcccctcatcgtaa

SEQ ID NO: 95634 - DNA, 606 bp, Enterobacter aerogenes
atgaccacattagcagattacccacgccacacggcggcagatgatttttacgggcttttcactggtgtagcgctggcggcgatggggatcgcagcgctgggcgctggtgggctcattaccggaggggccgcaggtatggcgcttttgctttcctaccttgtaccctggacacccgcacagcttgtacccgtgataaatctaccattcattgcctttggcttttttgcaatgggtaggatgtttgcggctaaaacccttgccgtgtctctttcgctgggcgttgcggtgcatgtttgcgccgtcatgctgttaccaaccatcgccccgataacagccgcagtttttgggagtatttttttaggtatcgggatcttatttatggcaaggcacggggcgagcataggcggcaccgggatagtcaccctttgggggcaacgtcgctttaacgtcaacgcggggctatcgcaatgtgcctttgacgctgttttgttcgtcgtggcggcattctcgcaaccctgggataagctggcgatctcttttgtgggcgtcgtgattatgaatagttgccttattttctggcataaaccagggcgctacagagggtaa

SEQ ID NO: 95635 - DNA, 456 bp, Enterobacter aerogenes
gtgaccttcccgaaagagggcgtaaagcttacacaggcaaactttgccgctatcggcaagcggttagagccgctgctggctggtggggggagctatcgcctgatcctcaagacctggcgcgaaacccgcagcctatcccaaaacaatctaagccacgcctggtatgagcagatcagtaaatacctggtttccaggggcaaggcctttgcctctcctgagtgggtcaaagacgccctaaagcatacctatttgggctatgagcaacgcgaaatgacagacgttatcaccggggaaaaaatcacggttagttccctgcgccatacgtccgatctcgataccggcgatatgttcgattacatgagcaaggttcaagcctgggcagcggagatcggctgcctggtgtccgttcccgccgattctgaataccaacaactacgcgaaaggcaggatgcataa

SEQ ID NO: 95636 - DNA, 366 bp, Enterobacter aerogenes
atgtcgcactacagctttacccttccatacccgccgagcgttaacagctactggagacgcgggaacgggcgcacctacatcaacaaaaagggcgttgaataccgcgccgccgtccgcgagacgctggttacgctgggcatcgatatcaacacagccgcccgcctggacgtgaggatcatcgcccatatgccggacaagcgccgccgggatatcgacaacattttaaaggccgtcctcgactcgctggagcacggcggatttatgcaagacgattcgcaaatcgacgtcctcaaagtcacgcgcgccggttctggcgtggttcgcggtgggctgctgtgcgtcaaagtaatggagatcgaccaatga

SEQ ID NO: 95637 - DNA, 696 bp, Enterobacter aerogenes
atgaggccgcaggcacacgaatttatcaggcagcagttaattatcgcaatggcagacctgagcggctcaaccaaggggcagttacaagcctggctggaggatgcccaatacgaaaccgacacgcacccgcgcaaaaagccgagctacatcgacgaggctaccggcaccctgattacgctggacaacccgccgatccccgggaagcagacacgcgccaaaggttcgcatattcctttggttcagccgattgagtttgttacagcgagctggcgcagggcggcgcttgcgcaggagtcccacgaaagagcctggctcacgtggtgctatgccgactcaacggcttacgcgcaccaggtggagatcgtgggatggggctgggaggcgctggtggtcggcctggccggaaagcgcgtggcgggcaagacgtttaaacttttgcgctcgctggtatggctggcggcgcaggacgttaagcaggagttacgatccgacgctgaccgctgctacaaggcgcaggagctggcacagctggcgggcgttagcaaatccacctggtcagagagttacgccggatactgggcggcgcttcgcggtcatttcctcaagctggacaggctcacacttgagggggtgagtaaaacgcgagggagacaaaaagcgactaattttacgcccaatattgcaaacccgaactaa

SEQ ID NO: 95638 - DNA, 210 bp, Enterobacter aerogenes
atgcctaaattacatcaacccgcctttgtgcgggtttttttgtttctggcgctggagatttacccgatggattttgacatcgacaagttagcggatctcgactttgaggccgcacagcagcgcgctaacgaggcgatggccgagcgtgacgaggaggcaagtaaaatccccgttacgagcaagtgcgaaagcggcgcgtgcgaaatctga

SEQ ID NO: 95639 - DNA, 159 bp, Enterobacter aerogenes
atgccgaaaaactggaaagccattgcgctgatcgctgcgttcgtgttgatgcagctcggcggccgcattacctcgatgctggcagatgccgccgtttgtgcggcgatctacttcctcctgatgcacgaaaacagcaaggcattgccaccagaggaataa

SEQ ID NO: 95640 - DNA, 240 bp, Enterobacter aerogenes
atgaacgaaaaaataactaacgcgccttattggtttagcgggatctcgctatggctatcagcgctcggcgacaagctccacggcgtaacgctttacgagtggctgacaatttccggcctgatcatcgggccatgtactttcgctcttaactggtatttccagtggagacaaacgcgagccattgagcgcgcggccagagcgggattagccgtcaccaagtcggggatcttcaaaaaatga

SEQ ID NO: 95641 - DNA, 516 bp, Enterobacter aerogenes
atgagtgttcgaaaggctggcgcagctggtggcatttgttccgtggcggccgccatcgctatcgttctgagtcacgggcaggtgagaacgaacaaggaagggctggagcttatcggcaacgctgagagctgccgcttacatccttacgtctgcccggctggtgtgctgaccgatgggatcggcaatacgcacgcggtgagagacggtaaaacgctggagcagatcgccgacgactggcagagaaacatcctcgttgccgagcgttgcgttaatcgctatggggctggtgatcggctccctgataacgcttttagtgccgcaacctcgctaacgttccgcgttggctgcgggaaggtgcagacctcgacgctgtttcaaatgctgagagggggcgacctcaaaggtgcgtgcaagcagttcccgcgctggcgttacgccggtagcgtcgttctgcccggccttgccacccgtagcgaggaagaaagcgcgttgtgcatgaaggatgtaaggcgatga

SEQ ID NO: 95642 - DNA, 462 bp, Enterobacter aerogenes
atgaaagaaggctttattgccctggtggtgatcgccctgtcattgctggcttactggtatcacctgcaatgggataaaaccagcgccgagctgaccaccatcacgcagcagctacaccaggcgcacgggcagattgacgcgctggagagcatgagcgcgagcaatgcggccattgataaacagcaccaggaggatctcgccagtgctaaagctgagaacgaaagtttgcgcgctgacgttgatcgcggcaataagcggttgcagctcgccgccacctgcgagcatgtgcgtaacggctccaccaccaccggcggcgctaatgatgcccgcccccgacttaatgacgccgctcaacggaattatttcaccctcagagagcgaatagcccaggcaaccagccagattaacgggctgaaatcctacatccaaaccatgcgccagcaatgcccagcaggagaataa

SEQ ID NO: 95643 - DNA, 543 bp, Enterobacter aerogenes
atgcagcgccgggccatgaagtttaatccgctgcgccggcgtgatggccaacaacgaaacgcagcacaatattttgctaaccaaccacagagaaaccccgtgaataaaaaaatcatttacgccgctggtggcttaatcctcctcctgatcctgctgcgcgcttgcagtgacaacacgccgcaggtagtggcgcaacagccggtagtgatgcaggagagcgacccgcaacccgtagcgatgcaacagcccgcgcaggtagtcgcagcgccagcgcccgtaatggtgcagccagccgcccccgtagtggttcacgaccacgacagcggatttatgagcggcttgctcatgggtcatttgatgggtggtggtggcggtggtggttcgcacgtaacgcatcacaccaccgtaattaacaaaaactacaccaccaggcgagtgaccaccgtccggcccacgaaaagctattacggcagccgcccggcctataagtcgcgatcgtcgttccgctctcgttcgtcgttccgttcgtcccgccgccgttaa

SEQ ID NO: 95644 - DNA, 531 bp, Enterobacter aerogenes
atggccgaactatcaccgaagcaagaaatgttttgccgtgagtacctgatcgacctgaatgctacgcaggcggctatcagggcaggttacagcgccaagactgcaaatgttaaaggggcgcaactattagcaatagttagcattcagagccggatcgccgagctgctggaggtaagagcgaaacaggttagcgctgacgctgcctacgttctgcgccgcctggttgagattgaccaaatggacgtagccgacattctgcgcccggatatgagctttaagccgatccttgagtggccggatacgtggcggcgttacattgctagcgttgacctggccgagatgtacgagggggcaggagacgatcgggagctggcgggcgtgctgaaaaaaatcaagtggccggacaagctcaagaatctggagttgttaggcaagcatgtggacgtgcaggcgttccgggagcaggtcaagacggatcatgttgttgattcgatctcctcgcttatggatgaactttcgagggggaattga

SEQ ID NO: 95645 - DNA, 1491 bp, Enterobacter aerogenes
atgagactaccgccagagcttgaggagttgcttagcgataagctcaagcgaataaattctctctactggatcaccgacaagagcgggaagccggtgcggttccgtatgacgcccgaacagctcgcctacttcgagggtgtccacactcgaaatattatcctaaaggcgcgccagctcggctttacaacgctggtttgtatcatccagctcgatgcggcgatcttcgagggcgcgaaatgcgcactcattgcccacaccctcaacgacgcaaaacgccttttccgagagaaaattaaatatgcttatgatcgattacctgctgagattcgggcggccaatcctgcgcgcaatgatgccgctggcgagctggtgtttaacaagggtggctcgctttatgtctcgacgtctttccgaggaggcacgctgcgttatttgcatgtgtccgagttcgggaagatctgcgccaaatatcccgacaaggcgcgggaaatcgtcacgggcgcgtttgaagctgtttcagctgactgtttcacgacgattgaaagcacggcagaaggtagagcaggttatttcttcgattactgccagcttgcagaaaaagcggcgttatctggcgctaccctctctcaattagattggaaattcttctttttcagctggtggaacaacccgctatacgcaattgaccccgtggagccgctcacgcagcgcctgagcgattatttcgacgagctggagcaaaagcacgggataaggcttaacgcccgtcaaaaggcctggtatcaagccaaagaaaaaaccctcggcgacgatatcaagcgcgaatatccatccacccccgccgaggcgttccagcaatcggtagagggcgcgtattacgcgaagcaattcgcgaagctctacgccaaccgccggatcggcgagttacccgacaatgaccaccagcgcgtttatacgttctgggatatcggcgtgggtgactctacggcgatctggttcgttcgtgtcgtcggtaatgagttccacgttatcgactactacgagaacagcggcgaaggcctgcgccattacatgaaggtgctacgggagcggggctacacctacgccgagcattgggctccacacgatatcgacaaccgggaatttgccaacgatggcaagtcacgccgccagctcgcacgcgagggctacgacatcgacggcgagaaatattctctctccttcaacgtcgtgccgaagctgggtatctccgaggggatcgagctggtgcgcgaaatcctcccgcgttgcgcgtttgactccagcaagtgcgaggaggggatcggccacctggaagcctaccgcaaggaatgggacttaaagcgcgggtgctggaaggataaccccttgcatgacttcacatcacacggggcggatagctttcgttatttcgccgtggctatgagcaggatccagccagcaacagacattgatatagggatcggctactaa

SEQ ID NO: 95646 - DNA, 1434 bp, Enterobacter aerogenes
atggcaggagatacaaatattgactttcaccaccccgcctaccatgagttttcggacgagtggcggctggtgggtgactgcgtggacggtgagcgcgcagtaaagcgcaagggccatcgccgcatggtctatttgcctcacccctctagcgattgggagaagacggatccccagcttacgcgctatgagggctacattgcccgcgccccgttcgttaacgccactggccgcacgctgcaaggcctgctgggcatcgcctttgccaagccggtaaaggtggagttatccagctcgctggattatctggagcgagatgtggacgggcaggggctatcgctaacgcagctcatgagagacgcattatcgcaaaacctacagaaaggccgggccgggatactcaccgattccacgggaacgggagatcagacgcttgccaatactggccgcgcgctgctgcggttgtacaaggccgggcagatcatcaactggcgagtaactggcggcaaaacgtcgctggttgtgctggtggaggtggaagccgtcgatcttcctgacgagttccggctggtgctgcggcgcaaatggacagagttgcgcctgattaacgggctagcttacctccgtatttggcgcgagggcgaggacaacgggatcaccgccaccgagctaaccccatttcgcgaccgttcgggcgcacagctcgacgaattgccctgggcgtggattggggcgaacaacaacgaccacacgccggacgcgccgcccctttcggatatcgcctggctgaacgtcaaacactatcaggctgaggcggacattgccgagattgcccaccagacgggcaacccgacagtaacagccacggggttaactgagtcgtgggccgataaatatctggcgagcggcatccgtaccggttcgggcgcgggcgtgctgctgccagtgggcggcaagctggagattgtccaggccgaggatcgcaacctcccggttgtggtggccgagcgacgcgagtcacaaatggcaatgctcggcgcgaagctggtagagcgtggcacgtcggcccgcacagcgacacaggccgcagacgaggcgcaaacggataactcgatcctctctttgtgcgccgggaacgtagaggacgccattaaccgcgctctaacgttcgttgaggcgttcacgggtggcgttggcgtggtgactatcaacaagcgctacgaggttgcacagctcgattctcaggccattacggcactactcggcgcggtgcagaccggcaagctattgctggtggactttatccgctatatgcaatcaatcggcattgttgacccgaccgcagacccggaagaaatcgaaaccacgttacgcgctcaaactgaccttaacgggagcctgaacgatggcaacgaggaaaccggcgacgatcaatga

SEQ ID NO: 95647 - DNA, 1116 bp, Enterobacter aerogenes
atggcaacgaggaaaccggcgacgatcaatgatcagctgagtgacgaggcaatcgcccacgcgctctatgtggcgcgctatggtaacggcgtcgccaaaaagatgatcgatctactcaacgacgccgacgcgcaactatcagctgaattgctggaggtgctcgacggcgtggacgcttccacgtacagcgagaagcgcctggcgtcgctgctggcgtccgttcgtaagctcaacggcaaagcgtacaagccagttattgaggcgcttaaaagcgatctgacggcgttttcagagcatgaggcgggctatcagttcgacctcttcaaccagctattgccggatgccgtcctaaaacatgttgagctacaggccatcacccccgatcaggtgtacgccgccgcagtctctcgaccgttccaggggcgcttgctctccgagtggggtaagaaactggaggccgacaggctgaccaaaatcaccaacgctgtgcgcatgggctatctgatgggtgaaaccacggagcagatcacccggcgcgtggtgggaacgaaagcggccaaccgcgaggacggggcgatccaggagaaccggcgcaaccttgccgccgtgacccggacagcagtcgcccacgtcgccagcacggcgcgccagtcgttcgccaccagcaacagcgacatagtgaagggtaagcagtggctctcaacgctggacacgcgcacaaccaccatttgcattgtgcgcgatcgcctccagtacacgctagacgggaagccaatcggccacaacgtgccctatctgagagggccgggccgggcgcatttctgctgccgttcaaccgaaacgctgatcctcaaatcctggcgggaaatggggatcgacgccgacgaaatggacgcaggcacgcgcgccagcatggacgggcagacgccagccaagaccacttacggggagtggctccagcggcagccgttcaaccgacagaaagcagtgctggggcttaaacgtgcccagctcctgcgcgccggtaaattaaaagtccccgacttctttaacgacaagggcgagtttctcaccctcgaccaattgcgggagcttgagccccgcgcatttagttaa

SEQ ID NO: 95648 - DNA, 693 bp, Enterobacter aerogenes
atgctgaaatacaagattgataaagccacctatgacgccctgagcgacgagcaaaaggccatgtacgccgaagcgggcgacggctaccagatgcagatcgaggggctaccagacgttaccgggcttgaggccaaggttaacgagctgttaggcgagaagaaaagcgaagccgagaagcgccgcgccgcagagctggcagcgcagcaggccgcagatgagcaagcccgcgccgctggtgacgtgaccgcgttagaaaatagctggcgtcaaaagctgactgacacagagcagcgctatcagtcgcagatcgatgggcttaatggctctctgaacacctatttggtcgataacgtggcgaccacccttgcggccaagctttccggcgaagccgctccggtaattctgcctcacatcaaaacccgcctggccgtcgaaatgcaggacggcaagccagtaacccgcgtcctcgatgcaagtggcaagccgtcggcaatgaccattgacgagctaggcgcggagttcgcgggcaacaaagcatttgcgggcgtgatcatcggctcccgcgcgcaggggatcgcaggcgtagacgcggcgaccgactggggcaaagccaaagcagccagtcaaggcaccggcggtaacgaccttgtgagcgaagccgcaaatattattaaaaacatgggaattgaataa

SEQ ID NO: 95649 - DNA, 981 bp, Enterobacter aerogenes
atgtctctttacgtattccaacagcaggtttccaccgccgccactgagctggtagcgcagcaggtacagaagtttaacgcggcatccggtggcgcgctggtgatgggctccggcgatcacatcggcgactacatcgagcgcactagctggcagctgatcggcggcctggcgcagcgtcgtaacgcttacggcgatggcgacctgaccccgcaggagctgggccagattctggatcgcatggttaaggttgatggccgtatcggcccggtttccgtgacccctaccatgatgaaacgcctgggcaaaaacacccaggaggcctctagcgtggtggcggcgcaggctgccgaagcgatgatccaggattatctcaacgccaccgctggcgtactggttacggcaatcggtaccaataccgacatggtgactaccgtcgccaccgccccgaacctggtaggcctgaacaaaggcgctcgccctatgggtgatgccttttcccgcctggttgcgtgggtgatggacggcgcgacgtttaacgacttcaccgacgaagcgctaaccaacaccaaccgactgtttcagatcggtaacgtgaacatcatgcaggacggtttaggccgccgctttgtgatctccgatatcccggcgcttgctgctgatggcgtgcaaaacgtcctggggctgactgctggcgctgctgccgtacagaccaccgcactaaacatggttgcgcagccggtcgtaggcaaagagaaccttaaagcgctgatgcagggtgaatatgattttaccctgggcgttaagggctatcagtgggcctctgactctgtgaagtcaccgaccgatgcgcagctgaccaccgccgccaactggaagaagatcaccaccagcaacaaagatactgctggcgtgctggtgtcgttcactggtggcgctggtggtagcgcaagcgagaaagtcgcagccaaagcgaaggcctaa

SEQ ID NO: 95650 - DNA, 483 bp, Enterobacter aerogenes
gtgatcgataacgatccaacctcggcgacgtttaacagttacggcgatgtggccgggctgctggcgttcgctacctcgcgcggctatgacgtgccggaagataccgccgaaatgcttttgtttcaggcgattgacttcctcaacctgcaatcgtgggcgggagagcccacagacagcgcccaggcgctcccgtggccgcgttctggcgttaaggtggggcgaagggttatccccgacgataaaatccctcctgcgctcgttacggcgcaatatcggcttgctattgccgcgcaagatgtggagctgatgccgggttactccggcgcgcaagccgtagaggaggctgttagcggcgctgtttccatcaaatacagtgaatcgacaatcggcgcgggcgtaactttcccgtggctgcgggcgctgctgggcgacctgctggacgctggcgcatcctccgttaactttcgcgttatgaggaattag

SEQ ID NO: 95651 - DNA, 351 bp, Enterobacter aerogenes
atgccgatcagctacccccgcatgagggctaccgcccggcggctaatctccggcaacggcacaacgtggcagatcaccaggccgggaaaggtgacggtagtcgctggcgttgagcaggtgcagccggaacagcagttaaccgccgtgggcgtgcgcactgactaccagcccgcagaggttgacgacacgttaatcaaggcgggagacgtgcggatcgtattcacggatgaaacgccgctgatgattggcgatctggttgatattgacggcacggcttatcgaatcgttaagcctaatcccgttaagcctggcgcgctgcttctgtgctaccgggcccaactgagggcgtag

SEQ ID NO: 95652 - DNA, 414 bp, Enterobacter aerogenes
atggccgacaacgatccattcgtggcggcggttaacgcctttgtgttacgggccaaagagaaccaggagcaggtaattagagcggtgagcctccgcattctggcgcggctggtgcaaatgtctccggttgataccgggcgctttcgcggtaactggctggtgggcttcaataatgcgccaggcggcacggtggaggcgttcgacaagaaaggcgacgacacaatcgcgcgtgaatcgctggtgatcgagcaattcaaggtaggcatgacggcggtttacttcacaaataatctaccttacgcctacccgctggagttcggccactcttcacaagcgccgggcggcatggtgcgcatcaccgccgcagagttccagcaattctttgacgccgcagcacaggaggttaaagcatga

SEQ ID NO: 95653 - DNA, 414 bp, Enterobacter aerogenes
atgatccccgacattgccgcagcgcttaacgctcacctcggcgcatgggcagataagcacggcgtgccgttctatctggacaatatcagcgacgacaagccaccagccacctacctggaggcgcacgacctacccgccaccccgcaaacgctcgacatggggctaacgtgccatgtgtttaccggtatctatcaggtgaacgtggtgctaccggcaggcagcggaacagccaacggtcgctatctggcccggcaggtggccggggtgttcccggaaggtcagagcattgagggcgacggcttcacctgctggatcaccgcgctacccgcgataaatccgggcgtgcagaatccccggaaaacagcctactcaatcccgatcagcattcgctatcgcgctgacatctcaagttaa

SEQ ID NO: 95654 - DNA, 705 bp, Enterobacter aerogenes
atggcctttgctctaccaaatggagccaccattcaaatgggatccgctttcggcgacgaagtggaagtaaccgccgtgtctaacgctaagggcgcagtattcacttgcgccgaggatcacggcctggcggtgggtgatgaggtggttattacctccggctggatgctgcttaacaacctggcggcgagagtgtccgccgtgcaaggtgaagcggtgacaatcggcattatcgacaccaccaataccgacattttcccggcagggaacggcgcgggcaccctgcgcaaagtcaccgagtggacgctgatcccccagattaccgagctggcacagtctggtggcgatcagcagtacatccagatccagtttctggaggacgaccgccagcgcaaccttgcgacctataaggcggcgaaaacgcaaactatcaccctggcgcacgattccagcttgccgatctatccggtgctcaaagatgccgaccgcaacggcgacacgctgccgctgaaaatgtacgtcccgaaagcgcaggaaacccgctattggactggcgcgccgtcttttgaccctcagccgactaccgcgctcaacgccatcgaaacggtgcagatctctatcgccattcagtcaatggacatgaccttttacaagggcgtgcccaccagcaccagtaccggcggtggcactggcggcactggctcctaa

SEQ ID NO: 95655 - DNA, 312 bp, Enterobacter aerogenes
gtggctactgaatttaaactcacccctaacccgacctttaaagcagacgtgaagatcccccgcgctggtgacgttgacggcgagctaactttcaccttcaaacatcacccgctcaatgagctggccgacaaggagaaattagagggcaaaaccgcgctggacttcatcaccgaaattgcgaccggctgggcgctgggcgatgagttcaaccgcgaaaacctcgaaactctgattaataactatcccggcgcgttgaaggctatcaccgaaacctattaccgcgagttgctggggaatcgcgaaaaaaactaa

SEQ ID NO: 95656 - DNA, 315 bp, Enterobacter aerogenes
atggcggccgcctcggcgttttattcgcgtgaacctaccgccgaggagctggccgcctttggtatgaccgccgatgacttcgatgatgaagtgatcgaggtgtggccggactgctggcccgctttctgtgtgttccagggctgtgctacgcaatggcgcaccggcatggctggccctaccgggctggattacaacgttttgccctggctgatgaagatccacggcatcgaggatgaagcggccgcattgaaagatatccgattaatggagcgcgtcgcgcttgcgaaaatccataaatcgcaggaggtggcctaa

SEQ ID NO: 95657 - DNA, 2766 bp, Enterobacter aerogenes
atgtcagatatcgctactatctccctacgtgtaaacacgtcagaccttgagcgcgggaaccaggcgcttgaccagttccagcaggcagcaggggccgcagcaaagcaaggggacgcatttaaccagagccagaaaagcggcgcgggtggtgcgaagcaaaacaccgaacagctacgccagcagcaggccgagctgcgcaacctgcttaaccagattagcccggtaaacaaggctctcgacgagctggacaacatccagcagcagctttcccggttccggggtagtggcatcgtcggcgttgagcagttcgagcgatatagcgaaattctggagactacccgcgatcgcctgctggccgtgcaggatgcagagacggcagagggccgggcgcgccagcagcaggcgcaggcagcagagcgggcgacggcggcggcacaatcctttgttgcctcgcttgaaacgcaagtctctacgatcgggaaaacccgcacagaattgcttgagctgaaagcggcagagctgggcgtgacagagcagaccgcgccactcattgcccggctgcgcgagcaggacgacgcctggaagaaaggcgagatcagcgccgggcagtatcgccaggctatgcgccagctccccgcgcagatcaccgacgttgtaacgtcgcttgctggtggtcaaccggtctggctggtggcaatccagcagggcggccagatcaaggactcattcgggggcatcggcaacgcgactaaagccctgttaacgctcattaacccattaaacgttaccgtgggccttgtcgccctgggctttggcgcgctgacgttaaagattgcggataacaggaaggagcttgcggagtctgcaaaagcggttaatgacaacatcggcgtaactggtgattttgccgaaaagttaaccataaacatccgcaacattgcagaggcatccggccagacggctgacgcggtatcaagaacctttatctcaactaatgacggcgcgagccaggccgtagacaagctgatggcggttgggctgggctatcaggatgccaaggccaaagttgagcagtataaagaatctggcaacttcaccgcgcttaactccctgatcgagcagcaccagttaaaaatcctcgggattgcagaccaatggacggaggcagcccaaaaggctcgaaattattacaccgccgcaaataaagggccgcaaagtgtagctcttggcggtgcaattgatggcggcatggttgccgccaattctgccgggacgttattggcagatttaacgggagcccagcacgcatatcaggaagatgttaaaaaatctgctgaatcaaccgaagcgctctatttgtcacttgatcatgtagccaacgcgcaaaagaaccttgttgatgcgcaggagagcctaaacaagattcgacgtaccggcgacaaagagacaatatcgcaagcagagcgcattgtggctttgcgccaaaaggagctggcaagtgcgcaaaaggcacaaaccccacgcacgaccaccagccgcgcagcctcacaagcagatcggcaggatgtagaccttcagcggcaggcgctcgcgcttcaggtgcagctcgatacgctggacaagcagcaggctatcggcggcgttatcagccagcagcggcgcgatcttctcactactgaatcagaaatctctgtgctgaccaaaaaggcgcagactgatgggctaaaccagcaagagaagcagaagctggccgctgataagcgtacgctctcagagcgcgaaacgctggcggcgctgggcgaccaactggagcagcgaaagcgccagttagagcagagcaagcgccagttagagcttgagaaacaggcaagcaagtttgagcagcagcagcaggcgatccgggatggtattgctatccgggcgggtggcggcacagatcgtgacgtgcagcgggcgcagcagcgctcacgcattgaaagcaatccggcgctggacgataagacgcgcaaacgtgagctggcacagcttgagaagacctataaggcagaggacgacttacggggtaactggctggcgggcgcaaaaaacgcctgggctgagtaccgcgacacggcaaccaatgtttatagctcaatccatgacgtagccgcctcgggcttccaggggctatccgggatgcttgacgacctggtgacgaccggcaccgccagctttaaggaattcgcacaatccatcctgaaaatgattgtccaggttatcgatcggctgctggtggcttacgccattcagtcggcgctcggatgggtgacagcttccagcgggggatccaccccttccggcgcttatgaagcagcagcggctaacgtacagtttgacagcggcggctataccggcgatggcggcaagtacgaccctaaaggcgttgtgcatggcggcgagttcgttttcaccaaagaggccaccagcgcgttaggcgtcgataacctttacgccctcatgaacagcgcacagggttacgctaacggcggctatgtggggcgcgcccctatggcgggcatgaacagcggcgcggcggctggcagcgggatcgccgtcaacacaacggttaacgttgacgccaacggcagcagtacagcgcaatcaagcggatcgggcgactctgtaggccgggcgctggcggctgaaattcagcaggctgcgttacaggttgttcaaaaacagctcaaaaacggcgggattatttacaattttgttaaaggaaggtag

SEQ ID NO: 95658 - DNA, 477 bp, Enterobacter aerogenes
atgaaatacgctttagtgttgattggtgccttatctgtaagtggttgtgctcaaatgttagcgcagcagcaagcgcaaatagagcagagttacagagatatagagcagtgcgatagccctgatctgccgcctgcaggagccgttaacagagaagcgtttgccgatgcgctaggtaagcaagctatgtatgcctcggctgataaatttgttatggataacaaaatgcagcaattgcagtacgttggctggaatgattccgtggctagctcagtgggcgcatgttaccgaagccagcgccaggctaggcttgatgcggtaaagggccagtttgaatccttgaagtcatcaactaaaggaaaggatgagagaggcgcgctaatctcagcctatagcgcatgggaggcttatatggctaaccccagcgacaatttaaagtcagactttcaaagcaagttgtcactttacaaaaacatataa

SEQ ID NO: 95659 - DNA, 351 bp, Enterobacter aerogenes
atggcagtagaaacgtataaatggcccgtgcagctcggcgcgggcgctattgaatacagtcagtcgatccgctcggcgcagttcggcgacggttacgagcaagtggccgataacggcattaactcaaccgcgatccaggttccaatgatgtttaccgggcatgttgccacggtagacacgatccgcgatttcctgctggagcacacggttaaagccttcatcatcacgccgcctggcgaatacaaagggctttaccgggtggttgccgactcaattaacaagcagcagctttccagtaacgtggccgagctgacattcaccatcaaacgcgcctacggagtctttgcataa

SEQ ID NO: 95660 - DNA, 771 bp, Enterobacter aerogenes
atggcacttatcgaccaggccgcctcgcttgctcctggcgggcgcgtgcggcttattgtggtggacgcctcggaatttggcggcggcgttcatcgcttccattacagcccgttcccgcataccccggaagaaatcgacgctgccgacggtgacgaggacaagttagggccgaagccaatcacctgggccggggatgtttacgacttctggccctttcaggtggcggatctggaactatccaccgaccaggccgcagagcctagcctgacggtttcgaaccttgacggccaaatcacggcgctttgtctgcaatataaagacatggttaacgcgaaagtgagcattatcgatacttacgcggcgtacctcgatgcggtgaatttttccggcagcgtcaaccagtcagctgatcccacggccttcacactccaaacgttctggctcgacaccaaaaccaacgaagacgacgaaaccgtatcttgggccatgagtagcccggcagacctgcaaggcctggtgatccccacccggcaaatcacatcgctttgcgagtgggctttacgcggccagtaccgcagcggcgacgggtgcagctataacggcacggcgtactttgacgcaaaaggtaacgcagtgacagatccggcgctggacgtgtgcgggggctgctttagcgactgccggaaacgctttggcgctggcctggacgatccgagcgctgccgttctggacttcggcggattcgtaagcgcggctctcatttcccaatag

SEQ ID NO: 95661 - DNA, 732 bp, Enterobacter aerogenes
atgaataaaacccttatggcagctatccgggcgcacgcactggaggacgccccgcgcgaaagttgcgggctgattatcaaggtcgggcggcgtcagcgttatatccgcgtgcaaaacagccatcccgaccccaccgagcatttccgtattgatgccgaagagtgggccagggcagaggatgagggcgagatcgtccgcgttatccactctcaccccggcgacggtgcgcggcctattgcgtcccacctcgaccgccagcagtgcaatcagtccggcgttgtgtggggcatctatgccccggactgcgacgaatacgcggagattatgccggaagcgccgccgctggtgggccgcccgttcatcctcggctcttatgactgctgggggctaatcatggactggcacgccacgcagggggtaacgctcaatgattttcgcgtcgattacccgtggtgggagaaccaataccctgacgacctctacgcagaaaattgggagcgggaaggcttcattgagtgcgacccggccccgggctgcatggtgatcatgcaggtgcaggcggacaagtggaaccacgccgggatcatcactgaatccggcgagctgttacaccacctttacgggcgactctctgacgtgacgccttacgcgcggggatatttcaaggatcgcaccatgatttgtgtgcgccataaggatttgccaaaggagcttaaacaatggcgagactaa

SEQ ID NO: 95662 - DNA, 594 bp, Enterobacter aerogenes
atggcgagactaacgactatccgcctctatggggcgctgggcgctcgtttcgggcgtgttcaccgtttggcggtgcaaacatccgccgaagccgttaaggctctatgcgtcaacctaagcggctttgaggactatctccttaacgctaaaaagaatggcatggtgtttgccgtgttccggggccggaaaaatatcggcgttgatgacttccagagcctgcccggcgtaagtgatatccgcattgcgccagtcatggaaggggcgaaaaaggccggaatgtttcaaaccatcttaggcgcggtaatggtggttgctggcgttgcgatctcttacctttcatcgggggcgctttccacgttcggcacatcgttagcgctcgccggtgcgagtacgtttgcgggcggagcctatcagatgctttccccccaaccgagcggactacaggcgcgcgaggatcccgacaataagccctcttacgcattcggcggcgcagtgaataccaccgcaatgggaaacccggtggcggtgctctacggccagcgtgaaatcggcggggccatcatctcagccgggattgtggcagaagacatttaa

SEQ ID NO: 95663 - DNA, 8370 bp, Enterobacter aerogenes
atgcttctggcgctgggcgagggtgagtttgcgggcgggcttgatgctacccggattttcctcgacgggacgccgctgggtaatgctgacgggacaatgaactttgacgacgttagctgggatttccgccccggcacgcagacgcaagatcatattgcaggcttcccggcggtagagaacgagatcaccgtgggcgtgtcgctcaccgccgccgcgccgtgggtgcgcgccgtaactaatacgcagcttgacgccgtgttagtgcgcgttggtatccccagcctggaaaagcaggaagataacggggatgtcaacggggcttccgttagctatcacatcgacgtttcaacggacggcggcgcgtatgaaacgcttctgaccaaaaccgtcacggagaaactcagctccctgtatgagcttacacaccgtatcaatctgccgaaagccagtaccggctggcagatccgcgttgtgcgcgatacggcggacagcaccagccagcgtgtgcaggacaagacgcagatccaggcaattacagaggtaatcgacgcccggttacgttacccgcatacggcgctgctgtatgtgagctttaacgccaaatcgtttaacagcatccctaaaatctcatgcctgccgcgtgggcgtattatccgcatcccgtcgaactacgacgcggaaagccgcacttatacggggacgtgggacggtacttttaaatggggatggtcaaataaccctgcgtggatctggttcgatatcctcacagagccgcgcttcggtctgggccgccgtgtcaccgccgacatgctggataagtgggagctttaccggattgcgcagcgctgtgatgagcttgtaccagacggcaaaggcgggacgggtaaagagccgcgctttgtgtttgacgtttacattcaggcgcaggccgacgcatggcaggtgatcaaggatgtggccgcaggtttcagcggtatgacgttttggggtaacaacatgtttaatgttgtctctgacatgcccgccgatgaatcaaagctacagatcctcacccgcgcctctgtggtcggtaagccgagctactccagcggcagcgagaaaaaccgctacagctccgcgctaatcaactttagcgacccggacaaccattatcaggatcgcaccacggcggtgatgttccctgacctggtgaagcagttcaaatttaaacagacgcagttaacggccataggttgcacgcgcgagagcgaggcgcagcggcgcggcggctgggcggtttactccaactacctcgatcgcattatcacggtgcaaaccgggctggacggttacgcgtttgtgcccggcacggtgtttgcgtttgccgacgaacgcctttccgggcgggtgtacggtggccgcgtaacggactatgacgcgtcgatcctggcggtaactgtagaccggggaacaagcgccgcagagggcgacacgctaatgatccgcacgctgggcggtacggtggagagccgcaccattcaggcagtcaacggcacgcagctgatcgttacagaggcgtttaccgcgccaccagcgccggatgcggtctttgttatcgatgccggccagttgcgtttgcagtatttccgcgtgacgaaactgacgtataacgacgaggacaacacctttaccatcacgggggctgaatacaactcctcgaaatatgacgccgttgataataacgcccgcctcgatacgccaccaatcagcctgatccccaccgggattgtgtcgccaccgcgtaacgtcatgatcaccagttacgacgccgtgcagcaggggcagcgctccgcaacactggttgcgtcatgggatgccccgcttgataaaacgggcaaggcgcaggccgatattgtgggctatcaagcgcaatggaaacgcgacgataacgagtggatcaacctaccggaaaccgggttacgtaacgtagaagtggcgggcatctttaccgggggttatctggtgcgcgtgcgggcgattaactccgctggcacttcgagcctatgggccacttcggaactaacttccctgagcggcagggctggcgacgtgccgcagccgctggggctagcggccacggatgatattgtttccgggattaacatcacctggagctttccgggtgactccggcgacacgttaagcacagaattgcagtacagcgcgaccgccgacggcgcaaaccccgcgctattggccgccgttccctacccgcagcacatctatcaacaggcagggttagccctcgggcaaaaattctggtatcgcgcccggctggttgaccgcctcggcaatgcctcgccgtggactggctggatcggtgggatggcgagcgataacctcgatgattattaccagcaactcgacgatgcgatcaaaggctctgatacctacggagagctgacaggcggccttaaagatgtatccgacagcgcgcaggctgctaatgatgctgcacaggctgcccaggcggccgccgacgacgccgcaaacaccatccagcagcaacagcagcagattgaaaatcaggcttctgacatccagcagaatgcaaacgacatcattacggcggcgaatgctggcgcggcgaacgctggagctatcgcccaggagattctcgatcgccaggatggcgaccttgccacggccaccaaagccgctaacgatgttgccgacgcaatcgcaaaagccgaaaccgataatgccgaagtggccgcccaggctgcggccaatctgctggcggcgaaaaatgaggttgaggccgagatcagcacgacgaacatcaccatgcaggatggttttgattcgctggcccagcaaatcgcgtcgatttctgccgggactggcgagcagttcgacagcctcaaaatttggtatttcgacaacgacagcgaggggtggagttcggacgacggcggcacggaactactaccgacaaccgatgacgggtggatccttcctgcggattcgatttcaaccatgcgcagcccgtccggcactggcaccctgattgacggcggcgcgtataagtatatccgtctgcgcattaagaaagttggcgctccctcttgggatggtcggctgtactggatcggcgctgacgaaaccgggtgggctcaggggcgcagcctggcgctaactgcctcggagtttgacccgtcaaccggaatcagcactatcgcgatcccggatattccgtggcaatcctccggcacaattcgccgcctgcgcttcgacttctcgccggacggatcagctgatgcagataactattatgccgttgactggctggccgttggccgcccgacgccaggcgcatcacaggcgcagatccaggatctgaaaacggcgatgactgctgccgattctgccgaagcatccgagcgaaacacgctggccgtacagatgcgcggcaacagcaccagcaccgacccggcattactgaccactggcctgatctacaacgagcgacaagtgcgcatcaccgccgagaaggcgataagtagcaccgttacggcattgcagaccgactacaacgcgaacaaggccagcgtaagcaatgagctttccacgctcaccgacgcgaacaacgccaacgctaaatcgatcacggaattgcaatccgacctcggcgacattgattcagacgttaccgcgctgactaaaacagtggcaacgaaggccgacgcctcggcagttaccgcactgactacccgcgtaaccaatgtagaaggcgaagtgtccaccaacagcaacgcaatcacgcagttgggtaatgagctggacaccacgaccgacacgctcaacggcaagatcaacacgaaggccgacgccaccgcgttaaccgcgctcaccacccgcgtagcagcgactgaaacgaccaataccacccaggcgcagcagatttccacgctgggatcgaccctggtctttggtagcgagctttataacggcaacgtgacgcagaacgccgacggctgggctaactctggctccggttcatcgttcacttgggatagctcccaggccattcgtgcgaccactggatcggtacgtgtggcgaacgtcaccccgatcgcggttgagccgggcgaaaaggtttacttgagcttgcagatcaaggcgacggaagactttaccggcggcagttcggacacggtcggctttatctctaacctggacaatccgaccgcgtggatccctggaatgtctaccctcggctggttatccaatatcacgccgggaagcactgactatgtcacgctggaatattcctacaccgtcccggctgattttgcgggcaagtttatctatttccgcattgctgcgggcgcaactaacccggtaacgtcggcgcgcgtctacttcacgaaagtgttagtgactaccggaatggatatcgcgagcaaggccagcgccgaagcgttgcagtcactggctaccaccgtagaccagaacggcgacgatatttcctctcatggtgccgcaatcaccgaattgcagaacgatctaaccacgacgcaagccgacgttaagacccgcgccaccgccgccagcgtcaacgcattgactaacaccgtcacccagcagggcaagacgatcacaagtaactcggccgcaattaccaacttgcaaggcgacctgtccgacctttccgacgacgtggacacgaaagcgagcgcggcggcccttaccgcgctgactcagcgcgtaaccaatgccgaaggcgtgaacgactcgcaagcgaccagcatcaccaatctgaacgcgacggcctcggcagttcgcgcagcgtccggcaacttgatccctaacggaacttttgagccggtatacgcaaataacatgggctatacagtcgtgtcgtccaccgctgacggcgtcccttcgggatgcccgttcgcctatgttgccaaattggcaagccgcgaccatatgccatcgtttaatggcttcccggttcgcgctggcgatgtttatgaaatgtctgtactggtggcgtgtggcactggctcggctgctttcaaccaatatgttgttgcggcagcctctccgactggcagctttgccgctgcctcgtccggcgggcaagttacggccgcaaatggcgcgacgtgggttaggtctgtattccgccacaccatcacggcagcggaagcggcaaaaggctacatgaggccaatgttgcagattagccagtcttcaccgttcggcactatttggtacgctacggactggtcatgccgcaacatcaccgcagcagcacaggcgcagaacaccgcagacgctaacacgtcggcgatctcttctctcgatacccgcgtaaccaccgcagagaagaacatcaccgcgaccagctcgtcgttaaccacccttgccgggcgcgtgacgaccgcagagaacaacatcaaaacgaaggccgacgcctcagcgctcacagccctgacgacgcgcgtcaccaatgccgaaggggttaacaccactcaaggcaacgcaatcacgcagttaaacaacagcgtcgatgccttccaaaatgacgttgattcatccggcgcgattgtgggtaacatgctggctaacccgtcgtttgagcgcggttttgacgcgtggacaaattccggctttgcgacctacaccgcacaggggccgcattctggaaagttaatcctgaccgctacaggcagcagcgcgggaaccgtttgcacgatctcccaggctgttaacctgaaagcgggccgctcataccgtttcggcgtttatgcccgccgcactggcgacgccgtagtcgctgaccagtctaatacgaagatttccgttcgttcgtctgacagcgccacgttgatcgccaacgcgaacatgagcggatccaccgtgccgactggttcaacctgggccgacaactatgtcgtttataaaccggcgtccgacattaccgtcctgatcaacttccgggcgtccctgtctgccggtacgtactactttgacgacgcctatgtcgtggacacgaccgacgccgaccaggtggcagcgaacgccaccgcgatcaccgggctgaccagcaccgtaacgcagaacgggaaggatatttcttcccagggttcgcagatcaccagccttaacaactcactggcgaccaccaataagacgttaggcactaaggccgatcagagcgacctcacggcgttgacgacaaaagtcaatacgaaggccgacgcaagcgctttaagctcgctacaaagcaccgtgtcgagcctgagcgggacagtcacatcacaagggacgcagatcaccagcctgaataacacgctatccactaccacggcagcagtcacagacctgacaaacgacgcatcaagcgcggcggcgattccgggtaacatgctggtgaatggcggttttgagtttgacggcaacggctggacggttgttagtggcattgcgccggtataccgcgacgcatcggccccgcacagcggtgtgcgcatcattgaggcgcaaaccggggaaatgcagctttcacagattgttagtgtgaaggcgggcaaaacctaccagttcggggcttttgcgcgtcgtaacggtggtacggctactgacaatcaggcttacaacaaagttcgtattggtggcactgacgggaacatcatcaccgccgccaatatcgtaacggagaacctcggcactagctcggcatggtctgaagtttccgggacgttcacgcctaccgcagatcgtgaaattgatttcgggatctggacttccgttaagggtggcgtgctgtatatcgacgatgcatatctgatcgacgtcaccgcactgactacggcaaccgccaacgcctcagccatcgctacgctaaataacaccgttacgcagcaaggtaaggatatcaccagcgcttcgtcgtctatcaccagcctggcaaacacggtaaacacgaaggcgtcacaatccgaccttaacgcgctgaaaacgaccgttaacacgaaggccgacgcctcggcgttgtctgcgctgcaatcgacagtcaccacccagggcaacacgatcacgtcgcagggttcatccatcactcagttgggtaactctctgatctccggtaacgagatctacaacggcgatctgaacgttagcgctgacggctggcaggactccggcagcggaagcggtttcaccttctacgagcagggcgggcggggctgcatccagaccaccggaaactccatccgtgtggcgaaccagacgccgatcgcggttgagcctggtatgaccgtaacagtggcgtttagcctccgcaccaccgacggcgggacgctgacgtccgatacgatggggctcactaccaatgttgatttttcatcggctgcgtggactgtgccgcaagttggttggggcgctggtgtaactacctcatggaagcgttacacctatgattttgttgtcccggctagttttaccggaaatcagctttatctgcgcttcgcttgtgcgggcatgaccaccagcggcaagatccagctcactaacgttatggtgacgaagtctaccgggatcattagcaaggctgacacttccgcactaaatgcgctgactacccgcgtcaccacggcagaaggcaagatcaccgccaacacaaccagcgttaacaaaatcagcgcccgcatggacgacgccgaagccgcgatcgataacgttaacgagacagtcgcctctaacgggctggctatgaccaacggctttaatcagatgcgcagcatgatcggtgataactccgcatcgattacgaacgtgactaagaccgtggcggatctggacaaggcgaccgcttcgtctatctccaccctgacgacctccgtcaataacgcgtccgcatccgtgcagacggttagccaggcgctggcggataccaacggaaaactaagcgcacagtatggcgttaaagtgaccacggacagcaacggcaataacccgcgcgttgctggtattcaattaggcattgacgcgaccggctcgtcgcaattcctggtacaggctgacaccttcgccgtgtataccgcggctggtggggtttcgccttttgcggtaagcgggaatgctgcatacctgcaatctgccttaatccaggatgcgtctatttccttcggcaagatcaccgacagcctccaatcgtctaactatgtggcgaacagcacgggctggcgtttaccgaaaagcggtgatttccagatcaacgggaacgtgccgggggaggggcgtgtacagattgactcgacgggccttgctgtatacgacgaaaacggcgtactccgttgcaagattgggaggatttaa

SEQ ID NO: 95664 - DNA, 648 bp, Enterobacter aerogenes
atgagttatggcgttactttgacagcgccgagcggtgaagtttgggttacacctgacagcatcccgcttgcgctttattcgaaacagaccatcacgctcagaggtggaaccaatgaggatgagtttaggtcggtaacatatgactcatcgcagccgatgatcgcgttcgtatgcttcacgaacggctacgcaaaggctaataccacttatagcgggaatgaatgccgggttgtcttctccttcggaacacagcaggcaacagcggagatttacttctttaccgtctttgagcaggaagcgccgaattatggcctcgctatatgggatgcatccgggcggctcattcttaccgacaaaaccaggactttatccgacatacagagctacgggcaggggtacgacaccaacgtcactaatagcggaaagtgggctgtttcaccgcttgcgctggggctcgttgttggtgtcgtatctgaccccttgccgcgaccattccagggcgagtatcacgcttacgccatctataacggttcaagtacgaatatccgggcaatggttacgcagacccccagcggcaacatttctggggttacttatataaatatgcgaaattcagtgctggctattgattgttcgcgatatgactaa

SEQ ID NO: 95665 - DNA, 1131 bp, Enterobacter aerogenes
atggcaacgattagtgatgcgctggcgaacagcattcaacaatgctttgatcaggtttataccgatctggcaaatcagcagcaatttttattcggcgctggcacggtgacgatcacgaagccggacggcacgaaagggacggttaaatcatgggcgcaattccaaagtgattacgccgcccgacagacgaccattgataccaacattgcggcggcgaacgcgaaccaggccaaattaaacaaagcccagacgttcacgcaagggcaagtatttagcgcggcggcgacgttcaatagcacggttacagttacgggaaactttaacgggaagcagatcaccgggacacatatcgagctaaccaacacgacgccgtatatcgattttcaccacggcaacaccacgaccgactatacacataggatcatcacggaagacggcgcgctagctatttatcccgccctgcgcgtccgtggcggcttcggggtttacggcaccgcgacgcagtacggtgatcttttcgggcaagccttcattgcgcgactgagcacagatcccagcgtggcgatcggcgatatcttaggcactccgcgctttacttcccgttttgatgtgcgaggcgcggatagcaatgttgacggggggcaagtcggcttatggatggaggagcaggtgggaaccaaccaccgaggcgtgttaatggttgccggattcggggcaaacgtcgagtattggcaattccttaccggcgggaacatctacggcagcacaaagggcagcgtatcgttcctgggaacgtctgacgcccgctataagcacgacatcgccccaacggacggaagcgagtcgatcgccaggcttaaagcgctggagcttgtcaccttcgtgtataacgacgatgagcaaaaccgggtaaggcgcggcatcatcgcgcagcaagcgcagaacgtcgatccgcagtacgttaaacaggttgtaaccagtttcgacgacggaaccggaaagcatgtggcggttgacaagttacagctggacaacaacgttatcatgatggatacgcttgcagtcgctaaggtgttaatcggcagggttgaggcgctggaggaggagatcgagaggctgaaagccggataa

SEQ ID NO: 95666 - DNA, 993 bp, Enterobacter aerogenes
atgagtcagaatacgctgaaagttcatgatttaaatgaagacgcggaatttgatgagaacggaatggaggttttcgacgagaaagccttagtagaagaggaacccagtgatagcgatctggctgaggaagagctgctgtcgcaaggcgccacccagcgcgttctcgatgcgacacagctgtatcttggtgagattggttattccccgctgctgacggccgaagaagaagtctatttcgcccgtcgcgcactacgtggagatgttgcttcacgccgtcgcatgattgaaagtaacctgcgtctggtggtgaagattgctcgtcgttacagcaatcgtggtctggcgctgctggatctgattgaagaaggtaacctcggcctgatccgcgcagttgagaagtttgacccggagcgtgggttccgtttttcaacctacgccacctggtggatccgtcaaacgattgaacgggcgattatgaaccaaacccgtaccattcgtttacctatccatattgtgaaagagctgaacgtttatctgcgtaccgcgcgcgagttgtcgcataagctggaccacgagccaagcgccgaagagatagccgaacagctggataaaccggttgatgacgttagccgtatgctgcgtctgaacgagcgcattacctcagtggataccccgctgggcggtgactcagaaaaagcgctgctggatattctggccgatgaaaaagacaacggcccggaagacaccacgcaggacgatgatatgaaacagagcatcgtcaaatggctgttcgaactgaacgccaaacagcgcgaagtactggctcgtcgtttcgggctgctgggttatgaatccgcaacgcttgaagatgtgggtcgtgaaatcggcctgacccgcgaacgcgtgcgtcagattcaggtggaaggcctgcgccgcctgcgggagatcctgcagggacaggggctaaacatcgaagcgctattccgcgaataa

SEQ ID NO: 95667 - DNA, 252 bp, Enterobacter aerogenes
atgaatagaaaatcttggttctttatttttttctatctattttttgcttgcaatgtagcaatgatcgtattgtttttaattatatacgtgctcattagaggttacctcttattggtttaccacatcccatttgagctgatttggagtgatacatggaagtatacaaaagctgcatgtttcacaggggcgttgatagctactggttgttggtggatttattaccagggctacaagaaaaatcgtaataggtag

SEQ ID NO: 95668 - DNA, 273 bp, Enterobacter aerogenes
atgaaaaagttaatgattggtttggcagtactcagcatttctgttttaagtggttgtgtcagtgaacaacagcgggttgatcgttgtgttgcaactggtgttagccgtgacacttgctaccacgaagaaaaagaatattggagagcggttaacgctaactatgccactgagagagcagcagaaacacaggctgacgcattccgtgaagggatgggtaacaacgatcataaaaaagaaaaatcttcaaaacttggcaaattctttggttattaa

SEQ ID NO: 95669 - DNA, 1230 bp, Enterobacter aerogenes
atggcgcgtcagacaaagccccttaacaacaccgaagtcaaaaatgccaaagcgactgaacgtgccactatcctgtacgacggggatggcttagagctactggttaagcccggaggctcaaaactctggcgattccgctattacaaacctttcactcgcaaacgcgccatgattagctttggtgcttaccctgctgtatctctctctgaggctcgtcaacttcgtgaagatgcccgtcttctattgagcaaagatattgatccgcaggagcataaaaaaaccgaacagttgcggcaaaaaagtgccactgagagcacctttgaaaaagttgcaggagactggtttaaaaccaaagaatcagcggggctggcaactcatacattaaacgatatctggcgttcaatgagtaaatatgttttcccacatattggctctatgcccattgctaacatcacggctcagcagttcatcggagcattagagccaacacacgctgccggaagactcgaaacggttaaacgtctgagccagcgtatcaatgaagttatggattatgcgctcaattccggtctggtatctgtaaaccccgccgcacgaatcggacgaacattccataaaccaaaagtaaagcaccgccctgccttacctccaaagcaactccctcttttaatgaaaactctggcatttgccagtattggacgtcaaacccgatgtcttatcgaatggcaattgcttacgatgattcgtccagcagaagcatcaacgactcgctgggatgagatcgactttgatgcaaaagaatggcgtatccctgctggccgtatgaagatgaagcgtgaacacatcgttccgctttctgaacaggctctggcaattctggaagtgatgaagcccatcagtaagcacagagattatgttttccctggctaccgtaatccacttgaaccgatgaatagtcagacagcgaacatggcgcttaaacgaatgggcttcaaagatcttcttgtcgctcatgggatgagagcgattgcctcaacagtgcttaacgagaaaggttttcctcctgatgtgatcgaagctgcgttagcacatatcgatactaacgaagtcaggagagcttacaatcgcgctcaataccttgaacaacgtagagagatgatgaactggtggggagaacatgtggaagcggcttcttttggggcaacgagtattacttctgtggctggataa

SEQ ID NO: 95670 - DNA, 603 bp, Enterobacter aerogenes
gtgaagaaatcagatattagtataattttcgataaaaatattcccgatgaatttttcaaagattttgaaaacgatgtagaagtacaaggtttaaatcttgttattgagtccagagaaccaacaggtccaatggcctgtgctgaatggttcatccttccagttgtttttgcattcatcggtaaaagctactttgatggcttcctgaaagaaatggggaaagatcactaccaatccatgaaggaaagtctatcaaacttaacaacaaaagtaatgaagacccccagaattgagccaacactatttagcaccaaggggaaaattagtagccgcaatccattttctcttgcattctcaattctggcagaagcagaagatggttatacattcaaactactaatacctaaagcaacaaatgaagctgattatggtttaatcgctaagaaatttatggagtttctttctgactatcatttagggattgcgaccctggaatccataggctatatatctgaaggatgcagacttacctctggattaatcttcgtgcattacaattctgacaataactctattgaatggttaaatcaaaaagactatcgttaa

SEQ ID NO: 95671 - DNA, 1230 bp, Enterobacter aerogenes
atggcaaagatcgcgaagaaactcaccgacactgaaatcaaaaacaccaagccagcagacaaagaaatcaacttgtttgacggggatggcttgattctacgaatctctcccctctcaacaggtgggaaaaagaattggtatttcaggtattcagtgcctgtgagcaagaaaagaaccaagatgagccttggaacctaccctcatcttaccctggcaagagcaagagccttacgtgatggatacctatccttgcttgcgaatggcactgatcctcaagtccataacaacgataaagctaatgcattaaagaatgccacagaacacacattacaagccgtggcgagaagatggttggatgagaaggtaaagacctctggcatctcacaagaccatgcagaagacatctggcggagccttgaacgaaatattttccccggtctgggtaatgtgccaatcaatgaaatccgtcccaaactcttaaaacagcatcttgatccaattgaacaacgaggagtactggaaactttgcggcggctaatttccaggttgaatgaaatcttccgttgggcggctacagaagagctgattgaatttaaccccgcagataatctaggccaacgtttcagtaaacctaaaaaacagaatatgcctgccttacccccctctgagctccctcgttttctggcagcactgaacaatgcttctgtccgtttagaaacaagactactgattgaatggcaacttctcacttgggttcgccctggtgaagctgtccgcgcaagatggtctgatatagatatggataacagcatgtggaacatcccggcagaatttatgaagatgaaaaaacctcataaggtcccattaagcaaagaatctcttcggatactcaagtctatggaatctatcagcgggcgccgcgagtgggtatttcccagcataaaggctcccttaaagcatatgcatgaacaaacagccaatgcagcaattatccgtatggggtttggaggtgaacttgttgcccacggaatgcgatctattgcaagaacggcagcggaagagtcaggtaagttcaggacagatgcccttgaagcggcccttgcccactcaaaaaaagacgaaattatcgctgcatataatcgtgcggaatatattaccgaacgagtagctctcatgcagtggtggggagattatgtccaggcacaacagcttaaattttttgctgcttaa

SEQ ID NO: 95672 - DNA, 882 bp, Enterobacter aerogenes
atgcgttttaacaccccacttcgttatcctggcggcaaaggaaagctttcaaatttcatgcttcggattattgaagataataagctttcgcctatacattatgcagagccgtatgctggaggggctggtttagcgctgaagcttttacatttaaatgttgctgaaaaaatcattcttaatgatattaatatctctgtttatgctttttggcacagtgtgttaaacaattcagatcatctatgtgctttaattgaagaaactaaagtcacaatggacgagtggttcagacaaaaagaaataattaacaaacccaaagaccatgatatgctaacaattggtttttctaccttttttcttaatagaacaaatcgttctgggatattaaaaggcggtgtgattggtggtaaaaatcaagaaggagaatggaaacttgatgctcgctataacaagaatgatttaatttctcgaattcagcatatatcaaagaaccgagataaaatagatttgtataacatggatgcaattgatttcataaaaaagatagttgttcaattgcctaagaaatcattaacatatttagacccaccatattacattaaaggtaagggattatatattaatcactatgaacatagtgaccatgtgaatgttgcaaaagtagtacagaatgatattaaaacaccatggattgtttcttacgataatactcctgagatacaaggtatgtataaaacatcatcattggtgtacggaataaactacagtgctcaagatcgatataagggctcggaagtgatgttcttcagtaaacgattgaaggtcttcaaaaccgatgatccgactaaggtaaaagcacctgccattaaaaatgtcatgagctag

SEQ ID NO: 95673 - DNA, 1734 bp, Enterobacter aerogenes
atggcaaatccaataaccaaactaaaaaaaataaacgttgtaaaatttcgtggactaaaaaatataaatatagaatttggttcacgcctaactgttatttgtggtaaaaacggcacttcaaaatcaacaattcttggtattattgcccaaatctttagttttacaaaagatctgtctaagaacccagaggttgatttaacacaatataagacattaactaatggtaccttcaagtcagcttttagtgaacattttagactctcagaacaatttgatactgccggttcaatggaagtcaggattagcgtttacgatggcgcatctaacaaacatcttgaaaaactaacattgggcctatacagctcctctgacagggataaatctaggccaatagtcagaggtaatgattctataccggggaaaaatcaaagtagaaacgtcacccatccagttgtgttcctaagcttagccagacttctccctatcactctccggactgattactcaacaagggatgttcagtatatcaatgaaaactcagatgatataagaataatgagcaatcaactcttacttaagaataatgggtgctcagtaacagccacgaaaggaacgatcgattcaatggtcgtacatggcgataattatgaccaccaatcagtttctgttggtgaggataatgtaggtcaattaattcaagcaatattttcatttaaaaggctaaaagaactttatgccgattatcatggaggtattttgttaattgatgaagcagacgcaggtcttttccctgctgctcagttagaattaattaacatcctaactaaagcagctaaaaaatatgacttgcaaataatcatgacttctcactcaccattaataattgaagatatattcaatcgttccaaacaagaccccaacggatttaaaacaatatacctaacagatacttatggtgatataaaaacaaaagataatctgtcatgggctgatatcaacgctgatttgcatgttgaaacagtaaaaataaatgatgagattagtcttccaaaagccaatgtatattttgaagataaagaaggattcgatttcttcaaacaattaataattgacagaagaataaacagaatattgaacccattagggaatattaatattagctgtactgctatcctagatttaatggctagaaaaatccctgaatttactattaaaagcctagtggtcttagatggtgatgttgctcacgacaacagtgacaatgccaaaaaagctaaaaaagagagaagcttatgtttgcttccaggcattcttcctccagatcaaatgatttttgaattcttatataacttacctccagatgatacgtattggaacaataaaaatagatttacaaaagcagtatttatgaaaataacaaaagacataattacaacgctaaaaataggtaactaccctattgatttacaaaaagttatagagaactataaaaaaacaaataaaaaccatggcggagtaattagaaagctatttaaagattttgcccatactccagacttcctcgcgcaagtaaaagggcgtgttaaagataacccctatcgatattgggtcgagaaacatcccgtggaatccgacagtttcaagcatgagttaatcaaaaatcttaaaataattatgactaatggacatggtgttgactctgctactatcacttcgtatctgtccggcaactga

SEQ ID NO: 95674 - DNA, 1167 bp, Enterobacter aerogenes
atgggctcgacaaaatcgcctaagctcccgcgcggcgtaaccatcaggaagcatcgcaacggtgaaaccatcaatattaccttcacttataagggggttaaatgccgagaacccctttctaatctggaggtaagccataaaaatatcaaatatgccgagcgcacactcggcgaaatccataacaagatcgaaagggggactttcgtttatgcggaatattttcctcgttccacccggttaaaaattttcggtaacgctgctgcaggtaaaactgtgaagatgtacctggacgagtatctggttatatgtgaaacgaggaaactatccccttcaacaattggtggatacaagaaatgccgaagcgcactgtcatcacttcatatttttcccgcaagtgagttgacgccggcagtattgaagacgtggatccagagccagaaaacaactttgaagactattcgaaaccagctgtcattcctgcgctctgctttggatgaggccgtgacggatggtgtgcttcagattaaccctgtatcactggtaacagcatcacggtaccaaagtgataaatcgaaggcagaaagtagttatgtggttgatccgctatcaccagcagaagtagatgctttgctctccgctgctggtaacaagcagtgggagaatcttttcaggttcgcgatacaaaccgggctacgtagttctgaactgtgtgctcttcgttggagtgatatcgacttcataggaaaaacagcccacgttcagaacgccagcgtagttggtgtcatcaaaggaacaaaaacaaaagccggtacgcggaaagtagagctgactgaagaggcattcgctgctctgaccagccagaaacagttcacttttatgaaggatgaaacgatattcgaagatccaaaaaataacaaaccatgggccagtgctgatgcaattagaaaaaaagcatgggttccgacattgcgaaaggcagggattcgatacagaaacccatatcagactaggcatactttcgccacaagccatatcagtcgaggtacaaacttgttctggcttgcgactcagatgggacataaaggacctgagatgcttttccgtcactacggctcatatctgaaggaatatgatggacaaacaagcctgaagaagataaaaatataa

SEQ ID NO: 95675 - DNA, 567 bp, Enterobacter aerogenes
gtgaaccatttaatgatcgacctcgaaaccatgggtaacaagcctactgcgccaattgtcgcgatcggcgctgtattctttgaccctaaaagcagtgagttgggcgcagaattctatgtggccgttaacctcgccagcgctatggatcagggggcgaagcctgacggtgacactatcctgtggtggctgaagcaatcagctgaggctagatccgcaatttgtaccgacgacactcatcacatcgatgaggcactttatgaactgagtgaattcatcagtcgcaactctgaaaacccacgttatctgaaagtctggggcaacggtgccaacttcgataatgtcattctgcgaactgcgtatgaacgtgcgggccgtatatgcccttggcagttctggaatgatagcgacgtgcgcacaatggtattgcttgggaaacaacttggtttcgaccccaaacgcaatatgccatttgatggtgtagcccacaacgcattggccgacgcccaccaccaggcaaaatatgtctctgtaatctggcagaaactattgccttcaagcgacgaataa

SEQ ID NO: 95676 - DNA, 372 bp, Enterobacter aerogenes
atgagtaatgatcgcatgacagtcgtgcccgatttcctgggcgaactggacgccggcgtattcataaacaagattgcggcggctcttaacaccaccgcgctcggcgttctgaataacggcaacaaaggcaaagttgtcctcacctttgattttgagcgtatgggcaactctgttgaagagaagcgcgtcaagattaagcacaagctgaactacagcactccaactccccgcggcaaagcgtcggaagaggacaccaccgaaacaccaatgtgggttaacaagggcggcaagctcaccatcctgcaggaggatcaggggcaactcttcggaatcaccggcacggtagacggaaagcttaaagcggctcagtga

SEQ ID NO: 95677 - DNA, 657 bp, Enterobacter aerogenes
atgaaaacagaaatgaaagatcggattagagcacggcgagtacagctcagcgtcacacagctggccctagcaaaaaagcttggggtaagccgcgtttccgtaactaaatgggagaatggaaccaccagacctgatggtgaaaaccttcaccaattagctgtggcgcttcagacaactccagaatggttactgtatggacatggtgacgaagttgatgacaccaaagtaattccatacctcaagccccccactccagtcccaattatttctgctgttcaagcaggcgtgtggaccgacacttacgcatgctcaaggctgaccgacgtgatttcatggacgcaaaccactgcaaatgtttctgacgaggtttttggcttagtagttagaggtgagtcaatgacaaatcctcatggattaccctctatcccagaaggttcgatcgtcattgttgaaccacattacgggcaacttgatgacctttatggaaaaatagttgtagctatccttgaaggttcagctgaggcgacagttaagaaattagtatgggatagtccttttgcttatctcatgccgttaaaccctgcatttaagccaatacagattgatggtaactgcagaattgtgggtaaagttgtacagataactcaaaatatttaa

SEQ ID NO: 95678 - DNA, 198 bp, Enterobacter aerogenes
atgctcaaatctaaagtactgaaacatttcggaggcgtatcaaaaactgcaattgccttggggatttctcatccagcagtttgccgctgggggaaggtgattccagaaaagcaggcttttgttattgatcgtattaccaatgggaagctcaagtacgatgccaggctttatcacaagtctaccaagtcggctgcttaa

SEQ ID NO: 95679 - DNA, 198 bp, Enterobacter aerogenes
atgagcaatttaaccgcaaataatcagcgttcgcaacttcgcgcattgccagttcgcggtggtaaaggcgttattgcgtattgctatgccgtaagaataccgggcggatgggcccaggttaaccacagctttaccgaatgggctgtgggggactttattgcaaagggagggaagcagaatggcgcaatggataaataa

SEQ ID NO: 95680 - DNA, 720 bp, Enterobacter aerogenes
atggcgcaatggataaataacctcactgcttcatcagttgcttctgtccctgcctttactgctagcagcgtaaccatgagtagccgtgagattgctgagctgactgaaaagcagcatgggcatgtttgccgggatattgaggcgatgctgaaacagctaggagagaagccggaggggtatatccaactttggacacacccccagaacggccagaagtaccgcgagtatcgcctcgatcgtgagcatactgaatgcctgatcactggttacagcgcggtacttcgcatgaagattatccgtcgcctgcgtgagttggaagatagcgctaatgctattccacaaacgctgcctgaggcgcttcgtctggctgccgatatggctgagcagaatgcgcgcctgtctcacaaggtccagcaggacgcgcccaaggtggcgtttgtgaatcattatgtcgaagccggcggcgccaaaagtctgcgtgaaaccgcaaaaatcctgaacatgccggaaaaggccatgatcgacacgcttctgcgtgacaaggtgctgttccgtcagtcaggcaacttgctacctcatgccctgcgtcagcgtgaaggcctgtttaccgtcaaaacgggtacatctgattatggccatgcctacacccaaacacgagtaactccccgcggcgtccagtggatagcacagcgttacgcctctgaactgatgggaggttga

SEQ ID NO: 95681 - DNA, 759 bp, Enterobacter aerogenes
gtgatccattaccacggaggaccaattacacccggatcatgtgcgatcagggcttggacagcacggcacgcatttatttcacatgcgtatatggaacaactggaattggctgctgcaatttgtcagtcgtttgcatttgataatggtgcgtttactaaatggaaagaggaggggcgaaatcgtcctaattggcagtcctattatgaatgtatcgaggaatggggtaatcacccgggattcgacttcgccattattcctgatgtgattgatggtggggaagatgagaatgataaattgctgagggattggcctttcggttcatttgtgggcgtacctgtgtggcatatgaatgagtctgaagcccgctttatccgactttgcaacgaatatccgcgtgttgccattggtagttgcggtgagtatgacgtgcgtaaacctaccatggctgtagctcgaatgaaggacattattcggcatgtactggacaagcatgatcgcccaatttgtaagcttcatggattgcgtatgctcaatccacagatattcacaaaattacccctttcatcagctgatagcaccaatattgcccaaaatattggcaaagatgtgaattggaaaaatggcaattatcctccagcctcgaaggagaccagagcgtgggtaatggctgagcgtattgagtcaaataatagtactggcaggcttgaatatgaccccgtagccgataaattgtgtccccagttggctctggaggtttga

SEQ ID NO: 95682 - DNA, 696 bp, Enterobacter aerogenes
atgaacctacaaaatctggaatatacccgtattgaagttcgtcgagcgttgttggatttatccggggcaacaaagggacaactcgaggcattcatcgagaacccaccagcagataagattaagaatccgcggcgcgccccctatcttgtcgagctggatggcggcgttggttgcggtccgtcagtggttaaagccatgacggctcccgtctatgtgatggagacacatagccgccgcagaccgatgccgcctattaacgatgttgagttccgttattcgccatggcgccgagcagtgaatcaactggaagcccaccagcaagcgtgggtgcgttattgctatggctttgatctcaactttcattatcaaacattaatgtgccagcacgtctggagtgaataccagaactaccaggtaagcaaaccgttgcaatcgagagtaatcaaaaaactggtggggctggtttggctagcggcacaagaagttgcggcaacccgaaataatgaaacctataaagactatgctggcgcagcgttggcgcggatgattagcgtagatcgttcgacttggttgcgggtctattcaagccactgggccgccttaaaggcggcgtttgtggatctagatgaacatgcgctggtggccgcactagagaattatgaggatggatacgtgctaaaaatgcagcaaatgtga

SEQ ID NO: 95683 - DNA, 603 bp, Enterobacter aerogenes
atggtttggagtggcacgcctttcccatttattgattcactaatgaaagataatattgttttgcagatcacaaaattacccactctcatggtagatagtggctttccttgggaaaatctagtcggttctttcattgctggtagtattcctgcatttatcgcatggaaaactatcaaatataataatgaacttataaaacgacaaattacagttgctgcacaacaaaaaaaatgtgatgagcttagggaattattttctagattcctgtctctttatgagtcaactataaattatgtagacttactacttagtcaatatctggaagaagacgaagaactaccatttgaaaaatatgctgatattaaagacgatcttactaagcttgcgcattgtaccaatttgatttaccttatgatagggacgaataatgaatactatgagcgtttgactaacactgtaaataaatttgaagagaaagtttcttcatattttgatgattacaaaaaaaactcgtcgcatatggttttctcgattagaaatgacgttaaagagtttcttgagttatttaatgaaattctagaggcggagcagtcaaagatttaa

SEQ ID NO: 95684 - DNA, 333 bp, Enterobacter aerogenes
ttgaaaacgttgaaagtcacaattacagaccttctacagattaaggctggtattgtctgtggtgccaaagtcacatttaaagtcattcagtctggttacgttctggtggagaaggttgtttctggcaaggctaccggcccgtttactttgtcttatgatgtagatgcgaatgatggaccgctggtagttgaacatgatcgccctgacattcagagccttagaataacagcgtcattgacatcgaaagctcagaatgaggcggccctaaatcaggccgcagatgagatcgttaaatccgatggttctattgcttaccgctcagggtggctttag

SEQ ID NO: 95685 - DNA, 246 bp, Enterobacter aerogenes
atgaccacatttaaatttgaaactattaatactgacgtctcttcaaatcccgaggatgttggttacgctctgataggtgcgtttgcagcacttgcttctacggtcttgggtgacgatcaagaaaaacaggccgagcttttccacaaaatggataaagctctcgaatacaataaagaaacatcgtcatatattgaattggctagaattgctcaaataactaaagccaccctgagcggtaagcaatag

SEQ ID NO: 95686 - DNA, 834 bp, Enterobacter aerogenes
atggcatcctctgagttacttcgcgttcgcagacgatcgcaaagcaagaaagatgttaacaaagcttacgaaaatgccttacgtaattatatcgttcattactcctgcgagtccttttacgacaacacttccgggcaatctcgtagagtgacgtctattgctgttcgtaaccttgattcagctcagactcagtcttggtcactacactcttctgcagaattattaggtctacagaatcagatccaggctaatttagatgtcatagaaaaacatctgctttcggaatactttacctttctacaaaatcatgcagactcaacatttatccactggaacatgcgtgataaatcctacggtttcccagctcttgagcatcgattcaaggtgttaggcggtcagccctttattcttcaagacgaccgtaaactcgaccttgcaagagtactaataaacctttatggtcctggatatgcgcctcatacctgtcctatcacaggaaaacgcggcaggatcatgagcctgatggaaatgaatcggattaccagtagagattctttacaaggcaaagaagaagcagatgcttttgaaaatggagattttttgaaactagatcggtcgactcttgcgaaagtcgatattttccataactttttcgatcgtctccatgcaaacaaattaaaaacaaatgctactttttcagacaaatatggcttcaagttagcagctatacctgagcttgcgagagataatccctttatcattgctttcattgtgagtggtggtgtaattgctgctttaatcaaatggtgggatgccatcaagctgtttttttaa

SEQ ID NO: 95687 - DNA, 303 bp, Enterobacter aerogenes
atgccatttgtaggcccggtaagcgtagcgccaccgggcagggtgtggttgatgtcgtttgtaggcccggtaagcgcagcgccaccgggcagggtgtggttgatgccgtttgtaggcccggtaagcgcagcgccaccgggcaggatgtgggttgatgccgtttgtaggcccggtaagcgtagcgccaccgggcagggtgtcgactcagtcctcgaagaaccagtatccgctgttgaccagcgccgccagcatggcgaggaaagatgggtcttccagcgcatcgccgaaatgttcggcgcgtag

SEQ ID NO: 95688 - DNA, 627 bp, Enterobacter aerogenes
atgcatcttaattcaaaaaaagaagtcaacatagtttcactgagttctgggcagagaacattattcggcaatgcaattgtattaagtggatatgtagaaaaaaactgcatgatatgtattgacgaaccagagaatagtttacatcctgaatggcaacttaattttatgcgtttcatctctcttttatgccccgacactcttgaagctcatatacttattgcgacgcattcacctcaaattatttctggtatgcagtttgataatggttgtgtgctgtccctagaaaatagagataattttgattcaataataagaaaagaaaacaaatatgaagaagatgggttttatgaactacagcctttgaaagcctatagagagcagtctgctggaaaacaacttacaggtgtttttaaaagccctgggtataaaaatgactttatcataaaaaaattactcttaatactgtctaagatatcaaaaaaaatcgctcttacaaaagatgataatgaatttatggacgaaatcagcatactcattgataaaaagagaataccggaaggagaccctgtacaactgatattcaagcagatccttagctttgagtatgcaaggaactctgatgattaa

SEQ ID NO: 95689 - DNA, 675 bp, Enterobacter aerogenes
atgattaatagacctattgtatacagcgcaacagctcaggaatttgtagatacattcaatggagacgcctcgcattgggatggtacgtgcgcagtgcgtaaagccttccgaaaagaagttagagattatcatcgcgatgaacaagagttcacatgtccttattgtgggagattaagagaagaatttcatggtgggcaatgggatattgatcatattatccccaaatcttcttacccacaatatctctacaccccaagaaatcttgctgttacgtgcaaagactgtaatacgcataaatccaaaaaaaatccactactaattacactcgacagcggagcaccctaccctgagaatactgtgtcttacaaaataatacatccgcattttgactcttacaatgaacatattacgctaagaaaagataaaaaaggtcgatcatatcatgaagtaattacagataaaggccgcgaaactttccttatgtgcaatttgattcggttcagcgaagtgatttgtggcacctctgagtttattcctgagttgggaactgaaattggtatcactaatagctttagtgagtcagttcaagtatggttggcggattatgacgatctaaatcctgtcgatgcggaaatcgccttacaggctctgatgcaaaaaataagcctgcgttga

SEQ ID NO: 95690 - DNA, 267 bp, Enterobacter aerogenes
atgcatttttatttctgtctgtcggccgctctaaaattagccagaaagcatgaagaggctgactcctgtattcaacagaacatgtttatcctgaggtggctgaaaaatgcaaaacacaataaaattttcgacaggaacgtttccccggaaattgaatggttacagggatacattcagtcccgggggccctttttcagatatgctgaaatgttaattgaaaatatctataccactggtcagaaattactctataaggaagagccttaa

SEQ ID NO: 95691 - DNA, 1416 bp, Enterobacter aerogenes
atggaaatattacgctcaataaatagcatattctggggatggctggttgcgggattacttctgggtaccggagtgtttttcgccatcagactttcctttccgcaggtgcgctattttaccaaactcttcaatgctttaattaagaaccgaaaatcaggtgaaaaaaaaggggtgtcaggttttggtgcgctttgcgctgcattaagcagccaggtagggacaggcagcctcgtcggggtggcgacagcccttgcttcgggagggccgggggcaattttctggatgtgggtaaccgcattgctgggtatggggataagcttcagtgaggcgatcctggctattttattccgggaaagtaacggggacgggacatatcgtggtggaccggcctattatatatccagaggactgaactgtaagccacttgccatcgctttttcagtcagtatgatcattggtatgggtttcttttatacaatggtccagggtaactcagttatattagccacaacctccgtgttcgatgtgcatccggtaacgattggcgtgcttctggtcgccctggtctctgttatcatctttggtggcgttaagcgtatcagcgacttcgcttctgtattcgttccttttctttctgtcgcttatattttactgtcattatttattatttctttaaacatcgaaaaattgccagaggttatcgcgttaattgtcaaacaagcgttcaattttgattcagcggcaggtggtgctgcagggtatacaatctatatggcgtttcgttatggtgtggcacgtggccttttttccaatgatgcgggtaatggtaccaccccgagtatgcatgccacggctattgtcagtcacccggtaacacagggttttacagccatgttcgggacatttttcaccactattatagtctgcagctgtacggcctttaccatcctgctcacaggcgcattaggcaccgggcaaaccggggtggaacttactcagagcgcattcagccttggcgttggcgactggggcaaacaggtagttttcgttgcaatgttaatgttcggatttaaatctgtcattgcagacatttattatggtgaggttaacctgcgatggctcattgataataaattcatcacccagatttatcgtcttttctgctgcttactggtgattttgtgtggcatgatcccagtcgcaaccatctgggaactggtggattttgctgcagctatgttaataattttcaacgttccggctttattgctgctttcaaaatatgttctatttgcgcttcgtgattatgcgcagcagaaaaaagacggcattgctgagcctgtatgggactatgatactgatgtcaaagaacgattgcaccgtaaaacggaaagccgtactttcataaaaagctga

SEQ ID NO: 95692 - DNA, 1248 bp, Enterobacter aerogenes
atgaaacagcaatcgaaaaatgaaatctttctggatggacaaatcctgatatcccagctgaatgaactgggtcagatcggtgccgattcagtcaatggtggacgtacccgtgcagccctgactgatgatgaacggctgggcagggatttgcttgtgaaatggatgcaggaactcgatcttgaaataaaagtggacaaaatcggtaacatttttggcacgcttcccgcagctgacgcgagtgacaaccagccgctcatgattgggtcacatattgataccgttgtaaacgcaggcgctttcgatggatgctacggtgttctttccggcctggctgtcgtccgagcgttcagaaaagccgggatccagccttcacggccaattaccgtcgcggctttcacaaacgaagaaggcattcgctaccagccagatatgatgggttccctggtttatgcgggcggtatctcccttgagaaaacgctggataccattggtactgacggaacacgtcttggcgacgagcttaagcgcattggctatgccggtgatatgcagcccggagcaatcgttcctcatgagtatattgagctgcacatcgaacagggccccgtacttgaagcggagggcatccagatcggagcggtagaaaaccttcaggggatctcctggcaggaaatcaccatcaaaggaacggcaaaccatgccggcaccacacctacacgtctgcgtcatgatgctggtttcgcagctgcgagcgtaatcacttttctaagggagctggcaggtaacggcacaacgcttgccactatcggcagtatccgcgtcgaaccaaacgttatcaacgttatcccgcgtctggccagatttactgtagacctgcgtgacccggatgaagcccgcctgaaagaggccgaacaaaaactgacagatttccttgccgagatcggcagtaaagaaggcgtggaaatttctaccgaaaggctggttcgctttgagcctgtattgtttaaccaggacatcgtctctcaggttatcgagtctgcagaacgtttcggactcagctggcgccgtatgacttccggagccggacatgacgcacagatgatcgcacgtattgcgcctgctgccatgatattcgttccgagtaaagacggtatcagccacaacccggccgaatatacatcagaagaggagctgattcagggagccaggcttctactggatgttgttagccatcggctggagaaatag

SEQ ID NO: 95693 - DNA, 1194 bp, Enterobacter aerogenes
atgtttcgcattaacataaaccagttctataccggcaaatccagctctctttttacaactgaaattgctgaagaagcccgccgtttccacgcgcagatcccagggtatgcggaaacccctcttatttcgctgaatgcgctggcttcccggctgggcgttaaagcgatttacgtgaaagatgagtcaaaacgcttcggtctcaacgcctttaaagtgcttggcggctcgtatgcgcttggaaaattcctggctgacaaactgggcgtggatatttcggccattgatttccgcacggtagctcatcaactgccttcgcccttaacgttcacaacagcaaccgcaggaaatcacggaaccggtgttgcctgggctgcacgggaaatggggcaaaaagccgttgtatttatgcctgaaggctctgcacaggcgagtgtggatcgcattaaaggccttggagcagagtgtatcgtcactgattgcaattacgacgataccgtacgcctggcctccgcaaccgctgatgataaaggctggacgctggtacaggataccgcctgggaaggctatgaggaaattccagcatggatttcccagggctataccacgatggcggcagaagcggccacccagctacaatctcagggggtggaggcaccttcacatattatgctgcaggctggcgtaggcgcaatggccggaggggtgctgggctactttgccgatctgtatggtgctgagcggttttgttcagtcatttcagagccggcagccgcggattgtctgtaccgctccataacatcggtacagggtgaacgcgttgcggttggcggcgtgctgaattctattatggccgggctggcatgcggtgaagtcaatcctgtcacatggaatattctgcgtgactgtggtgctgcctttgccagcgtcagcgatgacgtttctgcgacggggatgcgacttctcgggaatccactttccggagaccgacaaattatcagtggtgagtcgggtgccattaacgcaggcctgctgtatctgcttgccacctcatccggtgaggatgcccgtgtgatgaaagagcatctgggcattaatgaagatgcggtcatcctgattttcagcaccgaaggggatacaaacgcagaacgttacaggaaaattgtctgggaaggagcctggcctgtggagtcataa

SEQ ID NO: 95694 - DNA, 387 bp, Enterobacter aerogenes
atgaagaaagatattgttgaaactcataatgcgccgcaggctatcgggccttattcgcagggtatttcttatggtgattttgtctttacatccggtcagttacccctggatccgactacagccgttctccctgccgggggaattaaagaacaaacacggcagtcgcttctgaatgtacaggcggtgcttgaacaaagcggagcctcaatgaaatctgtaatcaaaaccacctgcttccttgccaacatggaagacttcgccgagtttaatgccgtttacagtgaattttttgacgctgatacggcccccgcccgctcctgcattcaggcagcaaaacttcccagggatgccctggtggaaattgaagccattgcccacaaactgtaa

SEQ ID NO: 95695 - DNA, 633 bp, Enterobacter aerogenes
atgcagtcgtactaccggcttgcagacatggttgctgatcttatcggtccgcactgcgaagtggtcctgcattcatttggtgatctggatgcctcggttgtcaaaattgtcaacgggcatcacacggggcgcggtgtcggttcacctatcactgatatgggcctgaaaatgctccgactgtttatgcagacaggtgaagtgaactcccgaagctatttcacccgtaataaagtcggtgaattactgaagtcaacaacctgcgttgtagccggcgagcatggaaaacctatcgggttgttctgtgtcaatatcaatctgtcggttcctttcccagagttaattaaaacacttatgccggataactcaccgcttgctatggtgatggagcatttcagcaccaattctcacgatgtcattagccagtcggcagaaaaagcaattcatgaaattgacagcgattctaatatcagcaagaaatcgagaaataaagcaattgtttttcatttatttgaaaatggaatttttgaattaaaggaatctgcggggattatctccgaaaaactcggtatctcacgacacgctatttataaatacctgcgtgaatttaaatccgctataaaggaacaggagtaa

SEQ ID NO: 95696 - DNA, 519 bp, Enterobacter aerogenes
atgcgggaaatcgtggtgatgccatacgacgacaaatggcctgagatgtttgaagcggaacgttttcagctgcagatcctgctgggtgatgtggctgagaaaattcatcatattggcagtacgtcagtgcccggactcccggcaaagccggtgatcgatattctgctggaggtttccggtatcggcgaactggatgaacacacctccgcgatgagcagcgcgggttatgttgcccgcggtgagaacgggattgccgggcgccggttctttatgaaggggggagccaggcgcacgcatcatgtccatgcgttttcagcaggcgatgcacagatagtgaggcaccttgctttccgtgactgcctcagaaaaaaccgtgacactgctgagagttatgccgagataaaacgtacagcagctttgctgtaccgtaacgatcctcatcgctacagcgccttcaaggcaacgtttatcgagcatcatctgcagctcacgctgatggatcaacatgatgagacgtga

SEQ ID NO: 95697 - DNA, 225 bp, Enterobacter aerogenes
atgccaccggggtggcgtaaaagcattcccgccgaagcactgttacagctgcgtcagcggctggagcgtctgtcgcccaaaaatcctgagcgggcctcacagatcgcggccatgtctgaattgtacggattgtctgccacatcaatataccgggctctcaatgacctgctgaaaccccataccgttcaccgggttgaccacggacatccactttgtcccggttga

SEQ ID NO: 95698 - DNA, 240 bp, Enterobacter aerogenes
gtgtttgaacgtaacctggtgcgggagcgtacacaggcggagttatcagcggcccgccggcgcgggcgtcagggcggacgtccggcgctgctcagtccgacaaaaaaagccctggcgctgaagctacatcaggagcgtaaccataccattgaggaaatctgcaacatgatggggatctccaaatcaaccctgtataactacctgaacaaggcgggacaggatgccaccggggtggcgtaa

SEQ ID NO: 95699 - DNA, 273 bp, Enterobacter aerogenes
atgctgattgggtacgcacgggtttccactgacgatcagcacctcgatctacaacgtgatgccctgacacaggccgggtgtgaacgtatttttgaagacagggtcagtggtgcgcaggcggaacgcgaagggctggcgaacctgataacctcactccgtcccggggataccgtcgttatctggcgactggatcgcctgggacgctcactgaaaaatctgctgcagctggttgaacgactggacgagctgcgtgtcggtctgcgcagtctgtag

SEQ ID NO: 95700 - DNA, 750 bp, Enterobacter aerogenes
atgggtaagctggacggcaaagttgcagtaatcactggcggcagtgacgggatcggacttgcggccgctcaactgtttagtcaggaaggggcaaccgtggtgataacgggtcgggatcaggccagactgggttcggctggtcagcacggtggcggtaagattgatgcagtacgcagtgatatttctgttatgacggatatagagcagctctgtgcctatgtgaaaacacgatatggtcatgttgatattttgtttgcaaatgcaggcgttggcagaccaagattgttcgcacaagtaacagaagaagactttgattttacggttaacacgaattttaaaggcaccttttttacagtacaaaaaattaccccgcttatggccagtggaagctctgtcattctgacgacgtcgacgctggatcaacaaggtcggccgtatgtcagtgtctattcagcaaccaaagcagcgatccgctcattagccagatcgctggcggctgaattgtctgatgccggcattcgggttaatgcgctctctccgggtcttattgatacagatcaggctagaaaagtcggcatgagcgaagaaatgattaagcagtcgaatgcccatttacataccttgatccctatgcatcgcagtggtaccgcggatgaaattgccagggcagctctattcctggcttcagacgattcttcatatgttactggctcagaactgtgcgtagatggaggatgggctcaggtttag

SEQ ID NO: 95701 - DNA, 645 bp, Enterobacter aerogenes
atgaccaggggggcatcccaacagctcaaccgccgcagaatgccgcgtcaggaacgatccatcgtgactgttgacgcaatatttgaggcaaccattcaggttttgttaactggagggccaatacggcttaacacaacacgtgtcgctgagcgggcaggggtttcagttggcacgttgtatcagtatttcccgaacaaacagtccttgctgcttgctctgctggaaagacatctgacctcccttacagacatcgtcgaaaaggcctgcctcgaaaatttgaatactgagtcagctaaaatagcatctgtcgtcgtcagggcctaccttgaagccatcatgtcgaatgcggaggtttctcccgccctttattacattgcgctggacctggatgccggcaggttgcttgatgaagcggtacaaaaaactgttcacgccattgagggactactgacatcggcctgtgatggttatttcgaagaatgccatatcattgcacaaactatggcagcagtcctttttggcacagtgccggcattctgtatgcgggttataccgtccagtgccggagtggaagcagaaaaacaactgacactgatgttacgcgcttaccttgctgcgcaccggcatggtaattacggagaataa

SEQ ID NO: 95702 - DNA, 537 bp, Enterobacter aerogenes
atgaaacgaagaactcggattaactacacgccagagcagaaggcgattatctgggacagatataagcaaggtgattccctgcatgatatcgccagaatgttcgacagatttcattcttctatcatgcctacaatcctacagacaggtggctaccgtcctcccgtgcgaaagcggcaccgtttagcgctttcgcttgatgaaagagaggagatatcgtccggtggtagcaatggcatacgcgatatcaacttttttacctggtctatcacaagcgcgtcccgaaggatttcggcttccattgttttgagtcccagcatttgttcaggctgtttgacttttttctccagcgctttgaccccggagatgctgaccacctcgtcgcctgcggtgatcgcagacttcccaccatcgatcatgaaccgtttcaacttaaaaagaagactgggtttgatgccatattgccgggcaacgagtgagacggtatatccgggctgcatggcgagcgcaataaaacgggctttatcttcgggagtataa

SEQ ID NO: 95703 - DNA, 630 bp, Enterobacter aerogenes
atgttatatatgcgaatagatcagattatgattggaaatatgatcgatgatgcttctgttggcatctattctgttgccgtaaaaatggttgagatttggtacttcgttccaattgcgatagtatcctcacttttccctaagataataaaagctaaagatgaggacaatgaagataattataataaaaagcttcaattcttatatgatttactggttgttattagtgtttgcatagcaattgttgtgactatattttctgactggattataagtttttgttacgggccacattatcatgaagcttcttacttgataaaaatatatgcatgggttagtgttttttatttcctcagctcggcaagcggcaggtggtatataaatgaggggttgcagaaatatgcattaaatagaaatattttaggcttggctattgctatcgtactaaattactttcttattcctagctacggtgctgcaggatctgtttatgctactttgattgcttattcatgtgctggttattttttcgatttcttaagtaaaaaaacacgcattgctttttatcagaaatcgaagtctctatgggttccgggtgctttattgcgcattaagaaaaattttcaaggataa

SEQ ID NO: 95704 - DNA, 309 bp, Enterobacter aerogenes
atgatgactgagttcaaacgcacccaacgtgattatcctctatcctttaaaatagctgttgtagagcaagttgaaaaaggtgagatgacctataaacaagcccagcagcggtatggcattcaggggcgctccaccgttcttgtctggctgcgtaaatatgggcggcttgactggagccccggacttcctgacctggtgaagaggaaactgcccgtggcccagacgactatcccgcttacacccgagcaaagaatcagggaacttgaagaacagcttgaactggcaaaccagaaagctgagtttttttag

SEQ ID NO: 95705 - DNA, 609 bp, Enterobacter aerogenes
atggaccagcggacctgtcgtttttctccccctcagtgcttgtctgaacgcttttaccacgttttctgtctgcaagttttccccaacatggtaacccacgatttttctggagcaggcatcagtgaccagactcagataagccgtaccgctgcacagcggaaggtaagttatatcagcgacccagacctgttctggctcaagggcggtagcctgttcagggccgggtttcagcagattaggatgccggtgaaatcgatgatggctgttggtggttttgtgatatgcccgtttcactggcaccaggagccggtgttcgctcagaaggcaaaacaggcggtcccgttcgatattcagccttttaccgacctgagtgttcagcagatagtgcagtttacgtgtaccgattcgtggctgacgacacctgacccgggaaacaaaatcaatgacatgagcatgttgttcctgtcgttttgtgtgtcttgtattgtcctgataccacgcctgtctgctgtgccccagaaactggcatgcacgcgtaatggttatttttggggccgaactttgcgcgaggacttgccgggccgcttttttacgacacttaccccgtaa

SEQ ID NO: 95706 - DNA, 282 bp, Enterobacter aerogenes
atgaccgatggttatgactgctaccagaatgcgctggctgagcgagtaaacggcatcctgaaaaatgaatttttactctcgcgccctgcggacctggcgcaggtccgggaaatggtaaaagaatccgtgtcaatttataaccatgagcggccacacctggccctgaaatacaaaacgcccgatgaagttcatcaggcatttacagacgaaaagctgtcaacctatatcaggactagtcatgtaccaacttcccgactgcgcggcatgcatggcgttgtctaa

SEQ ID NO: 95707 - DNA, 891 bp, Enterobacter aerogenes
atgaaaattttactgattggtaagaacgggcaggtaggctgggagctccaacgttcactgtctaccctgggagaggtagtggcggttgactacttcgatgcggaattgtgcggtgacctgaccaatctcgaaggtattgctcagaccgtccgccaggtgaaaccggatgtgattgtgaatgcagcggcgcataccgctgttgataaagcggaaagcgagcgcgagctgtctgatctgctgaatgaccggggtgtggctgtgctggcagaagagtcagcgaagctgggggctctgatggtacattactccaccgactacgtgttcgacggagaggggagtcactatcgtcaggaagatgaggccaccgggccattgaatgtctacggtgaaaccaaacgtgccggtgagcttgcgctgcagcagggtaacccgcgtcatctaattttccgcaccagctgggtgtacgccacccgcggggcgaactttgccaaaaccatgctgcgactagcgggtgagaaggagacgctgtcaatcattgacgatcaacatggtgcacctaccggggcagagctgttggcagactgtaccgccatcgctattcgtgaagaacagcttaatagggcggtggcaggtatttaccacctggtggccagcggagaaaccaactggtatgactacgcacgctttgtatttgatgttgctcgtacgcatggcacagctctggcggtgaaagaagttaacggtatcccgactacggcctacccgacgccggcaaaacgtccgctgaactcgcgtctgtcgaatgaaaagttccagcgggtgttcggtgtgacgttaccggactggcgccagggtgtagaacgggttgtggttgaagttttaggtaaatag

SEQ ID NO: 95708 - DNA, 549 bp, Enterobacter aerogenes
atgaatattattaaaacagacattcctgaggtcctgatttttgaaccccgcgtgttcggtgatgcgcgcggctttttctttgaaagctttagcagcaagatgtttgatgaggcagtgggtcgtcatgttgagtttgtacaggacaaccattcgcagtcacagaaaggcgtgctgcgcggcctgcactatcagttggccccacatgctcaaggcaaactggtacgctgcaccgaaggtgaagtgttcgatgtggcagtggacgtgcgtcgttcatccccgactttcggtcagtgggttggcgtggtgctgagcgcagagaacaagcgtcagctgtggattccggaaggatttgcgcatggctttatggccctgagtgagacggtacagtttgtctataaagcaaccaactactatgcgccacagtctgagcgcagtattctctggaatgacccagaaattggcatcaaatggcctgacattgatgatattcagctttctgcaaaagatctgaatggattattattgagtgatgctgaagtatataattaa

SEQ ID NO: 95709 - DNA, 933 bp, Enterobacter aerogenes
atgaatataaacgataaaattgcggtcctgctctgcacctacaatggtgagaagtatttaaaggagcagattgattcgataattaatcagacctataagaattgggttatttatgtttcagatgatggttccacggatggaaccattgctattctagaggagtaccagcgtaagttaggagaaggccgtctacacattacacatggtcctcgtaaaggatttgcctggaattttatctcctctttacaaagtaacggctctgactgtaactattttgctttttgcgaccaggatgatatttggtatgacgataagcttgagcgtggtgttcgatatcttgccagctttagtgagtttaataaaccagcggtttactgtggccgtacacaactaatagatggtgacggccatcctattggtttttctccattattcgaatataccccctctttttgtaatgccctcgtgcagagcatcgctggtgggaatactatgattctgaatcatcaggcacgggagttggtatcccaaactccgtgttatgatgaaattatctcgcatgactggtggatctatattcttgtttctggttgcaatggtcatatatattatgacccgcatcctgctattctttatcgccaacatggccaaaatatcattggctctaatatttcaatgacggcaaggcttttgcgcatcagaaagctgatggatggtaaattcaaaaactggaatcaaaagaatattgatctgctgatgagccttaatgaatacttaactcctgatagtaaaattaagttaggaaatttcattagattacgaagcgcatgcctggtcgatcgattgcgtgttttttgtttactaaaaccctatcgtcaaactactctaggtaatattgcgttgtttatggcagtccttttaaagaagttataa

SEQ ID NO: 95710 - DNA, 834 bp, Enterobacter aerogenes
gtgagtcatctatccttaaaaaatacagcattatataaaatgcttgcctcaatatggcgtaataaaaaccttatatatcaaatgacccgccgagatatcagcgggcgatataaaggttcagtgatgggattgttttggtcgtttattaacccaatatttatgcttgcagtgtataccattgttttttcggttgtttttaaagcgaaatggggtgctggagccgttaatgaaccaaagacccagtttgcagttattcttttcgtggggatgattactcacggattctttgctgaaacgctgatgcgagctccgggcctcatcatccagcatgcaaactatgttaagaaagttgtgttccctcttgaaattttacctgttgtgacattactttcagtacttttccatagttttattagtttctgtgtgttacttatcgcgttcataacatttaatggttttcttcattggaccataatatttgcacctttagtgtttttgcccctgattattctgacattgggactggcttggttgctatcatctcttggcgtttatatcagagacatcggccaatcaatcggtattattatgacagtggtcatgtttctctcgccagtattttacccgttatcagcgcttcctaaatcattccagcatattgttttgctgaatcctcttaccttcatcattgagcaagcacgaacagttattatttggggcgggcttcctaattttgctggcttggcggtatacaccctcatttcagttatcataatggtgctgagctatatctggttccagaaaacacggaagggttttgctgatgtcatctaa

SEQ ID NO: 95711 - DNA, 1398 bp, Enterobacter aerogenes
atgtcatctaatgattatgcaattgaagtagataatattagtaaatgctatcaagtttatgacaatccacttcgacgtttaaaagattttattgtacctaaaattgatcagcgacttggtcgcgttgcgcgcgtttaccatgatgagttctgggccctccaggatatctccttcaaattgccacgtggtcagactattggcattgttgggaaaaatggttcaggaaaatcaacactactgcaaatccttgctggaacgttgacgccaacttctggtgaggtcagggttaatggacgggttgctgcattactggagttgggggctggtttcaataatgattttagtggccgtgaaaacgtctatcttaatgcttcgttacttggtctgacgaaggctgaggtcgataatcgactggatgacattctggctttcgcagatattgggcactttattgattccccggttcgctcttactcgagcgggatgctggtaaggctggcatttgcagttcaggctcagattaaccccgaaatattaattgttgatgaagctttggctgtgggtgatgcaaaattccaggcgaaatgctttgctcgcctgaaacagttaaaggccaatggaacctctatattgtttgtgtcacatgcgacggaacagattgtgactcattgtgatagtgcaatattgcttaacgatggcgagttaatgctgcaggattccccaagggttgtggtgaatcactatcttgatctgctctttggaaagtcaccaaaagagaatgcggaaaaagcgtcactttctgattccattgatcaagcagcaaaaggcgaacaagagcgtcttgatcgtgaaatggcctctgagcaacaacccctgtctgagaatgcaacacccgcctggcaatatggcgatgctggttttgaccaacgagcaaattataatagtgctgagtatcgttggggtgatcgtgccgctgagattgttgactatcatttcgttcaaaatgctgaagagtacccgactatttgccgaaatgatcaacttctccagtttaaatttagaatcaaattcaaccaactgattatcaggccgatctttgggtttgcaatcaaaaccaaagaaggtgtgactatttataataccaatactgaatatcaaggtattcaatttgtcgatgataacacatcaaaggatgagtatattattgccatcgaattcccaggaatactgagccaaggggactattttatttctgtaggtattgcaagtagcgatattgaaggcaatatcatacctcatgaccgtcgttatgattcaattcatttagccgtagaacccacaccaggatttattggtctggttgatcttggtgttaaaatgaagtgttcatcaatttaa

SEQ ID NO: 95712 - DNA, 4209 bp, Enterobacter aerogenes
atgtttcatcttgaaaaaaatggttataaatttctggcacagcatggaatttggtcccgagccgattaccaggatatttcatatagtgatggcgattacgaagaacaacgattagccaagatcatcgcatctgcgaaagatatatccatattttcctctgagctacgtaatcaatgtattgactggcagacgctttatcatctgagttcccagcgaggcaatattttacgcccgttccaggataagctgagaggtaaagtactggagatcggcgccgggtgtggcgcaattacccgtttccttggcgaaaatggtgggcaaattcttgcgcttgaaggcagtcagcgccgagctgcgattgcgtccagccgtacccgcgatctggataatattacggttctcgctgaacgttttgatgattttcaaaccgatgaaaaattcgacgctatcaccctgatcggcgtacttgaatatgccagcatgttcagctcagctgagcatgctgcaaatgccatgcttgagaaaatcagaggttttttaaaacctgatggttttctttttattgctattgagaaccaacttggtctcaaatactttgctggtgcgccggaagatcatctggcaaaaccgatgtacggtgttgaagggcgatataagtctggcgaaccagagacttatggcaaagttgccatcgagcaactgctgaaaggaagtggctatcatgccgtcgagtttatggcgcctttcccagattataaaatgccgacctcgatcatcactgagcgtggatgtaaacttagtgagtttgatgcaggcgcttttgcctggcaaaccgttgccgccgacccacaattgccggctatgctgaatttttcattgaccgacgcctggccggttatctttagaaataaccttggcatggatctggccaactcgtttttgattgctgcaaccgttgctgattatccggcaactgatgccaacatcttagcgtatcattacagtacacaacgaaaacctgcatatgttaaagagactattttctcttcagacaatgctgccgtaaatattcattatgaaaaacttgctgagtcggcagaaaccgagcagggcaactatatctgtagaatagtagataaacctgtctaccataatggttttccgttcagttttaagttcgtgacattattcacctcacctgaatggcgtatagcgcaggttgttactttgctacgtgaataccttgcgcatttgcagttattgcttgcaggcaaaggacattcaactgacctccatcagaccattccaggtgagtttattgatgcgttgccgcagaatatcattatagataacagtgggcagcctcatctatttgattgtgaatgggcagcacctaagccaattgagacaacgtatcttttattcagaacgctcaatatcctcttacggcaaagtgcccgggtaatgctaccggctgaaaatccagaaataacccgccaggagtttattcttcaggttattagggaatgtggtttcacgcttaatgaatcagaactgaatgcttttaatgaacaagaaattattttccagcagcaagttacaggcttaagtaagtcatatcttgacgtctggcaccctgatgcacccttgagtagtggagcgtcctcattttcctctgaaggtcgtctttattaccgcaatggtgagcaggaatttacccagttgcaaagctcgtcttttaatctcaaattcggtcagacggtctcacattcactagatgtatcggttaacccaaatgaaaagcactatctgagactggatccttcggaaaccagcggttggatattgattgaaaacctgcaggtgaaagatcgagagggtcatgtccagtggtccctgaaagatggcactgccagctatgtggatctctgtgaggtatgcgcgttagagcagggtgtgctgtattattccaactctaacgatccgcaaatattgataccacaagtgtttattggtcagcagataacggttaatgttagtctccagatggccgcacctgatgttgttgctcaagccctggcggaaagaatccgcagtcatgctctaaccgaaagtgaactgagtcagttacagcaggctcagcaaaaattaacggcagagttgctcgagttaaaagcaaaagttgattcacagaacgcgcagctggccaactatgttgggcatattcaggttttgaatagtatcatcaatgatttcagagagtccactagctggaaagtctcaaaacctctccgtattgcgggtggggtgaatctcaagcttaaaaaagcgaatcgactgattacgggactgattcagaagcatggaatgaaagctgtcgcgcagaaaggtatgtattatattcgccaggaaggggtttctgggattattgctcgcctgaaacagcagcgcagtatcagtgtattgcaagaaaacttgaatcttaataccgtacctgccgcctcgatttcatacgataacaaaaccggttatcagctgaaacctggtcgttcagggtactgctatgttgaacctgcacggcctgtcgacctcgctgagcgcattgcagcgatcgaaagtaagcctttcttctctattgtaatacctgtttataatacccctttggatctgctcgacggattgttgaaatcaatcacctcgcaatggtatccgcattgggaattaattcttgccgatgattgcagcccggatcctcaacttcagcaagcattaaaaaatatttcacacccgcagattagaattatccatgcagaatctaatttacggatttcaggtgcgactaatcttggtatcaaagcagcaaaaggggatttcatcgtatttgctgaccatgacgacgagcttacggtcgactgcttgtatgaaatggctctgtgtatcgagcagcagcaacctgatttcatttacagtgatgaagataagcttaccgaagacggggactatacccagccgcacttcaaacccgattggtcacctgacaccatgatgagtacgatgtttacttgtcatgcgtcatgtgtgcgccgcagcctgttggaaaaaaccggtctgttacgttccgaatttgatggctgccaggactgggacttcgttttgcgagttgctgaacatactaaccgtattagccatattgataagatcctttatcactggcgaatcattccggcttcagtagcatcagatattgctgctaagccctatgttctcgaagcttcgcggcaagtgcgagtcgatgcgttaaaacgccgtggattacaagggaccgtcgagcctgtgactgaggtcccagggtatttccgtgtcaattatcatctgacgggtaccccgctgatttctatcattattcctacccgtgataatgcggaagttctacgtcgttgtattgattcccttatcgagaagacgaaatatgagcattatgaagttatcatcgttgataacggttcggtggcggaaaccacgctggcttacttctccgagctaacgtctgtttcgcgtgtgaaggtaatacatcatgatatcccgtttaacttctcagaattgaataacataggggttgcggcatcgtcaggcgatattctactgttccttaacgatgatactgaagtgctgatggatgactggctggagcgaatggcgggatatgcgcaacttccacatattggcgccgtcggtgcaaaattgttatatccaggcactcagcaaattcagcatgctggtgtgctgaacctgcagtgtggcccggtacatgccttcttgcgccatgatagcaatagcccgggttactttatgcgtaaccttctggaatataactggctggcggtaaccggagcctgtctgatgatcgaacgagaaaaatatcagaagattggcggatttgatgaatctttccctattgcttataacgacgtggatttatgttttacattgtcccaaaatggcttctataacgtcgtatgccaggcggtaacactttatcactacgaatcgattagccgcggtttagacctcgtcgaccctgttaaacaagagcgtctatttagtgagttacgtcgtttgtatgagaagcatcctaatttctatcagtatgatcctttctacaatgtcaatttagctccgaatggaattaactttgatttaacagcttaa

SEQ ID NO: 95713 - DNA, 1791 bp, Enterobacter aerogenes
atggacgaactttcgaagggccagcttctttgtgaacctaaactggctaaaatgattgatgtggctgaggttgtttcattcgatttttttgatacgttatatctgcgcccgctttcagacccggaagatgcattcacccttttaggtgaaaaactgaatattgagaacttcaaggccaaacgccaacaagcacaggcagatgcttttggcgttatggttcgggaagggcgtaaagaaataacccttgataatatttatagttgtttcccagattgtcagtacacgaaagacgcgctgatgcaggcagagtatgagctggaactacagcttatcgagcctaactatgagttgttcccgctgtttgagcagttgcttgcagctggcaagcgcgttgttatcatctcggatatgtatttttccgcgcgattcttcgatcaggctctggcaaaacagcaaattaatggcgtggctgttttttcatccgcagatgaaaatgcaaccaagcgtgacagcggtgagttgttcactcttgtcagtgaaaagttaggggtaccaccagctaagattctgcacattggtgatagtgaaattggtgattttaaacgcccggcggagaaagggctgatgagttaccactatattgctagtcgttttcgtgagaagaagaaaaatgtcagtctgagcacttcattggctgaaggcttgctgcgcatggaggcccgtgagatagattatggttcgtatgaagagctgggctttttaaccggtgggcctgccagcgttggttttcttgagtggattaaagcaaaatcacaagctgacggtatcgatcatattctgtttttcgctcgcgacggttatgttctgaccaatgttgcgaagcagcagatgcagtcggagttaccaccgtttaattatttttatggttcccgtaccacctttactctggcggcaatcacagacagtaatttcagtgcttatattccttttctgatctctggatgtgatgggctggccccgtgtgaggtacttgaaaggattggggtgaaggttccggcgcgagatatcatgaaagcctttggtctcggtgacgatatagtgataaccccggcagtgcatgataaattggttgagtttttgtacgcttggcgttgggaaattttaaaggtgtgccagcgtaatcgtcgcgcgttattccagtatctgagacaagttggaatcaaaagccaccaaaaaattgccgtagtggatgtcgggtggagtggtacgacccaagaagctttcagccaggcaataagtacatttatgaaagtggatatttatggttattacttctgcctcgctgatactcaggaacggttacatcgacaaaatacgatgaatatggcggcactttttgatagttcaaatagtagtcctgatttggttgggaagatatacagtgccagagtcgcggtggaatttttcttttctgcacctcatgcttctattatcggattattaccgggagaaccggtaactcctatagaagatcctggacgcggtgcggatcaaagtctctccgaatctgtaaacgcattgtgtcgcggtagtgagcattttgctcaagttttctatcccgctcgtcagcgcctcggtttatcattaagtccgcaaatgctagcaatgcctatgattgagttagcgagtacagaaaactgggataagtattcgttaataacctgccttaaaaactttgatgcgtggggaagttcacgaaataagcaactggttgccaccgactatttgtga

SEQ ID NO: 95714 - DNA, 1425 bp, Enterobacter aerogenes
atgaccgatcatgtgataactgaaagtcgtaagttggcaagtgacaaacgcatcaggctcataaccctggtttccaccattggcgggctgtgctttggttatgacaccggcgtgatttccggcgcgctgatatttatgaaaaacgatctcggcctaagctcgctgcaggaaggtctggtgacctcgtttttactgtttggcgctgctatcggttcggtggctggcggctggctctctgaccgtcagggacggcggaaaaacattctttgggtggcgattatctttatcttcggtgcgctgggtaccgcttgcgcctgggatatgtcgtcgatgattatcgcgcgctttattctcgggctggcggtgggctgcgcctccgtaacggttccaatctatatttccgagctggcgcgcccctcgcagcgtgaacggttggtgacggtgaatgagttgatgatcgttagcggtcaatttctggcttattcggtcaatgccgcgattgtgaacttctatcccgatatgtcgcacaactggcgcctgatgctggcgatcccggcgctacctggggcgctattgtggattggcatgctgatgatgccggaatctccgcgcttctttattcgccaggggcgggccgacaaggcggtggaagtattgagaacgctacgtcatccgcaggaggtggaagcggaaatccgtgatatcgaacgggtaaaccaggtcgattccgtgcacggaaggttcattgacgaggtcaaaaagaaatgggtgcttcaattgatattgattggcctgatgatcgtcctggcgactcgagttaccggggtgaataccatcatgtactacgcaccgacggtgctgaaggcgaccggccttggcgatgccgctgcggtaaccggcgcggtcgccaacggcgtggtctcgatactggcgacactgctgggcatgctgttaatcggtaaacattcccggcgcaaaatgttctttaccgggcagattggtgtcaccctcagcctggtatcgatcggcctctcgtttaagttcttttttcaccttgaaacgattgaaggcgttagcagcctgcacgcgaactttgccggtgccagctacatcatccttggcttaatgctgatgttcctgatttttatgcagggctggatagcgccggtcttctggctgatgctggccgaaatttatccgctacggatgcgcggcctggggatgggattatcggtcttcggcctgtggatcttcgacttcatcatccagtcggtattcccgattttacttaaccactacggcggcggcatgaccttcggcgtctttgctggcaccaatctgatcatgttgatgctgttggtgaaatatctgccggaaacccgcggattaacccttgagcaaattgagcaaaaattcagattctaa

SEQ ID NO: 95715 - DNA, 1011 bp, Enterobacter aerogenes
atgactgtgaatatcggtttaattggattgggaatgattgggcgcgatcatctacagcgcttccggacggtgattaaaaacgcccgcgtcagcgccgtatgcgatatcaaccgcgaagttaccgatggtatcgcccgcgaatatggtgctacggcatggtatgacgccgtagagatgatccactccgatgaggtcgatgcggtctttatctgctctatcggcccggttcatcaacagcaaatcctcgcggcaatgaagttggggaaaccggtgttttgcgagaaaccgctgaccccaaccgctgcagaagcgcaggcggttattgatgccgaagtcgcccacggcaaacgcctgctccagctcggctttatgcgtcgctttgaccccggttataaccagctaaaggccacgctggatagcggtgcgctgggcgaggttctactcatgcactgcgcgcaccgaaacgcctcagtgccggaaagctacacccttgagatggccatcaatgactcggcgacccacgaaatcgacattattcgctatctgctaaatgaagatatcgtttcggtgcgtgtggataaaccacgcaagaaaacccgccgcgcctgtgcccatttgcaggatccgctgatcgtgatttttgaaactgcctccggcgtgcgtatcgatgatgaactgttcgtgaactgtgattatggctatgacatccgttgtgaagtggtgggggagaatgcgattagcgcattgaccgaacagtcgctatgtaccacgcgttcggcacagggttacgcccgcgccattgccagaacttgtatggagcgttttgccaccgcctatgaccgtgaagtacagcactttatcgaccgggtcagcgcgggagccgcaatgagtgggccttcatcctgggacggttttgtggtggcgaaagtctgcgatgctggcttagcgtcgctacgcgatggccaaacccaccgcgttacgctgccggaatgcccggcgttgtatcgttaa

SEQ ID NO: 95716 - DNA, 432 bp, Enterobacter aerogenes
atgttaaccctgaagcaagacgacatttttattggctgtcgggcgaattcaaaacgcaaggcgctgcgtattgctgccgatgcgctacaggccagcggctacgtgggcgaaggctttttcgcctcaatggttgaacgggaaaaaatgctatcaacctggctgggcgccggcgtggccatgccccactgtgcgaaagacggcatcgaccaggtcctgcaaaccggttttcagctgtttcaattccccgacggcgtgggctggggcgaggggaaggtggcttttctggtggtcgccgtggcggcaaaaaataaccaacatatcgatgttatcgccgatctggcggatctgctcgacgatgaagtcaaaacgacgctactggccgctgccgacagcaaagaagcgtttatgcaggtcctcgacgatacaaaataa

SEQ ID NO: 95717 - DNA, 942 bp, Enterobacter aerogenes
atgaaactggcactctgtaccgatgttcttgccgagctgagttttgtgcaaatgctcgatcgcgtgaagcaatatggcattagcggtgttgaaatgaccgccggcggctggtcgccctgtccgcatgttgccaccgatgaactgctggcttccccatcgaagctggcggcgttccgcggcgagctggagaagcgcgatatgcgaatcgtggcgctgaactgctcgggtaacccgctggcgccgggcgcattaggcgagaaacacaccaccagcagctataaaaccctggagctggcgggcaagctgggagtcaagaaaatcgtcatgatgagcggcctgccgggtggttgtgcagaagataaaattcccaactggatcacatcgacggtctcctggccggactatatgccgggggttatcgactaccagtggaatcaggtggcaatcccctggtggcagaacttcgcccgccatgccgccgaacacggcgtggagcaaattgcgctagaggagttcccgagtcagctggtttataacccctccacgttgctgcgcctgcggcaggcggtgggcggtattattggtatgaacctcgatccgtcccatctgatcgccatgggcgcagacccgatcgccgcggtgcgtaagctggaaggggtgatctatcatgtccatggcaaagatgcgcgcattgagcgcgggctggctgaggttgatggtctgctggaatataagccggtaaccgacaccaaaaaccgcacctggaattatgttgccgtcggctgcggccaggatctgcagtggtggaaaacctttttctcggggctgcgcatgaccggttacaacggcgatgtttcgctggaaatggaagatttgacgatgagtgttgaggcgggtttgcggacctcgattgatgcgctcaacgcctcgctgagtcagtaa

SEQ ID NO: 95718 - DNA, 873 bp, Enterobacter aerogenes
atgaaagcggccaaaacgcttggctatcggcccaatttgttggcccgcagtctgacgcaaaagcgcacccatattatcggcgtggcggttgatgaactgcgtaaccccaatatggtgctgctcctcaatgaagtgacccgccaactgcaaagccgtggctacatggcgctgctgattaacgtttccgaacaacaaaataaccgcatggcgatgtcgctggcctatcaactgcaggtcgacggcattctgtttatggcaacagtactgacaccggagcttatcgccattgccactgaaatccatcgcgtaccgctagtgcagattggccgtaataccgatcatcccgatatccaggttgttaatattgatggcgcggaagccggaagggagatcggtgaactgctgctgacgcaggggcaccgttcgtttggttatctgaaagggccggataccgcatcccgccatctgaggcgtaaagagggctacgagatggctctggagcaggccggttacgcgctgaactgtgagttaattgccggggaatatttacgccatcggggctacgaagcactatgcgcctatcttgatgagacgcccgttgcgcagcgcgtaaccgcgctgttttgtgaaaacgacattctggcgatcggcgctctgcaggcgttacgtgaacgcggcgtgaccatgagcatcgtcggattcgacaatatcgaagaggcatcggcgccggaatggcagctcactacctacgatcagcggcgcgagcggttggtggaagagggtctgaaccggcttattgatggcgttattggcgatccggaaagctggcgacgcggcgagctggtggtgcgccagtctcatcgccgcgggtaa

SEQ ID NO: 95719 - DNA, 1917 bp, Enterobacter aerogenes
ttgaatcgaatactcactgccattattttgtcgctttttatcgtcaccggatacattacctatctggtgcatgagcggcagagtgagctgcaaaaattaacccgttataccgactcgtggtctgtgtctcagatggtctccgaatacatgcgtctcgaggctcgtttaagtgccctggcgctgaacgtgaaggggaccgaccgcgatgaggtacgcctgcgcctggaaataatgatgagtcagatcgagctgctgcaacagggcgatcttggccagttcatcagaaaaagcgagcagcggcaggcaacggtgaccagtctgattcagatcctcgatcaactcgatcggcaactggacaccatgacgcctgagcagatggtgactctgctgcataccatgagtaagttagatggtccgatgacctcactggcctccatgaccctggcgcaggactttgatgtcgttaatcttacgcacgataagattcagcatctctattacatctattcggtgatttcaatcttgctgattacgatgtgtatcactcttgggctattgatgcttcggcaaaataacaacttgcgccgcgctcatgtgcgcatgaaattgctcgcgaatgatttgcagctatcgaaagagaaactgcaggtacagaaccgccggttgcaatatgatgcttatcacgattcgttaacaggcatgcctaatcgcctctctttctggcagaggctacaggaagtcgtcaatcatgtgaaaccttatcatggttgcgcagtggttatgttgttcgacctggataattttaaagatgttaacgataccctggggcatgatgctggtgacaaactgctgcaggagctcgccagccgcctgtcgttcttccgtaaaacatcagagacgctgtaccggcttggcggcgacgaatttgccctggtatcgcaggatctgagcgaagaaatggcgctggagcgggcggatgtgatccgcgagaaaatcagccagccgtaccagatctacgattcattaattaacatcggggcttgcattggcatcgtaatctccgatgctgaaagccgcactgattacttatacaaatgtgccgatctggcgttgtatgaagcgaaaaaatccggtgcgggacatgtggagattttccgtcccggcatgttgcaacgtttacaggacaacaaatcctttgaggacgatctgctgcatgcgctggaaaatgaccagttcaaggtttactaccagccgatcgccgacacggtgtcgcgtgaaatttatggttacgaagcgctggttcgctggtttcatccgctgcggggcatggtaccgcctacggaatttatcccggtggcggagaaaaccggcctgattaaccaacttggcgagtgggtgctgaagaccgcctgtgaggaagcggcccgctgggagcaaccactgaaagtttcggttaacgtctcaccgattcaacttatcaatacctcactcacagacacggtggttgcggtgctaaagaagacgggcctcgacccgcggcgccttgatcttgagattacggaatctgatgtatttaacgaaaatacgcgctcgctggagatcctcagccagttacgcgagcaggggattcagatttcgattgacgattttggcaccgggtattcgtcattgtcacggttaagttatttcccctttgataagatcaaaattgatcgctcgtttgtggtcaatatacctatgcaaaaagatgacctcgatattgtgcgcctgatcatcagtatggggaaaagcttacatatgcgcattgtcgccgaaggtgttgaaaccgaggaacaattaacctcgctgcaacaattgggttgcgatctcgttcagggctatttaattggcaagccggggcagttaaataacaactga

SEQ ID NO: 95720 - DNA, 240 bp, Enterobacter aerogenes
atgtcaagaaaactagctcctggttactgtatcgtcgaacagccgggctctatatctcttcaggctgggttgttattccgaaaccgcaatagcagtgccgcgcgttactttgaacagctaaatgcaggtacgccttgggtcaaacctgggcaaatactcattgtcgccgacccaaatagcacgatgacagaacagacactccgtttgctccatcaggcaaaactgatcttgcccacgtaa

SEQ ID NO: 95721 - DNA, 1086 bp, Enterobacter aerogenes
atgttcgtcgtcggcggggcgttatttgaaaccgggatggccaataaagtcggcggggtgatcactcactttgccaaaaccgaaaaacagctgattttcaccatcatggtggtggtcggcgtgatgtcgggctttctttccaacaccggtacggcggcggtgctgatcccggtggtgattggcgtcgcggcgaaatcgggttttgcccgctctcgtttactgatgccgctggtatttgccgccgccctcggcggcaacctgtcgttgattggcgcgcccggcaacctgatcgcgcaatcggcgttacagaatatcggtagcggctttggcttctttgagtatgcgaaagtgggtttaccgatgctgctctgcggcatcctctatttcctgacgattggctataaatttctgcctgctaccgggaatagcggcgaagtcggcagcgtcggcgaacagcgtgattacagcgacgttccgcgctggaaacagatcctgtcgctggtggtgctgatcgtcacgatcctcggcatgatttttgagaaacagaccggcattagcctgacggtggcaggctgtatcggtgcgttggtactggtgtttaccggcgtgctgacggaaaagcaagcttacaaagcgattgattcacaaagtattttcatttttggcggcacgctggcgctggcaaaagcgctggaaatgaccggtgcgggcaagctggttgccgatcatgttatcggcatgctgggccagaactcttccccgttcatgttgatggtggtggtctttgtactgtccgtcatcatgaccaactttatgtccaataccgctaccgtcgcgctactggtaccggtgagtttgtcgatagcggccggtatgggcgccgatccgaaagcggtcctgatggcgacggttatcggcagttcctgcgcctacgcgacgccgatcggtatgcccgccaacatgatggtgctctcagccggcggctataagtttgtcgattacgccaaatccggcctccctctgattattgtttcgaccattgtcagcctcgtactgctgccaattcttttcccttttcacccgtaa

SEQ ID NO: 95722 - DNA, 1008 bp, Enterobacter aerogenes
atgaagcctgtctcttttcttgtgctgttaatggggctgctgctggcccgcggtagtctggcggccgtttgccagaacaccaatggctcgcctgcaacggtcgattatgacctgacgacgacgctaacggcggcgcagaatcaggccggtacgaccacgcaacttagtaaaaaccaggatgtgaacgtgcaggcggtttgtcccgccggctcttcggattcggggcggacgtatcgttcgtatgtcgcttcttcatcgatagtggaaaccaacggcgactggaaatatatgcagctggatggcacctatcttgaaggagcaatgcgcattgaagattcggcggccggggaattttatccaccaatggattatgtctatatgggctatgacgccaacgttaacaatggctcgccttttccggtacatgattcgaatctggtattccagcttaaggttgtgaagccatttattggcacggtaaatatcgagccgaagaccatgtttaatgtctatgtcactaccactggcgacgatccactgagtaatgtggtgtacagcattgtctacagcggcagtgtgacagtgccgcaaagctgcgaaattaacgccgggcaaaccattcttgtggattttggctcgctgtacagcggcggcttcaatcgcgccggggaaaaaccgagcggtgtccgtaagaaaagattcaccgtgccggtgaagtgcagtggggtggattcacaggtcaacttaagtctgcggttgatagccaccgccgatagccacttaagccaggccattgcctctgacaatcctgatgttggcgtggtggttgagagcagcgacggcgcggtattaacgccgaatgacgccagcagcgtcgagcctttcacgacggatgaatacggacgcgcgactatttccctacaggcgtatccagtcagtaccaccggccagacgccggcggagggggccttcaccgcgctggctaacttacgggtggatttcgactaa

SEQ ID NO: 95723 - DNA, 693 bp, Enterobacter aerogenes
atgaaattaactagtttcgaaaatgataatgagaatgtcttgcactcatatattttctctcagcaggctaaaccccatgctgcgattgatgccttattttctgcactcctgccatttggcaagcctttcatcgtgcagccgggtgaagaattttcgctgtatacagagcagagcacccgaattgtgttactggagtccgggatcttctctatttgccgcagcgacagagggttgaatgtgctatcggtctttgccccttcgcttgcagggctgatagatagctatggcgtgacatacgatgttcccacccgcccggagcattttttgattgctgaaacagaatgccgtggtcgtgcggtctcgctggcggattttattaaagtgacggatgagtgcaatctttggcacgacgttgcccgtttccttgcctatcgtctgatggtgatgaacgttcgcgaccgggagctggttggcgttgattcttatcttaaggttcgcgcgttattaatcgaaattgccgcctacaacgacgaatatcgccagagcatcaatgttctcaattttattcaacggcgtactggaatatcgaggagtcgtaccatgaagcttctttcggaattgcgaaaaggcggttatatcaatattgatggtggacgtctgttaggggttaaaaaactgccgttggcttactaa

SEQ ID NO: 95724 - DNA, 879 bp, Enterobacter aerogenes
atggaactacgccaatttcgttacttcaccacagtggctaaactgggtagcatcagtcaggcggccaaagagcttcatatcgcccagccagcgttaactcgtcagatccaaaagctggaggatgatttgggtgtgctgttattggaacgaacgggaaggggagtaacgcttacagatgccggcactcaattctggttagacgcggaaaagttgcttgatgctgcaggcgcagcaagggagcgagcgtcacgtgcttcacgcggagagagtggaaatatctctcttgctcttcctgttatacaaaatgcagccccctcaataacgagtttgctcagaaaatttaagaacgaggtgccgcatgtaggtatcactcttcaccatcttgtttcggaggttcagcttaaaaagattgcagaaggtcaactggatgcaggctttttattattcagacctcagaatgatccctcatttgaggggatccccattttcaaggaaagaatgttattagcatatccctcagaatggcgttggccagataataaaaaacctcaatatttgagagaattacaagatttggattttatttggatcccaagaactgctgcgcctgcatggcatgacagactcatacattgctttttcaaagcaggttttacaccgcgttccgttatgcagggtgttgatgcggtatcgatgctaacattagtctccgctggaatgggatgtaccattgttgcggagggcacccaacatttggcaccgcctaatgtaacattcttgactttagacgatttaaatttgatacaggaatgggagttagtatggaaaaaaaaacgttgctcggtggttttgaaaaagctgatacaaatgattgaataa

SEQ ID NO: 95725 - DNA, 1203 bp, Enterobacter aerogenes
atgtcctataaaaatgaaatgaagctaaatgtgaaacgtctcacagaatttagacatgatttacatatgtatcctgagctgaaatttgaagaatatcgtacgtcagagaaaatcgccgagtacctcactactttgggcgtccccttcaaacgtggtctggcgactacaggtattgttggcagcatatatgggattaatcgtagtgctgataacccgggcccagctctgggaatcagagctgatatagatgctcttccaatggaagaagctaatgatttcgagtatgtaagtaagcataaaggatgtatgcatgcttgtggtcatgacggacatacagcaatgttgctcggtgctgctgaacttctttctgccgatcgtaatttcgatggcactgttcaccttattttccagccaggggaagaaggcggtgccggagctcgcgtcatgatgaatgaaggacttttcaaagcatttccttgccaggcggtttttgcattacataactggccagatttacttcaaggacagatgggtacaaaaagtggcccaattatggcttcaggaattacatttgaagtcattgttcaaggtaaaggcggacacgccgctctgccacattcgactattgatcctgttccgatagcttgcgtcatagttacacaactgcaaacattagtttcacgccgtattaatccactggatgcagcggttctgactataggtaaaatagaggcgggaagctccccgaacatcatacctgctgaagccagaatttctggaacatgtcggactctgacagatgacactcaattattacttttagagggtgtaaaacgtatttctcactatatagctgaagcacatgatgcacatgccgaggtgattattaacggggcgggctatcccaacaccactaatcatcctgaagaagctaattttatggcaagagtcatgggcgaactggtgggtaaaaataatgctaatactaatgtccgccctgctatgaccgctgaagattttgggttcatgctaaaagaagtaccaggggcgtatgggtggattgggaatggtagcactggcgttgttggtggagatcttcatagtacgtcttacgattttaacgacaaaaacattacgttaggtgcatacttttgggaaaaacttgctcgccaatggtttcttactgaggcaaaaaacagttaa

SEQ ID NO: 95726 - DNA, 1308 bp, Enterobacter aerogenes
atgaacagtgataataatatttcccaaagagtagatatcgaagaaatcgcacagaaaccgacccggcaaagattttatgtgttagcgattctttttattagcctttcggttatatatttagaccgcgttaatatttctatcattgctgcaaacactcagtttttacaagagatggttctggtaggcaaaccgatatacatcggattattaatgagtttgtttttaattacctatggagtttcaaatgttgtgttaagccctataggtgatctcattggcccccgaaaagcgatgcttatagcctatatcattataagcttatctcttcttttgggtgggttatcaagtatatttgggatgttattaggcactcgtatattattagggttgggtgaaggcctttactatcccatgcaaaatacatttatcaaaaactggtttccacccagagaaagaggaagagcaaatacagcatggattttaggacagtctctctccccagctgtcgccatgcctgtttttacctggataattgcagagtgctcatggcggcatacattttatttctcctttgcgttaagtttgattcctcttatcttgatttatttgttcgcaacaaatacgccacgcgaaaacaaatatatcaataaacatgagcttgagatcatagagaaaagcggaaaacccaataacttagtaagtaattcaagtgaaaagccatcaatcattacgcgttctaaaatctatctctgcaatgctaatttttggatgctgctaatcattttctcttcaaattcaatgttgtcatggggagttgttacctggcttccaacctatctgaatactgaacgcggtttttcatggtctaatgtcggctggatgtcatcattaccctttatttttggtttactcttcaagatcgcctccggaattgtagtcgatcgaacgggtaaaaaagggataattatgcttatctctgccctattgtgcgctgctggcattctggctggagtgaatatcactaacaattacatagctgcgataatgatatcatttggtattggggcctcatcaatgcaacttccctgtgtatttaccttgttgcaaggtatggttccttctgaagcgatatcctctgccgcaggggcactgaatggaatggcggtaggttttggtgctttatccccggtattaataggcttgatattaagtttaacccaaaacttttattcggttatgtatttgctgattggtatagtactcatcggtggactggtttcactgctttttgcggtgaggcgcctttaa

SEQ ID NO: 95727 - DNA, 1551 bp, Enterobacter aerogenes
atgaaaaaccagacagaaacagttgttattggaagtggttttggcggtgcaattgcagcgaaacgtcttgcggatgccggacgcgatgtgctgatgctggaaagaggtccgtggcgcgatacggtacccaatcgctcggtaggccttgataaccttgcgcctctgcctcagggaagaaaagcctttacgcacggtttaagatcgctcggatcgcaccgattgaagcgatttgtcctgcttaataagaaaggattcattgaggtctttagtggtaagggcattaatattatctgctcctcgagcgtcggtgggggcagtcacgtctatgctgctatgctggccaaaccctccgatcccgattactgggccaatcgtcatcccctgttatcaaaaacggtaatggatggttattatgccgaaatcctggcgcttctgaaggccagacctgttaacgatgacgattgcgtgccgaataatctcagcctgaccgattatgatggaacattatctacccaaggactggctaacccttttatcgggatcctgcttcctgcaaaacccggcacggttgccaaagtcgtggataacaatggcgtagagcgctgggagtgtgaatataagaataacagcattcttggctcccccactggcgccaaaaccacgctcgatttttcggttgtctggcctgcgatacgcagtggcctagttgttcgtgatatgtgcgaagttactgaaataaacaggctacaaacaagcgatgctgacggtattcgctatgaaatccactatcgcgatcatcataaaaacaggaatgaacatgtgcgtgcccggcatgtgattttagccgcaggctgtctgaacacggtccgtttgctgatgcacagtcgtaacgatagctcgggcctggtggggatgccgcagttgggtaaaggatttggaaccaatggcggctattttggtttctggaaagagaatagcactcacgatctctcaactggtcttcccctatgcggcccgttccgagtagcaaattctaccagcagatccgtccaggtactgcgcgccgctatccagggtctggacgacatgccatgccctgccttccttaaaaaatggtttcgaagaaacgcctttatcgttgcgctgggcaaagacaataacaacggcgtaatgtcgttaaaacgtggcaaattcaacgtggcctataacaaaacggaaagtcacgtctatcaggagatagataacgaagtcagcgagattaaagccaggaccggtacccagatctactccccttcttcacccgtcaccgtccagcccctcggaggcgcctgtctgggtacttctaatcaggatggcgtgattggtgccaacggtgaggtgtttgacaatccgggactgtatatcgccgatgcggccgcgctacccgagtctccaggcagaccacccagcctgaccattgccgcctgggctgccaacgttgccgacagactcctcgacacgctcatgcaagagtctttgcaacagcacggtccggcttcgcaatcccgttag

SEQ ID NO: 95728 - DNA, 1545 bp, Enterobacter aerogenes
atgacaaagcaagttgaagtactgattattggcagcggttttggtggcgcgattgccgcaagacgcctggccgctgcggggcgagatgtcttaatgctggagcgtggtccctggcgcgatacggtgccgaaccgttcaatcggactcaaaaatctcgagccactcccccagggaaataaagcctttacgcatggtctgagaacggtaggctcgcacctgttcaaaaagacattcacgcttaataacaaaggctttatcgaagcttacgccggtaagggtatcaatattatatgctcgtcgggtgttggtggtggtagtcatgtttatgccggttttctggacaggccactggtcgcaaactactgggataaccatcacccggagattagccaggagaaaatggaacgctactatgacgagatcattaaagcctttaatgcccgcccgctgactgctgccgataaagcacccaaccgcattgaagaggcgaattataatggcttgctcacccccctcggcgatccggcaatcggcatgctggtgccagaacagcccggcttcccggtcaaaataacggatcataatggtatcgagcgctgggagtgtgatatgaaaaataacagcttcctgggttcgccttccggggcaaaaactaccctcgactttacctttatctggcctgcggtaaaacagggcctggttgtacaagaaatgtgtgaagccctgtcgatctacaggcttgaatcgcaagcagacacgtccatgcgctacgaagtgcgttatcgcaatcatcttagtgggaaagaagaaagtgtacaggcagaacatcttattctggctgccggagccctgaataccctgcgactgttacttcgcagccgcgacattgaaggggggctcacgggtatgccccggctcggccagaaattcagtggtaacggtgacttcttcggcgtctggaaagagaacagcactaccgacctgtcgaaaggtatgcctattgcttccccttttcgcctcaaagattctactaacgagcgcgttattgtccttcgcgccagcattcagggcctggacgatatccccgtaccgtcgttccttaagcgttggttacgtaaacaatcggtcatcattgcctttggcggcgacgacagcaacggctccgtcactaccaggggcggtaagtttaaaattaactacagtaaaaaagagaacagtatttatgcagacattagtgatgagttaaaaaacattaaggtgcgtaccaagacaaaaatctatgcgccgcgtaatccggttaccgttcaccccatgggaggcgcctgtctgggaacgtcaaacgcggatggcgtggtaggagcggatggtgaagtatttgatcatcccgggttgtacattgccgactcatctgcgcttccagcctccccaggcggcgcgcctagcctgaccattgccgcctggtcggccaacgtcgcggacaggctgataaaaaaactggaagaaagtgacgccaccgccgttaaagaacagcaggcagtggcataa

SEQ ID NO: 95729 - DNA, 1188 bp, Enterobacter aerogenes
atgaccacagaacatgctctctccgtacctgagcaaaataacaatatcatccgcctgtcggccgctcaggcactggcaggagcaaattcggttgtgttttatgctaccggcgccatcgtcggcaacgccatagcccccagcgcgtcgctctcgacgctccctgtcaccatgttcgtcctggggatggcagcgtcaatcctaccatttggcgcgctggcaagacatcggggacgtaaagccgcatttatgaccggcacgggagcgggggttattaccgggctgacggctgctcttgcggtggttatcggttcgtttttgctcttttgtattgccgcttttgtgggaggggcctacgcggcggttgcgctcagcttccgttttgcggcgacggatggtgtctcgccggaacgccgagcccgagcgctgtcactggtcatgggcggcggtgttgtcgccggagtcattgggcctgggcttgtgaccagtacaatggatctctggccacctcatacgttcgccatcacttttattgcccaggggatagtagcggccgtttcagccgttattctgatgggcgttaaaccggtagaggtcgttacggcctcttcttccggtggccgttcgctcagggaaattattcgccaaccgggtttcgccagaaccgtattcagcggcgcagtaacctatatggtgatgaatttcctgatgactgcggcaccactttctatgcatatgcacggtatttcgcaggaagcctcaaacctcggaatccagtggcatgttattgccatgtacggtccgggtttttttaccggtaagcttatcagccggtttggcgcgctgcgcgttgcggcggttgggttgctgattaccgccagctctgtgattgccggtctggggggaacagagatccatcactactggctgtcgctaatattattagggataggctggaatttcggctttatcggcgcatcggcgaggatcattgatttccaccggccagaagagaaaactcaggtgcaatcgctgaacgattttgtggtgtttggcgtgatgatcgttggctcgttctcgtcaggagcgttacttaatctctatggatggaacgccgtattatggggttcactggttccggtcggcctggcatttctggcgataatcgtgggggagcgccatcaaaggtaa

SEQ ID NO: 95730 - DNA, 870 bp, Enterobacter aerogenes
atgagtgtgctgggtaaccgtttatttgtactggtgcagtactttgtaccgcaacatcttttgtctcagctgacgggttatgttgcccgaaatcgggttcactggtttaaaaccctgctgataaatgcatttatcgcccgatacgttgtggatatgcaggctgcgcgtggggaaacggcagaagattatgaaaattttaacgccttttttacccgccgactgaaagcacatctgcgtccgattgctgcccgaccgcaggatattgccagcccggcggacggcactctcgggcaatttggaacgctggagagcgatacgcttgtgcaagccaaaggacacaaatatagcctgcaggagcttctcggcggtgatacagaacgcactcttccctttatcaatggcgaatatgcgacgatctatttatcaccacgagattatcaccgtgtccatatgcctctgtccggaacgctgcgtgagatggtgtatattcccggaaaactgttttcagtaaatagcgtaactactggcgccgtgccgcgtctttttgcacgaaacgagcgtgtcgtttgccggtttgatacggagcaggggccactggctatcgttctggtaggggcaatgatcgtttcctctatccataccgtctggcatgggctggtttctccccatgctgacctgatccagaccttcacttatcaggagacggataatacggcgataaggttaaacaaaggcgatgagcttggccacttcatgttgggatcgacggtcattatgctctttggggcaaatcaaatgcagtgggataaagccttactgtcaggtaagggcataaattttggggaggcgatggcaacctccctgatttga

SEQ ID NO: 95731 - DNA, 513 bp, Enterobacter aerogenes
atgaatggactgcgagacagcgtcaggaaaggattgccgccgccgatgctgttgctgctgtttctgttgttcgacgtgggaagcagttggcccacgctttattatctggatgaaattatacgctggccgtggcgcacctgcgcagcgctgctcgcaggcgggttaagccttagtctgaccctggcagggttattaaccttaacgaataataagacgtccctgaatgcactgcatccggatcgcacccgtaaactggtgaccgaaggctgttatcgcttctctcgtaatcctgtctatttaggttttgtggggctgcattttgctaccgccctgttattgggcagtgtagttggcttactcgttaccccttttctgattttactcctgacaatcctgcatatccaggttgaagaggcaggaatgcagcggctttttggcctgcagtgggagcaatattgtaataagaccccgcgctggttctgccgggcgttattcctacggagctttacatga

SEQ ID NO: 95732 - DNA, 300 bp, Enterobacter aerogenes
gtggatattcaccgcataaaacgtgtgcatcatttctattactgcctcctcattgcagtaaaaatgtatcgttgtgagcgtccttttctgaacagaattgatgagaatgtttttatttacacgtggttaaagaaagcagcgaaaaacaatatttttgaatgcactttgcataatgagatcgcgtggttgaaaacacagttacgcggccatggaataagatcagacgtggcagcaataattgagaatatcgttgttaaattagatttccttttgagcatagaggaggaggggacaacatga

SEQ ID NO: 95733 - DNA, 387 bp, Enterobacter aerogenes
atgaaaaacattattaatactgaagccgctccggcagctattggaccttattcccagggcgtttcatttggtgatttggtgatgacttctggccaattgccgcttgacccggcgacgatggccttccctgagggcggggtaaaggagcagacacgccaatctctgttaaacgttaaagcggttctggaacagtcaggcgcttcgctggaaactgtgctgaaaaccacctgtttcctggccaggatggaggacttcgcagccttcaatgaagtgtacaccgagtttttcggttcaacaggggcaccggcgcgctcatgcattcaggcagggaaactaccaaaagatgctttagttgaaattgaagctatcgcctacattaaaaagtaa

SEQ ID NO: 95734 - DNA, 921 bp, Enterobacter aerogenes
atggatattccgatagaccttaagcacttacaaactcttcttacattgcgtaaaacgggaagcttaacgcgcgcggcggcggccctgcaactgactcagtcggcgttatcgcaccagattaaacagctggaagaccactacggtatcatactgtttgtgcgtaaaacatccccggtgaagtttacccaggccggggagcgtctgttacagcttgctgaaacggtgctaaatgcaatggaagaggccaatcgggatctttatcagttcgccagtgggaaacaggggacgctaaggatcacacttgagtgtcacacctgctatggctggttgttaccggtgatggacgagttccgtaagaaatggtctgaggttgaaatcgatattctgccgggtttccagccggatccggtgggcctgttgctacaaaacagagcggatgtggctatcgtggatgaaactgagcagacagaaatggtgagctatagcccgcttttcaaatatgagatggtggccatcttgcccaacgagcatcctttagcgcaaaagccctggctggaggcggaggactttcgtggcgaatcgcttattacctatgcggtgccggaagatcgtatcgatctgtgtcgtaaagtgcttaaacctgccggtattccggtacggcgaaaaacaacggaactgactatggcgattgttcaacaggtggccagccagcggggtatagccgcgttgccaatctgggcggtatcagaatatctggataaaaaatatgttacggccaggtccattacgaaagataaattaatgtcagaaatttggctcgcatcgctaaccgataacctggataaagattttgtgcgcgactttattcattttattaggcagcgctgcatgcgccttttgcctgatatccagattacgtaa

SEQ ID NO: 95735 - DNA, 1206 bp, Enterobacter aerogenes
atgtccagtcataattttgataaccaggtgtccccggaaacctatctttgtcacggcccgttcgatcctgacgtgtttggaggagtagttaacccaccggtctatcatgcctctacggtcattttcaaaaactgtaaagagctcagcgagcgtcaccaggcactttttgaagatgctgaagacgaggtaatgtactacggccgttttggcactccgatcacctttgctgtacaaaaggcactggcagagctggagggtggctaccgttctttactggttcctacgggtctggcagcctgcacaagcgcgttactggccctggtgaaaagcggcgatcatattctggtcagcagtagcgtgtacggccccacgcgcggattcgtcaataacgttctggcgaaaatgggcgtcacggcaaccttcttcaatccggttattggcgatggtattggcgatctgttccaggaaaacactaccgtggtgtttacggaatctccagggtcgcaaacgtttgatatgcaagatatcccggcgatcactcgtgtggcgcatgcccgtaacgcgaaagttattgttgataatacctgggcgacgccgctgtttttcaaacctttcgaccacggtgtggatgtctctgtgcatgccgccaccaaatatatcgtcggacactctgatgcgcagatgggtcttataacgaccaataaagagacctggctggcgattcgtcgcttcgtttatctttttggcctgcatgcggcaccggacgacgtttatcttgctcaacgcggtctgcgcactatgtccctgcgccttgagcgccaccaggattcagcgcttaaaattgcaaaatggtttgaagagcgtgaagaggttgagcaggtgctgcatccggcattgccttcctgcccgggtcatgaaatctggaaacgtgattttactggttcgagcggtctgtttagcgtggtgcttaaaccgcactattcaaaagaatcagtcgagaagtttatcgatagtctggaatatttcggcatcggtttctcctggggtggttttgaaagcctggccatcccgtttaacccgcgtaaagatcgcccggaataccactggccgtacgaagggcaatccttccgtttacagattggcttagaagacccggtagatttagtaaaagatctggatcaggcgcttcgtcatctgaagggataa

SEQ ID NO: 95736 - DNA, 1185 bp, Enterobacter aerogenes
atgtcgcacaataaaatcgcaaaaaaattacagaaccttcagtcatctgcaattagagaattattaaaacatagcaaaatggagggcgtcatttctcttggcggaggcattccggatcccaatctgtttgatcgcgaaggcttacagatcgccatggataatgtgcttacgcacgactggaaagacgcttttcagtatgggcttagcgaaggtagcccacaactgcggggcgctatctgccagctcatgagagaaagggcgattcgctgtgatatagatgatgtcgtcgtaacctccggctctcagcagtcgctggatattctggctcgcgcgttgcttaacccgggcgacgttgtcgtggtagagcggcccacctatctcgcggcattgcaggtgttacagcttgcggaagcaaatctgatgtcagtcggcacagatggcgaggggatgatcgtcgatgagctcgaagcgttgctgaaaaccacatcggtgaaagcagtttacatcgtgcctacctttggcaaccccggcggcgttacccttacggagcagcgacgcaagcagctggttgccctgtctcagcgctacgacttcgtcatcatcgaagacgatccttacggcgagattaactttaccgatacgacttttattccgctcagagcctgggcggtggagatgggtaacagcgataacgtgatttatacctccacgttctccaagatccttgcgccaggcgcacgggtaggttggttagtgttgccggactggctgaaacggcaggtggtaaacctcaagcaggccacggatctgcataccagttcgttatcccagtcgctgacgtaccactatctgaacaatggccgcctggctgggcagattgcacttatccgcgaagcctataagcagaaatgccttgtcctgagtcaacaccttcaaaacgagctgggtgaccatctgactttccatcagccgattggcggcatgtttttatgggcaaaatttagatatgagatgaataccacgcagtggctgcagaaaacgctgaataacggtgtggtgtatgtgccaggcgagttcttctattgcaatgagccagatcactccacgctgcgtatgtcgtacgtcagcaccacggaagagaatctgaaagaagcggtaatgcgcttaaaagccgcactaaattaa

SEQ ID NO: 95737 - DNA, 1323 bp, Enterobacter aerogenes
atgctcaacctggtggttatatttagtcaatcggggtctcctatgactgtaggaattaataacgaagcaattaataaaaagaatattccctttactatgtacgatttagggtgggtggtgctctgtatcggcgcagccattggatcaggcattgtttttttcccattacaggttggtctgaaaggggtatgggtatttgcactggcggttatccttggttatccggccgtctattacatgcaaaaattgtttatcgaaaccatggcacgtagcgatgagcaggattcctatctgagtatcattgccagctacgttggcaatcgctggggagtgctgctgggggcgctttactccatcaccatgctgaaatcgatggtggagtatgctcttgccatcaccaatgacagcgcctcgtacctgaaaacgtttggccttacaacccagacgctctcagaacactggtggtggtcgttgttgttaatcgcagggctatctcttgtggcttcgaaaggagaaaaggtcctgttcaaagtctcgggaagcatgattgccgtaaaactggtcatcattgttgccattggctttgtggttgttcctttctgggatgtgagtaatattggcgaatttcctacagttagccatctcgttgtcggcaccttcccaaccctgccattcgctatcttctctatcatgttcgttgggattttgaaccccatgaatatcgcttataaaaagcgcgaagaagataaagaggtggcgaagtacaaaatattgcgcgtacacaaagtggcgtatctggttctggtggctaccgtgctgctgtttgtagtgtccatcgtactttccattagcgaggcagacgcgctgcgggcttaccaagataacatctcggcgcttgccctggccgcaaaggtgattccgggagccgcggtgatatacatgagcttgattctcaatgtgttctccatcgtaaccgcattcctggcgctttacctcgccgttcatgagtcttttgttggcttgatcaaagtggctgtgaaaaagttgtttaagtcgcaggaccacaatagcaatgccatttcagttgctgcatttttcatggtggtgttggtactgtggcttatcgtcctgacgaacttcccgattcttaaggtgtttgtatttggcggtgtcacttatggtctgatcagctgcatcatccctgggttaattatattaaagaatgataagttcaccgatctgcgtggcgtatcggtctactacgtaatcttaattggtatgctgatgtgcatcggtccatttgtgatgctgttttcacaatag

SEQ ID NO: 95738 - DNA, 939 bp, Enterobacter aerogenes
atgacaattccattgacgatcaaacaaattgagatgctggtgaaaatcagtgagggaaaagggctgtcggaagcggcgcgcctgctcaacatctctccttccgccgtcagcaaggggctggctgtgatggaggaaaacctgggtgtgccgctcattcagagaacgacccgttcatttcagttaacagaagccggggaatactttgtctcaagagccaccgagcttctgaaagaatttgacgatattgtcaacacgacatgtgggtatttcaaccaccctcacggtgccctgcgaatcacctgttccgtggcgttcggttatgcccatttaattgatattttcgaagaatatcgcaagaaaaatcatgacgttgagttaatcctcgatctcgacgaccatctgacgaatcttaatgagaataacgttgacatcgcgttgcggatcaccgccacgccaccacaaaactatgcagccaggaagttatccaaaataagctggttatattgtgcttcacctgcctacctcgctcgaaatggcaccccaaccaaacgtacggagctcgcaagccatgagtgcctcgtatatccgggcttaacgccaccgcttcgctacaacgagatagcgtcccagcatccacagtgcaatatcaaatccagaacgcctgtgcaggctaatagcagcctgttgctgctcaaggcggcactctccggacagggaatcgcctggcttccttcctatcttatcagtcgacacattgataacggggagttggttccgctgacgctggatggtaaatgcgcttacccgacccatagcctttatgcgctctattttccgagcaagttccgcaatccaaaagtcagatcttttatcgatttcctggttgaggaaaatcaaccctggaatcgctgggaacaggcaatcgatggtctgctttaa

SEQ ID NO: 95739 - DNA, 156 bp, Enterobacter aerogenes
ttgaaaaacagggttacgcgcaccgacaagaaaaatcgtacgttgctgaaagggctgttctggctggtcgtcatctggaccgccagcgtcctggcgttgggaatcgtttcactgctgttccgcgcgctaatgtctgcggcaggtatgaaggcataa

SEQ ID NO: 95740 - DNA, 522 bp, Enterobacter aerogenes
atgagcaaagtacgtgttacgccgtggcaggataacgatcctgttccggctgagttactggctgctatgcaggcccgccgccccggcggcgaattaattggcattgacagggtattattgaaaagcttcccgctggcaaccggctggaatgcgttgctgggaagggttcgggccgattttagcctcgagctgatctatctcgagttgataatgctccgcgttgcggtacttaatggcgctgaattcgagtggggcgtgcactacccggtttatttaaaggcgggaggatcggaagcaaaggcacaggcactgaaacaaaccgagccggaacgcaacctatttgatgaacgcgaatggacgctaattaccttaaccgatcaatcaaccaaaaaggtggatgtcgatattcaggtgatcgagtcattgaaagccctttttggtgaaaccaaaacggtggaggctgtcgcgaccgttgccgcttataacatggtttcgcgttttctggtcgcgctggatatctag

SEQ ID NO: 95741 - DNA, 324 bp, Enterobacter aerogenes
atgtccatccgcgagctatcaacagctgaattttctactgaagttttagacgcttctgttccggtattagtcgatttttgggcgccatggtgccagccttgtcgctcggttgcacctgtgattgatgctctggctcgtgaaaacgccggaaaactggcggtatttaaagtcaatatcgacgagcagccgcagctggcggctaagcacggtattcgttctattcccttctttaagatttttgtgcgtggcgaatccgtaatggagttttctggtgccagaccaaaaagtgactttgatgcgttgctaactaccgttattgattga

SEQ ID NO: 95742 - DNA, 1026 bp, Enterobacter aerogenes
atgaaagaaacctataaggccatccaggttactcgtccgggtctacttgaaatggtggagaaagatctcccagagccggggccgggtgaagtgctcatcaaagtcgaagcctgtggtatttgtggggcggacgccggggctatcgagggactggaaaagggggttgaatacccacgcgttccgggccatgaagtggttggaacgctctgcaaaacatccgatccgttgcccgcatggctgaagccaggccagcgtgtcggggtagggcgtttaggcggacattgcaacgcctgcgaacagtgccgtcttgggcactttaatctttgccaaaaccagccggtcaccggcagctcacgtgacggggggtatgccgaatatatgctggcgcggaccacggggctggttgccatcccggacaatctgtcatccgtagaagccgcaccgctgctttgcgccggtatagcgacctttaacgcccttaaaaaatcgcatgctcaggctggagatactgtcgtgatccagggaatgggcggtttaggacatctggccgtgcagtatgcccggagaatgggttttcgtgtcatcgctgtgggcagaggtgacgatatcgcggacgaggttatggcgcttggcgcgcaccactacgtcgacacatatagtcaagatgccggggaagcaatcaaagcgcttggcggcgcggaagtgatcttgtcgaccataacggatagttctgccgtatcggcgttattaccggcgttggtgccgcaggggcggttaatgatcgtcggcgtaggcaaggagcctttgacgctgatgccgggtgtgatgataggaagagaattagcggtcaggggcgctattaccggtacggccattgagttagaaaaggctctgaagttcagtctgctgacaggtgtacgagcaatgatcgaaacgcggcctctggctcaggcgcaggaagcctttgaaaaaatgcgcagcggtcaggccaaattccgcatggttctcacactggaccatagctaa

SEQ ID NO: 95743 - DNA, 1074 bp, Enterobacter aerogenes
atgatggtaaagacccaggttgcgattattggggctggactcagcggactctatgcggcctggctgctgcagcgggccgggattgattacgttgtattcgaagcgcgcagccgcacaggcggccgtgtcctcgcagctgctaattcaggtgcagaccttggggcaacgtggctctggccggggatccagcccgcgctatccaggcttcttgctgaactggacattggggttttctcccatcaggaaacgggtgacatgctgtttgagcgaacaatggatggcgcttcgcgccatcagggatttgtctcttcacctgcggcggctcgcgtgcgtggagggatgtcacagctgaccgatgcgctgctggcgcgtctcgagcctgagcgtgttgtcatggaggtgcaagtaacgcaggttgaacaaactaacgaaacgctgactgttcgtggacagaatggagataaacaggctgtgaccgtgcacgcccaacacatcctgctggcattgcctccgatgctggcagcccggatcgcatttacgcctgcactgcctgaaccctggctacaggcgtggcgtgataccggcacctggatggcgccgcatgccaaatatgtcgcgctctattcccgcgatttctggaaagaaaagggcctctccggtgaggcacgaagcagcgtcggacccatggtggagatccacgatgtttctgagccggatgggatgtacgccctgtttggtttcatcgggctaccgtatagcgcgcgccgggctatgggagagactgctttactcgagcagtgcagggcgcaactgacgcgactgtatggccccgacgcagcatatccctgtgctgaatttatcaaagactgggcggccgatccttttaccgcaacatcgcgtgatctgtctttgcaggcgggccattccgtaccgccagccctggtggatgatgggtcctggcgacatgcagtaacaggaatcgccagtgagtggtcaaccgcattcccgggctatcttgctggtgcgattgatgccgctgccgaaggcgttcaacgaatcttaaacgagagataa

SEQ ID NO: 95744 - DNA, 672 bp, Enterobacter aerogenes
atgttgattaaccacgattttacccggcgcgttacagttgccacagacgattaccactgggttcactccccgcagggaggtattgatcgtgtgatgctggatcgcatcggcgatgagctggcgcgtgcaaccagccttgttcgttatttgcctaagacctctttcccacaccatgttcacccgggcggtgaagagattctggtgctggacgggcggttttcggaaggtaaacgagattatcccgcaggctggtatctacgcaatccaccgggttcttcccatcagccccacagcaccaacggtacgctgctgttcgtcaaactcggacagatgagcaaagatgaaaatcgtgctctgcgtatcgatacccgcgatggagcaaactggcagaagggagagggtatctcgacctgctcactgtttgaaaatgcctgtgagaacgtctgcctcttacgcatggcatccggctcgcttctggttgagccggatctcccgggcggcgcagagctgttgctcttacagggctgtctgattgaaggtaacagtattcatgctgaaggaagctggatccgcattcctgccgggcagcaactggcgtttattgccgaaaaagataacaccctcctgtacctgaaaaagggccacctcggcgctatgcaggaacctcaatga

SEQ ID NO: 95745 - DNA, 342 bp, Enterobacter aerogenes
atgtttttgaactggactgaaatgcgtaaagagttacgtgccgcgatcgggaaatttgcaggtctgcagcccgatgtgatgcagggcatcgataaaatgcaaaacggtgcggcggcaacaggacacctggatgccaaaacccacgagcttattgcgttggctgttgccgttaccacgcgctgtgacggatgcctgtcggtacatgccgaagctgccgccaaacacggcgctacacgcgaagagattgccgaggcactgggtgttgctattacgctcaacaccggggctgcgcttgtttactccagccgcgctcttgatgcttttgattcattaccgaagtaa

SEQ ID NO: 95746 - DNA, 282 bp, Enterobacter aerogenes
atggcttacttgcagatcaccctggatatcagcgaacagaaccgtgcagcagcagcagcggtttatcagaaatataaggcaccattcctctcgactattgaaggcgcggtctcaaaagagttgctggtacgtgcagaagatgtgcaggtgctgcatggctttgaaacgaccaaacaggccgaagcgtatctcggatcccagctgtttaacgcggatgtagttgaagccttgaagccttatcttaacagcgcgccagacgtgcgtatctatgccgttgcctga

SEQ ID NO: 95747 - DNA, 738 bp, Enterobacter aerogenes
gtgttaacagatcctgcccagcgcgccctgcccgatatccgtatgggtttccaaagcctgaacctgggaatgaccctcctccgtgaaggtgcatctaacggcattcttaacgtcaccattagcccagcttttgcagccaaatggctcttgccgcgaattgaagatttccagcatcgctggcccgatattgacgtccgcctggaaaccagtcttaagctgatggactttactgcacagggaatggatgtcggtattcgctacggtctgggacgttgggaaggactacatgcagaactattgatgtcagaagaagttttcccggtctgcgccccttctcttatagcagttaaccctgctattaattgcctgacgggagtaaccgagcaaacgttgattcatgatttgtcgatggagcagcacaaagatttcatcacttgggatcgttggttacgccgcttcaacgtccaggctattgcccgcaagccaggccttcgaattaataattctgcagccgtccttcaggctgccgtggaaggccaaggcattgcactagcgcgcagtataatggtcgaagatgatcttaaaagcggacgtcttatccgcctgtgtccggatgtttcactggtcagcccattatcttactatctggtttatcggcctggctgcgacagcctgccgaaaatcgcttacttcagggaatgggttattgagcaaacaagaatttgtgacaacagttag

SEQ ID NO: 95748 - DNA, 252 bp, Enterobacter aerogenes
atgggcgccatagcgggcgtagccgctaaatttcaggccgaaagggatcgccatatccggcgaagcggcggtggtctgcgggttggtcatcacgtcgacctttttatcggccgcggcatcaattttagcctggcggtcggccagcgctttatcaaccgctttggcgacgatggcgtcgatctgttcctgggtaaattcttgggctattacagaggtaaacggagaaaacgcggcgataaccgccatagttaa

SEQ ID NO: 95749 - DNA, 900 bp, Enterobacter aerogenes
atgagtgatgaacgcaaggtgaaacatgttcttggcctatcaggaggtaaggacagtgctgctctctcggtgtatatggctaggaactatcctgagctcgacatcgagtatttctttactgatacgggcaaagaattacctgaagtttatgaatacttggagcaactagaaattgttctaggtaaacctattctgcacataaacgacaaaaaaggatttgattattggttagagcaacacaataattttctccctgcaggacaacaacggtggtgtaccatccgtatgaaactcgagccatttgagaaatggattcgccctttcctcaacgatggctatgaagttatttcttatgtgggtattcgcgctgatgaaccttggcgcgatggttatcgtcccaatgagaaccaaaaatatctcacaatcaaaatgccgtttgctgaggacggcattaaaaagcagggtgtactcgatatattagatagtgcagggcttggtttaccgaaatactacgaatggcgttctcgttctggttgtaccttctgcttcttccagagaaaaattgaatgggtacggctacgtgaagagcatcctgaggcttttgaagaagctaagtcttatgaaaaaagagctgagactagtgagaatggcgaaacttttttctggatggggccaaatgaaccattagaaacactggaggacccagagcgtgtcaagcagattaaggaaaaccacgagaaggtaaaagctcgtttcgaaaagaaaaaacagcgcgagagaaaacgtcgattaggtatgcatgcaatggtggatgaaagcatgattattgacacgttagatatggacgcgatgtatgatcttgaagagggtggcggcgcttgtattacatgttataagtag

SEQ ID NO: 95750 - DNA, 3348 bp, Enterobacter aerogenes
gtgactcttagtaaaatttactctatcgctacacgccatcaacgttctacccgtatcgatagtgatttgagcgccgatttctttcctggtttggtttaccatggaactgcacaatcttccttagaaacgctcttccggcagtacaaacaaaccggacagagcgcctatacacttactggtgcttatggttcgggtaagtcgacggttgcgttgcttttagctggtttactgcatgctgatattaatattcgtagtgaagcactcattactataaatgatgagtctaaaattctattagaagaaagtgtcccttaccaggaagggtggttacaaatacgctccgtaggtggagtgagaggtcctatagaatcattttggaatgcaactcttagagcactcgaagaacatccaaagacatgcaaatccagcatactcaataagtatagcaaagtgagcgtagagagtgacagtgagctccttaactcatggaaaaccctgtttgaagacattgctccatacgttgatggtgtacttatcatcgcagatgaaatgggcaaaagcctagagtacattaaccgaaatggtggtgatttacatttatttcaggatatcgcagaagagctatctaggattaacactccagttatttttttaggattgttacatcaggcatttagtgaatatgctaaagaacgtggcaccaagttacaggatgaatggggtaagattcaaggacgctatagcgatattctttataacgtatcaactgatgaaacggttgcattaattagtagctcgataaaaacaatattaccgaaaaacgatggtgatcagctcgttaaacgtgtacttgcagcccttgaagataagcgacagcgtaaagagctgctacttacacgattggagcaatgtattccacttcatccattaaccgcattgctattagggcctattgccaagcgaagatttagtcaaaacgaacgcagtacgtttagttttttgaattctcatgaacagttcagttttcaacttttcttacagcaaacaagtgaccaaaacgctcgatatgatcttagtcatctttgggattatttagaagccaatatggaacatgctattttgggatcccctgatggtcatggttgggcgacagcagctgatgcaataagaaaagccttgaaacaagacttttcaccgcaatgcatcaagctgcttaaaagcatagctttgattaccctgtttggtaaatctgccaacctcaccggcactgagaagatactgcttaccgcaaccgagattacacagcaagaacagcttaatgcgtgtctacaacaactaaaagacgcttcctgtattgtatttagaaaatatttatcctcttgggtggtgtttgaggggtctgatctcgatattgctggtttagttgaagaaaaacttgaccaacttcataatagtcatgaagcgattgaacgtattaattttagctcccaagttattgcgaaaggccattatcatgaatttggtacattacgatgggctgctcaatcggtagcaatgcaacttagtagtatcgaaattggttcgttacttacatctcgaaatggtgaattcgcgaatttcttactattactaaaagaagaatcggaagcgcgattgaaggagttgacacgaaacaacaagtcactaatgcttgcttgtgcaccaaatgctaatgaaattattaaccttgcgaatgaaaaatacgcgttagatcttatccagagtgataaaataactggagctgcgcttactcatgacaaagtagctcgcgaagaacacaatgctcgtacttttaatgcacaatcagcccttgaaaccgctttaacctatgcattcaacaacgcggtttggtttcacaacggagttgcttatgacaaagagaccattagtgaaatagcaaccttcgctgccgacaacatatttttccaaacacctaaaatcctcaacgagcttgttaatcgtaataagttgtctggtaccgcagtttctgctttaaaaaagcttctcgaagccatgcttgataaagaagactgtgaagatttaggtattgaggggtttcctccagagaaatccatgtatataagctgcttaaaaaatacatctattcactcggccgaaggtgaaaaagggcagcattggttcagagattatttggatacaaatctcagtgccgtgtttgccgcagctgaacaactattgaaagatcgcaaaggtagtgaagttggtttgtctgaaatcgccgaattatggggcagtgcaccctttggtttaacgagaggcgttattccgattttcatactcgcttttttgaaatcaatgggtgaacaaatcgcatattatgaaaaagatatgtctggcgaatttgcctttatcgcagagccagacagtgactatgttcataaactgatcaagaacccaggcgatcttgccgcgaaatatatcgtattagcaactgacgaaaaagagtggttgcaaaaccttgcgattttcgctgcagcggaaaccaaccgtaatatttcaaataatatattatcagttgcgacaccattagttaccacaatacataatctaccgcagtgggtaaaaaatgcacaccatattgtgccagataatgatgcacgtaataaaacctatttgagagtgcgagatctttttttgcaagcaaatgatccacatactctacttattaagaagttacggaaagagctggtagattttggtgctaatgattttacgagtcaaattgatctcttggaagactgttttaaaactctcaggcaaaagcacgagcaaatgttagtttcgatcaagaccagagtaaaaaatatttttccagaaaatggtgaagaattagctcaaatgtgccggtacgttgagacaaattcaggtgacttgcgcttaaaagcttttgctagagagctcgccaaaagtgatactggattattacagtggctagagagcataattcaaattgtcactgggcgcggaaaacaaaactggaacgaaggaattcttcaaacagcatcaaacaaaatcagtgactacgcacaagattttttgagtgtggtaaagtcgcagcataatgacgaagctaactctagctctggtaaaacaaaattggtctccttagtattagaaggcgatgatggtaagctaacctcatttaagcgagaaattagagttgttgaaatggatgaattgcaaaacacaatgaatactattgaaggtcatctttctgggcttgatgaattccataaaatcaatgtgttgcagcaattgctgagaaagtcccttgaagcaaaaagttaa

SEQ ID NO: 95751 - DNA, 603 bp, Enterobacter aerogenes
atgaacacatcaccgtggaacaaagaccgtatcatcggccaaaaaagaccacttcagatatctcatatctgggggatccgaatcaggcttgaactggaaggtaaaacgcgcgatttggctctgttcaatatggccctagatagtaagcttcgaggctgtgatctggtaaaactcaaagtatctgatgttgcatatggtagctctgtttcaagcagagctacggtgctacaacagaaaaccggcagccctgtccaatttgagataaccaaagggacaagagaggctgtttctgcattgataaagcttggcaatttacacagtaaagactacctgttccgatctcgggtcggtactaaccaacacatatcaccccggcaatacaaccgaatttttcatgggtggctagcaaaaattggtctcgaagattcgctttacagtacacattccatgagaagaacaaaaccttacctgatctacaagaaaactaagaatcttcgtgtgattcaactcctgttaggtcataagaaactggaaagcacggtccgttatctgggcattgaagtcgatgatgcgttagagatttctgaatcgattgaagtctaa

SEQ ID NO: 95752 - DNA, 1770 bp, Enterobacter aerogenes
atgacagttcgattgaataaagtatcaataactaacttcaggtcttgcaaatacaccgaagcttttctaaggccatatacagcattggtcggctataataacgcaggtaaatcaaatattatattggctataaaatggctcttagatggctccctactaagcgatgctgatatgtacgacccacaaaatccagtgcgagtagagggagtcattgaagggattactgatgatacgctgacgttacttagcgaagaaaatcagcaaaaaattgcaccattcatcatagataaaactttgaggtttgcaagaaagcaggacagagaagttgttgatggtgataagttaaaagtcaaaaaaacacttgaggtttttgatggtaccacatggaaaaaaaatcctggtggaatcgatggcgctatctcgaatcttttccctgaaccaattcatattcctgcgatgtctgatgctgtagaagatgcaaccaaaaataaagccggtacaacaatcgcgaaaatattatctgcaattgttagcgaaataaaaaaagaatatgaagtaaaattctctgaaaacatctcggaaatcggtaaatatcttgctcatgatggttctactaggttggatggtttgaacaaaatagacagtggcgttagtcagaaagtaaatcagtttttccccgatgtgagtgtgaaactacactttcctacccccactctggatgaaatattcaaatcaggaaccttgaaagtatttgaagaacgagctggttcctcaataatgcaagacatcagccgattcggccatggtacacagcgttcaatacagatggctttgattcaatatttagctgatattaagaaaagaagcgatgatacaaaaaaatcaaacactcttattttcattgatgaaccagagttatacttacatccatctgccataaactctgtgagagaatctctggttgctttaagcgatcttggattccaagtcatcatctcaactcactcggccagcatgctctcagcaaaacatgcctgcaatgctatacaggtctttaaaagttccgaaggtactatagcccggaaaaccatttcggaaaaaatacaagaattatatgaggcatcctcaccacaacttcactctgcatttaccttatctaattcatcatttttcttattttcagaagaagttttattagtcgagggcaaaacagaaacgaatgttttatgcgcactttataaaaaaattagaaacaatgaactcaaccctaccaagacaagtattgtagctgtagatggcaaaggcagtcttttgaaaatggccaatgttatcaattcaataggtataagaacgcgaatccttgccgattgcgattttctatcaatactactgacaacctctcataatgaagtattaagtagtgaatgcgatgaattactctcatctttaaccaatttgtctgatccacaaagcttgcaacttactaaccccattatttctatagactcactaaaaagcagttcaagcaaagactttataaaaatctgcaatcatcatgaagtaaaagcctcaatcaaaaaaattcatgataaattaaagagtgatggaatatatatttggaagtcaggggatattgagcaagtatacggatttggaaaaaaacaaagcgaatgggataatttattagattgcttaagcgatgatgaaaaagaggtccgtgccattattaagaactatgatgaaatggaagatttcatcttatggatttga

SEQ ID NO: 95753 - DNA, 1386 bp, Enterobacter aerogenes
atgttaaatctgataatgaaagtaaatgatgatgactggactgttccagtagggcagattggtcgcagttcgatacctctaagccgttatttagaatataccaatgatagcatatcagtaatgtttcgggaggttaatgaaaaggttcttaatgatcttaaaagcataccttgcctgctgatgacagagtttgatagagagatgtcactggatggacattcacgtctagtttccacattacgggttgctatgcttgaaaacgttaccgtaaatggaaaaaatttagattattcatttaaaatccaaaaggattttgggaaggtagcagttgataactttcgctccctaggagacaggttattttttcattcattcgaaacttcgagaacacactgggcaattaaagatgttagtattaacgaagtgttatctgcactcggattagaaaaaaatgtaccgccaccacctccacctatccctgtcactgctattggtgaatttgagaaagctcagagcgtaacttctgtagaagaatttcttagaaagattaacgctattcctgcacatgaaggtgaggaggttttttaccgcgggcacagtagctatcgttataaacttgtaccctctctatttcgggaagaagaggctgttccgctgtacaagcataaagagagaaacatgatcaatgaaatgctgacagcgcatcccgcagagttttaccaagatcagtttatgattgataagttagtccgtatgcagcattacggtcttccaacacgtttactggatgttacggcaaatcctcttgttgcactttatttctgctgtgcagatatgttggataaaaacgatgaagaagaaattgttggtgatgtgaaaattttttctgtacgtacaggagatataaaattttataattctgacactgttagttgcataactaatttgtctcttcttgataccgatgaaaaaaataaactgatcatggataaaaaatataatttaaactctttcaccgaaggagttgacgaaaagaaaaagcttttacattttattcgctcagaaaagccctatttcgaggactctattcatttacccgatctaagccgtattgtctttgtccgaggtagaatagccaatcaaaggatttcctctcagtctggcgcatttctactttttggacatgaagctgttttgcctgatactggccaaagtggattaaacgttaaccgcatttatgttagtaataaaaaatcaattctactagaacttagtaaactaaacatcaaggccagtacaatatatccaggcattgaggagtcagcaaaagaaattgcaagaaaaactaaaggagaggaaacagttaacaaattcggttcactttaa

SEQ ID NO: 95754 - DNA, 1107 bp, Enterobacter aerogenes
atgggtggtttgttaaaattttactcccttaaatcagaaacgcctgtcccgctgttgcatttcacagaatttctgatatctaatgaattaaaccattttttcatgggggtgtttatggacttattaaagtacttatcagaaaagggattaaccgaaagggctctcgacttcgtcacatcacaattattcttcaatgcagagtcacctgataacctaaagtacgctttaaaagcgggttatgatattaatactattgatagtagcggcaacaatgctatttttggctgcagaacactggaagcactggattttctacttagaaatgaagtcaatatacaccatatcaacaaggagggtcaaaatgcgctctttcatcaaaaaaatcccgaaatactaaagaagctgattgaactgggtttagacacctcttatacagatactaagggctatacctgcatttttgcacattacatggatgctgaagggctacaagtgttacttaatgcaggttgtgatataaatcacgttgataacaaaggaagaaatattctcttcctgcctctctccccggaggttttatccatagcaatagattccggatgcaatgtcaaccatattaatcatgcaggaaaaggttttattgaagaggaatatgacgatgaattgcataatgtcattctccgtcatattgataaatttgaaagaagaaccttgcatgtcaatttttgcaataccaactcaatattatttttatatgagctctctgaatatggattcaaattagagctcaataaagaccgtttcgtcattaacagttacattagcgattacaaagatattttaagcactcttgattgtatcagtgacattcaagatgttaatttctataattatgacggcgcccctctttacaaagatatcgataagcgaattgtaaagtggatgataagaaatgagttcctcattgatctatcaaaaatttctaatgataaaaattatgatgacatatcaaaatacaaagctagttacgagcaaaaagaaatatctaggcatttaaaaccttctaaaaataaatctataacagtcaaacacggtagaaggctgtga

SEQ ID NO: 95755 - DNA, 855 bp, Enterobacter aerogenes
ttgaaaaactggtcaccagagaatactaaagaaattaaagcctggcttgacattgataactatcgcaagctcgaacacatcagtctgaatgccttgtattacgaactctgggcaagagcacttctatacaagcctgggcctactgacgaagaaaaaaaaggattatgggtgtatatgactgaaattttcagtggcaacccccatcttttcaaaggaaagcaactcgattatccaacagttcacgacactctttacagccctccacacctttttattacggatatcacccggcttgctgaacttagtgtgatggcccttagtgtgaaccttttcacctgggagaaaggaaacgatgaatattttgtgaatactcctcaccacgaagcttatgtatcacaactcttgtctcccttgtgtgagaaaacggtgttgctcgaaattgatcttggtagtggtacagacgatgaaattgccgagtcgataaaagcggctctgccacaatggaggttggtgaaaggggtggaagttaaggaaaccggtatcgttcgtttcggctatggaaccattaaaaaaatcataaattacaggttgatcgcgatgctggacatcttactctgggcaacaaggaaagaactaaggatctcagatgatcgcctctcccggcttctttatactgatgaagatgaagaaactactacccgtttagggtatcacattaaagactcggatcgaccgcttgccatgaaagctgcaacaatagactttattaagcaatttaattttttcatgaaccgaaacccccacctgaaaaacatgagagtttcagatgtaatgaaactctctgattctaactga

SEQ ID NO: 95756 - DNA, 207 bp, Enterobacter aerogenes
atgaataatcaaaacacccgcctcattcgcttgccagaagttatgaacaaaactggctatggcaaagcatggatttatcgcttgatcaatgaaggcttatttccaaaaccgataaagattggtacgcgtgctattgcttttattgaaagtgaaatcgacgaatggatcgtgtctgctattgcacgttcacgtaaaaatgcagcctga

SEQ ID NO: 95757 - DNA, 276 bp, Enterobacter aerogenes
atgaataattcaatcagagtaccggaagataaagattttgtatgtgcatttgtagcttcaccagagaacattgttgaggctatggagtgctatcgaagctatgtagatccgattgatgagatagagatgcatcatgttcttatatatattttgtttgcgataatggatgcaggtggcactgaggtttccattaatgacgaagttcggatatgtattgagaaacttatcaatgaaaaaaatattatcagaaagaataacgcagataaaaaagcgtaa

SEQ ID NO: 95758 - DNA, 138 bp, Enterobacter aerogenes
atgaaacaaagattccccataaacctttaccagaataaattatcagataaaaaacaggatctgaatgatattgttcagtatgtattctggttgctcgcattgatcgcttcgtatacgccagataaaagcattgtttaa

SEQ ID NO: 95759 - DNA, 564 bp, Enterobacter aerogenes
atgtcaattacaagcattgtattaacaaaagaacaaaaatctattattgcagaagcattagaggttatgcccgaagatctagaagaaataaagattaaagcaagcagctataaaaagacgtcctttagggacgatttctcaatgatctttaaaggtaatatggcgacactcgccagaatggatttgacgcccacagcattcagaattgtcctttatctcttctcagccattgattatggaaatattattcctgatttttcacagtctcgtactgccagagagcttggattgaataaatctaatgtttcacgtgcattcagagaattatttgagagaaaaatattgatccgtgacaccatagataatcaggtatatctgaattcaaatttatgcgttaaaggaattcctcgtcgtttcaatgaagatctgatggataaattcaggaaatccagactggagaccgaggactttgccaactcgtttaatttttatcgtgcagggagtaacacaaagccagttaaaaatcccaaaagaagatatcctgcagacggcattccattttaa

SEQ ID NO: 95760 - DNA, 426 bp, Enterobacter aerogenes
atgagtgctattagtgtattatctcaggaagaaaaatttatacatgttgttgataaatttataacccatcatcacaacagcgttaataacaataccttttataaaaaactttatattctcttcgctgggtatcatctaaagtatttttattcacgggcgcagtaccgcaactcttgttatcacgttgataatattatgcagatgtttacaggagtcgtttcgaccctgaacacaacgctgctcaggaagcttgcaaatagcgacacgttgctgcattgcctgaattcactcgtgaattatatttcaggcaatctggatgaagcagagcatatttatgctgatttgctggcacagtatgaaaagaaacgcattacaggctctctggcttatactcctcctggctcagtgatcagaaaaagactgtga

SEQ ID NO: 95761 - DNA, 321 bp, Enterobacter aerogenes
atgaaaacctctgccgttatcacactcgttaccgctgtctttttgctgagcggctgtaacagtgagccctctgaacaggatctttataatgccatgaataaggtcgtagagcagacgaatgccatcgttaaatccatagcaggtaaagatgtcccgaaagacacactgcgggaattaaaatctgtcaaaaagcatgactgcgtagaagtatcggataaaagctataaatgtagtgtgacggttgttgttgataacgaaaagcgtactgctgctgtaatccttgtcaaaacggatgatggctggcaggtcgttgataagtaa

SEQ ID NO: 95762 - DNA, 387 bp, Enterobacter aerogenes
atgaacagactcattgcttctgtattttttatttttactttccttatcgctggatgttcaacatcaggcaatcagcatcttaaaaatgaaacatcacaaagtctgcagtcaaaaattatcaaaaataaaacaaccaaatcagaaataacggccagtctgggtgaaccagatacccgaaccacgctggatgatggcaatgaagaatggatgtacacgatggataacaatcaattcgatgccaccacatttattcccgtgattgggctattgacggggggttcacagacgcaggccagaacgctggaaatcgaatttaaaggcgaaacagtcagcaagtggtcgttctctgaaaataacagcagaatgaacacgggtcttattcagtaa

SEQ ID NO: 95763 - DNA, 273 bp, Enterobacter aerogenes
atgagtaaccagaccgttcagtgccccttctgctttacacaaagtccccacggcgtgcggatttgcaaaggctgccatgcaaaagtggcctatggtgaaagcccgctcagtgtggcattcctgtttcaattcgtggcattagctctcgcctggttagtattttcattgaccggcagcactcctacctcagtcattactttttttgccagcgtcattattcttctctgcattataaaaaagaaatatgcagacagagtcgtttttatacggtga

SEQ ID NO: 95764 - DNA, 1200 bp, Enterobacter aerogenes
atgaaaggcatgcagaaaataaagcggggtaaacaatttacaggtgtagttctctatagcctgaagtcaggctctcaccacaaaatcacgccttatgtcatcggtggtaatatgaccggaagtactgctgctgagcttatcagtgaatttgagtgcacccgactgctgcgccccgacgtcgctaaacctgtctggcataattcgcttcgactgcccaaaggagaaacactgtcagtcagacaatgggcggcatttactgacgattacatgacacggatggggttcactgacacgcaccttcgctgttatatcgtgcacgacgatacagacgggcagcatattcatattcttgccagcaggattgatatagccgatggaaagttgtacctgggaaaaaatgaaaatctcatcagtacccggattatcagcgaactggagaaagtccacaaactcactcaaaccacacctgccaccggtagtcagcgtcaggagaaaagaaagccttcccgcaatgagctgataatggctgaacgaacgacaactccctgccctaagtccactctgcagagcctgattgaaaatgcgttaaccggccgtcccgatttactgacttttatcgatatgctggaacggaaaggtgtgacctgtaaacccaatatcgcgtcgacaggaaaaatgaacggcttttcatttcagtaccagggcattgcctttaaagcttctcagttggggaaaaaatatagctggtcttccctgcaaacactgattgattttacaccggagcatctgactttactgaaacaagagcaaaacccaacagagcctgcttctgtgccagtgccatcatgcagacctgaaaaacagactgtaaaccgggaaacaatcctcgagaaaatccatcagcttgaagaaaaaatttgtcgggaaagacagcaggaaaccgtgggtatcattcaactcaggagcaaactgcacagtacagctcgtcagatacccccccagcgtcgtcttcagtcgtggcttttattactcagtcatattgttgtacttctcaaacgtagggggctgtctctgctgaatgccaccagacatcctttccgccagatcctgcacctggagttgttgacccctgttcatttcagagcaggtcattctcttaaggaacaaacagttaacaatcacactcatcgcataccataa

SEQ ID NO: 95765 - DNA, 408 bp, Enterobacter aerogenes
atgagcagtgacatgagtaatgatgatgatataaccagagtatcaaaacgcggtaaattccatacggacaaacttcctgagaatgaaatacgacatcactgcgtcagtgtcagattaaatgaagaagagttaattattctcgacagtaaaagaggtcagtataaaaaaggagaatggctcaggatggcttccctgaataaactcccgccggttctgccagaaatcaatcgtgaagcatggattaaacttggcagcctttcacaggatttaaaccacctgctgagtcatctcgacagcaaaagctctgacagcgaactgacccgaacagaactcttcgccctgcgcagacaaatcaaaacgcttcgcgatcaccttattccttcagcctttctggatccaaatcaatga

SEQ ID NO: 95766 - DNA, 951 bp, Enterobacter aerogenes
atgacaaaatatacaacagataatttattttacagttggaccagagataatgtccttgattgtatcaaggcaggaatcgatattaatgcattaaatgaagacggtgataatgctcttttctcctgcaaccacgtggaagctgcaaaagcaatgattgaagcaggcatagaggtaaaccatacaaaccactatggcaataatgcactctttgttaattataacccacaaatgctgctgtttctaatctattcaggcgttaatattcatcacaaaaacaatagaggaaagtcatgccttcatcatcaacgcgacaatacagaaggcagggaggttcttattaatgcgggggctgatatccactgcgtcgataatgaaggtcagactgttctctttaatcattacatagagaaacattttgattactggatagataaaggctgcgacataaattacagagactataatggtataccagcgctcgatttgtcaactgactacgggggctacgcatatgatttcaatgtcaatgcgcttatgcggcatattgataaaatagactgtactcctgttctgatcagacatgtgacataccactctctaaacctgattaatttcctttatcagagagggctaaatgtcctgatcgctgatcactgtacactcagtttaaatgtaaaagatatgaagccattctttactgaacttaagaagcttgtcgatattaggaacactcagttttataacttttgtaatgaacatattggtgtatacaccggcattgagagagtgaaatggtttatccgaaatgatatcagaatggacgacgatatactgagacaacgttctgacgctgataaaatttttgattatatcgccagaagagagaaaaaaaccctgttaaaagaaatgaagccagagatcccccttgcacctatgcgaaaaagactctaa

SEQ ID NO: 95767 - DNA, 441 bp, Enterobacter aerogenes
atgaaaaaacataattacccaacactgactaactaccttaccaaaaccaaaaagaatgcagatctctatagattatataacccacaattttctgcattcggaaaaccagtaagtgaagagcaggatttttacttctgttacttcgcaagacacatgatcactcagagaaatatcttaaccctcttttctatccatacttttctctcttataacataagcaagaaagagacaattaaatcatttgttcattttctcagaaacgcaaaccatgacaccttcaacaatgcattcctgtttcgcggatgcaatatcatttatcaaaacaagaaaagagaagttaaagagatctcatggttttcgttttcgcggatctacgacgatatcataaaaataaaagagtatagtactaacaatgaaatttataacaaattcgcagcttaa

SEQ ID NO: 95768 - DNA, 612 bp, Enterobacter aerogenes
atgactatattgaaaaatttagaagataagtttaataagattagttccgatagtgaaagctatattatatcatatagtgatagtgttagactcaacgaaactaaagtagtagttagtaaaggtgcattatataatattcgaccctacgaaatcgaacgagctggatttaagataggtaagaaacttaataaattacctgcaaatgtaaaaaatacacacatctatcactttgatagtctggaacgtatatcgttaatagaaatatttggacagacatcaaatataattaacaaagagttttgtatctatgaaggtgataacttagaaaggatttattttaccagtgccggtatgctgcgaaacatctctttgtcagtatacaatgatggattgattgaaaaagatttcaattgggggatgtatgggtgcagtgtatctgattatgtttatgaagactcaattcttaagaaaatatatgttcagcaaaaagaacatgcagaatcatcttttacagaatttgaagttgtattttcgtataaaaatgcgatcatcgataccattaaaaatgtatttcctaatggttatgaagaacaacgttatcctgcacgctga

SEQ ID NO: 95769 - DNA, 273 bp, Enterobacter aerogenes
atgaaagaactcgagtatataaagccatatagcttaaaagaattaattacgaaaattgttcatcagggatacacaaaagacaatttttgcctttacacaaaggaatatgaagctgttgctacccccgaacttgtttgctatctggatcggtatcctgaagttagtgatgatgaagacgtttatcctgaatacgttgagcaaaatgaattggagttgtttttttacggcgatcagtttatggatgttctcaaaaatgcactgaatcaaaaataa

SEQ ID NO: 95770 - DNA, 468 bp, Enterobacter aerogenes
atgaagggaatgcaaaaaatcagcaggggtaaaaacttctctggtgtcgttctctacgcattaaagccaggctctcaccataaatgcacaccttatgtcattggtgggaatatggatggaagtgatggtggagatctgatagctgaatttgatgcaacaaaaacgcttcgcccggatgttgctaaacccgtctggcacaattcgcttcgcttgccgaaaaacgaagcgctgacagatgctcagtggtcagggattgctgatgattacatgtcccgaatgggcttctctgaaacgcacctcagatgctatgtccttcatgatgatgcggccggccagcacatccacattattgccagtcgtatagatctatccaatagaagcctttacttgggcaaaaatgaaaacctcatcagcacccgtatcatccaactgatcctacccatgaatagtggacacgggactaagtga

SEQ ID NO: 95771 - DNA, 441 bp, Enterobacter aerogenes
atgagcacaaataatacttttaataaaatcaatgaaagcaggcattaccgtaatggaagcgttagcgaaacgaagctctcgcacgatcagcttcgttcacattgcgtcagtgtcagacttaataatgaagagcttactcttctgaatgcgaaacgtggtcgtcatcgtaaaggcgaatggcttcgtatggcgtttctgcataacctcccctcagttattccatcgatcaatctcgaaacatggaaaacccttggtgagatttcacataagttaaacaggcttgtcactcatctggatagcaagagcaatgatagttctctctcacaaactgaactctttgcagtgaagcgtcagatctcagagcttcgtttgaacctgatcacagccgacctatggagatcaccttctgatgaagggaatgcaaaaaatcagcaggggtaa

SEQ ID NO: 95772 - DNA, 678 bp, Enterobacter aerogenes
atgaatatgttcgaatctttcattagttatattaaagatagcaaaaatataaagccgataataattagcttattaacaatactacccttaactgctttatgtacttatgtaatcatagataatattataattaaagaaaaagtctctcggataaacgaattgacctacgacaaaaattatcttactaatcaattggcaacactccaagcacgattagaaaaacaagttaataatgaggagtcaagacttgagaagcgatccactgctatcaaagcgttatatgatggagtcatcgctgaaaataacattaaattcagagagttaaataataagcgcgatgaattagcactccagttagccaagtgtaatagtagtgaggaattagaattatataagatcaataaagaaagcgtcatacaactcaagcaagagttgatctctgtgcaaaagaatataaataatctttacttggttcactcacaattaagttcagagtatggctattcgcttaaagaatgtgagaaacgtggggaaagttttcacagtaatatatgtgaacactcatcaagttcaaaagcgaagcttgactcattagttgaacaaattaagtcccaagaacaaagaagacaatttatacataacgaaatattgttacttcagggagagaaaaagcaataa

SEQ ID NO: 95773 - DNA, 1077 bp, Enterobacter aerogenes
atgattagctccggaataaatatcaaccagactgacatactgaacaaaaacgcacttttctatacaccctctcctgaaaccctgggtgtgctggctgaacatgggattgatatcaaccatacggataccttaggcagaaatgcgcttttttacagttgtgaaactaaatctgccgggttactgataaaaaatggaatcaacataaatcatactgacctagaagataaaaatgcccttttctttgcagtcagcgaaagtttagtcagcgaattaatcgatagcggtatcgacattaatcatactgacagcatgggaagaaatgcgcttttctacgcctgcgatcttgatatcagacgcctcctgattcaaagaggcataaatgtcaaccgcagagatatttacaataataatgccgttcgcattaccagtattgacgcggaattgctgaatgattatttcgccgctggccttgatcctaacatacaggactactacggaaacagcttaattttttacccttataaaaaatcaattacagacgttttaatcaacaataactgcgatataaaccatgttaataacaatggagaaaccgtcttcgaatacatacagaccatgttattcagcaaccgtcaacttgatcagtgtctcagtgtgcttacgccttacattcactttattaatgcaagaccattaatttttaatcgtctcacttttggctgccttgagttgatcaaaatattgcaaagccagaatatcgattacaaaatcaatgagcgttgcgttgtaagatacgctaacaaagacattaaaaagttcattactgaagtgcagaaagtcattaatatcagccacattactttttgctcatggtatgacaccccgcttgttagtttaaaaaacaaggaaattattaagtggtttataaggaataatatcaaggtaaacgttaatgatattgaagaaccagaggttcgcattgaaatccttgcctatcttgcaagtagggaaaataaagaactcaaaacccttattaagcctgttataaaagatattaactgtaaaagaaggctgtga

SEQ ID NO: 95774 - DNA, 156 bp, Enterobacter aerogenes
atggtgagaataatggtggcaaaacagcgttgcttaatgcgcttcgttggtgcctttatgaggaaaccactgaaaacttactcgaccctaaaaatcttctcaataagcatgcagaatctcaaggtaagaatactttcagtgtttctgttcaactag

SEQ ID NO: 95775 - DNA, 231 bp, Enterobacter aerogenes
atggaccttgatgcctttaaagctttgttaaagcaagtcgataaagatacccagatcgctcatctggattactcaaagaaatctgctgtgcataaagcagcactgcaggttatgcaatttgagaaagagctttactatggagatttagtgcaaagtcgtcatcttcagaagatcaaagatattattgaggctaatgtggaagatatcataaatgaaactaataagacttga

SEQ ID NO: 95776 - DNA, 1947 bp, Enterobacter aerogenes
atggacgctgtacagaaagccaaatccggccaccctggcgccccgatgggcatggctgacattgccgaagtcctgtggcgtgatttcctgaaccataacccgcagaacccgtcctgggccgatcgcgaccgcttcgtgctgtccaacggtcacggctccatgctgatttacagcctgctgcacctcaccggttatgatctgccgattgaagaactgaaaaacttccgtcagctgcactccaagactccgggccacccggaagtcggctacaccgcaggcgtggaaaccaccaccggcccgctgggccaggggatcgctaacgcagtcggtatggctatcgcggaaaaaacgctggcggcgcagtttaaccgtccaggacacgacatcgtcgatcacttcacctacgccttcatgggcgacggctgcatgatggaaggcatttctcacgaagtgtgctccctggccggtactctgaaactgggtaaactggtggcgttctatgatgacaacggcatctccatcgatggtcacgttgaaggctggttcaccgacgataccgcgaaacgctttgaagcctacggctggcacgtggtgcgcggcgttgacggtcacgacgctgacgccatcaaacgcgcggtagaagaagcgcgcacggtcaccgacaaaccgtccctgctgatgtgcaaaaccatcatcggcttcggttcgccgaacaaagcaggcacccatgattcccacggcgcgccgctgggcgacgcggaaatcgcgctgacccgcgaagcgctgggctggaaatacgctccgtttgaaatcccgtctgacatctatgcgcagtgggatgcgaaagaagctggccaggcgaaagaagcggcgtggaacgacaagtttgccgcctacgcgaaagccttcccgcaggaagcagccgaattcacccgccgtatgaaaggcgaaatgccgtctgacttcgacgccaaagctaacgagttcatcgctaagctgcaggccaatccggccaaaatcgccagccgcaaagcatcgcagaacgccatcgaagcgtttggcccgctgctgccggaattcctcggcggttctgccgacctggcgccgtccaacctgaccctgtggtccggctctaagccgatcaacgaagacaccgccggtaactacatccattacggcgtacgtgaattcggtatgaccgcgattgccaacggtatttcgctgcacggcggtttcctgccgtacacctctaccttcctgatgttcgtggaatatgcgcgtaacgcggtacgtatggcggcgctgatgaaacagcgtcaggtgatggtctacacccacgactccatcggtctgggcgaagatggcccgactcaccagccggtagagcaggtggcttccctgcgcgtcacgccgaacatgtccacctggcgtccgtgtgaccaggttgaatccgcgattgcgtggaaatatggcgtagagcgtcaggacggcccgaccgcactgatcctctcccgtcagaacctggcgcagcaggagcgtaccgcagagcaactggcaaacgtggcccgcggcggttatgtgctgaaagattgcgctggccagccggaactgatcttcatcgccaccggttcagaagtggaactggcggttgccgcgtgggacaaactgaccgctgaaggcgtgaaggcgcgcgtggtctccatgccgtccaccgacgcgttcgacaagcaggatgcggcctatcgtgaatccgtactgccgaaagccgtttctgcccgcgtagcggtagaagccggtatcgcggactactggtttaaatacgttggcctgaacggcgccatcgttggcatgaccaccttcggtgagtctgcgccggcagagcagctgtttgaagagttcggcttcaccgttgacaacgttgtcgccaaagcgaaagcactgctgtaa

SEQ ID NO: 95777 - DNA, 300 bp, Enterobacter aerogenes
atgaccaaatcagccacaaccagcaacaagccccgcaaacaacactcgcctgagttccgtcaggaagctctgaagcttgctgagcgcattggcgtagccgccgcagcccgtgaactcagcctgtacgaatcacaactctatgcctggcgcagcaagctgaagaatgcgcattcttcttccgaacgtgagcaggaaatggctgttgaaattgcccgccttaagcgccagttggctgaacgggacgaagagctggccatcctccaaaaggccgcgacatacttcgcgaagcgcctgaaatga

SEQ ID NO: 95778 - DNA, 855 bp, Enterobacter aerogenes
atgaagtatgtctttatcgaaaatcatcgggcagagttcagcatcaaagccatgtgcggggtgctgcgcgtggcccgcagtggctggtacacctggaggctgcgccgccatcagccaaaccgacgccagcagttccgtctggtctgtgatgccgctgtccggcaggcattcagtgacgcaaaacagcggtatggtgcaccgcgtctggcagatgaactgccggaatacaacatcaaaaccatcgccgccagcctgcgtcgtcagggccttcgggcaaaagccgcacggaagttcaggccggtcagctaccgtgagcatggtctgccggtatcagagaacctgctgaagcaggatttttacgccgatggtccgaatcagaagtgggcaggcgacatcacgtatctgcgcacagatgagggctggctatatctggcggtggtgattgacctgtggtcccgggcagtcattggctggtcgatgtcgccgcgaatgacggcgcaactggtgtgtgatgcgctacagatggcactgtggcgacgtaaacgcccggaaaatgtcatcgtacatacggaccgtggcgggcaatactgttcagcggactatcaggcattaatgaagcggcataatctgcgtgggagcatgagtgcaaaagggtgctgttacgacaatgcctgtgcagaaagctttttccactcactgaaggtggaatgtatccacggggagcgctttatcagccgggaaatgatgcgaacgacggtgttcaattatattgagtgcgattacaatcggtggcgacgtcacagtgcctgtagcggactcagcccggaacaatttgaaaaccagaacctcgcttag

SEQ ID NO: 95779 - DNA, 486 bp, Enterobacter aerogenes
atgcattcattaggaatgtttttactacgaggtgttaaccaaactggaatgaacaaaatatctaatcttttaaaagaaaaatcatttggtaacatgatttggttaatgtcagatagtatcctccgactcgggatggggtttattgttagcgtctggcttgccagatacatgggaccatctgcatttggtgtatttaattacgcatatgcaatgattgtcatttattcggctgttgcttcgcttggtatgaatggggttgttgttagagaattaattaaggggaacgctgatactcgaactattctagggacttcatttttcttgcaagtaatggggagtctgttatcaacttctttagttgtgttgacggtattaatgttaaggccaaaggattatgatcttttgattatacttttgtgtatgttgccttcagtgttattacgttcatcagatattgtaaagtatctgtctcttatacacatctga

SEQ ID NO: 95780 - DNA, 531 bp, Enterobacter aerogenes
atggggtctgacggtttcaagtgcaccacctttaccgaaggcaattactggagttccacaagcctgtgcttctacaggtgtaattccaaaatcctcttcggctgcaaaaacgaaagcttttgctttacgcatatactcttccataaccgcattggattgatatccaagaatttctatgttcatttttgctttagattttatttttgccatttccgacccatcaccaatcacaacaagtttcttatctggcatctggctaaatgcttccacgataaggtcaatgcgtttatatggaaccagtctggatgcagtgaaataatactcgtccttattttcacaaatggaaaaacgatctacatctacaggagggtaaataacatcagcatcacgtccgtacaccttctttatgcgacgagctataaatttagaatttgcaataaagtgatcaacactatttgcggtacgataatcccaaagtctcattttgtggagtatccattttgccataaggcctttcatacctttatctaa

SEQ ID NO: 95781 - DNA, 588 bp, Enterobacter aerogenes
atgatttttaacggggaaatggttcgcgccattctcgacggtcgaaagacgcagacacggcgcccagtgaaattccctgtgcatgataaaaaccttgggtgcgagttggctggcaatgaactggccggggagctgtcggcagggaactatctgaacagcgcatttggcaagcaaggcgaccgcatctgggtgcgggagacttgggcacgctacaacatcgaccaagacagtcacgatatggcgtaccgagctactcctccggcaggctggccagaaggtgggcggtggagaccatccattcatatgccccgctgggccagccgcattctgttggaaatcacaaatattggtgtccagcgtattcattccattagccagaacgacgcggctcgcgaggggctgatgaggctgcccgccaccggccgatactgcattaatcaaggcgaccaatatttcggtggggccagccatgatgcccgcgaagtgttctcgtggttgtggcagtccatatatggcgaagagagctggaatgcaaacccgtgggtgtgggttatcgagttcaagcgcgtagaaggcggtgcagcatga

SEQ ID NO: 95782 - DNA, 615 bp, Enterobacter aerogenes
atgaaaatgcacaaggctgaagagtacactatctcagttagacttgagacaatcgaaggtgaaaattactttgtcggaagagtagctgaattgcctgacgtggaggagtatgctgacacccgagaagaggccttttcattagctctggatactatccgcaccactcaaagggtatttgcagaagaaggtcgtgaatttccttcccctgtgtcctttaacgaacaaccgttggccaccgggagagtgaccttacgtctgaggaaaggaacccatcaacaagctattgaaaattcgaagttagaaggcgtaagcctaaattcttatttgtgtgcaaaaatagaaagcaacatacacaaatctgatttttcacaaatcctcaaccagttagaacagctaacagagcaggttcgcgaacttagcaatcaaatgcaaacaccacatatagaacattatagctcacgacgtctgacaacgactttacatattggatctcaacaaaaattcaatatacatagcaagttgcgtttatcggattctgagaattttaacaacgagtcaaacccgagcaaggtagcgttttacccaggcttcttctctggcatggaatgttcctaa

SEQ ID NO: 95783 - DNA, 189 bp, Enterobacter aerogenes
atgtcaggaacaaagactgaggtaaacgcccaggcgacccataaatgctccttttgcggggcgagcaacattgagattgcaggcgttctcatcgccggccccggcgtatccatctgtcaaaaatgtgtctttcagtgcgttgatattgtctttcagcacgcagaaaagaccgataaaccaacgtcataa

SEQ ID NO: 95784 - DNA, 909 bp, Enterobacter aerogenes
atgcgtgactatgcaacagtcgcaccgcaattctggctggggaaaacaggtcgggaactgcggaaaaaaggcgctgaagcgcaggtggtctcgttctatctgatgacctcgccacacgcaaacatgctcgggttgtattacctgccaattctttacatcgcccatgaaacaggcttgggcttggaaggggcttcgaaggggcttaataggtccatagaagcggggttttgtagctatgacgaggacacagagatggtctgggtgcatgaaatggccgcctatcaggtaggcaaagcattaaagccaggtgataaccgttgcgctggagtcagaagtgagtatgcatcacttactgaaaaccgttttctttcagagttttacgagcgttacaaaaatgattttcatttgaatatcaagcgagaaccacgccgaattttggaaggggcttcgaaggggctaggaagccaagatcaggaacaggatcaggaacaagaaaaagataaagatctcttggggcatggctccgccacacccccggatagtgaattttcagatgaagctccatctgaaaagccgaaaagcagttattcggaggaatttgaacaggcctggagggaatacccgaaacgagccggaggcaacagcaaggctgacgcgttcaaagcctggactgcccgaattaaatccggcgcgacagcgcaggagctcatcgatggcgttcgtcgatacgctgcatacgtgactgctgccggaaaactcaataccgagttcgtgaaacaggcatccacatttttcggtccgtccaagcactacgaggaaccatggaccgcaaccgcggctgccggaaagcgggatccgaatctagtgtcccagcccagtaagttaattcccagcgggttcagggggtag

SEQ ID NO: 95785 - DNA, 786 bp, Enterobacter aerogenes
atggctaagaattctatcgatgtatacggtgccagcggcaaaacaaacgtgctcaacttcgagcctgaaaacctgcacctagtcacagataaggcccacccactttacgatgagcgtattcaccttcctatcagcgaggcaatggtgctgaacatcatggaccagggagtactggaaccaatcattgtctggaaagaccctgagagcggtttgtcctgtgtggttgatggtcgccagcgtgtgcgccatacactggaagccaacaagcgtctgtcgaatgagggcaaagaaccattactggttccggcagtcactaaacgtggctctgctatccgcatggcgcaggcgatggtaagcgctaacgaaatccgccaggcagatacgccgctgggccgcgcaaaaaaaatggctgatgcgctggaacgtggacacgacgagcaagacctctctctgatgtttggctgcagcgttcagaccgtacgcgcaacgctgtcactgctggatgctactcaggctgttcgcgatgcagtggagtctggaactgtcaccgttactcaggcgcgtcagctggtatcgcttaaaccagaagagcagcgggagaaggtcgctcaaatcgaagcggcaactgctggcacaaccggccatgaaaaagcccgacgtcagcgcgctgcgcttggcgaaactaagtcacgtctcaaatcacgcaaagaaatcacaaaagccctcgaaggtgccagcggtgaatacgcggcggctctgcgctgggtgcttggggaggctgtatga

SEQ ID NO: 95786 - DNA, 138 bp, Enterobacter aerogenes
atgagcaagaatcaaaagcctaccgtccctgattggatgcagccaacgtctccgctcactgatgcgcagcgcgatgagttacggcaagccatccgtgcgtatatccgtcgccggaaagacgaggagcgtgcagcatga

SEQ ID NO: 95787 - DNA, 345 bp, Enterobacter aerogenes
atgactgatatcactaggcttttagccagcctcaagcgccgctcagcccatgcaaaagagttcggccacgacgttctgttcgtaaagctcgaagacctagacgctctgggagaggttctggagaaggcgcagcagcgcatcggcgaactcgagcgcgaagaggaatcttttcgcccggtcggcgtaatgagtgagaaagcgtatcaccgcctggaaaacagagaatcacgctttattgcactctggcctcgccccgagatctatttaccgcgtaagcgcccgaaagatggcgttattgtttatgcccgaaccgtggtcccctcaatcaacaagaggaagggatga

SEQ ID NO: 95788 - DNA, 978 bp, Enterobacter aerogenes
atgttcacagcaatagataatatattaaattcagcccaactttccggcgaggcttattttgttgcagaactccaagggcaactagatattttcagagttgctctagaaccaggggcagaacagaaattaacacagtctttcagtcaatcacttaagcgtgatgttgttgacccaaacactggacagaacgctttgccgttagtttcttctctgctaagtcgagataagcaggtgcatgagtatgatcaccaagtaataaaccatcttccacctgctctagcaaagatggcggacgtgcttagctttggagttaataatacccccactgattttgactttgcccagcaaaacctatcaaccgttaaaggaatagtttattatctttgtgatggccaaggtaacggagttgttgtttaccagcacaaatatccaatcgcactacataaaaaaacaaaattgtcatacttctctgcgaatggtagaacccttgatgaggtcactcatgatagcattgacataaatgggaatgtggatttcttttattttaacaacaagtattatgcactaaacatcaacttacttgaaagagcgtatggccttgaacaagtcataaacaatttagcggcaaatgcaactcctcatataatcgcactgaacatcctagacgtatcaaatcatccgaaccctgcagacatttttaatgacatgcatcgaaatagaaatttcatgcgcagacttgccaccacagcaaatagcccactaatacagaatggaactattaacatagccaccattcagacattaattcaaaacttcccgattcttgggaggaatataataattaaccaagctggattgatagaattatcatctcaaaagcaaaaactatatttcattcgcctgctaaataatgaggcatctttcacagcattaaaccgagagccttttcttgcggtcggaaaagactcagcggcataa

SEQ ID NO: 95789 - DNA, 594 bp, Enterobacter aerogenes
atgaaaaaaagaacaggtttaaagtatgcattatatatattgtcactgtggctattatttgtttcactttttataatgtcatatgataagaatctttttgtaagtatatcatcatatctggacagcaaagatacagaaatattaatctcaagcatcacgcctaaaaatatagtttttatttccagctttgcaatgatagtagcaggcgttttaatttttctatatttactattttcctttaactctggttggtcagtagcgtgcaccgtttctgatgttagaaatgaaagtcatgagcatcttgaattcttaactacctatgttatgcctctggtatttactgatgtgaacagcaagaggactatgctgaatcttttgatcatgatagtagctatagggatgatttatgtaaaaacaaatcgtttttattccaacccatcattagcattgcttggatttagaattttcaaagcaaatataaatgatagaggaaccaaggaatttgtaatcatttgccatggcgaaattgatagcaacagcagaataaaatatatcaagctagataacaatacatgtcttgctaaaataacttaa

SEQ ID NO: 95790 - DNA, 297 bp, Enterobacter aerogenes
atggcagaccttcgcaaggcggcgcgtggccgtgaatgtacagttcggatccccggttactgcaacggcaacccagaaaccagtgtgctggcgcattaccgactggccggcacctgcggtaccgcatgcaaacccgatgatacccaggcggcgatcgcctgcaacgggtgccatgacgtaatcgacggcagaactaaaaccaccgatttcacctacgacgaattgcgcctgatgcacgcggagggggtaatgcgcaccctggaaatctggcggaaagagggactcattaaatcatga

SEQ ID NO: 95791 - DNA, 369 bp, Enterobacter aerogenes
atgaaaatctacgatatcacgcccatcggcaaacccaggatgaccagagctgataagtggaagcagcgtccggcggtaatgcgctaccgggcattctgcgatgaggtccgtctgaagaacgttgctatgccggagcagggcggacacataaccttcgtggttcccatgccaaagagctggagccagaagaagcgagtaacgatgaacggacaggcacaccagcagaaaccagacgccgataacatgatcaaagcgctgatggatgctctgtttactgatgacgcacatatctgggactttcgtgtaacaaaagtctggggtgaatccggacaaattttaatttctgatatcggagaagtggccgcatga

SEQ ID NO: 95792 - DNA, 783 bp, Enterobacter aerogenes
atgaaactggaagcatcgttaaagcatttcagcccgcaggggatgcatatcagcgacgacgtgaaaagcacatcgccgaatcgactgaccggaacagatgttatggcggccatcggtaccaccagcagtcgtgcgcgcttcggcctttccgctttcctcggaaaggctggtatcagcaaaacggacgaacagcttgcaattcaggcgctggcgcagtttgccatcaaaaacgctcctaaaaatgtccgcaaagccgctggtgacaagctcggcgcctgcatgttgacgctggcgcaatttgcctttgcggaatactcacgttcggcggccaccagagcaacgtgtcaaagctgcagcggtaccggctttatttcccgccatgaagatgtaattaagcaccccggtattttcgatgctgacggtgtcgaagtgaaggccccaaagattagaaatgaactggtgaaaagggtctgtggagtctgcggaggaaagaaagtgatccatgcgcgatgcaggtgtagtggtaaaggggaggtcttagatcgcaaagcgaccaaagaacttggcgcaccggttttcaaaacatgtgaacgctgctctggtaatggcttctctgttgtaccctctgcgacggtacaccgcgccattctgaagcgtctcccggatctccatcagtcttcgtggtcacgcaactggaagccgttctatgaagggctggtggatatgcttcacaaaggagagagacaggcagcggctgaatttgagaaggcgaccatttattga

SEQ ID NO: 95793 - DNA, 333 bp, Enterobacter aerogenes
atggatacgtacatccaaatgaaactgattctgaaccctgccaaccggcggggttttgcttttctgggggaagcgatgcagcagccatatttttttaatccgggcatgaccactcaacagcttgaagactggcttgggcaacagaaaatctatcttgcccacttcaaccgtctgatagcagaaaaagccgctcttgaggagcggctgagtcagatctctgcggagattgggcgagtcgctactggtagctttgaaggaatactgagttttccctgggatcccagtcctcttgcggaaaatcctcaacaggatagtggccagtcggcagattga

SEQ ID NO: 95794 - DNA, 474 bp, Enterobacter aerogenes
atgattaaaacatcaactggtgaaaatatgagtaagtactcagaccttttacaggtaatcaagtcccgggtttgtcaaaataacaacttcccccaaacattactggcagactcacacagttacagagccaggcaggtttggtatcgaataggacaaatattcactcttgaatgtattctcgatgagtacaggaaacatttttcatcggattattattatcttgataacgataaggctcttcatcaccttatcttcgaaatgaccaagtggaaacctgaagagattagaagactctcgctaaacgactgtctctttatcattgccagtcaactaaagcccagttatatgtcagaagatgctgccgctgtcctagcgtcactcaatctgccgactggccactatcctgttgaggattttccgcaagaggactgggatcccagggaaaactcagtattccttcaaagctaccagtag

SEQ ID NO: 95795 - DNA, 312 bp, Enterobacter aerogenes
atggctaaacgtatgcaagacaaagagagcattgccgggatgtcctggctggttctgctgatcattgcttgctggggtggacttgtccgctacctgatagatgtgaagcagagcaaggcaacatggagcttgatcaatgctcttgcccaaatggtggtttcagggtttaccggcgttattgctggcctggtgagcattgaaagcggactgagcatttacatgatactggccacttccggaattagcggggcaatgggttctgttgctttgacctatttctgggaacgcattaccggagttaaggcgccatga

SEQ ID NO: 95796 - DNA, 540 bp, Enterobacter aerogenes
atgacagcagatcagattatcgaggggatcctcggcaaggagggtggttatgtcgatcatccgtcggataaaggcgggccgacccgctggggcatcacgcagaccaccgcccgtgcacatggctacaccggtgatatgcggaacctgcccagggaaacagcaaagcaaatcctgctgagcgattactggaccggcccccggtttgaccaggtggcagctctatctacgttactggcagatgagctttgcgacactggcgtgaacatggggccatctgtagccagtaagtttttccagcgctggctgaccgcaatgaatatgcgcggaaagctgtatcccgatctgattccggatggtgccattggtccccgaaccatcaccgcgcttaagggatacctttccgcccgcgggaaagagggtgaacaggttctgttgcgtgcgctgaactgcagccagggtgccagatacctcgaactggcggagggccgcgaagccaacgaggattttctctacggctgggttaaggagcgtgtcctgtga

SEQ ID NO: 95797 - DNA, 348 bp, Enterobacter aerogenes
gtgaagatgatcattttcgctttgcttgtgctggtggctgtgctcgttctgttacttctgcgcaaatatacccggctggagttcgtagggcatgccagcttgctgctgaaaacgtggtctgtaaagctgggagctatcggcgcgctggttggtgtatgggcgcagtcgttcccggatgctgcgctgcacgcctgggcggtgctgccgccggatatcaaaaacatcctgccgtcaaacatcgttgcgttgattagccctgcgctggtggtgctggccgtactatcgcaatacgtacgccagccggcattgaaagataaggccgacgaacagaaggagccgcagcaatga

SEQ ID NO: 95798 - DNA, 240 bp, Enterobacter aerogenes
atgatgcatgtgacaagttttgaactagggaaggcctggtctgtaaagttaggggcaaacgtgattattcatagtgatttggaagcttacctattccttcttctcagcatgtggccggtattgatagtcgtttgtgttgggatggcgttggcgtttaatggcgtccttatgcgtaaaacagcaatactgttcatgatactagcaatcagtattggtttattgggctggctttatgcctga

SEQ ID NO: 95799 - DNA, 1308 bp, Enterobacter aerogenes
atggcgatagctccgacgcttaacgttccccaggctcgttttctggctatgcagcagaagtttaaagcctatgtagctggctttggatccggtaagacatgggttggctgcggtggaatatgcaaagggttctgggagttccccaaaataaaccagggctactttgcccctacctatcctcagatccgcgatattttctatcccacggtggaagaggttgctcacgactggggactgaaagtcaaaatcgttgagagcaacaaagaggtccatttctacagtggccgccagtaccgcggcacgacaatttgtcgttcgatggaaaagccggacacgatagttggctttaaaatcggcaatgcgctggtggatgagctcgacgttctgaaagcggataaggcgcgtcaggcgtggcgaaaaatcatcgcgcgtatgcgttataaggttgatggtctgcgtaacggcattgacgtgaccaccacacctgaaggatttaagttcgtctataaccagtttgttaaggctgtgagggaaaagcctgaactgaggccgatgtatggtctggtacaggcttcgacattcgacaacgaaaagaacctgccggatgactatattccttcgctcctggcaagttacccgccggaattgatcaaggcatatctgaacggccagtttactaacctgaccagtggcaccatttatcaccagttcgacagggtgctgaacaactccagcgaagaagagcagccgggtgaagcactctatatcgggatggacttcaacgtcgggaagatggccgggatcgtccatgtattgaggctcggtttaccgcatgcggtaaccgagattatcaacgcttacgatacgcccgacatgatacgcatcatcaaggagcgtttctggctgtatgccgacggtgactaccgcaaggtccgcgagatttacatttatccggatgcctctggtgattccaggaagtcaaacaacgccagcaaaacagatattgagcaactccgacaggccggatttaacgtcatcgttgatgatgctaacccgccagtaaaggaccgcatcaactccatgaacgccatgttctgcaatggtaatggcgatcgccgatacaaggtgaatgtggcccgttgtccggtctatgccgactgcctggaacaacaggtgtgggataaaaacggcgagccggataaaaagagcgataacgatcatcccaacgatggcgccggttacttcattgtgaagcaattcccaatcgttcgacctgcattctctatttcactggacacgacattctaa

SEQ ID NO: 95800 - DNA, 1401 bp, Enterobacter aerogenes
atggccaataacgatattacttacgttcgccctgaggtcagggcggcgatgcccgtgtggaaaaaaattcgtgacgtgtgcaaaggggctgatgctgtaaaggccgccgggaatgaatatctcccttttctggatccgtccgataagtctgcacgcaataaaaagcgcaatgccgattatattcagcgcgccgttttctacgcgataacgggcaatacaaaggtggggttactggggctggcattccgaaaagacccgaccatgaccgcaccggataagctgaattatcttcgtgataacgccgacggtgctggtgcaagcatttatcagcagtcccagcaggttacagaaaatattctggagaccgcgcgcgaggggctttatacggattatgcagcagagaccaacgaggcgatcattcttcgctatcaggcggaaagcatcattaactggcgcaccaaacgcatcaatggacgtgatcaactggtgctggtggttttacgcgaatgcatggaaaaggaagatggctttgcgtacgaggatgaaatccagtatcgcgaactggttctggagaacggaaagtttgtctgccgggtgtggcgaaaggcagctgacgcaggctctttttccgtcagttccgagtatcagccgaagccaaaaggtgaggaattctgggatgaaattccctttacctttgttggtgcacagaataacgatcccaccatcgatgagtcgccgttagctgctctcgttgaaatcaaccttggccattatcgaaattcggcagattacgaagacagcgtatttttctgcggtcaggtgcagccggtgatttcaggtcttgatacagcttggcgtgactggctgcaggataagggaattcgtgtcggttctcggtctcctttcctgctgccgaaggaggggagttttacgtatgctcaggcgcaaccaaacaccctggctaaagaggcgatggacagtaagcgtgattattctgttcagcttggcgcccggcttatcgagcaaaacagcgctgttaaaaccgccacgcaatcgagcggagaacaaaccgcatccacatcggtgctcggcatttgcgtttccaatgtctcggaggcctacacgctggcgctcggctggtgcgccaggtatctcggcattaagggcgaggaataccgttacagcattaatcaggagtttattgccaaagtcgctgaatccggcatggtaacggcaatcgtcaatgcctggcagtccggtgcgatccgcgacacggatatggtcagagcgttgcagaggcttgacctgatagatccagctgatgaccctgaaactgtcattgacgctattcgtaacggcgcgcctaacctgattggtggcaataatggcaacggcgaatga

SEQ ID NO: 95801 - DNA, 1113 bp, Enterobacter aerogenes
atggcaacggcgaatgacaaactgcaggatgaatccgtagcccacgctatatgggtgagccgctacagtaccggcgttgccaacaggatgataaaagtcctgaatgacagcgacgccgaacttaccgcaaggttgctggtggctattgatacgctggacgctgagagctttaccgtttcgcgtctggaagcgttactggtaagcgtcagggcgataaacaaggatgcgattcagtcgatgtatgcagctcttactgccgagctgcatgaactggcgaagcatgaagccacttttcagatgagcctcttccagtttgctattcccgacgatgttctcgctcttcatccgctggtgggtatctccccggatgcggtttatgccgcggcgatggggcgtccattccagggtcgtttgctgagtgaatgggccagtaacctagaagctgatcggatggcgcggatatccaatacagtgaggcagggattcctgctgggcgatacgcaggagcaaatcgcaaaaaaggtccgtggccatgctaaccgcggctaccaggatggtgcgcttcagatgagccgggccaatgcggccagcatagcgaaaacggcagtagggcatcttgcatcaacagcaagacaaagctttgcgtcggcgaacgacgacattctgaagggtaagcagtggttatctactttggataaccggacatcaaaggattgtcggatccgcgaccgactcaagtacacgctggataacaaaccgatagggcacaaggtgccatatttgcaggggccggggaaaatccacttttgctgtcggagcaccgaaacttacatcctgaaatcgtccgaggaattgggtattaaagtcggcgaaatcaaggatagctcgcgcgccagcatggatggacaggttccggctgaaacgaattaccaggactggttctcccggcagtcgttcacgcgacaagctgagattgtcggagaatcgcgcgccaggctgattcgtgatggcggcatgtctcccgatgagttctacaacgacaggggcgagtggttgacgctggaccagttgcgctcaaaggatgagcaggcattcagaaacgccaggctttaa

SEQ ID NO: 95802 - DNA, 786 bp, Enterobacter aerogenes
atgcttattcgtaacatgctcattaaatattattcggcagctggcggtgaaggtggtgatggcggtggctccggtggtggtgcgcctgagattacgcctgaaatccaaaagctgatcgatgagcaggtcaatgctcaggtctctggcctgaaaaataaaaatagcgaacttctcggtaagctcaaagagtccactgagtcgctaaagcgttttgatggtatcgatcctgacgcggtgaaaaccattctccagcgtttctctgatgatgaagaagcgcagcttattgccggcggcaaaatcgatgaggtgctgaacaagcgtactgaacgcctccgcgccgattcggataagcaaatcaaagccgctaatgaacgcgctgaaaaggcggaagcgttctccaacaaattccgtgatcgtgtcctgggtgatgctatccgcagcgcagcgcttaaggctggcgcgctgccagaagcatccgacgatctgattctacgtgctaaaggcactttccagctcaacgacgaaggcgaggccgtagcagttgatgcaaatggcgatgttctgttcggtaaagacggcaaaactccgctcacccctgttgagtgggctgaatctctgaaagagacggccccgcacctgttcccacgtgctgaaggctccggggctggtggtcacaagccaggtggcggcggcggaagcctcaaacgttcagaaatgagctcaagcgataaagcggactacatccggaaacatggccagcaggcctatctcaaattgcctaagtaa

SEQ ID NO: 95803 - DNA, 954 bp, Enterobacter aerogenes
atgcctacgaccgtaaacagtgacctgattatctatgacgacctcgcgcagactgcgtttcttgagcgtcgccaggataatctggaagtcttcaacgccgcctcaaatggcgcaatcattcttgataacgaactgatcgagggtgatttccgtaaacgtaccttctataaagttggcggctccattgagtcgcgcgacgttaactccaccagcactgtagacggaaaaaaaatcggtgccggtgaatctgtcagcgttaaggcgccgtggaaatacggcccgtacgaaaccactgaagaagcgtttaaacgtcgtggtcgcgatgtaagcgaattctccgaagtgatcggcgtcgacgtcgctgatgcgacgcttgaaggttatatcaagtatgcacttcagggacttgtggcagccattggcgcaaatgctgatatgacggtttcagcggatattgccactgatggtaagaaaaccctgacccgcggcctgcgtaaatacggcgataagtttaaccgtgttgcgctgttcgttatgcattccacgacctatttcgacattgttgatcagtctattgacaacaagatctacgaagaagcgggcgtggtggtttatggcggacagccaggtacgctcggtaagcctgtactggttaccgacaccatgccagttgatgcgattctggggctggtggccggcgcggtttccgtaacggaatcacaggctccgggtttccgttcttacgacatcaacaatcaggaaaaccttgccatcggctatcgcgctgagggtacggttaacgttgagctgctgggttacagctgggatgaaacgaagggcgctaaccctgatctgaccaaaatcggcactggtgcgaactggaaaaaacatttcaccagtaacaaatccactgcaggcgtactgattaagctggaagctccggcgggggagtaa

SEQ ID NO: 95804 - DNA, 396 bp, Enterobacter aerogenes
atgaccgtttatataacaatccaggacgttgacgagttgctgggggatacctgggctgccgccgacaaaaaggctaaagccgtactccaggcaaacacctggatgacggcgcttaaccttcaggatatcgacctggagcatattcctgaagaagttaagcaagccggagcgtttatcgcttccgtagccgctgcaggcaatctttatcagcaaaaaacagattccggggtggtgacgagcagaagcgtcgaagccgatgatgtgaaggtttcccgcacttttgctgaactctcaaccaccagcactgaattactcgatcctgatttgcaactggcgctggatatgctcaagccgtggatgcttaacccgttccagacgttctttgtgagggcgtga

SEQ ID NO: 95805 - DNA, 255 bp, Enterobacter aerogenes
atgtccgatttgaaagtggtcccatttcaaaagtccagccatcacgacatcgataatgatcaggtaattcgcttactgaaacaggctctggagcgtgctgaaaatggcggttgccacagcgtcgcagtgatactgcttgatgatgagggtaacgcgattgattgctggcataacggcggtcgtccttatgtgatggttggcgctatggagtcgcttaaaaccgactttatccatgctcatattgagcggcggtaa

SEQ ID NO: 95806 - DNA, 234 bp, Enterobacter aerogenes
atgcaaaatccagatgtgcattatgccggtgacggactcggtcctcgcgatgtgtttgtgaatggaaacccgatcagacatgtcgtttacgcaaacccggcaaagggcgttgttgagtttgctccgctcccgctgcgggttaagcgcaatggcgaaatttatacccgcaaactccacggtacagtgatcgttaaacctcagcagcatattggtgggtgcaatgggcattcgtga

SEQ ID NO: 95807 - DNA, 342 bp, Enterobacter aerogenes
atgaataaaaaagtttatgtgtgtgccatcaaacctaagccaggttacaactttgatgttttcattgaagagcttaacgaagatttaaagcctgatgatggcgtactatatgcaatacaagactactttgaatattacatgaaaggtggcaataaagattataattttaccgattgggactacataccacacgacattgagcgattgcttgaggctcgctacttaattggtgcgccaataaccattttaaaaagatatgacttattgacgcaggatggagtatttaccgaaaaaggcaagaagatcttctcttacctctctgataaattcgaattgaagtag

SEQ ID NO: 95808 - DNA, 1107 bp, Enterobacter aerogenes
atgataaaaaatatagaaatatcaaattttaagatcatagaaagcttgaagttgtctagcttgaagagagtaaatgtaattgcaggtaaaaatggcaaggggaaaacctcgatacttgattctatatttataaccaatgatattgcttctccggattgcttgataaaacctattgcttttagaggtggttctccagacttaactaataatgagctatggctatcttatttcagggattttgatagaaaaaacgaaatatctattaagatggaaattgaaaatggcatgaaacaagaaacaagagtatctattgagaatatcaagtctgatacatcgaatataggtactgtttcaagtaatgttattgagagaaaccagatatcaccaagatcatcatatagaggggatgttctgaaaattagaaagtatgatagaagtcaaccagaaagtttatcgatgaaaatggaagttacacaacaaataagtggaaatcaactcacctctaatttggttaagcacggaagtggcattgatgcaacagcaacaacatttataacaacatcaagcacaataaataattcaaatactatatctgtacttggcaacttaataaaaaacaaagatacaaaatcaataatagaaagtatgaaggaaataaatgataagatattaaatattgaacttggggttttaaatcaagtgcctgagatactctttgataccggaggggataagttagtaggactttcttcaatgggggaaggtgtagggaaactactaacaattttggttgtgtcttatagtactaaaaatggaataatacttattgatgagatagaaaatggtatacactattccctcatgccgtcaatattaaaaacccttgtttctcaatctcatagaaataataatcaaatatttgtgacgacacatagttctgatgtagttaacagcatagctaaacttttctctagtggttcagtgagtgagtcagatatttcatttacaagaattggatactctgaaaagaagaaaaaatcactggtaaactcattcacgctttcagaggttcagatttcttctgaagggaaatgggagatccgctga

SEQ ID NO: 95809 - DNA, 654 bp, Enterobacter aerogenes
atggaggagaaaaaattagatgaagttgttatcacaaaggagaaagtgatttttgttgaagggatggatgaagttaattttttttatgccttattaaaaaaaatggagatgggagatgactatcaagtaatcgactataagggaaagtcaaggatgagcgactttatatcaatgatgtcaaaaacagagagttttaatgagaatgcaatatctgttgctgtaattcgtgatgctgataacaactatgacttcgttgctgaagaaatcaaggatgcactaaaaagaatatttaatgttattaatcttgagcatggggtaatgaaaagtgaaaaggatattaatatcgggttttacataatgcctggtcttaaaaagaatggcgagttggaagacttggttttatcttcccttgacggcaatgaaatatttaaagaagttaataattatcttgatgtgctaaaagggatgacaagtcccgttaacaacgggtcaaagttttgttatccaaggaaagagtcaaaagctaagttgcaaatttatttttctagcatgaaggaatcagataccaggatgggattgtcagcgcagaggaattacgtggattttacacatgactcatttaaagaaataattgattttattaggtctatgtga

SEQ ID NO: 95810 - DNA, 327 bp, Enterobacter aerogenes
atgggatttccctccccggccaacgactacgcacaacgagctctcactgttgacatgatatgtggtactggcccaaacaccagaaccatagaaacggcaactggctatgttgtgattgatgtatcgctcaagcctaagcagaacagcacggtaatgatcgcttattccggaataactgattttgcaaaggtgatgggcaggacactaattaccagagatggggaagcgatcgaaggggaagcgcttaacgatgtcgaggttaagggggttgtgacgtttattatcaatcgggcgactcaggatgatgatggttgcccagttatgtga

SEQ ID NO: 95811 - DNA, 2424 bp, Enterobacter aerogenes
atggcgactaccgacacacagcaaacggcacagttcgcggcagaggcatccgtgagtgccgcagaggcaaaacagtacctgatcgaggtccagcagggctatcaggatattagcgccaccactcaggaagcgattaatgcggcgacagcggcagaagcagcgaagactgcggcggaaacatctgagcaaagttcctcagcttctgcagttgcctcatccgaatcggcaacggcagctgcaggttctgctgcacaggctgaagagtatgcaaataacgcttctgactacgcacagaataagttcacgttctataaaacctcaagtgacccggatggaactatagcgggactggcggctacaaccaatgggcagtcgtttcgcgtagctcagggtgtggatggtatggatgctttcattacctaccagaacgacaatggcgtagcggtggcacaagcggcccagccaggaacagcggccgtaacaagtacagtgcgcgaatattcgacatcattgcttgctcagaatgacgtcgaggcgggtaatatccttgatggagctaaatgttggattaccagttcaattgatagcacacttgctaatgaattcattaacaatgcaggcattctggaaccgactggtagaaaaatgccgtcgcaggaagctgtacaggtcaatgatgattttcgtgtcgatgttactctggggagtgagtcccaatgggtggatgaaggaagcgacattcaggcaacgacacttacagctgacgcatcagggagaaagttactttatttagatcacccaacaaaaaaactcatggcttatggaaaacaaatcgcagaacaggattcagtcgattctcttgataatttcagagccgaggtcactgatggcagctacagctcatgggttaatgtctcgggtgataataattcaactgatctcattgttgattccagtggcagaaggtgtctctttttaaataatgccgtcaaaaggctggtcgcttatggtaaagagttggcagataacaaaacggtttcggaattaggctctgaaacatgggtaatgaatgacagcaatccgaccattatcattgaattggtcgataaatcaggccgcattgttaagtatctggacctgtcatccgggctttattatgtttttggtaaagctgttgggactgaacagtcatcaattgtgtacccgacgtttattcctgaattcatggatgccaggagctacggacaaagcctaagtatttactcgcagggaatgccgggactttccacccctacagtgaatgcattgcgatttgataccggagtattgacctacaataaaaatccagcgtcattggttaaccttgaagacccgacgtccagccagtatatgcaaagccagatccacgactttcagactaaagtgagcgacgcctccagcagcgagtttctgcttgccgcgtccgggctgggtggtacgccattctcagggcttgagccaggaacggtggtctatacgcagttcatcaacacaatccagaaggcaaaagacctggctgatgccaaaggcctccagtacggcatgctctggtttaatttccagcatggcgaaaccgatgcgtctcagggaaccgggtatacctactaccggcagaagtcgaaagagatgcaggaaaccactaacgctcatgttaaatctatttcagggctgaatcatgacgtggtcatgttcacgtatcagatggcgacacatggccgttatgatgggacaacatatcccagctatgaaataccactggcgcagttagatgaagcgattagcaacccgttaattcagctagcgacgccgatgtatattttcgactatgccgatgggctacacctcacgaatgacggctatcgtcaccgtgatttgttcttctcgaaagcccagaagtattactacgagaacaaaaagccatggctaccgttatatccgacaaaagtaagccgtatcggaaatacctctgtcctgcttgatctgcacgtcccggttggcccggttcagttcagtaccgatcgtgtgactgctgcaactgatggaatgcagggattcgaactatgggcagagaacagtgacggtacgctaacacgcctggctatctcatcggtcactatcgtaagcggctcacgcattaaggttgttcctgcggttccgtttaatgcggctgataaaatttatctggcctatgcattcacgccggaaaaccgtggcgccgacagtggaggcggtatctatccaaactggcccgccggatataccgccggttgtcgtggcaatgtctgtgattctgacgattatgaatccgatctccgcgataaaaacggcaatccctatgaactccgcaactatctaaccattttccggaaagaggcaatttcatga

SEQ ID NO: 95812 - DNA, 1296 bp, Enterobacter aerogenes
ttgaataattcagccataccgtcacgtctgacggttgtcttttctgtgagcggcgacaaaaacacgatcccggtcaattccacctctgaaacgctggctgatggcctggcggcgatggactccgggttcccgcccctgacccgcatcgcactctctgccggcggtaagccgccaaaggggcaggactttaacgggattttcaatgacgtttacacgcgcctgcaatggtcggctgccgggatggggtacccctttaacgcggatttcagaacggcaatttccggctacccgaaaggcgcggtgatcccatccagcgattactcggtgtcatggctcaacaccatcgactccaataacaccgcaccggaaaaaaccgatgccactgcatctggctggatgccttcatggggctgcggatcggcgagcatttcaatatcgacggctaacgttaatgccaccgatctgcaggcggctaacccccggctcattctcaccggcgcgctaactggtaaccgggtcctttatcttccgccatgggtgaaagactggaccattgaaaataattgcaccggcagcgcttactacgttcagatccgcaccagggctgcgggcgcgaccgttgtcagcaagccggggacagtcacccaaattcattctgacggaaccaacgtaacctccctttcaaagccgcacggaaacatcgcttacgcagtcaacgggacgtattcgttcgtcgtgcctgcaggggtaacgcgcattcgttacaccgtgacaggtgcaggcggatcaggaagcggttgtcaggcgtcatcctcaagtgagtcctatagcggcggcgggggcggggctggcggtacagctttaggctggctggatgttgttccgggaacgacgttatccgttgtcgtaggcaaaggcggcgcagcggtatcaggcgccgtgtccggcaatgacggcggtgactcttctttgggcgggatcatattcggacggggcgggaaaaaatccaacaaggccagcatcgtgaacagcgccgggggtgatggcggtgttgcgtcaggtggcgatgtcaacattcagggaggtaccggtcaggacggccaggccgcaaccaacatgcttaccggttctggtggagcttcgttctggggtggtggtggccgtagcggcgcaaccggcggcgtgaaagggaaagcggcaggctccggtggtggtggtgcatacgatattgatttcagcggaatagcttacccatcaggcgatggcgccgatggcattgtgcatatcgagtggtaa

SEQ ID NO: 95813 - DNA, 588 bp, Enterobacter aerogenes
gtgaataacgtcgactggacgatctacgcgcagtatgtgaactcaacaagcctgcggtcgctgattgatacctttaacgcttctgtcgcgcctgaggactggatagacacgttctatgacctcgtcttcaacatcgagacatgcggcgattacgggctgatgtgctgggggaaaatcgttgatgttgagcggttgctaaccgtcacgccatcacaacagtttctggggtttggcgaagctaccagcaccccggcagaactcaccgatccgcagccatttaaccaggcacctttctataccggcgttcaggacacaaatactgtcgtcctgaccaatgacgcataccgcaagctgatcatgtgcaaagcgatggcgaacatcagcgactgcactgtgccggtcatgaatcgcatgctgatgtacatgttcggagacagtgggcgggcttacgtgcgtgacgatggcaaccatgtcatgagctacgtctttgagtttcaactttccgattcggagctggccatagtgcaaagctccggcgcgcttccttcccctcccggggtaaaagttaatatcgttcaggaggtctga

SEQ ID NO: 95814 - DNA, 1233 bp, Enterobacter aerogenes
atgacgacaatctctacggcggtaccggccgtgaccttttccaccaccggccttgatgttccagatgagggagacattcttgccgggcgtatagcagatattggttctgcattcgggacagcgatgagcacgaaccttaagacgccgcaggggcaactggctgtcactgatactgcaatcatcgctgacaaaaacgatcagcttctggctatcgtcaacaacatgaacccggacttttcctccggcagatttcaggatggcatcggcaggatttacttcctcgaccgcattgctgcggcgggcaccgttgtaacggccacatgctccggcgtgccgggaacggtaattcccgcacagtcctatgcaaccgacgataacggttatatgtacgtgtctttggcggccggaacgataggcgcagacgggacggtaaaaatcgagttccagaacctgactaccgggccgatagcttgcccaatagggactctgacaaacatctatgtcgcggtaagtggctggtcgagcattaccaacgataccgcaggcgttccgggatcaaatgtggaagggcgatctgcctttgagtatcggcgccgtcagtcggtagcgcgtaacgccttcaacacggctgcagccgtgcgtgctgccgttctggaggtagacggggtgcttgatgtctatgtcatcgacaacaaagaaccaaccaccgtcgataaaggctcgacgaattacacgcttctggccagctctatttatatcggggtttatggcggggcggtcgctgacattgcagcggccatcaataaaaagcttccccccggtaccgtcatgaacggtgacaccactggaaccgtgcaggataccgaaaattatgacgctccttatccggagtacacctacaggtggaaaacgctggatgcggtgagcgttcatatcaaggtggaatacgaggcgaatgacagccttccctcggatatcaacgcgcagatcagaacggtcgtcctgaatgccttctccggcgcagatggcggcacccgggcgcgtgccggcgcgcgaatttatggcagccggtttatcggccctatccaggcgcttgatgcacagaacatgaacgttctctcggtccagatctctctggacggaaccacctggtcgagtgctttgaccatgggtattgatcaggagccgactcttgatgcgacaaacatcacaacggaggcggtaagtgaataa

SEQ ID NO: 95815 - DNA, 357 bp, Enterobacter aerogenes
atgaaaacaatctctctcaaactcgatcccgacacctgggaccttgtccttgatgagctgggtaatatcgccacggtagaaaacccctacgcctgcgctcaggacgtagcgacggcatgcctggctatacgcggcgaatgcatttacgaaaaagacaccggcgttaattacaaagagctgctgaacgttaaggccagcaccggagccatggcggccgcgcttcaggttgaagcgttgcgaatgagctatatcgcgcgagctgagccgacgctgattaacaaccgagatacgcgccgcactaccggcgttattgcgatcgtggataccaacggcctggattccagcgtcaccctgtga

SEQ ID NO: 95816 - DNA, 1068 bp, Enterobacter aerogenes
atgagaaaatgttcggtgcctaaaaacgacgaaaccccagtcgcgccaacgactgaggtttctaaattaccagttaactacgagaaaactgacatgactagtttagcaattgcagatcgtacaatcaacgtgcctttctacggcaactccctttttgtagttgagcataacggcgaggcctacacgccgatgaaaccaattgttgaggggatggggctggactggaaatctcagcacaaaaagatttctcagcgcttttacaaaggtatggtggaaatcaccataccctcagttggtggtattcagtcaatgatttgcctcgccctgcgcaagctagcagcatggctgaacagcatcagccccaacaaagtccgtcctgaaattcgcgataacgtcattcgctaccaggaagagtgcgacgacgttctttacgagtactggacgaaaggcgaggttaagaacccgcgcaaggctaaaaagtcactacccggcaaaatcacccctgagcagcaggaagccattaagcagctggtaatgactcgcggcaaggcgctgccgaaagagaatcaggccaaagcgatgatcaccatgtggtcttcactgaaatctcactttggttgcagttacaaagaaatcagcgacgaccagtttaccgaggccctttctatcgctgcgcgcgtacctcttgagggggaattccttggcaagcaggaaacactgccagcgccgaagtttgacgttaacattccgcttcaatggtggatcgataacaacccgttggttcgcagtggcaacctgtcatttgggaagtctctaacggccccgtcctttgacgtgacgatggagatgctttgtggtgacaactcgacatctgcggccattcgcctgattaacattctggaggaggctggctttgatgtatcagcgccgaaggccgaaattgtagcgatgcgaaaacatctgggtaatgtcgagtacggcatgaaggctatcgcagacgcttgccgccgggcgggaaataaaaccatctcgttccgcggcggaaaggctgaatatctgattggttaa

SEQ ID NO: 95817 - DNA, 177 bp, Enterobacter aerogenes
atgaaagacctgttacatagccagcgcgtgatcgagcagttctcactgagactgccggaaagagtcaagaaagcagttcaggaaaaagcagaagaagaggggttgtcattgaatgcagcgatcgttcagcggttggtttggagcttaaaaaacgatgagaaaatgttcggtgcctaa

SEQ ID NO: 95818 - DNA, 363 bp, Enterobacter aerogenes
atgagcaaattccctagccaagaaatggacaggtttaatgtaagattgcctgttggcatgcgcgatgccatagccgatcgcgccaagcggaacggcaggtctatgaactctgagattgtccagatccttcaggatgcgctggagacagaaaagctgatagctgaaaccgacattgtcgattttgactcaacccaggcggctctggattcaaaatccacgccagaggaaaaagctgcgtttctctctgagcttgagaaaagagatccctttaccgctgcaattcttcgcgagggagaggaacataacagaaggcttgctgcaatccttgggaagcgcatgggttatcttgacaacgataaatag

SEQ ID NO: 95819 - DNA, 204 bp, Enterobacter aerogenes
atggaatggattattggtgtaatcgtaatagtatttctcgttaaccttttcaaaccaaggcgttgcgatgtatgcggcatagggtttaagcggaactactacacctggaagatcgacggcaaaaatcaacacctttgtccgaactgcaatagcaaaatgaaaaaaagaaaaagcgacatcagctttaaagacagattcggctaa

SEQ ID NO: 95820 - DNA, 591 bp, Enterobacter aerogenes
atgctaactaatcagaagccgatggacatgtcgtgtcaggggaatgctgttctttcgcttatagccggagccataaagggctgcgtatttgccgatatcgtcttagtcaaaaaagtgaatgggaagacccttaccgtttttcctctggttactggaacaaacgcttctggcggatcaattgaaaaccaggatgtttacaatgttccattcattcagtaccaggctggaaatagttcggtaaaaatgacgcccagagtaggtgatattggcttggtgattgcctgtgataaagacatcacaaatgtgaaaaaaactaaaggcggaggccctccaccaactcagcgccgtcactcgtactcagatgctgtttatatcacggcgatcgctagcctaaatgatgagccgacggagcttgcagagttcaccggtagcggcataaacatcaagagccctggcgtagttaacatcaacggcctgaaagtacacccagacgggaaacttgagcttgtcgatggctctatcgttgatggacatgaccatggcggggtaatatcagggggaagccgaaccgatcctctgggggcggcatag

SEQ ID NO: 95821 - DNA, 867 bp, Enterobacter aerogenes
atgagttacaaggaaagagagttaacggttgagtttactctggccaatggcacctttgacggtaaaaaaggtaacacgctcatagccgaagggttcaagtgcgagctttctgtttcggcttatgggggagctaccgggacgatgatggagcttagcctgtggggcttatcccttgataacatggctaaattgaccaccaactccgaaaaattctttgatgaagaacagaatgcaatccgagttttcacaggtgatgtgtgtgtgtttactgggacaatagttgcatctcgaataaactttaaccagactcctgatgctccaattgagataacagcgtcagcaataggaaaggaaaagttaataccctgcgaaccaacctcaatagaaggtgacatatcggtatccgatatgatacaggcactagcggctaaggttggcctgaagttcgtaaatgttgacgttaaggcagtacacagcaacccttactacgagggaaatgctatagagcagatacagaaaattgctgctgatcacaatattactgcagatatagattttggcaccgtgacaatttacacgggtgacaaccctatcgactcagtagtgcctttcatttctcctgagcatggattaattgggtatccaatattctataactttggtattaattttcgttgcatatactcaccagcggttcagatagctcgaaaaataaaacttgagacatctcttcctcacgcgagtggagaatgggttgttcagcatggaactactcattacctttcatgcaaagtgcctggcggattatgggagacctttgttgtcgcttatccgggatttattttaggggatgggtatgctaactaa

SEQ ID NO: 95822 - DNA, 306 bp, Enterobacter aerogenes
atgcaggaaattagcttatcaccgtcactttctcaaaaggtgtatgtcacgcttggcggccaaaactgcgcgatcaagcttcatcagcgctcaactggattctacatagacctgtatgttgatgacactgcaattatgcagggtgttctctgcctaaactgtatatatcttgtcagatataagtaccttggatttaagggagatctcatttttgtagacacaaaaggagattccgatccggtttatgacgaaatagggacacgctttaaactttattatgcgtcaagtgatgaggtggaccgatga

SEQ ID NO: 95823 - DNA, 843 bp, Enterobacter aerogenes
atgtcgttttctctgaatgtctcgacagtgctatccgccattcagggaggaagcctgttatccgtccttaacagcgccctgtcgccaacgtaccggatcacctacaacaccgttgacaagtcgcttttgacggctgcagccgggcaggaggttttctctccttccggctgggttagcgttgatcgctacggtgatgcggcggtgactaaggggccggtagaaaatgggcagtatacttcgtacaacaaggtccggcagccatcggagttaagggtgatcctggcacttgagggatggactgcatatacaggtgcgcttccaaacctgacaaacttatctcttcttagccgaagtaatttcattcagaaactggatgagatgaaaaacacggccagtacctacaacattgagacgccggacacggtgtattatagctacgatcttactcactttgattactttgtgggatcatatcgcgggcagacgttgttgatggcaaactgcaccttcgaagagataatggatagcggtgaagtaattatcgctaatggggtttcaggtaaggctccgacagataacgacaaaacaaacaataagggcgctgcaaaaacagaggtaatcactgcttcaactaaagaagtaacgcttactgacgcaaaaaacgcatggacaagcggaaatacatcgctatcaagcgcccttgatcttaccgggagcgccatagtttcaggtgtcaattcggcggccaaatcggtatctcaagtatgggataactcatcaacagctgtcgcaaaacagatcaaaagtacggtggctgattttcttaaaaataaggtgatgtga

SEQ ID NO: 95824 - DNA, 1917 bp, Enterobacter aerogenes
atggcagcaacggtaattgacgccctcctggtgacgctgggccttgatacgtctgacttccgtaaggggcagaaagacgttagcgacgacctcaagaagcagcgtgaggatgcgaaaaaaaccgccaaggaaatggcggagcaggggaaaaaggcagcagcattcttcggcagcataaagacggagctgctggcactgactggcgttaccgtcactgccggcggcctgatgagccttgttaaaaataccacgtctagcctgatggatttgtcgatccagtcgaaagcgctggggatgagcgctaaagagcttgatgggtgggcgaaatctgcggaggctgctggcagttcagctgaaaagataacaaatgttctaaaggggtttcaggacgctaagcagggagcaacatttggcgactttaccaatcctctatatgaggtagcgccgatactaaggcgcttaacaggggttgagataaatacatcaaaggatgatgttccaaccattgcgagaaaggttttctctgcccttcagaaagtaaaaaatccagccatgaggcgggtattggcagaaagggttggcattgacgatgcgacccttcagcgcaaccaggaaggacaattcctgcctgacgttgatagcctgactaaaagctccggcattacagacgcctcaaccaaaggcgcaaaggaatttacagccgcatgggcggagctggggcaaaatctcgacacggtaaaaaaccaaatttatgaaggtctgataccaaccattcgagacctaaatggcttgctaaaagaatggtcatcagggaatgttaaatcctcttcattcttcaaagagctgaaacgggacattaacgatatcacaggtattgaccttggtagctggacgctatcaagcgatctgcgcaacctcaaagataacttttccatgctcggaaaagtgctcaaccatctgggtaacgctttaaacgagctcaacaacggcaacttcaccaaggccgcagatgagtttaaaaaggcgtggtacggaacagaagacggaaagcctaccggtaatgatgcgctgcccggagtgacaagtaactcccaaagcatttacgaaaacagcacgtataaaaaatataatgacctcctgaacaagtatcttcccgagtggctgggtggaacaccttcggacagaaagaaggaccaggatgagaagtcttactgggatacgacaaagactctgctttctaaaatagccgatgccattgtcacccctgctggcgcctcctctttagagccaagtatcggggggtatcagccaaacgtcccgcttaacgctcaggccgctcgtcttggcgctaaaggaaaggcttttcttcaggcaatggctggtgagttcggcgcgctggaaggtaaatatggacttcctgccgggctgctgtcttcggtagctgctactgaatcaggtggtgacccgttcgctgagtcgaaagccggagcaaaaggcttgttccagttcatgccaggcaccgcaaaagatatggggctgaaaggtcgtgacgtttacgatccccataagtctgcagaggcagcagcgaaatatctaagatggttaatggatgccacaggcggcgatctggaaaaaactcttgcctcctataactgggggctcggaaacgtccagaagaaaggcatggataacctgccgtcggaaactcgcaattacgtccctaaagttatggccggaatgcgccccggcgccggtatggccgtagaccgcgcgatgccgggtcaggctggcggtgtttataacttttatggcaccaaaatcaccacccaggcccagaacgtggaacagcttaccagcgatatcaaaaagcacggtgacaaccgcgtcatgctaatggctggctactcaggacaataa

SEQ ID NO: 95825 - DNA, 477 bp, Enterobacter aerogenes
atggctcgtaaaagcatcgtattcacggttgaagcagataaccgtgacaagggtaagcagttcaaaatcaccgaaatgccggcgagaaaggccgaagagtgggcgatccgcctggcgtgtgccgtaattggcgccggcgttaccgttcccgacaatatgatgatggccatcggtgctgcggtggcgccagccccagccgaggataacgcagaagctcgcgagctgtacgaaagcgtgatggccagcggcatggcaggtctggctcagtggggtatcacttcactggctaaagttccgttcgaacagtcaaagcccctgcttgatgagttgcttggctgcgtgaaattcctcggcggtaacggtatcgaaacagcgcttgttgacgaagggcagatcgaagaaattagcacctggtcacgcctgaaaatcgaagccttcaaactccatatcgcttttgtagcagccaccgcaagttag

SEQ ID NO: 95826 - DNA, 756 bp, Enterobacter aerogenes
atgtctaatatcatccccatgaattacgatgaccgttcatttccttttacggctgactgctggttcaatgccacggttgccgcaaagcatcacggcaagctaccaaaggactggctaaagactgaggcgacaaaaatttatatcgccgaattggctgaggagcttggaattgctggctccggcgtaaaagaggatttttctccccttttagtcagagtggagaaagggcgaaacggcgggacctggcttcatccggagttggcggtggaattcgcccgctggttgtcagtaaaattcgcccgcgcctgtgatcgtcatattaaaaatctgctgctgagtaaaaacttccagctcaccgaagatcagattgtcggcctgatggtgtgccagcaaccaacgtcctgggagaagcgctttaaagacccgttctaccaggcgctgtcgaaaatgtccggccttccttactttggtcatgtcggtggttgcccggcgctgttcggtcagatcaccgctcgatgggtgtacggtgtcgcacttcccgattatgtctatcaggcagcaaaacaagccgccggggacagcaaggagaagattcaccaacatcttaagcctgatgccctggagaaggtcgagcagcaactgatcgccgttaccaacattgccagttgcagcattgaccagaaggacttcgaagcccgctgcatggctgcgtttcccgttaagggtcagatgaaactgctgtatgcggcggcgtga

SEQ ID NO: 95827 - DNA, 444 bp, Enterobacter aerogenes
atgtccggtcaaaatattacgtcggcagacgcgatcattgagctggtaatcgctgagctctacccatcagggtttaacctggaacagttcgaagcacaaaacatcttcgaaatgggtgataccgacatggcagagtaccagcgtactgctgacggtaaactgctgggtggttttgtttatggtgatctgccgtggacgtttcatctggcggcatcctccccgtcgattaagtacatcgacaactggcaaaccacgcagatgaccacgcggtctgtgctgcgtgttaatgggactgtgatcctgccgtcgctgggcaaaaagtacatcatgaccaacggtatcctgcagcgcgcacgccgcatgccgtctgccggccgtgtgcttcagccggtaactggactcatccagtgggaaactgtcaccccggcagactactcagcgtaa

SEQ ID NO: 95828 - DNA, 1482 bp, Enterobacter aerogenes
atggcaatttcgctatcaaaaatcgcccagatgcttcccggcgtactgaaggcgacagggacggctattgatctcaatggcctgttcctgaccgacagcgcatacgcgccggttggtgcagtaccctcattttccagtgcggatgaggtaaaggcgtacttcggcagcgcgtcgattgagtacaccgccgcggtgctgtatttcgccgctttcgccggtaaaacacagatgcctggcaaactgtattttagccgattcaataccgcagcagtggcggcattccttcgttccggatcgcacgccgcgaccacgctggcacagctcaagttgctttctggtacgttgactcttaccgttgacggcacggaggagatttctgcggctatcaacctcagcggcgccaccagttttgataacgcagcagagctaattgaaaccggcattggctcctcggttgtagtgacctgggatagcgtgctgaagaaattcatcatcacctctgccaccacgggcgtggatagcaccattacctttgctgatgaaggtacgctggccacaggtctgaaactgaccgaagcgaccggtgcggtgatctcccagggtgcggcgccggcaatggttgacgatatctttactgctattctggccaaagagcaggactgggtaacattctccacgacgttcgctgtcaccaaagaccaggctaatgcttttgcgctctgggcaaacagccagaaccaccgctttgcctatgtcccatgggacgcatcaggaacggcaatcgtggcgggaagctcgaatgcactggtgtacgacatcatcaacacctacgcctataacgacacctgcccggtgtatggttacccgaaccacgcagcaaacgcgatggggtttgtggctgcgctgaacttcacgcaggccaatgggcgctgttctctgaatggtcgtcaggtgtccggcctgctgccgatgatcagtaacgatactgattacgaggcggccaaggccaacggctataacttctacggcaactatgcctcgaatgcagtcgaaaccaaccagtgggcgcccggctctattaccggtgattacgcctggcttgacgcctgggctggtcaggtatgggtaaatgctcagcttcaggcggctcttgttgcgctgttccagcaggcgagcaatctgccctacgcagcagccggaaaagctcgcattgagtcgtgcatgaagccgaccattgagcaattcagggcgtggggtggcatgacggcgggcaccgatcttgaccagtcgcagatcgaccagattaacgccatcgctggcgtcgatgttacggattcgcttctggctgaagggtattacgtctacatcggtccgttcaccccggcaatgcgcgccgcgcgtaccaagccaacggtttacttctggtacaccgacggcgggatcatccagggtatcaccgttaacagcgtggaggtgcagtaa

SEQ ID NO: 95829 - DNA, 552 bp, Enterobacter aerogenes
atgtcagcaattgacgtaggcttgcaggtcactgaaagcgctctgtttaaggcgactggcgatttcctttctgccctcttcccggatgcagagatcacgcagactcagcaaaatcagacccccatgccgaaaggcggtttcattactatgacgccgctttttctgacggacctctcaaccagtgctgtcaattacgagtatgacggcgttagcgattacgggcgggcagaacttcgccgcgttgatgaatggcaatgtcagctcgatttctacggagatcaggcgcaaaacaatgccaccatcttttcgcgcatcgcccgctccgaattcgcatgcacctggttcagggaaaacgcaaatgtcctggtgccgctttattccggccccccgcggcaaacctcgatgatcaacggcgagaaacagtgggaatcccgctggacgcttgaattccatgcaaacccgctgattgtcgtcagcgttcctcagcagtttatgacaggcgcagatgtgatatcgcagccggtcgacgtgagatttcctccggagaaataa

SEQ ID NO: 95830 - DNA, 369 bp, Enterobacter aerogenes
gtgaatcttcattccatagtgcgaagcgccattagcgcggttaatcctcgcgtcgaggcgcagatttaccgctcgatcggaccaatcaaaaacccggattactcgacctctccgggtttcgcgccgccggtaacgatgatggtgcaaaagcaggcgctgagtcaggctgatatcaggcacatggataacatgaacatccagggtgtgctggtcagcatctggacggatggcaactggtgtgggattaacagggaacggcagcagggcggcgataagttcgttatcggcaatgaaacatggctggttgtggatgttcctgaaatctggccggactggacgagggttatcgcatgtcagcaattgacgtag

SEQ ID NO: 95831 - DNA, 564 bp, Enterobacter aerogenes
atggatggaatgtcaggcggcgataagctgatggagcacctgcagtcgatcgcaaaggggctgtcctctggcgatgatttgaaggtgggcttccttgagggggctaagtacccggacgggacgccggtagcacttgtggcagccactaacgaatttggcggcactgtaaaaatcccggcgcatacccgggatttgaacttttacgttcgccgtgacggtgtttcgcgcttcgcaaagccatcaaaggccaatttcgcgcagtcagtaatgatacccgagcatatcgttacgatcccatcccggccgtacttcaggaagaccatttctgaacatggtccggagtggggcggagagctcgggaaactcatgaaggcaaacgattttgacgcccgcaaaagcctggcgctgatgggggagcggatcaaggggcagattcagtcgtcaatcatcgccttttctgagccgccgaacgcaaaaagcacggtcgaccaaaaggggtttgacgacccgttaatctggtcagggcatatgctgaactcggtcgactacgaggtgaaagagtga

SEQ ID NO: 95832 - DNA, 444 bp, Enterobacter aerogenes
atggcgatcgttgtctttgatgttgccgcatttcgtgagcgttatccggagttcgatgccgtaagtaatacgctacttaatgcgtacttcacggaggcaacgatttacctgaataacacggacagcagcccggtaaaagatatctctatccgggctcttttcctgaacatgctggttgcgcacattgcggcgctgaattcaggcgtaaacggcgaaaaggcttctggtctggttggccgtgtggcaagcgcatctgaggggtcagtgtcagtatcagctgacgcagggccctcaagcgaaagctcctggtggtataagcagactacttacgggtcagcttactgggaagccacgaagccttacaggacaggtttttatgtccctggctcatccccttcaatgtacccgggccattataaccgtcgttcattcatccggaggtag

SEQ ID NO: 95833 - DNA, 327 bp, Enterobacter aerogenes
atggccgaaacagtaactgtaggatgcaaactgccgaacggcctgatcctggagcagggcgagtacaaagtggagcttaacggctccaactcctctatcgttgtcggcggctacggcctgaccgaaaacgtggacaaggaagcctttgaggcgtggctggccgtacatgctgatcagccctatgttcgcaaagagctggtgtttgcccaagcgaaaaccagcagcgcccaggcgaaagcgaatgaaaacgcttcggagaaaaccggtctggaaggtctggatcagaacaacccggccccgggcgttgagaaggcggacaaaaaataa

SEQ ID NO: 95834 - DNA, 1038 bp, Enterobacter aerogenes
atgaacgaatttcagcgacactacgccgcagccagcgggaaatatggcattgtgctgcccggcgcaaaggactacctgaagccggagtttgcggagaatttcgcactggcgatggatgcccagccgcaaatggttactgcgaataacgccggtatcccggcctacttcacgaactacgtcgatccggaacttatccgcgttctcgtaacgccgatgaaggccgcagagattatcggtgaagtgaaaaaaggcgactggacgacgctgacctcgcagttcccgatcgtcgagtcgactggtgaaaccagcgcttacggcgacttcaacaacaacggaatgacgtccgccaacgtcaactgggtgccgcgccagtcgttccattatcagactcacacccgctggggtgagcgcgagctggacatgtatggcgccgggcgtatcggctatgccgcagagctcaacgtggcctctgcgcttgtgctgaacaagttccagaacaagtcctacttctacggcatcgccggactggaaaactacggtctgctcaatgatccgtctctgagcgcttcggttactccggcggcgactggttccggcggtggcgttacctgggcaacgaaagacgggcaggctgtatatgacgacatttccggtcgcctctataagcagctggtctctcagaccaaaggcctcgtagagcgtaccgatcgcatggtgctcggcatgtcgccggaaatggaagtcaacctgaccaagacgaaccagtacaacgtgaacgtcaccgatcagctgaagaaaaacttcccgaacatgcgtatcgaaaccgctgttgaatacagcaccgcctcaggcgagctggtgcaactgattgttgagcgtctgggtgagcaggacaccgcttacgcagcattcaccgagaagatgcgcgcgcacgctgtcgtggtggaagagtcttcctggcggcagaaaaaatccggtggcacctggggtgcaatcattcgtcaaccgctgggcatcgccagcatgatcggggtgtaa

SEQ ID NO: 95835 - DNA, 483 bp, Enterobacter aerogenes
atggcaggttttcagacacgaattaaccagtatccggcccccggcgtcgaaggggcctttgctggcaccaaccctcaagcgacctatcaggctggcgagggcgctctggttgctggcaatgacggcctgactgtcggccgctttgcctgggctgttgacggtgtggcttccaatgccggtagcggtgttccgtctggctttgtccatcgtgatggtcaggcctcgatcaccatctggctgggccaggcatccatgcttatccagcccggccgcgaaatcaccctgatggttgccggtgacttctgggccaaaacgtcaaccgctgccacccgcgggcagaaggtttttgcatccctgaccaccggtgaggtgcaagtcgccgcagccggcgcaaccgtggccggttttatcgagaccgcattctatgccgcaagcgattgtgacgctggcgagctggtcaaaatcagcacctggagcaagtaa

SEQ ID NO: 95836 - DNA, 1170 bp, Enterobacter aerogenes
atgaaccccacagagtgcttagctttcgatcgcgcctctgtgcgcactatcgacgcaaatggccgccttcagatttcacgaacgaatatcagcaaggcaaacgtcaacggatactacgggcgcgagataccaagaagcgaagaacttgggctcgaacccaacaagctttaccggctttggcgccacccggacgagctccggaaagcagccaaatccttcaataacatccccgtgctcagcaagcacatccccgattttcccaccgacccgcccaacgaatttcgtgttggcgtgacgcactccaatgcggagtttgacggcacgtatctcacggttggtatgtcgatctgggataacagcgcgattgctggaattgagagcggagagcagcgagagctatctgcatcgtacaagtacgtcgcagacatgaccccgggtgtcactcctgacggcgagccttatgacggcgttatgcgtgacattttcggaaaccacgaagcgctggtccctgacggccgcgcagggccagatgtactggtcgcagattcattaccaccggagcttaaccacatgcgtaaacataaggcagaggcgatccgcgccacccttaagccacttctggcgcaggatgctgatctggaggcagaagtccgcaaagctcttctggctcttgatgaggccgaaaagaaagacgaagaagaaaagaagaccgccgacgacgaagacgacgacgagaaggataagaaaaaaacggcggacgatgaggacgacgacgaagacaaggacaagaaaaaaaccgccgaagatgaagacgatgaagaagacgacaaagtctccaaaacggcgatggactctgcgattcgtctggcagccgacagcgcaactaaaaaggctgcggaaaacttccgcaaggttcgcgaagccgaacagattgttcgcccgctgatcggcgacgtcgttgccatggactcagccgaagatgtctatcgcaccgcgcttgagcaaagcggtgtggatatcgctggcgttcacccgtcagcttatccggcaatggtcaaaatggcgatcagccagaaagaaaattcacgccctgtcattgcgcaggattccgcttccgtcagtgagttcgaaaaagcattcccgaccgctggcaaactgaaacgaggttaa

SEQ ID NO: 95837 - DNA, 699 bp, Enterobacter aerogenes
atgcaggcgtctgttgtctactggctgtcggcaaactatcgggccagcggcgcggctttcgccatggatgcatcgcctgcagtgatgatgcggaatgccatgcagaaactggctaatcgctggacgcggcggtttgatgacatggcgcaaaagctggccgacaggttcgctaacgacgccatgaaaaacgcggatgcttcactggccacagccttcaaagatgcggggtttactgtcgagttcaagatgacctcgcagatgaataacgctcttcaggcgaccatcgccgagaatgtcggccttatccgatccatccccgagaagtatttcactgaggtggaagggctggttatgcggtcggtagcgcgcggtcgcgacttatcctatctcaccgatgaactccagaagcgatacgggattacccggcgccgtgcggcgttcattgcccgagatcagaacaacaaggctacctcagtcgttcagtctgcgcgacagcaggcgctcggcattacccagggaatatggaagcactctcatgcaggtaagaagcctcgccagtcccatgtaaaagccaatggcaagcttttcgacctctcgaaagggatgctcatcgatggcgagcacatcatgccaggcgaattaccaaattgtcgttgcacctgggaggctgtcattccagggctttcaaaacaggattga

SEQ ID NO: 95838 - DNA, 1521 bp, Enterobacter aerogenes
gtgtggtggtttaaaaagaaagaagtcgccgcgcctgagccggcaaaagaacctgaagcaccgaaggtcgggatcaggccagaggccgtggccgaagtccgcgcattaccgaaaagagagtttcagcgctacgagccgccgaaaggggtgatccccgaggctatcaaaagcgccattctggcaatggactccacgccttacgatgctctcaatgctgcgtatggcggctacggctacggcgactttgatagcttccccggatacccgtatctggccacgctggcgcaaaagcctgaatatcgcaagatggtcggcaccatcgcggaagaaatgacccgcaaatggataaagctcaaaactgtcggcgatgaagacaaggcggatcgggtaaaacagctcgaagatgccatgaagcggtttaaggtgcgcgagcgctttaaagaagccgcagagcatgacggctactttggcggcggccagatttacatcgacgttcgttcgccgcggggcatctccgcatggatggacgacaacgagctgcaatcgaagctcttcatgagcgacaagaaaatcacgaaaggcagcctgcaggggttcagggtcatcgagcctatctggacctatccgggaatttataactccgacaacccgctgagcccggatttctacaagccgacgcagtggtttgtcatgggacggaccgtacatgcaagccggatgattgatttcgtctctcggcaggtgccggatctgctgaaagcatcgtataacttccgcggcctgtctctctcgcagatcgccgagccttacgtcaataactggctcagaacacgcgacagtgtcagcgacatgattcactcctactcgataccggttttcggtacggatatgagccagatcctgacaggtggcgcagcagatacgctgattgcccgcctgcaggttatgaatcagtgtcgtgataaccgcggggcgttcgctgtcaataatgataaggaaaagccggagaccgtggagttcgtcagcgcccctatcgccggccttgatgccctgcaggcccaatcgcaggagcacatgtccgcagtatcgagcatccctctcgtcaagctgctgggcatcactccaaatggccttaacgcaacttctgacggcgaaatccgcgttttctacgactacattcacgccctgcagcagtctgtttttaaagacaacctgaagcgcgtgatggacatcattcagctctctgagttcggcgacattgacgatggcataaccttcgactttgagcccttgtacgaaatgagcgctaaagagcgggcggaaattcgcaaagtagatgcggatacggacgctgtctatgtggccgccagcgtgctctctggcaacgaagtccgtgaaaaaattgccggtgacccggattcgccctatcactctctggacctgaatgatgacctcgaaatcgaagacgactacgacgaagaggaagaagcagaccctgacgataagggcggttcatcctaa

SEQ ID NO: 95839 - DNA, 1677 bp, Enterobacter aerogenes
atgagcggaattatcgaatgggatgatctgtcattcccggagcgcgtgatcatccgttcaaagtccacgaagtcattcctgaacttcacccgaatatggttcgagttgattcagggtgatcggctgctggttaactggcatcaccgcctgatggcttcgaaaattgatgatctgcttgccgggcgccttgtcccgcgaaacctgattatcaacatcccgccaggcggtacgaaaactgagttcttctccattcacttcccggcgtatgtcaacgccctggtgcaggagaagcggcttaaacgctttcgtaacctgaatatctcttttgctgacacgctggtaaagcgtaacagccggcgcacccgcgacattatcgccagccgtgaatatcaggagttctggccctgctcgtttggtgtcaaccaggcggaagagtgggagataaaggacgaacgagggcgctctatagggcagacggtatcgcgctcaagcaacgggcagatcaccggtggtcgtggtggctactacggaccagagttctccggcatggtgatgctggacgactacaacaagccggtggacatgctcagcgagtcccgacgcaaaagcgcgaatacgctgctggtaaacaccattcgatcacgccgcggcgataagtcgaaagagcacccgactccgtttgtgagtattcagcagcgcctgcacaccgacgatgcaacgggcttcatgcttgccggcggaatgggcgtgccgtttcaccatgtcgccataccagccatgatcgacgagaagtacatccagtcgctcgatgagccatggcgttcgctttgctgggaaacggtcaaagataccgattctgtggtcgttggaggcgttcgctactggtcctactggccgcagatggaagatgttaacgacctcctgcaactgtgggaaaaggatcgctataccttcctgtcgcaataccagcaaaacccgatggcgctgactggcgggattatcgacaccagctggttcagaacgtacaccacgctgccgaaacttacgcaccgtgccgtgtacgtcgatacgaacagcgggaaggtagaggactggctggattacaccgtgtttacgctggctggcatgggcgtggacgggaatttgtacatcatcgacgtcgttcgcggacggtgggacccggaagacctcctgaagaaagcggaagaggtttgggaaaagtggcgcctgtctggctccatgcgggtcatgccgctgcgtcatatggccattgaagagaagcaggcaggacagggcctcatcaccacgctgaaaaaacgtagtcagacccccgggcagctcgccatcccggtgagggaaatcccgcgcggcaccgggcagaacaagctcgttcgctgccttaacgtcatcccccaaatcaaaaccgggaaagtgtttgtccccgcgacgcacaccgaagacggacagaagctttccagcatcttctacgaggacggcacgatcgcaggctcaacggagtgggtgctgacggcgatgacggaatgcgctgctttctccgctgatgacagtcacgacaacgacgacatcctcgatacctggatggacgcaatcgacgacaacctgatttccggcccgcagccgatggttatcgacccgaatcaactcaggagaatttaa

SEQ ID NO: 95840 - DNA, 633 bp, Enterobacter aerogenes
atggcgtcgaaaaagcttacagctgatcagcagcagcttttcgatgctctgactccgctgcaaaaaaggttcgcacttgcaatcatcaaagggaagaaccagacggacgcctataaggctgcgaaggggaaggctaagacgccagaagccattcgcaactcggcgagtcagatctttacaaatcttggtgtgcaagcctttctcaaatcagtgcagggcgagattgtcgacgaggcaatcatgactcgagaagaggcgttaaagcgcctttctaagatgggtcgaacatccatcgccgatatagccgagttcagcaacagcgtcgttggcgaagatgacgatggcaatcctgtgttccaggccgtgtggagcttcaaagattccgctcttcaggaccctgacgcaatgagtgcaatctctgagctaactacgggaaaggacggcatcaagctgaagatgcacgatcccaaagcggcaattaagcagcttgccgaaatgcagggttgggacgctccgaagaaaactgagctgaccggtaaagacggcggcccgctgaatcaggtgacgtacaccgctgaagactatgcgaaggcccagcagaagctggagggaaggttagaagggctggactga

SEQ ID NO: 95841 - DNA, 144 bp, Enterobacter aerogenes
atgcgcaccactggaatcctaatggcggaaattacgcttcgcccatacatgaagccgctgctcatcctttcagtgcttttgcgctggggttggctcactaagaagtgcatccggattggccctgtaattggcaagcaggcgtaa

SEQ ID NO: 95842 - DNA, 276 bp, Enterobacter aerogenes
atggtcagtttgcgtcatatgtgttcgcgcttcatctcggcttgctgggcaattatcaccaccatttcgtttggcgacatctcggtaagccgagtagttagcaagctacgcctggtggtggagcgggtcatttccgcagtctctgtgaaagcatcgcctgaaaaggctgattggcgaatcgtagagcgaatgtgcagtgaaaacgtgcgcgagcaagttaatattttcggtcgccgtcctcgcaacaccggtgctttgtgtagtccgctgctatag

SEQ ID NO: 95843 - DNA, 489 bp, Enterobacter aerogenes
atgactgccgaagccattctggctctggtgaaaaggttctggttgccggtgctggttggtttgcttggtggcgcactggccatcgctgccagccattacaaggaaaaggctgagcacgaagcaacccgcgccgataacgcagagctcaacctgaagctggcgaacgccaccatcaccgacatgacaacccgccagcgtgacgtcgctgcgctggatgccaaatacacgaaggagttagccgatgcaaaagctgaaaatgatgctctgcagcgccagcttgataatggtggtcgggtgctcgtcaaaggcaagtgtccagtgtcagccgcaacccaaaccaccggcgccgccagcatgggcgatgatgccaccgtcgaactctctgcagttgctggacgaaacgttctcggtatccggtctggaatcctcagcgaccaaacagccctgagggcgctgcaggaatacatcaccacgcagtgccttaaataa

SEQ ID NO: 95844 - DNA, 207 bp, Enterobacter aerogenes
atgaaactcgttgatgactggaaaagcgcatggcgctggttctccatgcatgcactggtgctggccgggattattcccaccgtgtgggcagagctaccgccagacctcaagaccgcaatcccgccgggagcgatgggcaccattacagcggtgattgctgcctgtggcgttgtgggccgcctggttagccagagtaagccgcaatga

SEQ ID NO: 95845 - DNA, 450 bp, Enterobacter aerogenes
atgcaaatcagtaataacggtattgcgctgattaagcgatttgagggttgcaggttaactgcatatcccgacccgggcacaggtggtgatccctggacgataggttacggctggacggggaaagtcgacggcaaacctatcaagcccggaatgaagattgacgacgaaactgcggatcgcctgctgcgcactggcgtggtgagctttgaccaggcggtaagaaaaatgctcaaagtaaccgtaacccagaaccagtacgacgcgcttgtgtcgctggcctacaacatcggtacgcgagcgctatccacatcaacgctgatgaagaagctgaatgcaggtgatgtgaaaggcgcagctgatgagttccttcgctggaaccggtcaggcggcaaggtaatggctgggttaacgaatcgccgtaaggcagagcgtgaggtatttctctcatga

SEQ ID NO: 95846 - DNA, 318 bp, Enterobacter aerogenes
atggctaagcgtatgcaagacaaagagagcattgccgggatgtcctggctggttctgctgatcattgcttgctggggtggacttgtccgctacctgatagatgtgaagcagagcaaggcaacatggagcttgatcaatgctcttgcccaaatggtggtttcagggtttaccggcgttattgctggcctggtgagcattgaaagcggactgagcatttacatgattctggcaaccgcggggataagcggcgcgatgggctccgtagcgttgacctatttctgggagcgcctgacggggattaaagatgcaaatcagtaa

SEQ ID NO: 95847 - DNA, 693 bp, Enterobacter aerogenes
atgatcaatacccaatacctccaatatgttcgccagcagctgatagtggccactgccgatctgagcggtgcgacgaaggggcaactggtggcctttgcagagaacgcgcaattcaccgctacggcgcggagccggggaaggaagaaagtagccgacccggtaaccggccgcatggtaaacccatccagcccgccaatccccgggcagcagtcccgcgcaaaaggttcatcaatcgctctcgttctccctgttgagtattctacggccagctggcgccgcgccctgctgtcgctggaagagcatcagaaagcctggttgctctggaactacggtgaagaaacaaaattcccacaccagacaaccatctgccaaatatcatggcaggagttcaagtgccagatagaaggggagaaaattgctgcaaaaacgctgggtaggctgaaagctatgatatggcttgcagcgcaggacgtaaaagctgagttagccgggaagcgcgtatatcagcaacaggagcttgcatctcttaccggtacaactccgaataactggagtacaaactacgcatcccgttggcgtgctatcagagagatatttctcaagctggatcgtgactcgcttctgagtgtgacaaaagcacgatcgcaacaaaagtcgacaaattaccattcagacattgcaaaaatgaattaa

SEQ ID NO: 95848 - DNA, 582 bp, Enterobacter aerogenes
atgcttaaacgtgctcaacgccggtgcaaaatctgccgggaaaaattcaccccagcattcgaaaaccatcgttggtgctgccctgagcatggtgctgaatttgctatgcaggagcttgagaagaagcgcgataagcaggcccaggcgaaagagaagaaagagcgcgcagcctggcggaagcgcaaagcagcggtgaagcctctccggcactgggaagacatgactcagcgtgtcgttaacgactatatccgcgaacgagactacgacttaccgtgcatcagttgcggcacgttcgacactgttcagtgggaagccggccattatcgctcccgcggtaaagcatcgcacctgcgctacaacgaggacaacattcacaagcagtgtcatcactgcaacgtgcagatgtcagggaaccagcagcagtaccgcatcgccctggtagagaaaattggcgctgaacgcgccgaggcgcttgaaaacaacaatacccctcaccgatacaccatcgaagaactggaaggcatcaggcgccattacagcgcgctacgccgtgcgcacataaaacaacgggaggctgcatga

SEQ ID NO: 95849 - DNA, 597 bp, Enterobacter aerogenes
atggcgcaaatactgcaatttgagaagagttatcaaaacgtactgattcccgcagagccgggaaccagcgaatacctgcaacttatccccgtagggcaactgctttgcggtgagttccgcaagccccggaattacgcattccacaagaagttcttcaagcttctgactctcgggtatcactactggacgccttccggtggtctcattgagcccgctgagcgcaacctcatatccgggtttatcgacttcctttcatccgacctcgatcagcgcgctgcactccagaacgccgcggagatgtatctctcctcggtcggcatttctcgttcccgcgatatggcgcttctgaaacacttcgaatccttccgcgagtgggcaaccattcaggctggcttttacgacgaataccagatgcctgacggtagccgtcgtcgtgtcgcaaagtcgatctccttcgccagcatggacgacagccagttcaacggcgtctacaaatcagtgctgaatgtgctctggaactacattctgcgtcgcaaattccactcgccggctgaggctgaaaacgccgccagtcagttgctgagctttgcggggtga

SEQ ID NO: 95850 - DNA, 315 bp, Enterobacter aerogenes
atggctgagttacgcgcaggttgtcaggcaatgattattggcggcttctaccgtaccaatgacggaaagtcagtgctggttgtgggtttcgtgccgaatggctcccgctttacctggaatggcgaggtctacgccgagccggtgcctatgggagacgcatggttggtatcaggcgacctggtagcgcgggatggcgctactggagaggctaaaaggatagatttcgcgctgatgccagcaaaatatctgatgcccattgatggtaacgacttcagcggcgaagacgagcgccagaaggaacgggagaatgcctaa

SEQ ID NO: 95851 - DNA, 321 bp, Enterobacter aerogenes
atgaacaaatcaaccataaccagagaacgcctggaagaaattgtcagtgatccaatgattaatcagggtagcgagtttgcgatgatggcccgcatggcgctggccgcaatggacagcgagccggtgattgctgattgcgatccggaagtttacgagaagggtgtaagcgcatgccttgtagtcatcccgaaagaaactgcagaggttatctgcaaaggcatttcagcggccaccggttgcaaggttgactggcattacatcggcggtcgcgtgcatatcaaggcgctccaagccgccccacaggaggttaaccatggctga

SEQ ID NO: 95852 - DNA, 285 bp, Enterobacter aerogenes
atggcacgaagaatcaggttaactgatgctcaggtgcatacgctgcgtcgtatgtataacggttcgcgctatttcatgcgcagtgacatggaaaagggggaacacgataaaggttcgcatcgcgttaactgcccgtctatcccagtgctattccgggaagggcttgtagattggcgcaaccgctcatgccgtaaattcgatggcttgtattacagagtggaattgacgcctgacggaacaaaagcagccattggtgcgcagacaagagaggagcgcggactatga

SEQ ID NO: 95853 - DNA, 357 bp, Enterobacter aerogenes
atgacaactgatatcaccgaactggcgcagagcctgagacggcgagctgcttcagcaaatgagtttggcgaaggcctgttcttcataaaagccgatgacgttctggcactgctagaggcgctggagaaggcgcaggagacgattgcatttcagcaaggagaaattaaagcgcttttgtcgtcattggagtcccgcaccgtgaagctgtcgcccaaaattgagcgtaacgatattgatgggtggtttatgtacaaaggcggtcgcgtcggtggcggcgttgctgagtggtacaacaaggcgctggatgatgtcggcgcagaacttaccgccgctggcattaaggtggaggctgagtga

SEQ ID NO: 95854 - DNA, 909 bp, Enterobacter aerogenes
atgagcaaagagccaatggtcgtcagcttctcaggtgggcagacatcagcgtttatgtgcgacttcctcatgcagaactacgcagatgcttacgaattccattttgtgtttgccaataccggaagggagcacgaagagactctgattttcgctgacaaggtggacaagctttttggtcttaaccttgtctggctggaagggattaccagtagcgagcatggtgttggaatgcgtcaccgcgttgtctcattcgaaaccgcatccaggaacggcgaaccatttgagcagttcattagcgtggagggaatacctaacgtatcgcgtcagaaatgcagcgactatctgaagacgcaaaccatccggtcatggatgcgggctgtcggacttgcgcgccggggttggtcggcaaaaactgcaattggtatgcgtgctgatgagccagaacgcgccagcatggagaaggcatctaccaaacgttataacctggtctatccgctttgccattggggtggattcgataagcaagatgtgaacgacttctgggatgctatgccgttcaaactcaatatcccaccacaccacggaaattgcctgacctgtttcaagaagagtgacgcgaaactttacctgatagctcatgagcaccctgagtggttctcctggaatcgcgatatggaagagaaatacgggatggttaaagcagttgctggacatacctggtggcgtagaaagcgggatacagaccagttaattaatgatgcaaacctcgaagaccgtcagcggctgatttacctgacaaacacaaaccctgatgacggtgacggatgcacatcttcatgtgagccgttccagggcgatgacatggcagaagatgaattcgacgacaagattgaagggagtgcagcatga

SEQ ID NO: 95855 - DNA, 390 bp, Enterobacter aerogenes
atgactatcacaatacagacagtaaacgagctcatcgcctccctggagagtgcaggcgagctgtcgatcagagagcagaagttcctgaagctggcgaaagcgtttaagcagctggctgcggagaatgtggctctgaaacagttcccggaacagatagttcagtttatcggcggacttgggaccagtgagattggtagcgacacgaaagagaaaatcgggttggcggcaagccacattaaagcgcccgccaccgacgccttcctggccgggattaaggctgatggggtggaggagtttgctaaaaagcttgaatcacgtgggaggcaccatgactacgttaaagttgcctacgcatttgcccagcagctgcgcgagggggccgacaaatga

SEQ ID NO: 95856 - DNA, 225 bp, Enterobacter aerogenes
atgaaatttatcaaattaacccaaaactcaacggtagagtttcaggggaaatatggccgtgaatctgaaacggtttatgactctgtattcattgcgccagaccacatagaaagcatgaccccagcaggccttacttatctcaggatggtctctggagagcgcatctcggtgcgggaaaccccggaagaaatcatctccatgcttaccgaaggagccgccaaatga

SEQ ID NO: 95857 - DNA, 300 bp, Enterobacter aerogenes
atgaaaaagaactctggaaaacaagccgtaatcaattacatcggccagcatcctggctgcagctttcaggatatccgccgcggtaccgggcttgactcttcagtggtcaattcctccctgtggcagatgcaccgtgacggtcaggttaagcgtgaaggggagtgcaggagctatcgctacaccctgcttgacaccacagctgtcaccgaaagcgatccggagttttatcgccagcgtcctggcggcgtaaacccaatgaccaatctgtttaaccagtgcctggcgggagtgaggaaatga

SEQ ID NO: 95858 - DNA, 900 bp, Enterobacter aerogenes
gtgagtaacgttctccgcatatccgattttagagggtctcagaagcccatggagaaacctcagccatcagggcaggggttggtattcctgcaccgtaaagtaagagagctgccgttctacaagaccgacagtgaagccgtccatctgtggatccatctcatcatggaggtgaattcagctgatgggatggtaaccacagagtttggtgagtatccggtttcccgcggtcaggtgatcactgggcgacataccctgtcgaaagacacgggaatagcacctgacagggttaagtacctgctgaacaagttcgcgaaaatgggcatgatcaccactctggcaaacaagaaatttaccctcttaaccgtcaccaaatacgacgactatcagcaattttttgcgccaacagaatgccaacagagtgccatcgaaaacccagtaaccgcgctgcgtacaggcgaggttgtgccaacagaatgccaacagagtgccacaaacaatatattaaataatatctcttctactgacgtagaagagagtgcatcagcatcgcaaaaatcagaaccaaaaaaaccgtctctcagctgtgagcaggttgttgaggtttaccaccgggttctgccagaagctcaaggcatcaggatcctcactgacaagcgacgtaacctgatccgctcgttctggcagaaggccaacaaaattacccgtcaacttgatggccacagctttaccctggccgactgggagtcttacctgagctacatcgccagtaactgccgctggatgcttgagaatcgccctgatcagcgcaccgggaaaacttggcgccgcaagtcgctggaatacttcctgaacgtcgatgtctacgccaaaacgcgcgagggggcctgtgatgacctctga

SEQ ID NO: 95859 - DNA, 147 bp, Enterobacter aerogenes
atgcctaagagcaacagattttaccaggcgcaaacacacaaaaatgttactcgtgaccgttttgttcgctcggtaaatccagtggtggccgaaaagatgcgcgccatcctggaagagctgaaacggaaggaggaaggccgtgagtaa

SEQ ID NO: 95860 - DNA, 195 bp, Enterobacter aerogenes
atggctaactcaattcctaacaacggacgcgccgtgatgatgcgtaatcgacgtactggcgcagcctggctggtcagcttcgactatcgcgacggcagctactggcatgagccgcagggtaatctgcgccacatccgccggccatacgcttcacgcaacattgagccgaacctggtacctgccgggacgcattaa

SEQ ID NO: 95861 - DNA, 972 bp, Enterobacter aerogenes
atgagcgaaataatggatttaaccgtcatcgaaataaaaccagagcaggcgccgaccctgtaccgggctggcggtcttgacgcttacctggagcagattcgccaggccgtgaacgaggttccggacctgaccaccaagaaaggtcgtgatcgtgtcgcttctctcgcggcgcaggtatcacgcagcaagacggcaatcgagaagccggggcgcgagtacctgaagcgccttaaagaggctgtgcgccctgctgaggcggaaattaagcggttcgttgacgcatgtgacgagctgcgcgatgcaacacgtcgcccactgactgaatgggaggcggagcaggaacgcattaaggccgaagaagccatgaacgtactgcatgccgaagcgctggttatgaatgaagagttcgatcggcagctggcagctcggattgagtctgaccacgaaatggccctgctgatgaatgacgctttcgaccgtgagcaggcagagaagaaagcagaagccgaacgccagcgcatttttcgggaagaagagatggttcgccgggcggaagagaaagcgaagcgcgaggcagcagagcaggcgcagcgtgagattgacgccgcggccgccagagagcgcgaagcaattttggccaaagagcgcgcagaacgtgagcagcgagaagcagctgaacgtgctgagcgtgaaaagcaggccgctgttgaagcggaacgccgcaaagcacaggaagaagccgatcgcatccgccgtgaggcagagcagcgcgaacaggcccgcctggccgaagagaagcgcaaagctgacgagaaggcgcgccgcgaagccgacgtgaagcaccgcaaaactgtcggcactgacatcgtcaaagccctggtggccaataccagcattacccgggatcaggctatcgaggtgctcactgcgattaaagacggaaacatcccgcacaccgggatcagttactga

SEQ ID NO: 95862 - DNA, 846 bp, Enterobacter aerogenes
atggctaacgaacttgtgattacagccagctctcttgctgagctaggcattgacggcgctacctggagcgccctcaaaaacagtatttatcctggtgccaaggatgagtcggtgatgatggcgctggactactgccgggccagaaacctcgatccgcttcttaagcccgttcatctggtgccaatgagcgttaaggactcgaagtcgggtaaaagcgagtggcgcgatgtggttatgcctggcatcgggctttatcggattcaggccgatcgctccggtgattacgctggcgcaaaagaaccagagttcggcccggacgtcactctgacgcttaccggcattgaagtgaccgtacctcaatggtgcaagtacacagtcagcaagcgcatgccgagcggggagatcgtcgaattcagcgcgaaagaatactgggttgagaactatgccaccgccggccgcgacactaccgcgccaaacgcaatgtggaaaaagcgcccttacggccagttggcgaagtgtgccgaggctcaggctctgcgtaaggcgtggcctgaaattggccagcagcccactgccgaagagatggaaggtaaaacactggaagttgatgcgcgtgacgtaactccgcgaaccacgacagaggcgctccccctggtggccagtgaggaaacgttgcaggcaattaccgaccttctgacgtccctgaataaggactgggatcaggacttcctgcctctgtgcagcaacatcttcaagcgtgacattttccaggcgtcacagctcaccgaagaagaagcgcagaaaggatttagcttcctccagaaaaaatcgcaggtggcagcatga

SEQ ID NO: 95863 - DNA, 681 bp, Enterobacter aerogenes
atgacaccagaaattatccttgcacgcactggcattgacgttacccgcgttgagcagggtgatgaatcctggcaccgcttacgcctcggcgtgatcactgcctctgaagtccataacgtcatttcgaagccgagatcaggcaccaagtggactgacatgaaaatgtcttatttccacacgctgctcgcagaggtatgcaccggcgcggcgccggaagttaacgccaaggcgctggcctggggaaaacagtatgaggccgacgctcgcaccctgtttgagttcaccaccgaagtgaaggtaacggagtcaccgatcctcttccgcgacgaaggcatgcgtaccgcctgctcaccagacggcctgtgcagtgatggccgcggccttgagttgaagtgccctttcacctctcgcgacttcatgaaattcaggcttggcggcttcgaggctatcaaatccgcctacatggcccaggtgcaattcagcatgtgggtaaccgggaaggatgcctggtatttcgcgaattatgaccctcgcatgaagcgagaaggcattcaccacgtggtcgttgagcgcgacgacaaatacatgtccgacttcaacgaaatggtgccggagttcatcagcaagatggacgaatctctggcggagatcggttttgccttcggggagcagtggaaatga

SEQ ID NO: 95864 - DNA, 429 bp, Enterobacter aerogenes
atgaaacgcactccattttaccgcaggcccggaaaagcagggaaattctccggccttcgcgagcgcgtgatctggatgattcagacgcgcggccgccctgtaaccggcagcgaaatagcggagaagttcggcgtgacgcttgtcgaatttaaccgcgttgcgaacggcattaccaggggagaaggccgaattgcgcagctgatcgcatcggaaacctggctcaacgaggacggtatctgcgatcgcacctttgacctgatcacaaggccaaaggtcattaccccgcagggtaaaacgcgcctgttcactaagcgctcgatagttcaggccgcctctggcaaccgccagaaatgtattgataaagcggcccggcgccgccggcttatcgcatctggcctctatatcgatgaaatggagtcagtcctatga

SEQ ID NO: 95865 - DNA, 657 bp, Enterobacter aerogenes
atgaaccgctactcacttatctattctgacccggcctggtcttacgggaacacgatcagcaacggcgccgccgtcgatcactaccccaccatgagcttgctcgatatgaagcggctcccggtatgggagctcgccgcggataacgctgttctggcgatgtggtacaccggcacccacaaccaggaggcaatcgagctggcagaggcctggggctttacggtgcgcacgatgaagctattcacttgggtgaagctgaaccagctggccgagctacgcattaccaaggcactagcagagggtgccgtcgccgacttttacgacttcctcgacctgctgaatgctgagacgcgcatgaacggcggcaatcatacccgcgccaactccgaagacgtgctgatcgccacccgcggcgccggtctggaacgtaagcacgccggcattaagcaggtggtctacagcccactcggcgcgcacagtgagaaaccgtgggaagttcggcaccgcctggaactgctctacggcgacgtgccgcggattgaacttttcagtcgcagcgcagcgccaggctggagccactggggcaaccagtgcgccaccgcttccgttgagctgatccctggctgcgccattgacgttgttaagacggaggcagcatga

SEQ ID NO: 95866 - DNA, 771 bp, Enterobacter aerogenes
atgagcaaaggtactgttatctgcctctgtgatttaaccgggaaaatggctgagccatgggtcgaagcaggttatcgtgccgttctggtggacccgcagcaccctgagacttcgatcgacggtcctgttgagcgcatatcggcaaccatccttgaggcgatgccgcggatatctcagatcatccgctctgagaacgtcgtcattgtcatcggcttcccaccatgcacggaagtggctgtttccgggtcccgttggttcgagtccaagcgcgccaaagacccgcatttccaggccaaagccgcgctggtcgcagaacaatgcaggatggttggcttggcgtccggctgcccgtgggcattcgaaaacccggttagcgtgttcagtagcatcttcgggtctgccgattacacgttccatccgtaccagttcactgggctgtgcgcggatgacaactacacgaagcagacatgcctttggacgggtaacggcttcaagacaccggtagagaatatgcacccgatggttgaagcggctatcgacgccgtgaagctggcctgcggccgcatggtgccgaagaaaaaggcgatcgagtccatatcaggagcgtccttttccggattggtggctgactggtatccggacaaccgaattcatgaatgcccacccagcgacgagcgcgccaacattcgcagtgctactccccttggctttgcaagggccgttttcctttcgaatgcaccccacctcaataagaagcgggaggcagcatga

SEQ ID NO: 95867 - DNA, 198 bp, Enterobacter aerogenes
atgacgccagaagaaaaagaaaacgctctccgcgcccaggctcgtcgttgcgcagaagagataaccaaagcgatgagcgtgaagcctaaaccgaagtggaacgctgtatgccccccccatccttcgcaagcactacgagaaggtccggcctatgggtgtcagtctggtgaaatttgtcagtgttattgggcggcttag

SEQ ID NO: 95868 - DNA, 249 bp, Enterobacter aerogenes
atgagcaaccctattactgtcggcctgtcaggcttaactaaccgtatctttgccgggcgctctaagcaaagcaaattggcccctggcgtccgagaattcaccggggaaaagttcgatgttacggatgacgttctgtttgctgtagcccatctgatgattgcccgcgatgacgttcttgttttccccgcggcaaacggcaaggaaatccatctgcgcgctgacctcaaagacaaggcaggtgcagcatga

SEQ ID NO: 95869 - DNA, 192 bp, Enterobacter aerogenes
atgaacagagcctctcccgttgatttaaggaaatgccttgaggccgcacatggcctcgctcatatcggcatccgttttgtgccgatcccggtagcgacagaggaagagttccaggcactgtctgccgagctttcacgaaagcttgagcagatggtggttgaagcggaaaaaagcgaaggcggtgcagcatga

SEQ ID NO: 95870 - DNA, 219 bp, Enterobacter aerogenes
atgagcgcagaactcatcgatcaggccaacgatctggcagagcgccggcttgaaatgaccatccagaacatgcgcatcaaccataacgcagtctcggctactcactgctgcgactgcggggaagagatacccgatcggcgccgggaactggtggcgggctgccagcgctgcgctgattgccaggaagaagaggaattacgcggtaggcatcggaggtga

SEQ ID NO: 95871 - DNA, 1164 bp, Enterobacter aerogenes
atgtccatcaccctcagaggcggcatgtggcactgtcatttctttacgccgtcagggaaaagagttaggcgatctcttggtacgggggacaaaaagcaggcacaggagctccacgacaagctaaaggcagaagcatggcgggttgaccagatcggtgacctgcctgtcagaaccttcgaagaatgctgtatccgctggctgcgtgagaaagaccataagcggtcactggatgatgacaaaaccaaaatagagttttggctgcagcatttttccggccgtgacgtctcaaagataacggcggaggaaattcacggagccgtcaatgggatgatcaaccgtaagcacctgcaggtatgggagagtaagcgcgatgccgcgttgcggaaaggtaagccggttccggagtacaaaccacgacaggtttcccaggccacgaaggcgcaacacctttcctttattcgatccctgctcagggccgcggcgaatgactggggctggataaaaacggcgccagttatcaaaacccgcaagccggtcagcaagcggatacggtggctgaccagagaagaagctgagcggttgatcgagtgcatgccggagagcattaagccagtggtgatatttgcactggcaaccggcctgcgccgctcaaacatcatcgggcttgagtggcagcaggtcgatatgcagagaaaggttgcatgggtaaacccggagaacgcaaaagcgggcaaggcgattggcgtagctctgaatgataccgcatgcagggtattaagggatcagatagggaagcactcccgatgggtgtttgttcacaccacggcaaaatatcgcccggatggaacactgacgcccgcggtgagaaaaatgcgggtggatgacaataacgcctggcgcgccgggttgaaaaaagcggggatcgaggatttccgttttcacgacctccggcacacctgggcgagttggctgatccagtccggcgtcccgctttctgttttacaggaaatggggggatgggagagcattgagatggtacgccgttatgctcacctggcgccaaaccacctgaccgaacacgcacggaaaattgacgccatttttggcgctagcgacacaaatacgacacaaggaggaaatcaggccggcttaaaactggcgtaa

SEQ ID NO: 95872 - DNA, 906 bp, Enterobacter aerogenes
gtgctggcctgcgtgctgttcgcctggaaccgcaactactttattctgctgttcgtcggcgtctttctcagtagttttggctccaccgccaacccacaaatgttcgccctcgcccgcgagcacgcggacaaaaccgggcgcgaggcggtgatgttcagctccattctgcgcgcgcaggtctcgctggcgtgggtgatcggcccgccgctggcctacgcgctggcgatgggttttggttttaccgtgatgtatctcagcgccgccgtggcgtttatcgtctgcgcgctgatggtctggttcttcctgcccagcatgcgtaaagagagcaaaaccgccggtggtcatcttgaagcgccgcgcaccaaccgccgcgatgcgctgctgctgttcagcatctgtacgttcatgtggggcaccaacagcctctatatcattaatatgccgctgtttatcattaatgaactgcatctgccggagaaactagccgggctgatgatggggaccgccgccgggctggaaatccccaccatgctgattgccggttattacgcgaaacgttttggaaagcgcttgctgatgcgcattgccgcgcttgccggactgctgttttatgtcggtatgctgactgtccataccccggccctgttgctggcgatgcaggcgctgaacgcgatttacatcgggatcctcgccggtatcggtatgctctattttcaggatctgatgccgggccaggcgggcgcggcgactacgctgtataccaataccacgcgcgtcggctggatcatcgccggctcgctggcgggcgttgtcgcggaaatctggaactatcacgcggtgttctggattgcgctaatgatgggaattatcgctcagggctgcctgtggcgaattaaagacgtttaa

SEQ ID NO: 95873 - DNA, 624 bp, Enterobacter aerogenes
atggaattacttgttcttgtttggcgccagtaccgctggccgttcattgccgttatggcgctgagtttgctcagcgcggcgctgggtatcgggcttatcgcctttattaacctgcgcctgatttcccttgtggatacctcgctcaccgtgctgccggagtttctcggcctgctgctgctgttgatggcggtcacgctcggctcgcagttggcgttaaccacccttggtcaccactttgtctatcgcctgcgcggcgaatttattaaacgcattctcgacacccaaatcgaaaagatcgaaaaaatcggcagcgcttcgctgctggcgggcttaaccagcgacgtgcgtaacattaccatcgcctttgtgcgcctgccggagctggtgcagggcattattctgaccttcgggtccgccgcctacctggcgtttctgtcaggtaaaatgatgctggtgaccgcggtctggatggcggtcaccatctggggcggctttgtgctggtggcgcgcgtttataagcatatggcgatgctgcgcgagaccgaagataagctgtatcatgattatcagacggtgctggaagggcgcaaagagctgacgctgaaccgcgaacgcgccgaatag

SEQ ID NO: 95874 - DNA, 432 bp, Enterobacter aerogenes
atgaaagttaaagtactgtccctcctggtaccagcactgctggtagcgggcgcagcaaatgcggctgaaatttataacaaagacggcaacaaattagacctgtacggtaaaatcgacggtctgcactacttctcttccgacgacagcgtcgacggcgaccagacctacatgcgtatcggcgtgaaaggcgaaacccagatcaacgaccagctgaccggttacggccagtgggaatacaacgttcaggcgaacaacactgaaagctccagcgaccaggcgtggactcgtctggccttcgcgggtctgaaattcggcgacgcgggttctttcgactacggtcgttgtttacgacgtaacttcctggaccgacgttctgccggaattcggtggcgacacctacggttccgacaacttcctgcagtcccgtgctaa

SEQ ID NO: 95875 - DNA, 570 bp, Enterobacter aerogenes
atgaagaaagtggttgcccgtggtccggttgctgctgcggctgcttcgactgacagcgcgccagccgccgcgcctgcggccaaaccgcaggcggtcgcgaacgccaaaaccgtcgaagcgctggtttccccgatcaccggtgaagtggtggcgcttgagcaggtgccggatgaagccttcgccagcaaagccgttggtgacggtatcgcggtgaaaccgaccgataacatcgttgtcgcgccggcggccggtacggtggtgaaaatcttcaacaccaaccacgcattctgcctggaaaccgataacggcgcggaaatcgtcgtccatatgggcattgataccgtcgcgctggaaggcaaaggctttaaacgtctggttgaagagggcgcacaggtgaaagccggcgagccgatcctggaaatggatatggcgttccttaacgccaacgcccgctcgatgatcagtccggtcgtctgcagcaacagcgatgattacagcgcgctggtgattcaggcaacgggtaacgttgtcgccggccaaacgccgttgttcgagattaaaggcaagtaa

SEQ ID NO: 95876 - DNA, 654 bp, Enterobacter aerogenes
atggatattatctcagttgccttaaaacgttactccactaaggctttcgatccggcgaaaaaactgacggctgaacaggcggaaaacctgaaaacgctgctgcaatatagcccgtcgagcaccaactcccagccatggcactttatcgtcgccagcagcgatgaaggtaaagcccgcgtcgcgaaagcagccagcggcacctatgtgttcaacgaacgtaaaatcctcgacgcttcccacgttgtcgtgttctgtgcgaaaaccgcaatggacgatgcgtggctggaaaaagtcgttgatcaggaagatgccgatggccgttttgccactccggaagccaaagccggtaaccacaaaggccgcaccttctttgccgatatgcaccgcaaagagctgaaagatgacgatcagtggatggcgaagcaggtttatcttaacgtgggcaacttcctgctcggcgtggcggcaatgggtctggatgcggtgccgatcgaaggcgtcgatttcgctatcctcgacgaagaatttggcctgaaagcgcaaggttataccagcgtggtcgtggtgccggtcggtcatcacagcgtggaagacttcaacgccgcgctgccgaaatcccgcctgccgcagtccaccaccatcaccgagatctaa

SEQ ID NO: 95877 - DNA, 759 bp, Enterobacter aerogenes
atgaacgcattgcatcgtattgcgccgctgccggcgcagaaagtattgctcgttgtcagtctgtttttctggggtggggcaatgcatctctactggccgaataacgggggtagcggtttgtcgttgccgctaaatataacggcctggatttatgccgttgtgctggcagctagcgcattgatgctggtacctcgtcaacgttggcggataactatacccgccgcggggtttacgatgggggcgctcattctgacgttgctttgtctgttgacgcctgaggtttggcggtccgaggcgctgctggtcgcgggggcgttgctgggaggcgtgcttgtctatttggcgacgttgcaaattccgcttacgacaaacacgctgacagtactgctggctctgctctggggcgcgtgcgtcctcgaatgtctggcgtttacctatcaatactggcattggccgggggtgaattactgggagtttgcctggcggcgcggtacacgcccctacggtatttttcagcaggttaatctgatggccagcttcacggcgtgtggcgtgctgctgtcagcattgctttttttacggctacgtggcggatatcggattatcatcgggattgctctggtgataatgggatttgtactgcatgagtctcagtcgcaaaccggttacctgtctgtggcagtaggcgaggtcttgctgctggcggtttttcctgcgcagcgccgtacgctgctgttatcctgctgccgctggcgatag

SEQ ID NO: 95878 - DNA, 183 bp, Enterobacter aerogenes
atgatagagggaacgataaaaaccagtaagtatgaaatcattgctattttcagagaggaacagagaaagcaaacagagatagaaattttctttaataacaaaagcatcagtactcagattgcgcgtgtagattttgccgaattccatatccagagcgatagcaaaatccctgcggggaattaa

SEQ ID NO: 95879 - DNA, 915 bp, Enterobacter aerogenes
ttgagagttctacacgtctataagacctactatcccgatacctacggcggtattgagcaggtcatttatcagctaagtcaaggctgcgcccgccggggaatcgcagccgatgtttttacttttagcccggacaaagagacaggtcccgtcgactacgaagaccatcgggtcatttataataagcagctttttgaaattgcctccacgccgttttcgttgaaagcgttaaagcgttttaagcagattaaagatgactacgacatcatcaactaccattttccgtttcctttcatggatatgctgcatctctcggcgcggcctgacgccagaacggtggtgacctatcactctgatattgttaaacaaaaaaggttaatgaagttgtaccagccgctacagcagcgattcctcgccagcgtagactgcattgttgcctcgtcgccaaactacgtggcctccagccagaccctgaaaaaatatcaggataaaacggtagtgatcccgtttggtctggagcagcatgacgtgcagcacgatccgcagagggttgcgtactggcgggaaaccgtcggcgataatttcttcctcttcgtcggtgctttccgctactacaaagggctgcacattctgctggatgcagccgagcatagccggctgccggtggtgatcgtcgggggcgggccgctcgaggcggaagtgcgtcgtgaagcgcagcagcgcgggctgagcaatgtggtgtttaccggcatgcttaacgacgaagataaatacattcttttccagctctgtcgtggcgtggtattcccatcgcatctgcgctctgaggcgtttggcattacgttgctggaaggcgcacgttttgccagaccgctgatctcctgtgagatcggcaccgggacctcattcattaactag

SEQ ID NO: 95880 - DNA, 603 bp, Enterobacter aerogenes
gtgctgattgtcggggcgaatacggtcgccagaaccctggcccaggcgctcagaaaactcgatattccggttcagctgagcgataacagctgggaatactaccggctggcaagaatggaagggttaccaacatattatggcaatgtctggtctgaacatgcggaaaactacctgaatctgagtgagattcgtcaggtgatcgccttgtcgccaaatcgtcaccagaatgcgctgaccaccctgcattttcagcatatatttggtaataatcgcgtcttctcaatccgtacggggcctgtgactaaaggacgtagtgagaaagaaacgcgtcacgaacagcttttcgatactgatatgacctgggcacggcttagtagcctgatagcgaaaggcgcagtcatgaaagtcactcgcctgaataacaattttggctggccggagtatctcagcaccaaccccggtgcaacaccgctgtttgcgcaaagagaggatggcaatctgatagcgattaataatggaatcatgccgccgccaccctgtaccgtcgtggcgattatcgaacctggagtggaaagtgaaaaaattccgtcagaagcgtattga

SEQ ID NO: 95881 - DNA, 1266 bp, Enterobacter aerogenes
atggctctgacagatatcaaagtgcgttctgcaaaaccacaggaaaaggagtatacccttgtcgatggggatggcatgtttttgctcattcaccctaacggctcaaaatactggcggttccgctttcgctttggtggtaagcagcacctgatggcatttggggtttatcctgaaacgtcactggctgatgctcgtcaaaaaagggaagaggccagaaagcttgttgctgcaggtatcgatccccgtgaacacaaacgtgcagtgaaagaagagcagacgaaagaggctattacctttgagtcagttgccagagagtggcacgcagcaaataaaaaatggacagaagaacatagtcgacgggtgctgaagagcctggaagataatttgttcccagcaattgggaagcgaagtattgatagttttagtacgcgcgatctccttgtccctatcaaagtagttgaggctacagggcgtcttgaagtggcttcgcgtcttcagcagcgtaccaatgcgattatgcgttatgcagtgcaaagcggtttgatcgattataatcctgctcaggagatggctggggcagttgcttcaagtaatcgtgtccatcgaccagcacttgaactgaaacgcttacctgaactactccaccgaattgatagctacaccgggcggcctttaactcgtctggctgttgagctcacgttattaatctttattcgttctagtgaattgcgctttgcccgttggtccgagatcgattttgaaagggcaatgtggacaatcccggcagaacgagaagctatagaaggtgttaagcattcgcaacgtggttctaaaatgcgtacacctcacttagtaccgctgtctcgccaggcattagaaattctgaaacaggttcacaagtttagtggcgagcgtgattttgttttcgttggcgatcataaccctcgtaaaccgatgagtgaaaacacgttgaataaggcgctgcgtgttatggggtatgacactaaggtggaggtttgtgggcatggcttcaggactatggcatgtagctcgctgattgagtcagggctgtggtcaagggatgctgtagagcgtcagatgagccatatggagcgtaactctgtgcgtgctgcttacatccataaggcggagcatttggatgaacgcaaactgatgctgcagtggtgggcagattttctggttgcgaatcgggagagtgggattacaccgtttgactatgcaaaaatcaatcggggtaatatttag

SEQ ID NO: 95882 - DNA, 1650 bp, Enterobacter aerogenes
atgagcgcaatcacattacgtaaagcgttgggtgtacttgcgaagtcatcttcgttttccgtcaccaccgtgacacaccgtcagaaggatgagttcgatcagttaaaggaacaactctttgttaaacaagaaattgaaaccgaattacaacgctatctggatgttgctaaacccggtgaaatcatttttttgtgcggcagtagcggggatggaaagtccgaaattttaacccgctgtcagtcagatccgcgttatcagcggcgatttattttccatctggatgccactcatagctttgcccctcgacaatcagccattgatgctttgaatgaattatttgctaatcatcatcagcagtcatctccattgctcattggcatcaataccggaatgctcgctaactttgcccgagaaggtgctgaatgccacagggtgatccggtctgcaattgactcatttttatcagggcagcaggatgcaagccgtccttaccgtaacgagaattgttctttttttgattttgaacattaccctaaattccagtttgacgaaaataaacaatattcatcatttattaagacattattagataatttaactcgggatgatgataataatttatttcagtttatttttcggcgcgatgagtcaattaatccggatctaaaagaggtcgcaaactttaaattgctttgcatgccaggcgtgcagaatgtattaattacgcagctttttaaagcgcggctaattaaagatcaatttgtaacgacccgaacgctgctggattttttgcatcatctgctgatggggcctggctacttgtttgataacctcttcaccggtgcagaaaatgatctgattaaaaaagtttccgattttgatcccgccagattgcacacttatgaacttgatcagtttattttgcgctatgaactgagactggttgatgctgaactcgatgattttttagccgcacttgagccgttacacattaagtttgatcgccagtgcgttaagcctggtgacgcaacctcgttgatccggcttttttggctattgcagcatgagtcgttgggtaatgattatcatcggagattttccgcgttttttaaagaatcgttgtttgaacattactcagaaatctggcatttacatagaaattacacagcagatctggagcaaaaaagatcattgaatcgcttttacacctctgaacttatcgctggtatccagcgctatgcaaaccgtaaagcgccggagttgagtaagcataaagaagaattttttttgggagagtttggcggggttaaaataactgcgccagtagcgctgaagcctgactgggacgctatccgtagtaaacatactgctcatcctactggcttcgatgttcatttaaaagtgggtgaggatccattaccccccatccgtatcggacttaacctattcgaattattgaaaaagttaaataatggttatcgtccgaataaatacgataaaaatgctattgttctattagacggaattattgatttagtttctgataagatcaagctcagcactgagataagattttatgatggtatgcgccgagtttatagtgcaagattggatgacgatatgatctctattagcggaatggaggggtaa

SEQ ID NO: 95883 - DNA, 1341 bp, Enterobacter aerogenes
atgtatcctatttcagagatcttggaagtaaggaaaaataatccacaacctagctatctgcctatacgaaataaaaataataatattaactggcaaatagtgaccggtttggtactaagttattccttgaaacataaaatcgaagagtcttacgggattgaacaattcagagatgattgcaaagcccattttgaaaaaataatcgatgaaccagatttctgggccgtcttggaacgaatgtatttttcgaaccacgatatttttcgtgtttctcctatgtttttattgtttcaatcccagtttaacaataaaagcataaactctggttcagcagccgataagcgtcttggagctctcttcgctaatttgatgggggattttaatctcaactatccaatgccggataagctgaattttatcgaaaagcaacttttgaataagcttgatgaaaaagtatgtgagttttctggtgaaagtccatttaccaaagaacaatcttatcttccctttattgcgaaatgttttcagtccgatttggcatttctagcagaatatccacaatatcttctacaggaactagccaatactttgcgattgtatgcttttagctggtgcgctcaacttgcgctcaatctagacaattggcaaaagggggagccgcaaagcaaatcactttttttcatccttgactcggaaaaagccagtgcagaacgggaaggtgtgcaaacctatggttataagctttttgctcggcatagtaaaaatcttttcccgatgctctctgcgctggaagttttacagtggaatgataaaaagcacaaagggcaacccaaacgcccgctatggcaggtttatcaagattgtctcaattactcagattcatcaaaggtactaaattcgcttaacaattacttgcaggagtttattgtcgagcgcgaacttcaagtttatgaacgagctgcaaacttggatgaggcctttaagcagctaaaatcagttgctgttggacagtttcagaataaaaggtctgatagagcaagagtgaaccgagactacattaatgagcttgagagccagatttgcactgacttcattcaggtccgtggtcgggcagggaaagtgttggtgctgaatcaggatcgtcttctgttactgaccaatctcaccataggcaaaaatgacaaactccgcctgcacgaactgctgcgtggttttgaacagcgaggtttttatctggataaccagtcggcgcaaacgttggtcgcgttttatgaacgcatgggaaatgtagagcgaatgagtgatagtggagacgccgtgtatgtccgtaaaacagtatga

SEQ ID NO: 95884 - DNA, 5079 bp, Enterobacter aerogenes
atgtccgtaaaacagtatgaaacctatctggcagaaacctttattgaatgggtaggtggcatcattcagcccggcgagcgctaccagttcaaatctcccgatcccgataatgccctaaaactctgggaagcattcgtctctctggcggacggcaatcagttggaaattgcgcaagggcaatatattgattgcctcccctgcaatggtgttcagcttattcctgtactgcacggagccgaggctccagcattcacagaaaactacatttctcatttgcgcgatgaagttgcagggcgcagcggcgtttttgcccaaacagcgctgttgattattcacaacagtatgctcgataccctgattaacagtacgaaagacgtggcggcaccggatgctatttggtacccacaaactttcagtcatcaattggaaaagctcattactactaatagtaaccgttcggaattgtcccgctgtttgctggaggatcaactggcgacggtactgtatgaaggtgcgaccgtatttggtttctcgtcgctgtatcgcttgctggatgatggcaatctggatttctccgagcttcatctgtttaaagatgatgaactactgaattatagccagaagcagctacgcacccgactgaatgaaaaccggaaattatatcgccagatagaagatagtgtagaacgctacagtggacagctggagaatgtgctgcctgagtttagttcaaaattcattcaggagcatttttacgataaagatgactggcgtgagctcgatttctccgactacaggaaagagaaagaacagaatagtgaacaaaaactggtgctggagaacgtctccgtcgaaaacggcgaggtttggcaacgggcgaaaagcgccagtaaggcaggcaaacgagacatcagcctgctggtgcaggtgcagccagggcaatcaaaggctgagctggagttcagttttcagggtaatgatcttcaggataaccagataaagattgcccataatcgtcagttaaagaatgcacctttctggcgcaccagccgggcgggcggcaagacttcccgcattatggcctcggtgccttttgatgggcatccctgcttctttagtctcgaactgaccaatcgaagtaattcagccgaagagtataaatttcgcctattgttggtcgagcagggacaattctggctaaacgatattcagcactgttaccgtatcgagccaggtaaagatcaaataaccctgcaactggaagataacacgctgcgtattgcagagtctggcaacttgatatgtacgttggatgacgagagcgaagacatcgactgccagcattatgctcaggtgaattttgaaacgctggcaaatcaaagtgacctggttcagtttgcgctcgtttccggtgattcccgtctgtcgtttaacatcgaggggccgggagcagaagaagggctaacgttaccgttgctttttgaccaaagtcgtttcaataagttgttcaaagaagagggcaatgcaacttggaaccgactaaaagggcgcatcatactcgataatactgaacacaaggtcgtaggtgtacgccagcagttgttgatactggaagcctcattaattgagcaacgtctgctaggtacgggaagtgacgatagtgagtttgcgctggatgaacttcttgccagctaccccgatctccataacgcctatgagcagttatttgcctactatcatcgtcgtaacaccctaccgagtctggtgtcgtggtcagcggaatatcgcacactggtcagctacattgttacaacgtttgaacagtcactccagcaaatcggtctgagcagagcgctgacagcgcaggagaaacatcttctgcatctggggatctgccgcaatgatagccatgagcgtctctcaccactgcacccattagtgctggcctaccatctacaactggcagaagctatcgttgcggagtcggaacagaacgattcggcttcatttgccacactaccgccgattactcttgatcgcttgatggtttccgggttaatgccgtttgtttaccacagtgagcatgaatacgcgcaactacagccggtggaagaaaaccgcttctggattgacgcggttccccagcggcaggtcagccatgactacgttaaacgtctggtaaaagacaaactcaatgagttcacggacgcttacgcccggttgttccagagcgctgaaaacagtgcgttgattatcaatgccattaatcaagggaatgccaaagaactgtttctgggattagtagaatattttaagcaagaaaaagagcacgctatttcggttcatgtgaactgctacgatgaacgtttgctacccaatatgttcgatcattttgccgaaagtggtagctatgagcagcttaaaaacgatctcgatctgaacagcggcgtatggcgatcggaagcggatatgctgattgacctgctgcgtagccggttaacgttcagcaagtttgtcctgccgtcagaaagcgacaagctggcctatgcacatctggcatttttcaccaatacagcacctgtggattgccgccagatccgcattgaagatgcgtccagcggggtattgtgtcatggattgatagctggggaaggtgccgaaacgcagggggatgcttactttaccgcgtttggactgcgtgatgtggatactgagtcctactgcgctctgcgtcttgcccgactaattggctgcttgtggcaacccgcacgtcaaagcaacagccagtaccatggacaagggatcggcctggctgtgagcggcaattttaaacagctgctcaattactcctacaatagcgcgctctggaccaccattattgatccaaaagtcaccctcgactttttcaccagtcagaaagatgtggtgcttatccactattctgaccagtacacaagttgcgcaggctacgatgctgtcactgtcacaaagcaggttgatttgttcctgcggttgctccaaaccggaaatcagtcagggcaacctgccgttgacagtcagaatttgctggctgaatttaacgcctttaatggcgaatggctgctgaaaatgctgcgctctagtgaaagggagcgtaaagagaaacacggcattataggcgcgtacaaatttgtgcagtccatgctgcaccagtccgatatttgctggattcccctatcggtggccgaaatgatccgcgtgtccggcaatgtcgggctgaaaatgaaagagactgatttatcaagaaatttacagggttatcgtaacggcgcgatctctgatgatgtactctttgtgggattcaaagaagaccgcctctatctgttgccgctggaagttaaaaccggggcgcgaccggactacagctatgcaggccaacaggctcgtgagttgaaacgctacttacagcaggacattctggaaccacaaacgctggcatcacaattgtaccgggcgctctttattcgtcaggtgctgatgcaggtggagaagctgcgcctgtatggagtgctggacagcaacaaactggctcccttgctggaacgacgagaatggtggttaaccggcgactatcagttaggtgagttgaccgactacgcgaacggcttcgtcgtggcgcatgtggacagcgcaacctgcttcgatctctcttataaagagacagcggagaatatcttacagattgaaatcccttattcactgctgccttcgctaattgctgcgcaggggaatgaaccaccgctggcggaacgttaccgggtgccggaaaaataccggcttaagccagagagtgatgccactccgtcacaacccgaagtggtggtagaagtcacaacgccggctactgcacggtccatttcggaaccggagtcgttacagcctgctgtaccggtggcgacttctgataaaagcgatactccattacagatcctgtttggtcatgatgctgcgcgtcagagcccgttacattgggagccaactaacaccgcgaagttcatgaataccaataccggcattattggaacgatgggcaccggtaaaacccagtttactaaatcgctggtcacacagttgatgcgtaatcagtcctgtaacgttgatggcaaacctattggtttgctgatcttcgactacaaatcagactatgtggatgaggcttttcttgatgctacgggggccaaaaagtacaaattatttaagctgccttacaaccccttatctctgtttggtgacacgccaatgctaccaatccataccgcgggtgggctatcggaaacgatggcaaaagcctatgggttgggtcataagcagcagctcaaattagaaaatctaatcttagaatgctacgaagctgcaggcatttcgccggaagatccgacaacatggtcaaggactgcgccgacgattgaagatgtatggcagcgcttcctcgatcaggagaaggttgaagaagattcgctttacgcagcactctctaaactggcgcgttacaagatattcgagaccatcccagagaagatgaccagtttgtacgaattgattgacggtgtcaccgtgattgagttggctggctatccgccagaagtgcaaaacctggtagtcgcgctcacgctggatctgttttatgcgcagatgcaaaagcgcggtaaaccggtggtgcggggggattatcgtcagctcactaaaatgattctggtggacgaagccgataactttatgcgtcaggatttttccagtctgcgtaagatccttaaagaaggccgtgagtatggtgttggtgcgatcctatcaacgcaggagatcactcactttaagaccggagaaaataattatgcctcctatattttaacttgggtgatccatcgtgtctctgagattaggaatgcggatattaaggctgtatttaacgtcgatgataaaggtgagcaggagtctttgatggggcaaattcgtcagcttgagaagcattttagcctgtatgtggatggggataagcaggttaagaagatgcgtgatcgagcattttgggagctgatatga

SEQ ID NO: 95885 - DNA, 492 bp, Enterobacter aerogenes
atgagtgatgactctaatactattacatcaagtgacagttacattaagtctactgggataagatgtgtaaatgctatgtgtgctctttctttctggcgagagtttattgcatattttatcttgggaagtatggggctatggcttcctccttttttaggggcttctggcgcgaatgcagtttttgatccaatgaatgttttaacatttggtcttgtgacattgtttataatattagaagcaaggctttttatggataaaaatgatgatgctaaatctcctggagtaactaaattaatagttttgctaggtgtgatattattgtgcatcggatatgttaaaggtgttgttacaaatgggactccattattctgggggatgggttgggtacatatctctttgttttttacaatgttagtttggctgcttaaccatgttaatacatcaagatatgatccaaaaggtattaatgagatgcttggggggagcgtatga

SEQ ID NO: 95886 - DNA, 1212 bp, Enterobacter aerogenes
atgagtaatgaaatcagacttccagcaattaaaatagagcaaccaattggatcattttatgcagtttctatgcgttcggatctattatcaaaagttgcttttagttctagagctgaatataaaaaatccgatcttcaagaaggtatcttttcgcttttaaaaggtaaccaacgtgagttggatttaaaacgtagcaaacaaataggccaatatattgacagtgttgagtcaacattcccaaattctataattcttggcgccaattttgataaggacgggaatttgatcgaggattatgatattagatggcgagtggaaaaaaatggggatttatataccttagttataccttcggaaaacaatgttgtagcaacaataattgatgggcagcatcgattatcagggtttgggtattcagaacgtgaaaatatggaacttttatgttctgtatttattgatcttcctgcgccatatcaggcatatattttcgctaccatcaattttaatcaaaaaaatgttaataaaagccttgcatatgatttatatggatttagagttgaagaagaagataagaaagaatggtcaccagagaaattagctgtatttatagctagaagattaaataaatattgtgaacctttgaaagataaaataaagctaggggcgccttccgacattgatgatactagttcctctatgaaattaatttctctatcaactattgttgatggtgtgatgaaattgataactaataatcccaagaaggatagagatgaacttcttaacttcaaaaataaaaatggccgaagtgctctatcaagaaaaatgatttcccagccgttaagagatttatatattgaatataaagacgatgaaattgaaggtataataagaaaatattttactaaaatcaatgaaatattatggattcatcaatcggataacagctatttattaaaaacaattggttttcaaacgcagtttgaaattcttaggcaatatttactgtcgacatctgattatgagctcaatggtattgatgaaaaattagaactgcttgtggatattgatttttctgatattttctttactgcatcaggaattggtgcaacacgaatgaagaacatatcattgattagattaaaattgaaacctcttactgatctagttgaacacaaagattataacgactatgtgaggttactcaaatag

SEQ ID NO: 95887 - DNA, 354 bp, Enterobacter aerogenes
atgctcccgaatcgaatggtgcttagtcgtcagactgaagaccagctcaagaagttaaaaggatatactgggattacgccaaatgtcgcggctcggctggcatttttccgctcggtggagagtgagtttcgctattcgcctgagcgggatagtaagaagctggatggctcgctagtgctggataaaattacgtggcttggggaaacactgcaagctacagaactggtgttaaagatgctttatccacaattggagcagaaggcgatgattaaggcatgggctgcgcatgttgaggatgggattgctgcgttgaggaattatcggagtttaaaggatttggttcaagtactataa

SEQ ID NO: 95888 - DNA, 2010 bp, Enterobacter aerogenes
gtgctcattaagcaactggtattacataattttcgcgtattttgcggcacacacaccatcgatctggctcccagaaagcgcccgcatgaagtaaaccctcgcccgattgtgctatttggtggtttaaatggtgcagggaaaacatctattttgtcggcaattcggctggcgctgtatgggcgtttagcatttggcccggcaatgcagcagcaggagtatgttgaacaactcggtgcgctggtacacaacgggacgtatacagcagagcgcccggatgaggccgcagtagaactgacctttacctacaaccaaaacggccatgagactgaatttaccgtcacgcgtagctggaaaaaaggaaagaaagatcgtctctctttgcagcaggacgggcaaccgcgtagtgaactcagttatgaccagtgccagggatttttgaatgaattaattcctcacggtgttgccgatcttttcttttttgatggagagaagattgcagagctggcggaagatgaatccggcaatattctgcgtacagcggtgcgtcgtttgttgggactagatctgatcgccagactgcaaaatgatctgatgatttttgtcaaacgccagcaaaccgcccagttgggtggctcccagcaacagcaggttgaagcgcttgaggcaaagattaaaacgcttgccggtcaggcggagaaattgttggaagaagccgatttcgtcaactcgcggatcgaatttttatcccaggacattattcgccatgagggattgttaaatgcgcagggcggcgcatttgcccagaccaaagcacaggaaaaacagaaagttgaaacgctgttaaaagaaaaagagcgtctggaaaaagcgttacgacaggaatgcgatggatcgttgccctatgcattagcgcctaatacgttgtcgcggttgctggaaaaaattgccaatgaagcgcagatcaagcaggcgaaaatttttgagacagagttaaatcaatttttaactcaactcaaaaatgatatcgcgttccgttccagcagtgaaagtagtaccagagccattgctaccgaagcgattaccaataatttggacgcatatatggcagccaaaccaaaaggtgatttgctgtttgatatttctgaacgtgaagccggtatgctccagcaatccattgagcaggacagcaaaaaagcatggcagcgttttgatatgtaccgccatcaattagcggatattgaacaacaactggagcaggccgctgccaatattgctcgcgccccggaagacgagcagttaatggatctctttgcagcattacgcgatctcgatcataagcgtgaaaaacagcggcaaaaataccgctctctactggaagaggctaaacggacgaaacagcagcaactggactgtgttcgtcaggtacagaaagcacatgacatcacccgtagccagcatggtttgagcagcgcatttaaaaatgcacaagagaccattaacctgctcgattactacagcgatgtgttaacgcaggcgcgagtgaaaaagttatctgctaactttgaaattgcctaccacaagctggcccgtaaagaggatttacagcttaatgcgcacataaatccacagacatttgatgttgaactggtggatgaaaaggggtcggtgattaatcgtaagctgctttctgcgggtgaaaagcagatttatgcgattgccattcttgaggcgctggcaaaaacctctgggcgtgatttcccggttattattgatacaccgttagggcgtctggactctcagcaccgggataagttgattaatcattatttcccggaggccagccatcaggttgtgctgctatccaccgatactgaagtggacgagcgttatttcgtcgatcgactgcgtgatgatatttctcatgcttatgagattgtgtttaacgcgcataccaaatcatctgcgctgaaacccggttatttctgggaactaactaaggaggctgtctga

SEQ ID NO: 95889 - DNA, 1635 bp, Enterobacter aerogenes
atgagtaaattagttcaggcctacgatttggccgaatacgaagattttattaatcaggagcagttcgctggccgccctctggccgaatatgttgctgaggttcaaagaatttattgtgcggataagcgtccgtgggtaattggctatagcggcgggaaagattcttccgccgtgatcacgctggtgtatctggccttgcttggcttgcccccggaaatgcgcagcaaagatgtttttgtagtgtcatccgatacgctggtggaaacaccagtggtagtagatttaattaagaaaacgatgttgcagattgaggcaggcgcaaagcgtaatggcctgccgatcactcaacatgcggtaacgcctaaaacaaatgaaaccttctgggtcaatttactggggaaaggttatccggccccaacccgtagttttcgctggtgtaccgagcgtatgaaaatcaatccggtgagcgactttattaaagataaagtcagccagtttgatgaggtgattgttgtcctcggctcacgtagtagcgaaagtgcctcccgtgcgcaggtcattgcaaagcacaaaattgatggctcacgcctggcccggcataccacactggcaaatgcgtttatctatacccctattgatacttgggatgtagaagacgtatggaaacttctgcgcggcgcgttccgctatgctcctgaagatatcgacgaatgggaaagcccgtggggtggaaacaatcgtcctctatggacgctgtatatggactcttccgcgcagggtgagtgtcccttagtgatcgacgacagtaccccctcttgcgggaactctcgctttggctgctggacctgtaccgtagtcaccaaagataaagcgatggaaagtctgatcaaaaatggcgaagagtggatgtcgccattgctgaaatatcgtgatctgctggcttttaccaccgatccggtgaataaagacacctatcgcaactataaacgccgcaccggtaaggtgagctatcagtacgctaaagacggcgaagatcgcagtgcagagcgtaagcatgttcctggcccctactggctcaaataccgccagcagtggttaaaagacttactggaaattgagcgtgatttaaacgcccagggccacacgattacgttaattacccagccggagctacacgctatccgccaggagtggttgaaagatcctaacgagccagactggtacgatacattgccggggatttaccgcgaggtatatcagcaggatctaaattgggtggttgacgatcaatctcgctttgatgccagcgatgctgatttgctggtacaaataacgcaagggtttgacgtagtacctgaaatggtaatgaaactgattgagctggaaacctcgatggaagggttaagtcgtcgtcaggggatttttgacaagctcggcacaattttgaagcaggactggggcagcctggaagagatccagcagcaacaggcaacgctgcaaaaacgcaacgatcgggatattcatcaggacgaggtagataagctagaagctgaactccagactttacagcgcagaattatcgatgcgggcgaatcgtctgtgcttatcgatgaggaaaatgaacgtgctcattaa

SEQ ID NO: 95890 - DNA, 1086 bp, Enterobacter aerogenes
atggctagtgttgatgcagattactgctactcttttccagctatacgtggcattcaggctggtcgtcctttctacatcgccacgtgcccgatgcgcatcatccccaaaatattcagctttgatgaaaatgacgtaccgcctgagctacgcgcgcagcgcacgctgaataaatcacgcatccccgaaatggttcgttatcttctggaaaacccgaaagattatgtgttttctgcactaacagcgtccatcgctgttgacgtccagtttgatgaattccccggctctaacaatctggggacgttatgtgtgccaatggatgcacaaatcctcattaacgacggccagcatcgccgtaaagcaattgaagacgctttagacgctcgcccggaacttgggcaggataatattccggtgttgttctttgttgatgaaggcttaaaacgtagccagcagatgttcgccgatctgaataaatacgccattcgccccagtccttcgctggcgtctttatacgatcatcgcgatgccagttcaaatctggcacgttatctggcgatgtccatagcgccgtttgtagggatgacagaactggaaaaatctggcatcagtcagcggtcgaataagttatttacgttgagcagcatcaagcaggctacccgcgcattgttgggtaaagatcccaaagagaataactttgaggaatgcacacaaatagctacccaatattggcaagctatttttagcgtgatgccggattggcagttagcggctaaaaaagaggtttcaccggttcagttacgacaagattatgttcacgctcatggcattggattgcaggcacttgggcaactgggatattccctgctaacggattatcctgagcaatggccggagaaaatagctgcacttaaaacttttaactggcgcagaaacaacccggatctcgtcaaacgtgcgatgcagcacggcaaactgagtaaaaccagtacggcgatccagctcacctgtaatgcgctaaaaattgcgctctcaatccccctcactcctgaagaacaggagcttgaagctcaaatggttgtctcatga

SEQ ID NO: 95891 - DNA, 435 bp, Enterobacter aerogenes
atgcaatttcgaaccattcgtaccgcccttaaccatgagggcgaagtaacttacatccgggacctgactccgcgttcaagggggctctggttctgccgttcctgcaacaatcccttgcgtctgcactggacgcatgacagcggcggttatttcgaacatgaccttgaagatgctgacgaacgccgattaacgcattgtgcgtaccagatcattgcccgggataaaccagtatccgcttttgaccaagccgtaaatgcactgatggaacgtgatgatgtgtccttcacagcaccttcagacagagattacttctgcgtactctgccagcgtgaatattatggtatccgctgctgcccggcgtgcgagcagcatatctacagcacggaaatgaaagacctggataccctgacgataccagttaaatttgcgaagtaa

SEQ ID NO: 95892 - DNA, 393 bp, Enterobacter aerogenes
atgacgatttacgccaaatcttttatcggccttgacggcaatcagcgtctaacgggcgcaaccactgcacagcttcacccttatgaccgctacacctgccatctctgcggcagttccctagtattccacccggaatgggccaccaatcgcccgtggttcgagcatacacgggaagacctgaccgagaacggtcgtcaccattgcccgtacgtatgccctgagccgaaagaagcacggcggatacgcatgctgcgccgttacgtcccggatgtcctcccgctggtgcgcaaggccgaatggcactgttcggagtgcgacagcgattatcacggtgagcgctattgtctgacctgccgtaccggtgaccacagtaccgaacgttgcgcagaatga

SEQ ID NO: 95893 - DNA, 588 bp, Enterobacter aerogenes
atgagctaccacgacacgaccgatatcaatctcagttacgttcagcacacagccctgagccgaaagctacgacgacatcaggaccagttatttgagcgttattccaagctactgatgctacgggtggacttctcttaccttcaggacagcgattcgcatggtgagggagatattcattcgacagtagcggatatcacattactgattcaacgctgcggggatatcaacgggctggtgggttacgcatgggtactggaacaaactgaacagcatggttaccacatccacgccgcgttttacctcaacggtcagaagcatcgccaggtctggactgtctttgaagcactcagggacacctggaagtatgtgacatggggagaaggacacacgcaccgttgtgagcctaaagaacattatcgcgtgcgaggagaatgggtgacctcttatgacgatgccaggggccgcagaggtatgcagtatatcctgagctacctcagcaagcaggcacagaaaagcctgggggttatctgccagttgagtgatattcctacaccacggacagcaggcaggcggcgaaaagccagttaa

SEQ ID NO: 95894 - DNA, 1209 bp, Enterobacter aerogenes
atggcaggcctgaaggatgactttagagtgtttgacttacgccgggaagacctggcctatgagagtcctaaccaaaggtggggggaaatcagccatcaatatttctttgttgggtttgagcgcctggaggaggatgaaaggcctggtaaggatgaaaagttcaaagctcgcttcaggatgttcgatatgctggacaaactttatctgaaccaggcgaccagcgatgggcaagagtttagaagaccgaagacgaagtttcgtgattctcagccaatccacagcgaacagttagagaaaaagtggaaagatgcgcttgtaaaagcgatctctgataaagaaaaggcattatcttatctcagcgagaactatcggaaggttgtaagaaagcatcgtcaggttgaaatgttgactctgtgtttttatttacctcttgataaaggtgagaagatgctgaacatacggaggaaaaaagatgactctcgtttcagactacaactcgctgaacttgaacgacgctttaccttgatgaggaaaaggataattgcggatccgctttataaagccgtctgtggttattcgcgagtgatactgataaatgctagatttgagcctttctatctggtgaatttctttttcaaaaaacatccagacagtcggatagacagcttagtctcattagacatttacaggaaatgggttcaatcgggtaagaaagaaaacaaatctggtgagcaggttggatattattgctttaaggatgcatcccgaccacatgttccagaagacagtgggctatttattcgcaggccagaccgagtaatcgatgtcggccaaatttcagacccgatcttgttcgttttatcagaagaaagaaaattcgaaaacaaccgcaaagattatctggctttctttcgccttcaggcccaaatctataatgttattccaggtgcacgaaccctgacatgttctgacgattttacctacatcaatgcagccgagaagaaacgcagaaaagccaaaaaagaagacctgaagaagaaatccaaaacagcattacctgtcactgaaacttcagctgcacccggaaatgatctctatgataaaaagggctctcccgagttggcttacctgttcgacgaaataaatgatgagctgccttcaaactttgaagagcatatcttcgggattttaaaagaggataagccgtaa

SEQ ID NO: 95895 - DNA, 354 bp, Enterobacter aerogenes
atgaccgatttcgataatattttcgatgctgcaatatcgcgggcggatgaaacgatacgctcgaccatgggcacggtggcgcttatctcttcgggcgagcttaccgggcggagtatctccggggtatttgatgatcctgaaaatattggctatgcggctcccggcgtgagggtggagggcacaagcccttcatttttcattaagtcagtgtatgccagcgcgttacagcggctggataccctcaccattaacggcatctcctactggattgaccgtattggtccggacgattgtggatcctgccatctctggctaggcaccggacatccccccgttggaaaccgccgccgatag

SEQ ID NO: 95896 - DNA, 408 bp, Enterobacter aerogenes
atgaccaaagaagagttgattgcccgcctgaaagagctgggcatcatgctgaaccgtgaggtcagcctgaccggatcaaaagaagagctggtgctgcgtattgctgagctggaagaggagcttgacgatggcggagacagcaatgaaccaggcactgagaatacggcccccggcggggagggcaacgatagcaaagcacagaataacgtattaactccgtcgccccaggaaaaaaaatccggatctggggacctggtagcagtgaaaactcgtgcgacgttacacctcgaagcactgcacgctgtaaagaatgaacaagtgagccttgttttgccgggtactaccgttcgtgtcagcgctggggatgcggaagagttgattgcacgggggctggctgtcgaaccatag

SEQ ID NO: 95897 - DNA, 261 bp, Enterobacter aerogenes
atgtctttagagcaacgtatagaaaactttgaagctcgcattcagaagcttgaaggtgttacaactcacttacacataagatctgaattaacgatgtacattatttctgcaatgattggtgcaggccttgttaaacgtgaaggggtaaaagaactgatagaaagcgctgatttgacctcgtttaatgccccagcaattgctacggcagaaaagaaaatcatgcttcagctgatagataaagtcgatgtaaaggtacagtag

SEQ ID NO: 95898 - DNA, 486 bp, Enterobacter aerogenes
atgtgccgagatgacgtgatttttgatcttcattactcttattttcttgaaaacatgttttccacgctaatgggaaggatggataaaaccatgtctctttttctcatcgttctgggcggcacagcttttgcaccttttagtaatgcttttgtctttggcgtttcagtagcaaccctatccgctgcacaatttattttccagcctggtaagcaagaaggtatttcgtctgaacatgcaaaaaaatacctacagctcatcagtatttctgacagtctggacgatgaaatactactgaatcggtttaatgaacttcaatccctggactccagaccctggggagtgcttaagaacgccgcacagcggcgcgccacgatagcactcggccttcacgacattcaaccagaattaactcgctgggaaagtctgtggtcgtggtttgcaggtgatttaccagtaaaagagcaatatgagcatcagaaccattga

SEQ ID NO: 95899 - DNA, 597 bp, Enterobacter aerogenes
atggcttggcaaggtgtacctttcgtctatgaaaaaacaactggtgtgctaactgttgctttagaaaaattaccaccagtagaaataaactcttcgttccctattgaaactctaatcacggcatttgctggtgttatggctgcagctattactggttgggttgcatataaagcgattcagaaaaactttgagttggctagacttcaaactcagctaaatagtaatagggaagtggctcagttgatccgaattgcaggcgccgaagttgttacagatgccatcatgcttgcaacaacctttgagcaatggcacttggaaggggcaaaggacattacagcgttatctagaggggtaatcccagcggaacttcaggagccaatgaagtctgccgagataagtaaaaacaaattcttgcttttaatcagtcctgatgaggaaggttgtaaacttattgcgttaactgctaaccttcaacaatccttaatgaagtgttttattaaaggatattttactgaagaagagaagcaagagttcgtaaatgcacaaaataatttcatatttggatgccatgagtatataaatcgaagtttatcgtaa

SEQ ID NO: 95900 - DNA, 396 bp, Enterobacter aerogenes
atggctgatatcacccgactgttagccagcatcgagcgccgctcagcccatgcaaaagagttcggtcacgacgtcctgtttgtaaggttagaagaccttgatgcgctagtaactgcaataagcagcaagcccgtattgtcgttctatcgtgatggaattgaggctgcggcgagttgggtagatcagcagcgtgaagcatatgacagcgaacacggatactctgacccagatactggatctttcgagttcagcaatgacgcccagatcgaatattcatccacactggaagaattggccgagggaatccgggctttacatcccaacgctgacaactcgctaataatttcagatggttacggtgatagtcccgaagataccgataaaagagatgattga

SEQ ID NO: 95901 - DNA, 174 bp, Enterobacter aerogenes
atgactgaaaagcttctaactgatgaaatgctaatggctctcatcgcgaaactacaagctcactcagaaattatggctgaattaggctcggaaaatgaagagaaagaagccaggcagatacttaatgcattatgtgagttaaaacgatataggttgactgtcgaccagaactaa

SEQ ID NO: 95902 - DNA, 567 bp, Enterobacter aerogenes
atgattcctgctatcttatcctctgagaaattatgtgagtttttacgtgaagatgttaaagaaaataacgtatttattaaattagatgatgatttttattctggggatggtgggttggataatgacaaaataataaacttatcagttgatggctattataatagtctgcgcttacccattactccaccatcaccagataatttattagtaatacggaggggggataagaaatactctatctatattatcgagcttaaagatgtggctagggtttctagacttgatcatgaaaacataaaaaagaaatacgaaacagcagttgatgattttatgtcagaaagatttaaagactgtttttataaagaagatattaagatagcagacttcaatgtctggattgtttgtaatagattttcattcttagcagcaaatttaacagacgaagaatatgctaagagagttataaataatggtgtaatggaaaagctactactttctaaaccatataaatttagaggtaaaatatctcctataactttccagttgagtgggacagaagtgtgttag

SEQ ID NO: 95903 - DNA, 1521 bp, Enterobacter aerogenes
atgaaagtcacactaaaaaattttggtccaataagagagttttcaatagatttggacaaagattttcatttgcttattggtcaaaatagcattggtaaatcttatgcgataactgctatatatttaattgtaaaatcattgctgcaacttaaatctagacgctcatttcctttttctcctttcgaatattatcttgatttcgaaccaatagaacttaagagtagtgataggaaaaaaaattttaaagaattcattgatggaaatgatattgaaaaagatattacaaattttgtaattgaagacttaaagtcacttttctctgttatgctaactaatgaattgacgaattcatttacaaatacgtttacatctttgaataatttacaaaatcagtttaatggtgagcctgctattattgaattgttttgtaattacgtttcaatttcaattaaacttgaagggaatagatttgttgtttctgatataaaaaacaataataattatcatatcaaaaaatcaaaaagaaacagaaatgtgcataaaggggtaaatgcaacatacatttattaccgagaaaataatgctaaccctgacgagtcgctggcacgtttaatcggcgaatatacgcattattttgttcagcgtaattttataaccatggttgcagcattaacctttgaactaaaaaatgtacattatttaccagcaagtcgatctggactgtatcaggctttaagtgcttttgggcaaattattgcagagctatctaaaaacaggtctttcttgtccaaaaaaattgaacttcctagtatatcagaaccagtcagtgattactttattaaactgtctgacattagagtggtaaaaaggaattatgaagataaaaaaataaactttctcgcaaaagaaatagaagactcaatccttgatggtaaggttgagtttaatccgcaaacaaaacaacttttattctacccgaacaatacgaatttacgattagagttgtcttcaacatcttctatggtttcagagttggctccaatagtatcgtatttgcgttatgtattaactaaatctgatgaaaacattattagaagaatgacgcaaaatactcgggataataaaaaagcagaacctagatctcttattatgattgaagagcctgaggctcacctccaccctgaaattcagattcgattaactgaaatatttgcaaagttgattgatgctaatattaaattgattataacatcacatagcaactttatttttaacaaagtaaataacttggttataaaaaatacatcgcatggttgcactgaaggaatacacaaagataatgtatcttcacttgttttcaaaaagacatcaactggtagtttagcgttaccactttcaatagatgagttaggtatagaggataataacttcgggccagcgacagaacagctatttgaagaaaagatggatatatatagcgcaataaatgatgacatggaagacgaggctaataaaaaatga

SEQ ID NO: 95904 - DNA, 1059 bp, Enterobacter aerogenes
atgtcaccacaccgtttacttttggcgctaacgttgttcagcgccagcctgttcaccagccaggcctttgccgaccgcaccgtcaccgaccaactgggccgccaggttacgctgccggaccacatcacccgcgcggtcgtcctgcagcaccagacgctaaatctcctggtccagttgaatgccggcgacgatatcgtcggcgtgttaagcagctggaaaaaacagctcgggccgcagtttgtccgctttatgcccgctattgaaaatctgccgacgccgggcgatttaactcaggtcaatatcgaaagcctgctggcgctgcatccgcaggtggtgttcgtcgccaattacgcgccgcaggcgatgatccagcagatccaaaacgccggggttccggtcgtcgcgatatccctgcgtcaggacgcggcgggcgagaaaaacaaaatgaacccgacgatggccaatgaagagcaggcctataacgacgggcttaaacaggggatccgcctgattggcgaagtcgtcgaacgccaaaaccaggccgaagcgctgattgattacacctttgcggcgcgggcagaagctaacgctccggtcgccggtatccctgacagccagcgggtgcgcgtgtacatggccaatccagatctcaacacttacggctccggcaaatataccggtctgatgatgaagcatgccggggcgctgaacgttgcggccgcgacggttaagggtgcccgtcaggtctcgctggaacaggttctgcagtggaaccctgaggtgatcttcgtccaggaccgctatccgcaggtggtcaaacagattgaaaacgacccgcaatggcaagcgatagacgcggtgaaaaaccaccgggtatggctgatgccggaatacgccaaggcctggggatacccaatgccggaagcgctggcgataggcgaactgtggatggcgaaaaagctctatccttcccgctaccggaacgtcgatgtcgatgcgaaagcgcaggattactatcaacgcttctaccgcgtgaaatggacgccgaatgcgcagtaa

SEQ ID NO: 95905 - DNA, 150 bp, Enterobacter aerogenes
atgaaagctaactcagttgtactggccctgaccccgctgctggccgccagcgctttttccgcccatgcaggaccgcaagcccaggcggtatgcggttacagccacactcttggcgacgacgcgattatgatgttcggtatgccaaactag

SEQ ID NO: 95906 - DNA, 1581 bp, Enterobacter aerogenes
atgcctgactacaattatcgccagccagccgaggtacgccaggcgctaatcgatggcgcagaagtggcgctcatcgatgttcgcgaagaggccgtatttgccactcaccatccgctgtttgccgctaatttgccgctcagcaagctggagctggagatttttcgccgcgtgccgcgcctgacgacgccgattaccctctacgataacggcgaaggtctcgcggagcaggcccttgaacggctgcaacgctggggctatcaggatgtcgcgctactggcaggcggcctgacgggctggcagcgcagtggcggcgagctctttcaggacgttaactcaccgagcaaagcgttcggcgagctggtagagagcgagcgccagacgccctcgttgaacgccgaggaagtgaaggcgctgatcgagggtccccagccggtcgtggtggtcgacgcgcggcgtttcgatgagtatcaaacgatgaatattcccggcagcatcagcgtgcccggcggggagctggcgttacgcatcgaaggcctgctgccgtcggcgcaaacgacagtgatcgttaactgcgccggtcgtacccgcagcattgtcggtacccaatcgctgcgcaatgccggcttagctaatccggtatacgcactgcgcaacggtaccatcggctggaccttagccggactggaactcgagcacggccaacagcgtcgctacgacgccgatttccgcgcctcagcgcaacgcgtagctgcggtgacgcagttggccgagcgcgctggcgtggccttcattgatgccccgactttagcccgctggcaacagcagccgagccgcaccacctatctgtttgatgttcgcagccccgaggagtatgccgcaggccatctgccgcacagcgtgaatgcccccggcggccagctggtgcaggaaaccgatcattatgccagcgtacgcggagcgcggattgtgctggtctccgacgatgagatacgcgcgccaatcgcggcgtcctggctggcgcaaatgggctgggaagtggcggtattacgcgatgtccgcgtggagcaattgagcgaacgcggcgttccgcccgccagcgtaccgccggcgccgcaggctgaggagataaccccagcgcagttagcggaacaattgcgcgaacccggcaccgtggtactggatttcaccaccagcgctaactatgtcgcacggcatatccccggtgcctggtggctggcgcgttcacagctgcgtcaggcgcttgagctcatcccttccgcaaaacgttacgttgtcacctgcggcagcagtctgctggcccgctatgccgtacctgaagtcgcggcattgaccggtaagccggtacaactattaagcggcgggacgctggcgtggattgatgccgggctggcgctggaacagggcgagacgcatctggcaacgccgcgcggcgatcgctatcgacggccttatgaaggaaccgataactccgctgaggcaatgcaggcttatctcgactgggagtatggcctggtggaacaattagcgcgcgatggtacccacggctttaaagtgttgtaa

SEQ ID NO: 95907 - DNA, 189 bp, Enterobacter aerogenes
atgaagcttcaactcttctcgggttgtcactatgttcagcacgtcagtccggatacgatgcgactgagattttggacgggaaagaatatagagttcaaatcaaaggtcgatatatgcctgatcctaaaaaagtctctgcgagaattggtgctattgatatatctaagccatttgattctgttcttttag

SEQ ID NO: 95908 - DNA, 318 bp, Enterobacter aerogenes
atggcgcaaaatcgcccgcatgacaccgcggaggttatccgcgaaaaggtccaccatgacgacaatcagggattcagaatgaaaaaagcgcttaccgtcctgctgctgaccacatccttcatcggaacggcttctgccgagacgctccattttggcaccacaaccgccaatccgccgtttgagaccgtcaaaggcaaaggccaggcaacgggtttcgacattgatttggccaatgcgctgtgtaagcagatgcaagcggaatgcaaattcacgccgcagcgctttgataccctcattccggcgctgcgctttaaatag

SEQ ID NO: 95909 - DNA, 1134 bp, Enterobacter aerogenes
atgtcagactcaataatcaaaagctatggtgggatactccggtttggagcaggattcagcatcgttctgatgacgctcactgccattttcatctggttttatcttacgtggattggccgtctagatatattccttcaagctgtcacttttaacgaactattctccttctctggaattatatttttaagtagcattatattgttctgtggcgtactgtttctaccttgcttgttaggatgcctcattatacatagcaatcaaaataatgcaaagtcaaagcaaaagaaaataattctagcacgtgtttatgctgggagctcttttctatgtataacttttgtcgctttaatatctttgtttgacatagactcaggagaattcatcttcataactttgatgttattgacaggcattgttagtacttttattgcattaattctccagagaaaatatatacacactcacctgaagtcactaaacacaataacgaagataaaagctctactattagattattcaatgaaaccctttctattgggaatcaattgctggctagtagtcttcccaatgatattattgagcaaattcttacacatcgaaaatggaatggatgactaccagcaaacctcgttattccttttatatggcacattagtaataataatcaatatattcccatgcatcttctttttacgacaagatttttctagtggatggtttaaacctctgagaaatactacaggtgttgtttttgctttattactactgtcatcatccttcatgcacgtcattccgttactgattgtcaactttgcatttcggatgactgggatgacaatcatggaaccagttacaattgctgtcaaaacggatgaaattccttctgaaatgcttcatagcagaggatgggagtatcagctatcagaggatagaaaatttagcttagtatcaggagttatctttttttcatatggcggagtttatcttgtctgtcctaaagaaacgactcaaaaatttcgtgaaagcataatcttcgacatactgtctgatgaaatagaaaaaaaggccagagaagaaataaaaaaatcagcccagcaatgcattgcagtagataaaagtgctttaaacttttga

SEQ ID NO: 95910 - DNA, 321 bp, Enterobacter aerogenes
atgaaatttctacctgcaacaaatatgcgggcggcgaagccatgccagtcgcctgtgactatctggcaaatgctgcttgcacgcctgctggaacagcattatggcctgacactcaacgacacaccatttagtgatgagacggtaattcaggaacatatcgatgccggtatatctttggccgatgctgttaattttctggtggaaaagtacgggctggttcgtaccgatcgcagagggtttaactggcaggagcaatcaccttatcttcaagttgtagatatcctgcaggcacgacaagcgattggcagctcaagtaagtaa

SEQ ID NO: 95911 - DNA, 357 bp, Enterobacter aerogenes
atgaacaatcactccgaatccggtaccaagccggagaatcccgcctgccaacagtggggactaaagcgcacgatcaccccctgttttggagctcgtctggtacaggaaggcagccgggtgcattttctcgctgaccgcgccggattcaacggtactttcagcgacgagcatgcgttgcgcctcgaccaggcctttccgttgatactcaaacagctggagctgatgctcaccagcggagaactctccccccagcatcagcactgtgtcaccctatattacaacgggcttacgtgcgaagccgatacacttggtagttgtggctacgtatacatcgccatttatcccactcaacgttaa

SEQ ID NO: 95912 - DNA, 222 bp, Enterobacter aerogenes
atgaaaatcatcagtaaacgccgggccatgactctgtaccggcaacatcctggttcccgactgtttcgcttcagtgcgggcaaatataaatggtcaggcagtatctgccattatgctggtcgcgaggtggaagacatacgcgccattctggccgtctttgctgagcgccgtcaggaccgcaatggtccctatgtcatttttcgaagtgtcactattaattaa

SEQ ID NO: 95913 - DNA, 450 bp, Enterobacter aerogenes
atgaatacacaacaccttcagttcgctgagcaggcagcaattactgcctcagtcgtccctgacgagttacgaattggtttctggccgcagcactttggctctatcccgcaatggataacgcttgagccccgaatctttgcctggatggaccgactctgctccgattatcacggcggcatatggaccttttatacgcttaacaacgggggcgcgtttatggccccggaggctgacgaagacaacgaagataaatggacgctgtttaacagcatgaacggtaacggggctggactcaccagcgaagctgcagggatagtcgtttgcctgatggcatacagccatcatgcctgtcgcaccgggtgtgacgcgatgactgaacactattatcacttacgtgacttcgtgctgaaccatcctgagtgcagcgccattatgcatctcattgactga

SEQ ID NO: 95914 - DNA, 822 bp, Enterobacter aerogenes
atgagattagccagccgctttggccgtataaaccagatacgccgtgaccggcctctgacccacgaagagctgatgagccatgtccccagcgtgttcggtagtgagaaacatgaatctcgttcagaccgttacacctacatcccgaccatcaccatccttgaaagcctgcagcgtgagggctttgagccgttctttgcctgccagacaaaggttcgcgaccagagcaagcgggagcacaccaaacacatgcttcgcctgcgtcgtgccggtcaactgaccgggcatcaggtgccggaaatcattcttctcaacagccatgacggctcatcaagctaccagatgctgccggggctatttcgtggcgtttgtactaacggtcttgtctgcggccagtcattcggagaagtgcgggtaccgcataaaggcaatgtcgttgagaaggtgattgaaggggcttacgaagtgctcggtgtgtttgaccgggtggaggaaaaacgtgatgcaatgcagtcactggcgttgccagccccggctcgtcacgcgctggcgcatgccgcactgaagtatcgctttggtgaggaacaccagccggtcacggtatcgcagttgctgaccccacgtcgccgggaggactacagcgatgacctgtggaccgtctaccagcgcgtgcaggagaacctgatgaaaggaggtctgtcagggcgaaccgctcaggggaaaagcagccgcacccgtgctgttaccggtattgatggcgatgtgaagctcaatcgcgccctgtgggtaatggcagaaaacatgctcgattttttcgggcgttaa

SEQ ID NO: 95915 - DNA, 207 bp, Enterobacter aerogenes
atgaagaaaatcatcacagtcgcagcactctgtctgctgtcattttcttcgctggccgcttcttcaccggtcagtgtcagtgttagtcccggaagctacagccactactcatcgattcggattacatcaaaagtcgattcgattgtgattaagcaactcattgtcaaccggggaaactgccaggatgcagaattcgccagcccctag

SEQ ID NO: 95916 - DNA, 465 bp, Enterobacter aerogenes
atgaaaaataaactgattatttcatttttactggcttcagtgctgacgccttctgtctcgcatgcgtttggcaaccgtgatagctgggtaagtggctatgcgcagggaacgtctgaatacaccatcctcggtaaagggcaatcacaactttatctggcctgcgatagttccggctcacagccagcgaccattatcttcactgatgtgaacggccatcaggtcaggatggacagcggccagacacttgccatgagaattgataacgctgaagaagtgaatatcagcgaaagcgagtctcatgtgggatctgacaatgtcatgtgggcatggaacaaattacgcaccggcaaacgtgttgtggtttcaggtagcggggtaaaacctgtcactttcactttagcgggggctgctgcagttattcctgcgttcggtgacaacggctgcgtgcccggatttgcactgtag

SEQ ID NO: 95917 - DNA, 159 bp, Enterobacter aerogenes
atgccgttaattctgttatggggcggtctggccttgttgctgggtttcgtggcgtccgctaacggacgctcgttctggggctggttcattctcggtctgataatcgacccgatactggcggggctgctgtactggcttattgcaaaggaccgcacatga

SEQ ID NO: 95918 - DNA, 888 bp, Enterobacter aerogenes
atgaaacatctctcgggctacgcccttatccgccgtcacctgcggcgctatccacgctcactacgacagcatttgctgaaagaactcaatcagctcgtcacgtacgaaccagtgattggcattatgggtaaaaccggcgtcggcaaatcctcaatgtgcaacgcgctgttccgtagcgaagtctgttccgttaatgcagtggaagcctgtacccgtcagccacagcgtgtccggctgcgttttggtcagcattatctgacgctcgttgatttaccaggcgtgggtgagagtgttacccgcgatggcgaataccgcgagctgtaccgggaactgatgccacaactcgacatggtgctgtgggttctcaaggccgatgatcgcgcatttgcagtggaagagcagttctatcaggatgttttcgcaaggtactgcggggcgttaccgcctgtgctgtgggtgctcaatcaggtggataaaattgaatctgccgagcagtggaattggccgtccgctcagccctcgacattacaggcggaacgaattgtgcagaagcaacaggcggtagcccgtcagttgggacttgctgagcaggacattcttcccgtttcggtccgggggcgttatcgcctgtcccgactggtggaggccatgataacccggctcccaaagcaggcccgcagtccacttgtgccgcacctgcagaacgggtatcacaccgaagccatcatcagcaccgccagcagcagctttggcgatgccgtggtggaagtgattgataagattattgacctggccccgctaccacaggtggcacgcattgcactgcaggctgcaacacacactgtcgcccgcgcagcacgctccctgtggggatttttcttcagctag

SEQ ID NO: 95919 - DNA, 1863 bp, Enterobacter aerogenes
gtgagtttccctctagaattgacagcgcaaattgctggtcacaatgaaaacttcaatcgcaaggtcaccttaaacagaggtcttacagttctactcggcccaaatggctctggaaaaacacatcttttgagggggctcaagcaaagtcttagtcagcatacgaatggaaagtatgtgcgctttctctctgctggacgaatggggatgttggagcagtatagatcagactttgacgggcatcatggaggcttaccacagtacgactacgcaacttatggtagcaagagcgatgctgttcgcagacatcagatggaaactattaatggcgatttccaaacgcttgctgaacgggctgatattttaattaaaattcaggagagacttcggaagttattcaagcgcgacattcttattgaatgggatggtggatcactaaaaatattattttcgcgattggacatagaagcaaaatcatactcgtcaggcagagaggcatccggattgatgcatctggttgggattttatctgcactttatgatgatgatgtaggggcgcttcttctagatgaaccagaggtttccttgcatcctcagttacaggcatttcttcttcatgaaatcctcagtgtctcgggccacccgtctgagggaggtaataaaaagattgttatcatcgctactcattcaacagaaatgctccaaattcagaaaccggaagatttactatctcttgtcttctgttatgacctgattagtgagccagtgcaaattccagctgacgctggcgagctcagaaacaaaaaagtacaaaacttaattgctcgtctcgggcaagagcataagttatcattgttttccaaacggcctttattagttgaaggcccctctgatgtaatgatttgcagtgcgcttgcaaacaaacttgatatacatcttgaagctgccggatcacagttattacctgtgatcggtaaaggacagatgccaaccgtggcaaaattattgcgtttactcggcaaaagcccagttgcgttggcggacgctgatggaatcgctgatggtcttgatcttgtcaactcataccttaatgataatcccaccgcagaaacgcgagcaagtgagttagggtatagatcctcgcaacaaatggttagtgctatattcacagatttttgcaaattggtagattgccggtggaatgaaatttctgcaatcgctgaattgcacccgtattgggtgaacaagaaaaccgaggaagtggcacaagcaaagcgtcgctctgctttctgtacacttttcattattgatgataatgaattaaaaaatttagctaaggacaatgagtggagtagtataaagatccgtttaaaagtgctacttgacctgctggaacagtgtggcctatttattttacgcaaaggttcagtagagtcttactatcaaaattcagatccatttacttcaattggaaagccaagtgcggctgttggtgaaattgaccatatcaatcagttatcacttgacgatgttaacactgcatattcagatttgatccgctgcgtccagcatgcctcgagcactgaagtaatatgtgaggctgatgcactgagagatcttttactttcaattgttgcaccagcacatgccagattaaagagcggtgaattatcaacaaacttcaatatattggctcgttcaattttgggtgagcgttctaaaatatttggtttggctatagaaggtgaaaaacttgttatctcaatcgagagtaacattcttaatgttagaggtttccccgtatctattggaaaagatgatgatgtactaaaatgtatcaatgcagcccttgccgctaatctttaa

SEQ ID NO: 95920 - DNA, 1446 bp, Enterobacter aerogenes
atgacctcatcattaaagaaaactgcagttactggattaatctggagtgcaattgaacgcttctcagtccagggtacacagttcattgttaccattatcctagcaaggctgatatctcctgaagactttggccttattggtatgataactgtgtttattgttttgtcggatcttattatcaatggtgggttttctcaggcactgatccaaaaaaagcatagaacacaggatgattactcaacagttttttactttaacgtattaatcgctatatttatttatggcataatctacttagcagcacccttcgtcgctaagttttacaaccaaatacctttagttgatatattgaggctgcttgcagtatcaatagttttaaagtcattttgtgttgtccagaatgcaattctatccataaagttaaatttcaaattaaggacaaaaataaatcttattagcgcaattttgagtggcgcaatcgctatttttatggcgtataaaggtttaggagtatatgctttaatatatcaaaccattattttttcattgctggtatcaatattctcatttgctttgataagatggttcccatcattaactttttcgttctattctttaacgacacttttcaattttgggtccaaacttctcttcgctagtgtagttagaaccattgttgataactgttatgcaatcttgattgggcgattcttgtctataagagatgttggatattatactcagggtcggaacttacctgatgtattatctatgaatttattcaatgtgttacagaatgtattctttccattaatgtctgcacatcaggatgatgagactcggttattaaaaatatataagaaagggattcaagggactgcttttataattattccagcgatggttggtttgatgcttattgcagacccttttgtccacgccgtactgtcagataaatggaatggtgctatcattgttattcaatggattgctttatcccgtattattataccaattagtgctttaaattgtagtatcataaatgctgtgggtcggtcagatatttatctgaaagttgatttgcttaaattaccacttacaatcggcgctttactggttactttctctttcggtttagaagttatagtcataggtaatgctattgtttccgcaatatgcttctttattaatgcctattacccgggtaaatggtttggctttggtgcctgggaacagttgaagaaaatctcaccgatcatattttgtacattatgtatggcactgccattatattttatagaaatggataacaagttattagaaatgattgtcaagttaggcatcggtcctgtcatatatagcgctatgtgttatttgatgaaggttgatacttttatggaaatatgtgcattatttaaaaataaaatcaaaaaggaatccgcatga

SEQ ID NO: 95921 - DNA, 1239 bp, Enterobacter aerogenes
atgactgcgactaatcaatttgctgcgcacgttggtctggactgggcagataaaaagcacgatgtctgtgttcagtttaaaaacggtgaacgcacattccatgtgattgaacatacgccggaagcgcttgatgtctggcttaccgagttacaccagaaggtaaaaggcaggatcgctatcgccgttgagctgaagaaaggtcccgtggtgtatgctcttcagaaatatccatttatcaccgttttccctgtccacgctttgtctctggctcgttaccggcaagccttctcgcccagcggcgctaaagatgacccgcaggatgccgagctggcattagagttaatgctgcgttatccccaaaagataaaagccattgaacccgacaatgccgatatccggttgctccagcaactggttgagcagcgtcgtcagctggttgaagataaacgccgttttgtgaaccggctaatcaactcactcaaacagtattatcctcagcccctggagtggttctcacatcggggtagcttgctattgtgtgaactgattatacgatggcccagtctgcaacaactaaaacgagccaggcgagacacgatccgcaactttctcaatgccaaaggtggccgcgcaatggcccttaccgagcagcgtgttgtgagtattgataacgccatcccgttgacaacagacccgagtgttatagaggctaatgctttgatggcaacagcactggcgacgcaaattaaagtcgtgagtgaaatcatcaaaacctatgacgaacgaatcgaaacgctgtttgacacattgccagatgcggggctgttcaaatcacttcctggaatgggcccatgtatgggcccacggatgcttgccgcactaggtgataaccgcgaccgcttcaacagcgccgaagaaattcaaaactacgctggcatcgcgccagtaaccgagcgaagtggccagaaatcctgggtacactggcgttggcagtgcgcgaagttcgtccgacagacattcgtggaatggactgcgaagacggttaactcatcgtactgggccagactttattacctaggtcagcgagaaaaagggaaatcgcatcaatcagctatacgggctctggcgtttaaatggataaggatcatttaccgctgttggaagaccagaacccagtacgacgaagcgaaatacttgctggcactggaagcgcgacgctcgcccttactgaagccataa

SEQ ID NO: 95922 - DNA, 948 bp, Enterobacter aerogenes
atgggcgaggatccgctgcagaccgatgccgagctttccgcggtgcgcaaggcgtttgaacagctggaactggttatcgtccaggatattttcatgacaaaaaccgccgccgcggccgacgtcatcctgccgtccacctcgtggggcgagcacgaaggcgtgtataccgcagcggaccgcggcttccagcgcttctttaaagcggtggagccgaagtgggacctgaaaaccgactggcagattatcagcgaaatcgccacccggatgggctatccgatgcactacaacaacacccaggagatctgggatgagttgcggcatctgtgcccggacttctacggcgccacctatgagaaaatgggcgagctcggctatgtcatgtggccatgccgcgacgagtccgacgccgaccaggggacgtcgtatctgtttaaagagaagttcgatacccccaacgggctggcgcagttcttcacctgcgactgggtcgcgccgatcgataagctcaccgacgagtatccgatggtgctctcaacggtgcgcgaggtcggccactactcctgccgttcgatgaccggcaactgcgcggcgctggcggcgctggcggatgaaccaggctatgcgcaaatcaacaccgccgacgccgaacggttaggcatcgaagatgaagcgctggtgtgggtcaattcgcgtaagggccgcatcatcacccgcgcgcaggtcagcgatcggccgaataaaggcgcggtgtacatgacctaccagtggtggatcggcgcctgtaacgagctggtgtcggagaacctgagcccgataactaaaacgccggagtacaagtactgcgcggttaacgttgaacggattgccgatcagcgcgcggcggagcagtacgtgatcgaggagtacaacaagctgaaagcccgcctgcgcgaaagcgcgatgggttaa

SEQ ID NO: 95923 - DNA, 630 bp, Enterobacter aerogenes
gtgcgtaaaattgtgtcgacgctgtcgcgcaaatatccggcaggcgagcagtggtcctactcttccggcggcgcctggctgctgggcgatgtgctggaacgcgcgaccggtatgtcgctggccgcctggcttgagcaatcactgtggcaacctgcgggtatggcccacgatggcgtctggcacgcctacaaaaaaggacaacatgatgtcggcgctcacggctttaacgccaccctcgaagactggggacgctttggcgagtttgtcgcccgcgatggccgcctgggcaacggtaaacagctggtgcccgctggctggttcgatcaagccgcaagctggacaaaagcgctgaactcggtttcagccgcgcatccggaaggtatctatggctatcaatggtggaataacgccattccggccaatgcgcaaaacgtacagccgacgccgcaggaagggctgaaaggctcgctgtgggcgctggggatctacggccaggtgattatggtcaaccgtgcggaacatctggtgatcgtgcagtggtcaacctggccacaagcggaaccgtcctttaacgcacagccgctggaagcggcgctgatgtacagcgccattgcccgcgaattgcgctaa

SEQ ID NO: 95924 - DNA, 225 bp, Enterobacter aerogenes
atgaagaatttgccggatatagcggcgggaacttcgtatataacatccaccgtgagcggcggctactggttgctgcaacttctcgataaggtcagccccagtcaatgggcggcaatcggcgtactggccagtattgttttggggttacttacctacctcaccaatctgtatttcaaaatcaaagacgaccggcggaaggcgcgagaatatgagcaacaaagctaa

SEQ ID NO: 95925 - DNA, 258 bp, Enterobacter aerogenes
atgaatggcacagaaactaagcaggttgattatctgtatcgtgggataattgattactttagcaatatatcaggtctggatattacgaccgagcagatcaaactacgagacaagtttattaccgaaagtgcgatagtgtgtgatgattctttggatgcacaggtgattagcctgcaagatgaattcatcgccgccggtggaaatcctgagcaagaaaagctagtgatcgaaaaagcacttaaattactaagcctgtaa

SEQ ID NO: 95926 - DNA, 2343 bp, Enterobacter aerogenes
atgtcggtacctaaccaaatcccttacaacatctatacggccaacggacagacaaccgtatttacttacaaattctacatcatcagcgccagtgatttagaagtaagtatgaatggttccgttgttaccagcggctataccgtatccggcgttggtaacaaagacggcggagatattacgtttctgacgccgccggcgaatggtgcggttgtcatgctcgaacgtgtggtaccgacataccggcttactgattaccaggataacggcgacctcctggcggataccgtcaataaggatttcgaccgtatctggatggctatccagcgcgcgtttattgatctcgggtttgctcttacccgtcctttttttggggggccattcaacgccaaaggctaccgaatcgaaaaccttgctgaccctgtcaatgaccaggacgcaacaacaaaaaaatatgtaagtcagactgtaaaaacaaatcttaacagagtattgagagttcctgagcagatggtaggggtggttcccccagtagcagttcgtgagcagatgctgttagggtttaatagttttggggatcctgttgctatcgcaggtcagacgcaaactgcagatctcgctttaaaattagcagcgtattttggtacgtctttaattggcatgccgttatcaggcaacctgtttgatcttgttaaaaacatggttacacctgctatgtttcacgcaaaagcaggaaataccgataacggtggtcttagctttgcccatgataattctctgtgcttccagaaaatgtttaatgctgtgcgtgacaacggcggtgggctggtcatcattgatgatgaatactgtgtcgatttttgtcttttcccacattcgaatacgacagtgatgtttgtgggcggcggctccatggagtttatcaatcctcgttccgcgactacaggccgtggtggttttatcgttggaagcagccgggagtttaactttgatttggcatggagtttgttccagtctggtgcatatcctggctcaatagttaatgaagcgttcacagatcccgtgcaaaaacagtacattcgcgataatcagcagttcgttcaggctgaacgtgtgaatttcataaacccggtaataaaagcatactataccgatccaacatactggggagggtttgctattaactgcgtgaatgcgcaacacgtcagaatactgaaccctgtgttcaatggatggactgaaggtgtcaatgtgggctccgacgtcccgccgaatacaccttcgtgttatgacgtgaaaattcataatatgcgagtcattaaagccgatctcgttagaacttattacgctggctttttctttgcaaactcgacaaattgtgaaatatcagatggctctcttgaaacaccactgactgcgggcaccagaaacggtagttttggggcacttaatttcacagaagactgcgttataagagatattaacgtcccaaaccttgggcggacggtttcctccgaaggtattttaatcaacaactccaaaggttgtttggttaaaaacataaaaatgggtaatgctaaatcggccgtcagtacattttatgtcgatgcaacaacgaatgatgcaaataacccaaactttatagatggggttgaggcgaacaattgcgatcaagcgctgggcgtaactggtaagtatgcggtgttttctaacatcaaagcgaccaactgcctacaagagttgtttttcagaaatgctaatgcaacgggaaaccggtttaagagcaagccggattcgataactataagcgaggccagtgcaaacattaaatactggtatctgatcaataatacgattggtgggtggcgtcgtaaatttacgtggttgcgcccattggatatactgcgaacgccgttcacttctctttcatcatggaattctaataattctgtgaaatttaacaacggtgctactgcaacttttttatataagatccctgaaggtgctatcgctgtttcaggatttacagcatacggtgattttagtgtgggagctgcggcagcggctacggattcggtatgtacgattgatgtaatttcaatgtctgctgtggacgggaatggaacagaccctatagtacttttatcggcatcggtttctgcccgtgcaaacggggacggtatctggtcagtctccgcagatgttcaatcatcttcgccaggatatttacccgtagagggggctagctcaggcgttgataacacgatgtacctgcgagttacatactcgaacggtgtggcaaataatacccttaaagaaatagggttaagaatgtacgggaactaa

SEQ ID NO: 95927 - DNA, 348 bp, Enterobacter aerogenes
atgcattcagattacaaaactcgccttactgctcttagcgataagctcaccgatgtacttctggaagaagccgatccggacaactggccgggggcagggaaggaaatcacaaagcacaccaaacaggaacgcggcgatcggtactggcataagaagaatgcggccgcctcgctaaccctgctggtaaaagtccattcacttattggcatgcacactcgcggcggtacgccgaaaaccggaggagaagatccggacgatgaagcgttcctgttaggtcagcaggtagcagctgctgagcgtaaagcgctggaagtcatcgagaggctgcaacacaaaggcaaaaaatga

SEQ ID NO: 95928 - DNA, 435 bp, Enterobacter aerogenes
atgcttagaaagctattcctatcactagctgtattagcttctccaatgtctttggcagcaaatgtatgtacaacaaatgtgactggttttgatgtttgtgaaaaagcaaaagaaatcgccagccaagttaaaccacatttgccgatgacgctctccgagaacgtcagcatgtacgatattaatgctgagaaaaataaactagttgctaatgttaaattaggtgtaactgaagaggaagtactagcggcagcaaaacagaaccacttaacccccggggtggtaaaaaccagattagctgatacggctaaaactggtgtttgtgcggggaaaaaccctatcggtgcatttattcggttagggggtgagatgcaatatatttacacctacccctccggagaaacttacacaacagtagacattacttcatgcgagtaa

SEQ ID NO: 95929 - DNA, 2895 bp, Enterobacter aerogenes
atgcctatctacccgcaatccgatattccgccgagcgtaatggataacgctcttcaggcgccaacgggttttgatgtatctctgcctgaaggaactaacccggaaccacagcagcaacaactgtctgtatgggatgccgcttttcgtcagaataacttgctcgccgggatgttccgcccggcaaaacaattcgagccggcggaggggtataacccttattctgataaaagcgaactaaaggggtacgaacaatggggatccgcctttgcggattcacaatccccagaggaaaccgcctggattaaaaaccagatagacgatgaaaacgaagaccgccgggtgctatctgaagcaggtgctgaaggaactttagccggtatagccgccggggttatcgatcccgtcacagttgcatcaatgtttatccccggtgcgcagggaagtctggcggttcgtattggttctcaggttgctattggcgccgctggtaccgcgcttagcgaggtcgcgctcaataacgagcagtacaccagaacagcaagggagagcgccgcacacatcacagccggcgcacttctcagcggtgtatttgctaccgctggcgcgatgatcaccccctcggtaagaaatgcggccacccgtgaagtggcggaggcgctcgataatatgaacgcctcgccaacgattaacaatgcagccgacgccctggcggataccttaccgaatggtggcagcgtcggcgccatgcgtattcgcgaagctacactggaagacctcacgccagtatctggcggcccactcggcaagctggctaaaaaagccggtagctatctgacgccgatcacccgcctgatggaatccccatcaaaagaagcgcgccggacagcgctggaactggcagagaataacttcacgttggaaggcaacctgcgcggtattgaaacgccggttgcagctgagacgcgagtacgtggctggcgccgcgaagaggcggccgtcgttactgcgaataagcaggcatacacccagtacaaagccgaaggcggtgatctgggttatacggccttccgtgaacaggttggcgaggcgctgcgcaacggcgacgtgcacgtcaatgcgaaagtgcaggaagcggcgcaggcaatgcgtacagtcattaaccgcgtgaagacagcacagcaggaactgggcttacttccgccggatgccgaactgaaagcgatgggacagaccagctatttcccacgcgtgtacaaggtagggaaaatagttagcgagcgcgataaattccgcaacatgctggttgactggtggtcacgcggtgagaaaaccatgtcccgcgaagatgccgaaattgccgccgataccactatcaaccgtatcgttggggctaaaattccgcaggagttcgccaacgtctttatggtgaaagcgcctggcagcactaaatcgcgtacgttgagcgttcccgatcgcctgatgaaagattatctggagagcgacgctaactacgtcctgcagcgtcatatccgcgaagcctcggcagaaatcgaattaacccgcacctttggcaacaagtcgctggattcgcagcttgccgccatccaggacgagtacgacgcgctgatgcgtttacgcccggcggaacaggaaaagctggcgaaagcacgtgaagccgacctgcgcgatattctggcgcttcgcgatcgcctcgtcggtacctacggtatgccggatgacccatcatcatttttcgtccgtgctggtgctttcctgcgtagcgctaactttgtaacgaaactcggcggcatgacggtatccgctatcccggatctggcgcgcggcatgatggttaacggcttcagcaataccatgcgtggatatggcgcactgatcacccgctcgccggcttatctcgccagccgggcggagcagaagaaaatggccgttgggctggaaaccatactgcatacccgcgcgcgtacgatgggcgatctggtcgatagctcttcacgtacgacagctgcagaagctggcatggaacgtattaccgatgtgttcggcaagttgaccatgatgggccactttgacgatatgaacaaatcggtgaatggcatgatcacgtccgacggtattctgtccggcgcgttccctgcgaagcgcctggcgaaactcggtatcaacgagaaaatggccgaacgcatccagcgagaatttcagaagcacggcgaagttattcagggctggcatatcggcaatttcgaaaaatgggatgaccagtacgccgctggcctgctgcaatctgctgtgctgaaggatgtaaacaataccgttatcacgccggggattggtgatacgccgctgtgggctagtaccccgctggggaaaactgtattccagtttaaatcttttgctacggcatcctataaccgtgcaacgctcggcggcctgcaggaaggtaccgcgcagttctattacggcaccgccttccagattggcctgggctcattgacctatgcgcttaagcaggcggctaacggcagggaagttgatttgaccccgcagaagatggttctcgagggcatcgaccgttcgggtatccttggcccactgatggaatataacaacatggcggaaaaagcatccggcgggatgatagggttagggccgttactcggcacaggtacgcaatcccgttatgccagccgcgggtttattggttctgcactggggccaactttcggcctgctggatacggttaccgatgtgaccgccggcgtgctgaatggcgacgctggcgaccgtgtgctgcatagcgtgcgtacgctgttacccggtaataatctgttctggattgcaccgctaattaaccaggtagatcccggaatgcgataa

SEQ ID NO: 95930 - DNA, 2715 bp, Enterobacter aerogenes
gtgagaattccaacgggtaattttggcaatgtaacgccgcaggtacaaccaacgcgcgtcgcggtcagcaatgtgggcgcagtgggtaacgcagtatccggttttggcgctgctgcggggcaggtagcagagcaggtgcagcgtgatcaggataaagccgacgtagcggccacgcaggctattctgaccgatctggaagctaaatctaatgaccgctgggaaaacccggagacgggcgccacggtcacgcgtcagggctttaaatcgtccggcgtggtcaccgatatggataaggccgacgctggcgattacgaggaggcgcgtaagcgtgtgccgcccagccagttaaactattttgatgcgcagtggaaagcggggcaggtacgccggacaagcacctatagcggttttgaacgagcacagaccgaggaagcccagcgccagcaacttaacgcgacggtgacctcttcagttgaacaggaggccagcgcctacgataacccgatgcaggcggggctgatacgcagcgcccgtaaacactcgatcgagatgtatggccaggcgcgcggctggtcgcaggaacgcattgacggcgcggtctcagaagcgaaccaaaaagcgctggagcagcgcgcacagaactacgcggtaaccaatcccaccggctggcttaatggtgattttacgctgttcaacagcagcacaggcgaacttgatatgcgcgccgtcggcctggtggaatccggcggtaaacaccgcaatgcagacggtagccttgttacatcacccgcgggcgcgcagggtgaatatcagttgatgccggacacagggaaagagctggcggctaaacgtggcgaagagtacaacccggacgatcctgtgcagcatgcgcaactggcgcgcgattatgccggtcagctcagtaaaaaatatcagtctgaaacgttggccggcgctgcatataactggggtatgggtaacgttgataagctgatcgctaaagtcggcgacccgcgcaaaggcgaaatctcaatggcggatttcgttaagcagctgccagccgaaacgcgcggttggatttcccgctacaacaaaaataaaaccggactcgacccggtagcggtaaacaaaatcgacaatatcgccgaatcgcagattcgccagcagcgtacggcgctgcgccagcagattgatccgattctcaataatacgatggcgcagctgtacaacggcgaggttccagatgctatgcccaacgcctccaccattttgtttgcgtacggtgagcaggggcaaacagcggtcaagcagctggatatcgcgatcgataccgccagaaccttccaggctatccagtatgtcaccccggcagaacagcaggccgagctggcgaaagtgaagccgcaggcaaacgacccggattacgcattgaaactcgatgcgtacggcaaacttagcgcgctggtgcagaagagcaacgccaatattcaggcgcagcgtgatgctacccgctttaatgacgcgctgatctccggcgagaaactcgacccgagcaataaatccatgcagaaggcggcggacaatacgccatcggcgcttaacttccgcattaacgatgccaccactcacgacgctatcgtgcagcaagttaaccagacgggcattatcccatcgcaagttacatcacaattgaatgcgatcgcccgctccagtagccccgacgtggttaagcagggctcgaccttatttaacgcgctgtacgaaacagatccagcctctgtgggcgatatgccaaaggatatgcaaagcttttacctgaccgttaaacagcttaccgattccggtatggcgtcagatgaagcagtgaggcaggcgcagaacgttatttataaccagactgacgccatgaaatcgcaattgtcttctacgcagagtacgaaggaatatagaaaagagcgtgatagcgcaatggattccgcagtcagcaacatgaaaccgtggtacagctttggcggccccgccgcggatgaccagagtcctgatactgtaaaattccgtaatgactaccagtcactttatgacattaattatcgcaattcaggtggtaatgctgaaattgccaaaaagatgaccaatgcccagatcgcgcgaacctggagtcttagcgatgtaaatggcagcgcccagcttatgaaatatgcgcctgaagcgctttataactatggcccctcagggtggcaggctgctcagtggaaagaagaaaaagagcgtctgacttatggcgaccgtggagaaataattgaaaccagtccgacccaactgggaattacatcaggctcagcgcctgttattacatcaaataccccggaatcgcgaattggtggcgaactggaaataatcccggatgtaatgacccctcgggatgggatgtactcaatagttatacgctctaaagatgagaatgggattccgaaggttcaactgtataacgataaatttggccgtcctttgcgctggaagccgtcgctggaagactgggaaccgtataaaaaaatgcagcaggagcgggaacagcaaggcgaagaggaaatatcacgcgggaaagatattcgaggctttaaggaaaaacaccgtgcgctagatgagcaatatcagcgtttgcatgatgaccgtatgaaccggtttaaaaaatacttttcatggagaaacgaataa

SEQ ID NO: 95931 - DNA, 270 bp, Enterobacter aerogenes
atgagtgaagcaaaaccgcaagatggtagtaccgtgaaaggctatagaaaattaagcgatgcagaaatcgcagcaatgaatcgcctaaaagaactgagtcgtaattttattcgcgagttgcgaaatattcagttggatttgttaccgcaggatccagttctttctgatcgcactgctgcttaccgtagcgctgcgttggcgaccacaaaaatgcaggaagcctgcatgtggggatgccgagcggtggcccgcccggacggcgactgctaa

SEQ ID NO: 95932 - DNA, 303 bp, Enterobacter aerogenes
atgaccaaagacgataaacgctggctggaagacgttgcatcactgggttgcgtcgtatgcagaaatctaggctacggcgctacacctgcagaagttcaccacatccgcaaagggcagggcatagcccagcgcgccgaccataaaaaaacactcccgctttgcccgccccatcatagaaccggcggacacggcgtagccatccatgcagggcaaaaaacgtgggaagaaaactacggtaccgaatctgaattactcaatcaggtaaccgctgaggtgggggaattacgtttatgcagaatttaa

SEQ ID NO: 95933 - DNA, 597 bp, Enterobacter aerogenes
atggcgcagtattcttttgtaaaagctcctggcaatgtattaattccggcgacgcctgactcccgcgaatttttagaaaaaaaagtccgtatgggcggtattttgtatgcggattttaagcaggcaagaaacccggcattccaccgtaaattttttgccctcctgaatctgggctttgattactggcaaccgtccggcggagcaatatcgccagccgataaaaaactggtacacggctatgtgcagctggtggcccactatgccgggcatgctgacactttgcaggaactggcggatcagtatctccgcgatgaagcagaaaaacgcgccgggaatatcagcgcggtaaaatcgtttgaagcattccgttcctgggtgactatcgaagccggtttttataccgaataccagatgcctgatggcactacccgcaaagaaccaaaatccatatcgttcgcaaaaatggacgatgtagaattttcccagctgtataaatccgtattagacgtcctctggaattttattttattccgcactttcccaacacagcaggcagcagaaaacgccgcttcgcaattattcagctatgccgcgtga

SEQ ID NO: 95934 - DNA, 339 bp, Enterobacter aerogenes
atggctaaatcatccgcagaacgtaaagccgcgcagcgggcgcggcagtctgccgccggcaaccgtaaaattgagctagttctcgatttgcaggagcgggatatgctggcgcgtaactgtgccgcacgtcgtcccggtcgagagccatacgatgccgctgagtatattgcgctgttgatccgccaggatgacgcgcgcgtgcaaagccgtatcaaatccatcagcaaacggttatgtgggaagtgcggcgatgcgttaccgctcaccagttgcccttgtgtcggtgattcgcagtgttgggtaacttatgggtggcatgagacgaaacttactgtgtaa

SEQ ID NO: 95935 - DNA, 1956 bp, Enterobacter aerogenes
gtgagagaaatcatcgttgataactttgctggcggcggcggcgcctcgacgggcatcgagctagcgattgggcgtagtgtggatatcgcgataaaccacgacccgaatgctgttgcgatgcataccaccaatcacccggacacgctgcactattgcgaatcggtttacgaagtcagaccaaaggttgcgacagccggccgccgcgttgggcttgtttggctttcccctgactgccggcacttctctaaggcaaaaggggctaagccagtagagaagtcaatacgagggctggcgtgggtaactcttcgctgggggcttgatgttgaccctcgggtaatgatgctggagaacgtggaagagtttaaaacttggggaccgctgcttgcggcagaaatgcgtccggatccagaacgcgttggcgaaacattccgggcatttgtcggcatgctgacaactggtatcccggcgaaccatcctgcgctggcagaatgctgcgagtttctgaacatttcgcttgatagcgaagatgctgcacggttggtaaaagggttgggatacatcgttgagtatcgagaactgcgcgcttgcgacttcggcgcaccgacgattagaaaacgattcttcatggtcatgcggcgggacggtaagccgatagtatggccggaggccactcatggagatccgaaatcaccagcggtgctggctggcaaactggctccgtggcgcacagctgcagagtgcattgactggtccattccggcgccgtcgatttttggccgcaaaaagcccttggcagaaaatacgttaaaacgcatcgcccgcggaattcagcgatttgttatcgacagtgccgagccgttcatcgtcaagtgcaaccacacgacgacgaaggggcagtacgattgttttcgcggacagtcgctggcggagccgctgcagacgattacgaaaacccacggttttgcggttgctgtgccacatctgacgaaattccgcaccggcgccaccgggcagccagtcaccgaaccggtaccgacggtgacggccggcacgtccaggcgcccgggcgggaatggtcatgcattggggattgtggaggcgggccttgtcccgtttctcgctggtaacggcggcagcgagtaccaggctaaaccacgcccgctcgataaacccgctcacaccatcctgaaagagtcccgcgcctgtatcgttgcgccggtcatcgccaggcagtttggcgccagcatcggccaccgggcggacgaaccaagcgcaaccatcacagctggtggcggcggtaaatctcagttggtatcagcgtttctggcgaagcactacggtggcaactacaccgggcccggcgtggggctggatgagccgacacatgcagtgacgacagttgaccatcatgcggtagttgcggcgcatcttatggtgaacaataccgggcatcccggcggttccgtggaatctcctgtgcatacggttacgactggcaatcaccacgccgttgtagcctcccacctggtcaaattgcgcggtacctgccgtgacggacaacggactgatgcgccgatgccgactattaccgctggtggccagcacataggggaagttgaaaccactcttgctgttgagcattacgacgagcagcgcgcgcaacaggtgctagcgttcctgaaagaatattgcggagccgatagcactgggctggtggaaatcgccggggtaacttaccgcatcgttgatatcggcatgcgtatgcttcagcctcatgaactctaccgagcgcagggcttcccggaatggtacatcatcgaccaggattaccgcggcgttaaatatgcgaaggataaacaggttgcgcgctgcggcaacgctgtaccgcctccgtttgcagaggctcttgtgagggcaaatttgcctgaaatgtgcatacgaaaagaggctgcataa

SEQ ID NO: 95936 - DNA, 273 bp, Enterobacter aerogenes
atggatgagcaaatgcgggaaacattactaaattatgcctattccagaatagttgaattagaaaaattattactccccgatattgaaaacacagtctggccagcagaagtagtaatagtgttctcccagattgaaaacgccgggaaactcccggcgcatcaccaacgccgattgcagcatcatatcaaccgcatgtggctggaaaaaatgccggtaccgtcaattatcgccgcggcaggttcgctggccagcgctatggagaaatacgcgtga

SEQ ID NO: 95937 - DNA, 984 bp, Enterobacter aerogenes
atgagtatgacgcttatggccaaagctatggctatcaagactggtaatccgattagaaaactggtgctgatcaaactggctgataatgccaatgataacggcgaatgctggccgtcttacaaacatattgcggatcactgcgagtgcagcaaaagcgcagtgcgcgatcacatcgatgcgttgatttctatgggcctcctggtgaaagaaaaccgccctggcgtaaaaaacgggaagggtaacgcgtcgaatctgtactgtatgaaacttgataaccctatgccgccaaaaagcatagctcctatgccgtcagaaagcacaggtatgccgccagaaagcataccccctatgccgtgtggcggcaccagaaccagtcactcttttgaaccagtcatagaacctaaagatccccctaacccccaaacgggggaaaacggcgagcgtattttttctgatgctcaaaaagcgcttgagttttacaacgaaaaaaccggtacccgctgccgtgaccttaagccgtttgtgatgatgctgacgccgaccactacccgggacgggtataccctggcagaaatccaactggtgatccgctgggtgttagccacatggcgccgccgcggcgatggattaccaaagccggcgaacatctgccgagttaaacggttcgatggctatctcgctgacgccgaggcttgggccgtgttggaagctgagatcgacccggaagccgtcatgagcggctacaacgaaatttttgctgatacgttgccggcggcagagctggatgatgatcgccgccggatgattaccagactggccgctcacatgaaaaacaaaactacgggcgcattcctgggctacttcgaaaaattccgcgctgacgcgtcagatttttatttcggtgctaacggcggctggcgcgccagttttgactacctgatgaaaccagaaacgttacgtaatacccgggaaggctcgctatga

SEQ ID NO: 95938 - DNA, 219 bp, Enterobacter aerogenes
atgcagacaactacagaccgtatcacctggcggaacggcttccgcctgaatggtgagcctgccttcatgtgtgacgtgcaggagattttcgaagaacgtctcactgccaaaaaatgggaactctacgaactgcgcaaagccgagctgcgggaagagaacctcacgcctaaagaatacgaaaacgcctgccgccagctggccgatatgctggggatctga

SEQ ID NO: 95939 - DNA, 402 bp, Enterobacter aerogenes
atgaaaaacgcagagctaaacgaccgtattcgtcgcagaagaacagaactcgatatgtcacagcaaaagctggccgatgctgtgaaggtttcgcacgtcacaattttcaaatgggaaaacggtgagacagaacctagagggcaaaacctgttcaaattgagtaaagctctcaagtgttcccctacctggctcttatacggcgacgaagatcaatcccccctccccgttgaagaattgccgaaagaattagatgctcgccagttaaaacttctggatctatttgattcacttcccgaatctgaaaaagataggcatttgactgaattggagtctcgcgttgaaggctttaacaagctatttgaagagctcttagcaacaagaaaaaaatcacaaaaaaaataa

SEQ ID NO: 95940 - DNA, 282 bp, Enterobacter aerogenes
atggacacgaaagcgaaacgggggaccgttggaaagctggcgttatgggctttttacgctttttgcgcttactttgtgtgggcgatggtacggtactggtggatagtggggcggattcaaagcgttcccggcgccagcattgatggtgaatggggatcaacggcgggcaaatggattggcgcgctgctgggttttttggtgctgggggctgtggggttaatccttggggcgatagcctggtacacgcgtccccctattcaggtacatgaacaacgcgattaa

SEQ ID NO: 95941 - DNA, 2088 bp, Enterobacter aerogenes
atgcaacaggaatctgtagacagtaaaaaagtcatccgcccggatggttcgttcatggagtggttcctcactccgaacgtacagtttggcctgctggccatactgaccgtgctgggtttgtttctcccctttaccatgctgctgagcatcctcatccttccgccgctgatggtggcattcacggatcgcaaattccggccaccgctgcgaatgccgaaagactgcgaaatgttcgacgacaccctgaccacggaaacccaggcggaataccgtctggggcccattcgcatcccgcataaggtccgggagcgaaagaaagcgaagggaattttatatgtcgggtatgagcggggacgcctgttcggccgcgagctgtggctgaacatgacggacctgctgcgccacatggtattttttggtaccacagggtcgggtaaaaccgaaaccttctatgggtttatcgttaacttcctgctgtggtgccgtggctactgcctctcagacggtaaagcagataacaagctggccttcgccacctggtcgctggcgcgccgtttcggccgtgaggatgattattacgtcctcaacctgctgaccggtagtatcgacaggttcgtgaacctggtgaagcaggaaagcatccccgcgcaatccaactcagtcaacctcttcagcgttgccccgccgaccttcatcatccagttgatggaatccatgctcccccaggtgggcggggattcggcacagtggcaggatacggcaaaggccatgatgtcggcgctgatcaatgccctgtgttataagcgcgcccgcggcgaactacttttgtcacagcgcaccattcagaaaaacatgtcgctgccggcaatggccgcgctgtacgttgaggcaaagaaaaacggctggcacagcgagggttacgccgcgctggaaagttatctggaaaatacaccaggcttcctgctggccaacgcggaatacccggaaacgtgggaagcccgcgccttcgaacagcataactacatgagccgtcagttcctgaagacgctctccctgttcaatgaaacttatggccatgtttttccggaagacagcggcgatatccggatggacgatattttccacaatgaccgcattctcatcgtcatgatcccgtcgctggagctgtcccgcggtgaagcggccacgcttggccgtttatatgtgacgctgcagcgaatgaccatcagtaaggatctgggctaccagctggaagggaaaaaagaggaagtcctgctcactcacgcgctgaataatcaggcgccatacgggctgatttatgacgagctgggccagtatttcaccagtggtatggatacgctgagtgcgcagatgcgttcactggaaaaaatgggcgtattttcctcccaggatcacccgtcgctcgcccgcggcgcgaacggcgaggtggattcgctgatcgccaatacccgcgtgaaatattttgagtcgattgaagaccggaaaacctttgaaatactgcgcgaaaccgtcggtcaggactattattccgagctctccgggcaggaagccgaacacggcacgttttccaaaacggtccgggaaggggatctgtaccaaatccgtgaaaaggaccgcgtaaacattcgtgagctgcgtaagcagaccgaaggtcagggtgtgatttcttttcaggatgccctggtacgcagcgcggcattttacattccggacaatgagaagttttccagcgagctgccgatgcggataaaccgctttatcgaggtactaccgccatcgccggcgacgctgtacagcatctatccggaacgcaaggatgatgaactggcggaaactaacccggatgcaatgcacttcccgccgatcaagctgttcggctacgacaaagcggccaacagcctgctggaaaaaattgaggtcttctacgagctgcagtgtggcgcaatttcaccggagaaaatgtcggtgtgcctgtttgaactgttcgctgaatggcttgatggaacggaaacggacgacgtgctttaccaccaggaagatgatctgttcccgatgatcgagatgtaa

SEQ ID NO: 95942 - DNA, 951 bp, Enterobacter aerogenes
atgaaactcaccgtaaaaaccgatcgcaacacactttatctttccgctgacggaaactaccaggaacaagccctgcattccttccccctgtcagcctgtcattttgggcttggccatgatgccggcagcggtcacatcctgacgcacaatacgttttctggtgaagcggtgcagctgttccgctttgaaaacgaatatcaggccatcgaggcgctgaacaatatccgtaaaaagctgaaacagcagcgcggactcaatgctgtgcgccggctgtctaactttattttctggccagtcgccgcgctgggctttatcgtctccatcaacggcgcgttgatgaatatgcatcaaccggcacagccactgcaggcaaactcgtatgctcccgcgccgggtctgcagcagcctgccactgcgccggagcagctgcaggtacaggcagcacctgaagcccctaaaaaactggctgataacgacttgctgtcactgaaagatgccgtcaccagcggacgctttacgatctcgctttcaaccgggcataaacacaccctgtatgtgttttccgatccgatgtgcccgcactgccgcgcgctggagccccgactgcaggaactgagcaaacgctataacgtcgagattttccccgtgtccgtttatggcgacctgcgctcgatggtccgcgccgctccagtactcgataccgggaaagatacccgactgaaaagctgggaagacacgattaacatgggatacaccaccatgaacccgaagattgacgatccgaaaacagccccggataccaccggcgcccgcctggttgacgcgaataatatggcatttgcgaaattcgggtttatcggcaccccgtccatcgttgccgattcgggtgatgtgatcccggtttccgtcgtcaaagacgatgcccgcctgcagcaggcaataggagaataa

SEQ ID NO: 95943 - DNA, 1308 bp, Enterobacter aerogenes
atgcaaaaccagccacaacggaaagggggaggggatgatggcctgatgattatcggggcccttctcatcatgatcacagtgatgtggtttggctttcgtgattatgtgatttacggagtctgtcgcctgctttactggatctacggtgtactgccggacgccattacaccgggtaatgcggccgagcgccgggacatgctgctgtcggcggcgcggtataaccaccaggtttcgctgtgggactttatcagcgtgatgaacgacacggccagcgtgctctttcccctgttcattttaatcatcgggttgttcgtctgggttatctcgcgcaatccttactaccgtctgacccgtaaactgaccatccggaacctgccctgggtgatggtaaaaaactatccggggatagctcatatcctcgcccggtttggccacctcgatcagctgctgctgaatgaagatcctgaagaagcacgcagcgcgcagtcacccgttgagtttgcccaggaacataacctgattgataccgctaagcgccgcctccgtaaaaaagccgcacataaagtcttcctgtcacaggtaaacctggcgcccgaaggggcggccctttccctggcgccctgggaaaaagcgctcgcagcctcgtttgtacatctgcggtttatgggcgaccggccaacggctaaatccattctcgacgatctcaaccgttcctgcctgcggactaaagacggtttccctgattattcgctggccgccgggttctggaccgtcgccagccagtgcgaagcgttccgggaatttgcaaaggggcgccgcagctcccgttcgctactctacgcgctgttcgatgatgacctgcagctgccatccgctaatttccggtggctgaaaggtgtggaccgcacgttatggtatgcactttcaagcgccggccgcgggaagttcttcattgagggaggtggtgttattgcctggagtcagtgcgaaagttaccggctgacgctcgatgaagaaaaggcggcgaaattcccgccgaccgtgcgggcggccgtgctgggccttgagctggatctgctccattaccgccatattgaccgccgcgatcccgccattccggtcgctcactggcaggaagacgttataccgccatttgcatttgaatctgacgctgaagcggaagacgagccggctacgccgcctgcagctccgcacgacaccccgaacaacagtctgcgactgacagacgatgaaccgacgccggctaaacctcagccggcaacccgtcccgatcacctggaactctaa

SEQ ID NO: 95944 - DNA, 396 bp, Enterobacter aerogenes
atggttgatgccccgccctcaatcccgctgccaacctgcatggttgaagcagcacagatttatcacattcctctccgtggattcctcgccttgtggctgactgaaggcggaaaaccgggaatgaaaaataaaaacaaaaacggcacttacgattacggcgcattccagataaacaccatctgggcgaataagctggcgtccgattttggagtaaaagcggagcagctgcagcatgacttctgcgcctctgcaatggccagtgcctacatcctcaaatacaacatcattctcgaagggggggatttctggcagggtgtcggccgctatcactccaacacgccggcgcgtaaggcctggtatatcgggaaggtttaccaaaattctctgaggttctga

SEQ ID NO: 95945 - DNA, 351 bp, Enterobacter aerogenes
atgaaattcaacacgaagattgctcttattctggctgcatccgtaatcagttgcagtgcctttgctcagagcgtatccgcgccgaaaaccgattctttactgagcagcattctgggtgagcaggtacagacaaaccaacatcttgtacaactgctggcaaaggatcaggatgccggtattacactgaccccggaacaaaagaaaacctcttgcctgtatgaaagtcattactacagcagtggcgcaccacttaccgtcggaaaagaaacactccgctgcacgctgagtggcgaaatccctacatgggaaaatgcgaacgagggcaatattgtctctgtcgaaggcaaataa

SEQ ID NO: 95946 - DNA, 654 bp, Enterobacter aerogenes
atgattcagtcacgtaataaatatctgcagtttatgctggttctgctggcagcctgggccatagcctggggggccatgtttgtcatggggcaggctgttctgctctatgggctggggaaaaatacactgttcttcagtcatggtgctgtactggtgtacctgctgtgtgttttcctggtataccgccgctgggttgctccgctaccggtcgttggccagctgagcaacgttggcgcactgtggctggttggcgcgatggccgtggtgtatgtcggtgaatttctgctgggtaaagtgctggacctgcccgctgagccatttatgacgaaactttttgccgataagtccatacccgatgtgatcctgacgttgctggccgtctttatccttgccccgctgaatgaggaaatcctgttccgtggtgtcatgctgaacgtcttccgttcgaggtacaactggacgatgtggctgggcgcgctgataacgtctttgctgtttgccgccgtgcatatgcagtatcagaacctgctgaccctggcagaaatgttcctggtggggctgattacatcagctgcccggatcagaagtggcggcctgctgctgccggtattgctgcatatggaagctaccgcgctgggtttactgttgggctga

SEQ ID NO: 95947 - DNA, 435 bp, Enterobacter aerogenes
atggcgctggatctcgtttatccccggccttcagtggaaggtgacgcactccctttttttgccgagcccgttgcggccggctttcccagcccggccgcaggctatgaggccaatgaacttaacctgcatgattactgcgtgcggcgtccggccgcaacgtacttcttgcgtgtgtccggcgattctatgcgtgatgcccgcattcatgatggcgatgtgctggtcgtcgatcgggcagaagagccccggcacggcagcatcgtgattgccagcatcgataatgaatttacggtcaagcagctgcagctccgcccttacccctgcctgatgccgctgaatccggcttttccgccaatcaggtttgatccggaggcgctgcagatatggggtgtggttacgttcactgtcatgagacaccgcccgtgtacgccttaa

SEQ ID NO: 95948 - DNA, 1305 bp, Enterobacter aerogenes
atggggtgtggttacgttcactgtcatgagacaccgcccgtgtacgccttaatcgatgtcaattcgatgtactgcagctgcgaagaagcgttccgccctgatttacgaggtcgccctgtggtcgttctcagcaacaacgacggggcgcttgttgcggtcaatcgcgcggcgaaagcgcttggcgtgcgccgcggggagccctatttccgctgccgccgcctgctggaacagcataacgttgccgtattcagttccaactacaccctttacgcctcattctcctccagatttgcaaccgtggtggagagtctggcgccgcggacatttgtttactcaattgatgagctctttgcggatgcctctcatatggagggagtgatgacgccgcaggcgtttggccagcttttgcgggctgaagtgctgcgccagacaacgctcacctgtggagtcggcgtcgcgccaacgaagacgctggccaagctgtgcaaccatgccgcaaagacgtggcctgccaccgggggggttgtggcgctcagtgatcctgtaagactgaaaaagctgatgagcctggtggcggccggcgatgtgtggggcgttggccatcgtaccgaaaaagggctggcggcaatggggatcaaaacggcgctggcgctcgcagagatggatatccgtcttgcacgccggctgtacggtgtgacgctggaaaggaccattcgtgagctgcgtggcgaggcctgctttgccctggaggaaggaaccggcgcgaaacagcagcttgttgtatcccgttcgtttggagcgcgggtcacgcaactggcgcagatgcagcaggcggtgactaaatatgccacacgggcaggggaaaagttgcgccaggaaaaccgcctggcgaaggtggtaacggtctttattcgcagcagtgcttatgacgccggcggtgtgccctacagtaaccaggctacagaagtgcttcccgtgccaagccaggatacgcgcgacatcatcgccgcggcgcagctggggctgtcgcgtatctggcgtgagggcgtgcggtatgcaaaagccggcgtgatgctcagcgatctgcagggatatgaaacccagctggatctgttttcgccggctgcagtgcggccgggcagcgaaaaactgatggccaccatcgacaaaataaacagggaaggaaggtcaaggatcttcttcgccggagaaggtattgatccggaatatgccatgcgccgtgaaatgttgtccccggcctacaccacgcagtggaaggatattcccgcggcgtttatgcgataa

SEQ ID NO: 95949 - DNA, 849 bp, Enterobacter aerogenes
atgaagaatgatgagctggccacacgacgcgctgaggcgatagccggcgatcggtgcttcacgaaagggcgcctgcgcgatgaattcagaatgaagccggctcccggtgctgagccggtgaaatggtacaaaagcgcctatggcggcaagtacgccgtataccgcattgcagactgtgttccgatgcgggaaaaacggccgccgaccgagaagcagcagcaggccggcctgcgtctttccgtcctgtcccggcttaacagcaccagtggccggatggcacggcgggcacacgactggctgagtctggcgccgctctttctggataccgaaacgacggggctgggtaataccgcagaagcgctggaaatcggcctgaccgatgcggccggccgggtgatatttgaaacccgcctgaagccgacagtcgccatcgaggcgcaggccgctgccgtgcatggtatcgatgagccggcactcagcggcgcaccatcctggccagatgtggcgctgcagctgcgccacgccatcggggcccggccagtgattatctttaacgccccctttgatacccgcattctgaaacagacggccgccgcacatggcgatccggccgactggctgggagaactgacagtgtattgcgcgatggagctggctgcagggtattttggggccaccaatcgctatggcaccatttcgctggccagcgcggccagtcaggcagcattgacctgggaaggggaggcacactcggcgatcgccgatgcacggatgacggccggggtggtgaacgccattgccgcataccatctggcattactgcaggagcaggaacggctgcaggcctga

SEQ ID NO: 95950 - DNA, 321 bp, Enterobacter aerogenes
atgaataatatgcaaagtaaagccccctcgatgcggctctccggtgtgcaaaaagacgtattgtttgttctgtatggtctggcagaacgtcagctggcgggcccgttcccggcgatgcagcttttcagcatcctcaataagggacgcctccagcccgttgccgataccaattttcgtcgctcctgccatacgctgaaccgccacggcctgctcagcaaataccgggataatcagtcactgacgctcgcgtttgggctgacagaggcaggcctggagatcgccagagaggtttatcacaaacgcctgacggagatggaataa

SEQ ID NO: 95951 - DNA, 639 bp, Enterobacter aerogenes
atgttatacatggctttatgcagttttatgatgatcctggcgctaagtgagatgttccgcacgatgacggcgatcggcaatggcagtttcgccggcaaccgcttcataccgctcgccttagttctgttaacgctggcgctggcatcacctttctttgccacattttatacgctgagccggcctgtttcgatggatgcactctccagcctgtccgttggtgcgcagtgggcaggtatcgccgccgccattctgctgtgcatcttgtatggctatcgtgcctggaaaaacggccgtttctggtataccggtgcggccattgcctcagtggtgattgccgttatttttgccaacagcctgcttttcgtgtccaggcccgatgccggcatcgtggccacttttgtgctgaacaacgatgacagcaatgacgtgcagtgcgaccgttcggtactgctggttcattacaacaagggaacccctacggagtggcgctgcccgaccggtatcatgttcatgtctgatgcgtcaaaaccctttcttccctggccggattatcacggcgggcggagtcagcatctgactacagcactggatcagatcacagacagcgccatgcgccttgacctaagccagaaaccataa

SEQ ID NO: 95952 - DNA, 210 bp, Enterobacter aerogenes
atgaaagatgaaattcggcacgaaaaacccgttgaagtgaatatacagctgacacacagagaagcgcaggctctggcgcaactggttaagcgcctgggattcagtgactgccgcggcctggcgacgtcagatattgaggcatatctgatgatggatggaatcaaccagatcatgaaagcactggctgaagagggctatgcaccacgataa

SEQ ID NO: 95953 - DNA, 219 bp, Enterobacter aerogenes
atgttcagcatcatttatcacgccggcgctgccgtccttttcctggtcatgagcctggcggccggcgccggcctcctgcttcatggccatgaatatacgacagggcatttctggaacatgacggggctgtgcattgtgtcaactctcgtctggatctgggctgtagctcaggcaaaagaagcctggtacatttcacgaaacatcaaaaaaggactctga

SEQ ID NO: 95954 - DNA, 684 bp, Enterobacter aerogenes
atgaacaaacgtcttcacctcatcaccacctgtacccggcgcaaggcgggcagcgtggaggataccgtttttccgggcgacgcttcccttaatgacgcctttgacggctggtacaggctgatcgcccaggccgcccgccgtcctggcaaggtgctggaaacgggagagctttaccggggcgcacactggctgcgtgcccgcggtatcgcggcgcggtggccgggcatcgagctgtgggccatgtcggccggtctggggctgcgccaccataccgatccggcggtcgcgtatgaggcaacgtttcacgccatgcccttcgcgccggcgaccgtctggggctcactgacggcacggcccccgctggcgggccgctgcgcctccctggctgagctgatgcaacgctgcccggacgatcgctttgtgatcgccggttcacccgtgtatatcagcgcggctgagcaggatattctggccggcgtgcccgcactgcatgatgcggccgctcagctgattatcgtgacctcacagggctatcgtggtccgctgcagccgtttctgaaaagaagccgcgcggacatgatggcggccctgaaatcgaacatgacgtgcctgaatattgcctgcgccggcgccctgattgacgccatgatgcaggcagacgcccggcaggcggcgaccatttaa

SEQ ID NO: 95955 - DNA, 273 bp, Enterobacter aerogenes
atgaaaacgacctgttatgcggacggcatcacggcggcaccactttccccgcaggagtggcgggcactgctcagggcgaaaggctggaagcagaaggatctggcccgccgctggaatgtgtcagaaacctggatcaggaagctggccaataaccccgatcggggcacgcactggaacgatgcctgccggggtctgcccgatattcgtgcccggcggcccggcgaaccgcgcgcggcaggcacagacgtacctgagccgggaggccccgaatga

SEQ ID NO: 95956 - DNA, 1275 bp, Enterobacter aerogenes
atgaccggtttttttgaacgtaaaaagcgggccaaaaacgcccagctgaccgtgcgtctcgatgagcagctgaagaaacgcgccgaactgcgtctggaggcaatgggcatgaccgccacggaagcagtggagcagctttaccgcttcatcgccgatcacggccggatgcccgtcacggagcgtatcgtcacatttgacatccagtcacagcgcggccgcgccatcgccctcaatcccgccgacgctgtgaccgaaaacacccggcggtttctgcagtcgctgggagctgtggaagtggtctgctgcgatcccgctgcatttgaacaggcggtactggagtacttcagcctgtatgtggccgaccaggctgcctgtttactggccggtgtactgaacgtcacgttcatggttaatgccgccagtcgcgtgaaagatgactggcatgacaggctgctgtccctgttacagcgcgactttgatttcagcgaagaacagtcagtgacgttcattaacagcatcgtggacagcgaacatgtcgatcctgccatcgtcagtcgaaataatacggcctggcggagcggaaaaagcaccgggtccggcgccggcgctgaacaggccttactggataacaccaacgtcagggtcttctatccctccggggaagcgcccgtctccggcgagatcggcgccgccgtcctgcagcgtttcctgacgttcctggcggagcggggcgtcagctgcagcgatccgcagagactgaccgaaagcgccggccgtgcatggggcgtgcgtgaaaatatgatcgggaatatgccccctggcatacagcaggccataaacgatggcgtcatttttgaggccagcgctgacacgccggacttttcccctgagctggcggcggcgtttggcttcacacaggcccaggcagaagcggtgctgaaacccgccctgaccgccagggatctccccggtttcctgcagcgctttctggcgttcctggccgaccggggtatcagctgcagcaatccccggcggtttactgaaaaggtcacggaatacgccagccatgagggaccgcaccggcttattgcaatgttgatgtcgcgcatcagggatgagggggtcagttttgtctatcacaatgaatccccggacgaactgccgcgcctggccgcgtcactgcccggcgaactggccgataccttcgggtttacgggatggcaggcaacaacaatactgcgtcaaatccagccggcacggccggggcaggattag

SEQ ID NO: 95957 - DNA, 345 bp, Enterobacter aerogenes
atggaatatgaagcgtacaaggttcgcggctacggcttcggactgaagaaagagatcaccggcgtgctgggtcgttaccccacgcaggaagaggcgcagaaggtcgcggacgactacacgcaggcctgcctgccggataacctgccggacagctacgatatgggcatggtccggccggtcgctgccggcgaacctgccgccctcgatacggacgtttttcgcggtccgggcgcgccgttcatgatggatgccggccagctaagcacaggtcaaaccgtatgcctgggcaaagcggcggatggaaaacggttttatgtcggcggggagcattccggtggccagtga

SEQ ID NO: 95958 - DNA, 159 bp, Enterobacter aerogenes
atgatgcgtcagggggtgatttctgccgttatatatttactgctggcaatgctggtcatgatctacatgccggagggttactccgcgattagctgggccataggcgcggttgtggttgtgacgctgatttatattcgtgcccgtaaaggagaggattga

SEQ ID NO: 95959 - DNA, 585 bp, Enterobacter aerogenes; identical to SEQ ID NO: 30057

SEQ ID NO: 95960 - DNA, 546 bp, Enterobacter aerogenes
atggatatcaactactacgataaacatcaggaagaatttgaggcggtcacgctggcgctgaaagccaatctggaagaagtttggggcagcagcctgaaaaatcagggggaaagcctggatgatcaggtgacgtatatgaagctatttgaagagctgcaatacaacctcaatccgtactacttcaaggagaacacctcagcaaaagagatggatgaagataaagtagcggcctttgtggccagaacccgcgactataagcacggcattaccattaaatcctggccgggacgcccgcagaaatggctgaaaggccgaatcaaacctcttcatcctgtggaaggcacaaacctgtgctggatcgacacgtccaacattgtgcatatcggtgccgataggcagtttgacgatcaatattacctcaccgtgaccacacagaacggtcagagttaccgcgtgaatgatgtccttctgcctggacgccttctggatgccgctcatgaagccctgttcagggcgctggattcaagcactggcggtaatttctga

SEQ ID NO: 95961 - DNA, 462 bp, Enterobacter aerogenes
atgataaagaaaccacttattgccggcatcatgctggttgtggcgcacaccgccggcgctgcgcaggttgatgataccaatctgcagcagatttataccgaggcgggcattcagggtatatgcagcgccgggatgctggctgtgccggaaggggccagagatgaagttgtcccgcagaacgtcagacacctcctggttcagtgtgcctatttcgacgagcagcagttgcgccggcgtgccggccttccggctcagacatttagccactggcgtgaccgcaatgcggtccttaatctgtcgtctgaccaggtatctgatgcgctctggctgtcagcgtggcgtgatttccgggcacaactggcctcggcctacccggccccggcggaaaaaaaggcacaggggaaagaggccgtacccgccggcacgaagcccggcactgagcatgggagtgcggcggattga

SEQ ID NO: 95962 - DNA, 249 bp, Enterobacter aerogenes
ttgaccggctttgacttgatcctgtggcgacggggcctgaactggacccaggaacgcgccgcggctgagctcggtatcagccgtaccagcctggtaaaatatgaggacggtgagacagtaccccggaccatacaacttgccaccgtcgcgctgacgctgaaagcggaatggcccaccctgaaaaccatgagcaaagacaggctgctgcggcagctgaagtatgaagtgctgaggatcgataatgaatga

SEQ ID NO: 95963 - DNA, 588 bp, Enterobacter aerogenes
atgaatgagtccatccatgttgtcggctcttttatccttgcgggtatcctgctgtatggcctctggcagggtacacggcgacgccggcgccggcacgaacggaaacaggccagcgcggtacgtgtgatcgataaaattaatacgtttccgcatttcgggcagaaaattgcctatctgcgcaagattgacccgtttgtgttcgaagagctgctgcttgaaggctttgaacgccggggctttgaagtgatccgtaaccgccggtataccggtgacggcgggattgatggccgtgtgaagattgatggccagacctggcttatccaggccaaacgctataccagctatattgccgttggccacgtccgtgacttcagcgacctgctgaacgccaccggtgcccgcggttttttctgccataccggcaaaacgcgcgaaggcaccaaatcgctcattcgcggagacagccgcatgatcctggtcagtggccagaagctgctagaccttattgccaccgatgcgccgtttatcccgtatccgggataccggccaccgaccgaaatggttcatcctgaacaggagacaacatga

SEQ ID NO: 95964 - DNA, 486 bp, Enterobacter aerogenes
atgaaattcaaaggatacgtcgccgccctgccggcactgctgctgacagggtgcgccatgctccccggacagcccaccgattatgaccgcttctgtaacgtctcaggcatcgccagccacggcgaaacctaccgtgtcagtgacagccaggatttctggttaaccccgaacggccgctatctcagccaggctgagtacagcagtccggcagatacgcttcagaaactgacgggcgtggtcagtggtgaagatcctgaccaggtgcggaagaacgccgtcagggtaagggtgttccgcgtcgagagtgaaaacagccataaaggtgcgtgcctgcctgtgcgttatgacgataatggcgcacagcgtaaaatggattcactgactaacggccgccgtatggtggtattcagtgaagatgaaggtcagtctggtcagcagatttacaacaaaagtcgtggtacaggattcagttacaggttgttatga

SEQ ID NO: 95965 - DNA, 249 bp, Enterobacter aerogenes
atgagtggattgaaaggccgccgaatcagcgcggatatgtttgctatgatgttaaaagtatctgccgggcagctggtttttgcagcccggcatgacaagcctttacgcggactgaccctacccccttacagaatcgaaggcgggaaaagctggagctcgaccgcctccacccgcagtatgacgtttgatatgcaggatgcggtcgaattcagcgagaaatttcataaaattcagtcgcctgacggctga

SEQ ID NO: 95966 - DNA, 741 bp, Enterobacter aerogenes
ttgaacactttccccctgcaaatttcccagaattcacgtagcgacgccatcgggaccgggcgcgtgacatatgcctacttcgattatgccgatgcgctggcgctgcgggagatggccagccaggctgatttacccaaatacctgctggccccggaggtgtcggtgtttctgcggtatgtgccagacctgcgccagcaggtccttttcgataccctctggaacacgggcgcgcgtattaatgaggcgctggcgctgaccggcgccagctttcagcttgacggttcccggccgtttgtccggctgaagacgcttaaacagcgtcagcgtggccgcggcaggccgggcaaggatgaagaggtgttccgtcttgttcctctgaccgatcctcaatatgtcaggaaggtgcgtgaatttctgaccaccctgcgtattggtaaacagcagctgctctggccggtgcagagtgataacacgccgcgtaactggatcaggaaggcactggacctcgcaaaacgtgactctgtcacttttagtatccctgttacctgccacacgttccgtcacagcttctgtatgcacctgatccagcatggggttccgctgaaagttgtacaggcttatgccgggcattcccggctggaaaccacagaaacctacacgcgcgtgtttgcgctcgatgttggtcgtcagtatggcgtccgattcagcctgccagacagtcatttaacgctcccggaataa

SEQ ID NO: 95967 - DNA, 975 bp, Enterobacter aerogenes
atgcgtatttttgttgatgacggttccaccaacatcaaactggcctggatggaagaaggcgcagtgaaaacgttgatcagtccgaacagcttcaagcccgaatggtccatgacattgctgacagattcatcggtgccggcttccgccaactatgaaattgacggggaaaagtacagctttgaccagctgagcccggatgccgtgcgcaccacggaaacacgctatcagtacagtgatgtgaatgtcgtcgctatccaccatgccctgatgcagtctggcattgaaccgcagccggttgatgttgtggtgacgctgccgctgggcgagtacctggatgaaaacgatcagcctaatatggccaacatcgagcggaaaaaagcgaacgtgaagcgcgcggtggccgttcaggggcgtgagagctttaccgtgcgtaaagtcagcgtactgccagagtcggtccctgcaggcttcagtgtgctgaaggatctggacgatctggactccctgctgattgtggatatcggtggaaccacgctggatatcgcgcacgttcgcagcaaaatgtccggattcaccaagacgcattgcgatcctaaaaccggcgtatccatcatcaccgaagccgtaaaacatgcactggataccagtgtgagcacccgtaccagttcgtattttgccgaccgtctgatccaggcgcgaaatgacgaaacgtttctttcccgttacctccagaatgctgaccagcgggcccaggtgatgaaggtactgcatgagcgggaaaaagccctgacgcaccgtgtcaccgattcagttggccgctttgccggcttcacgcacgtcatggttgtcggtggcggtgccagcctggtcgccggcgcagtgaagcaggccacgggggtgagtgacgatcgtttcttcgtcagtgataacccgcaattcgatctggttctgggtatggtggcaatgaagggctga

SEQ ID NO: 95968 - DNA, 444 bp, Enterobacter aerogenes; identical to SEQ ID NO: 21612

SEQ ID NO: 95969 - DNA, 564 bp, Enterobacter aerogenes
gtgaaaaaatatgtgctgttaaccctgaccctcatcgccggcgccgtggcagcaaacccggtaacagcggccggcaatattgccggcgatgtccaggcgcaagctgcgactgaagtgaaaaccgggttttcacccggcgggaccgcattaaatctggttctggattcaatcgaccacgcgcagcatgagattctggttgccgcgtacagcctgaccagtcgtcctgttgccggcgcgttgcgtgccgcaaaaaaacggggcgtatcggtggtggtggtggccgatcgcaaagcgaacgacaaccggtacaccgaagtgaactttctggccaataaccgcgtggcggtgcggatcaacgataactacgaggccatgcatgataaattcatggtctttgaccgccgcgccgtattgaccggctcgtttaacttcagcgccagcgcagacagtcgtaatgcggaaaatgtggtgctgatcagcggcgcgcctgcagtaactgaagcctacgtgaacgagttttcccgtttatggggcgaaggaaaggacgtggctccacggtactga

SEQ ID NO: 95970 - DNA, 507 bp, Enterobacter aerogenes
atgcaatcattccccctgttcgtttcccgtgtcgttcctgtgatcaccctgagccattgtctgcggcagcggcgctggtccctgcacaacacgccatgccagattgacctgagatcaggttgtcacctgcgctcacagcctttcggcacgctatccagacgggaaataagcgaccggccaccggctatgccccgcggttactggttcaggcaatgcagccgggatgtcatgtttacggggcgcatcgatcaggcagatcctatgaaacaggtctattacaacgaaggctggagcggtccgaacaagtatacgtttgaagtttatcagctggagaacgggagttaccgggcgctggcccgcaaatggaatggcaaaatcaacaaggtgcagcaggaaacgcagtacctgtctgacacgcgggaggggctgaagcaccaggactatccccgcacgcgccaggtgaaaatttttctgaattcagacttctgggagaagggtaatgattaa

SEQ ID NO: 95971 - DNA, 480 bp, Enterobacter aerogenes
atgattaagatggttagcgtcgttccgcagccggaaacagtgaagacgctccgggaaaaaatgggcatgactgaaaccgcattaggggctgtcatggggtacgaactgcgcgcctggcagcgtaaggaagctatcagcgacgatctcagccagtacaacaagaccagtcttcgcccaggcgaatataacatgctgatgctgatcgccggcgtgcatcctgattaccgcctgaacagggcattcagtcctgatgatatggtcaaagatcccgccacggccgaagacgttcgccgcctgcgtctggcgctggggctgaagcacgctgaaattgcagcgctgtttggctataaaccggcgtcatggcagaccaaagaaaaggctgctcagcgcggcgtaaagctcaagaccggggaattcaatttcctgttacttctggccggtgagcatccgtcactgcagctggttgagaaggcgaaataa

SEQ ID NO: 95972 - DNA, 411 bp, Enterobacter aerogenes
atgatcaccacacgccgaatgttaatgctgtatgcctgccttgtgcccgtagccctgacagggtgtgatctggctgattatttcccgaatgtgccacagcccgtgcccgtgatttcgcccggctatcaggttgatatcgatggccacccggtccgaatatcaggatttgatgactgtccgcgggaaaaagatgaagcccggcacgcagctgcacaagatgagaaaggctgcattgtgctgtctgcagagcgttccgaggtgaaggtcagactgtatcagccagccggcgccgtcaccgaaacctggcggatcatccgggaaaaagacgctcgccagaacgatattattcgcctgcagcgcccgaacggtgcgcttgtgatgcaaaatttacaggggaaagagtctccttaa

SEQ ID NO: 95973 - DNA, 264 bp, Enterobacter aerogenes; identical to SEQ ID NO: 21617

SEQ ID NO: 95974 - DNA, 363 bp, Enterobacter aerogenes
atgaccatgcaatcagaacttgtttttactgatcctatgctcaacgtcgttattgctgaagttaagcgttttaattgcccgcttctttttgtcaaagatcatggcgtgtatgtgatggcggcgaaaggtgagaaaaacagtaatgggatgcacaatgtctgttacgccaatggttttaatccggatacaacggattttgacgagctctgggaccggatgcgtgatgcctgtggcggagatgatttttgcgaatccctggagctcgatccgaggtcgattgaacttctcagccgtaccaaaccctgcctgaaaattatgctttcagagacggaactggaagttattgcagggggacagaaatag

SEQ ID NO: 95975 - DNA, 450 bp, Enterobacter aerogenes
atgaaattttcagcagaagaactcaacattatccgccaggcggacgccattattgccggtaaaattaccacaacggattttatcaccggcgccgacgccgcgcgttccttactgcggtttcgtcttgctgcagaaccacgcgaatcattctgcgcgttctttcttaactgccacaacggcgtgattgcgtttgaagaactgtttaagggaactatcagcagcgtcaccgttcatccgcgtatcgtcctgcaacgcgccctgcatcataatgccgccgccgtggtactggcgcataaccatccttccgctaacactacacccagccaggctgacaagctgatcaccgagcgtctggcgcaggtgctggggatggttgatgtcaaagtcctcgatcacctgattgtgggcggcagcgatatttactcttttgctgaacatggtctgatttga

SEQ ID NO: 95976 - DNA, 267 bp, Enterobacter aerogenes
atgggcaataaatataccgtaccgcttaacgtgggcgcgatccgcgaaagctgtttccgtcccgctgataaatggaccccgccgacgggggatgaactccgctatctgctggaaaatgtgctcaacctgagtcaggagggactggcgcgacatgtcggcgtgaacggcagaacggtgcgccgctgggtgaacggagaaagtgacatcgcgtattccgtctggtgcgtcctttgcatcgatgccggcttaccgccgatctggaaatag

SEQ ID NO: 95977 - DNA, 1284 bp, Enterobacter aerogenes
atgaatactgataactattttttcagagtcccggccacacgcggaatacagggcggcatagaacaatacatgctgacggttcctatggtcgtgttacgtcgtattcttgcaatggacaatgatggcgatgttatggatcgcagccagcgagaagcgaacaaaacgcgggccaaaaaaatacggaattatgttgccggcgcaacatcaaaacgagctccctatattttgccgtcaattaccggaaatattgatagtcatgttgaattccttcccagcgaactctcgccggcagtggggattcttaaaattccgatggacgctgatttaaaattattcgatggccagcaccgtgcgctgggtatttttgaatttgtacgcgattattccaatacggaagatacgatcagcttgttgcttaccgttggcctgccacttgagttacgccagcagtttttcgctgatattaataacaacgcgagcaaaccggcagcggcgatcagtatggcatataacaacaatgatccggtcaaccagctggcaatgcatctggcccgaaccgtcaccgggctggcgggcacagtggattttgaacacaacgtggtcccggcgaaaagctcacggctgatcagctttaaagcactgaacgatgcgacgaaaaaaatgctcaacctgcgggccaacagcattccctcgacgcaacagcgtgatatggcagaaaagctctggactgcctgggcacaggcgatgcgctggaatgatattgcccaggatgatatcgctgcggagtaccgtcaggaggcgctgggactgcatggcatcatgataaatgcgatcggtatggcaacggccaggatgttacggcacagaacacctgaaagcatcgagaaccttctggcctgtgcggaaaacggagacaacggttttcattatcgggagtcgtttgtacctgagtgctgggaagggaagtgtgttgatccggagactggcaccattaaaactgaccggcgggcgcttgaagcaacggctgaagcgctgcaaaagctgatagacccgttcgcagatgcgctgtggttgcgtgcttatctgccagttgaagaggcgagtgatacggcattactgaaatatgctgctgacatcgagagttataagcagcgcacagccgtgccgatgatcaatatcgtggagaagctgaaggcgctgggtgacggcgaaccgcagttcagagcgtcggtgctggcttcccgtgaggggctaagccgctatctggccggggctgaaggctga

SEQ ID NO: 95978 - DNA, 180 bp, Enterobacter aerogenes
atgagtaaagcactgaccccctcccagcttaaagctgaactggaaacgcagaaagatgcgctgctgaaggcgtgcctgtatgccctcaacgaaatccctaaccgtcgtttaagtggcccgtatgcgtccacgtatgcgctggccgagcaggtcagtaaactgcttcagcgctgcaaataa

SEQ ID NO: 95979 - DNA, 861 bp, Enterobacter aerogenes
atgtcatctgaaaaaactctcccgtcggtcgatctgatgtcctgccagcatggcggtgaagtgatcccgtccatagctattgagcgcattatctcgttgcggaatgaaggtattcgcgtctatctcgacggcatagacaagctgcgaaaagcgcgcgatctgatgcagcaggccggaggctgtcagtacctgtatgactacgacaaagccgtagagagcgcgatcaaatggagcgacaccagaccagaccaggccgaaacggctatttcccgcgttatcgacggaaaaatctgggatcggctgatgtcggaaaccggcatgtatacgctgatgagcaacaaacaacgtcaggaatgggatcggcaggtggcaggcgaggaaatgccgccgataacgctggagaacgttatgagtacgttccggcacctgaacgcaagcaaggccgatactttcacgcaagggctgattgatatctttaaatccctgtcgtgggattataaaaccaataacccctgcatgtttggcaagcgtatcatcatcgcgccgttgctcgatgtctggcgcagtggctgggtgcgcttcagctcagacgggcacaccaaaattgacgatctggcgcggccgttctacgtgctggacgggcgtaacgtgcctgattaccgcgtttctgacggtgccaaactggatgcctttttcagtgaaaaccagttcaacggtaaggtgttcgagtgtgattacttcagcgtgcgatattacaaaaagggcagcgcgcacattacgtttaaacgcccggagctggttgagaagatcaataatctggttgccagtcactatcccggaatgttaccccctcgcgtgtaa

SEQ ID NO: 95980 - DNA, 339 bp, Enterobacter aerogenes
atggctattcaatcccttcagttccgtaacggctccgtttctcttggtgatgtttttgtttccagctggggttatgagcagacaaatacctgtttttatcaggtgatcgccctgcgcggtaagaaaaccgccgtactgcgccgcatcgctgcgcagcaggtgaaagcagacagtgcaatgtctggcgagttaaagccggtattgaacgactttaaaggcgaacccgtgacccgtcgcatctgtgaaaaccatgagcatccgtctgtcagcattgacgagtacgaacaggcttataagaccgatcctaacgaaagccatttttacagcacctggggctga

SEQ ID NO: 95981 - DNA, 231 bp, Enterobacter aerogenes
atggcggaaacagtttatcaggcgcggaggcgtttttaccttctccgttttcggcgcagtcgtaacccggacacactggaaaaaatgtacgaatccatgcgggatcgtggacaggtgccgccggaggacaccgaggcttttgaggctgccgccgaccatcgccgcgcagagctggcatcgggacgcatctgggataagatcccgccgcatgtctggcagtatgtaaaataa

SEQ ID NO: 95982 - DNA, 411 bp, Enterobacter aerogenes; identical to SEQ ID NO: 21627

SEQ ID NO: 95983 - DNA, 306 bp, Enterobacter aerogenes
atgtcccagaatgaagcctattacgacacgctggccctgattgaaaaggggcaatggtgtttcggcagtatggacgaagaaaacgaagagcgggcaatcaaggccgctaaggcgctggcgctgtttgcgcgcctgaatgagcaggactgcgacggacacccggtttccgaaatcatcgttgattttatcgctaacctgatgcacctgggggaagcgataaattttcgtgtgctcgatgaagaaagcgcggtgatcccgttggtcaggatcgccgccgtacactttaacgctgaaacaaagtcatag

SEQ ID NO: 95984 - DNA, 441 bp, Enterobacter aerogenes
atgtctactgaactgaatcaacccgccatcactgcacgcattatccccaataaccgccgcatggcctttctgccacgtctgttcggcgcctggtatctcacaggtgaggccggtgtctacaacctcgcacgctctctctgcgccgattatcaaggcggttcctgggagttcgtcgaactgtcttgcggtagcggcttcatgtacccactgagcgcagagcgcttcacggtatcggttagcggtaactggttcgaaggggaactgtccgcagaagctaccggtatcgtgctgaccctgttcaccctgaaccacatgatctggcacgcacatgatgaaggctatcagcacatctgcgacatgctgatcacccagcaggaaaagctcaaattatatgccgaccagcacgccgaagccggtttgatttaccgcgcgattgactga

SEQ ID NO: 95985 - DNA, 285 bp, Enterobacter aerogenes
atgttaacactaactgatattcgcgccagcaatacggtgctggttacggaatttggcggcgtgcgtgctgtgcatttctgtctgcatgaaaaattaagcggtagcgacaacgatctgtggtttccgcttgccaatggagccgacctgttcgaggcgctggaaagcattatgtgcatcaattttgccgctgctaacgttgtctcgctggagttcctgcggcagaacgggaagtgcaaagactaccggatcacctacaacaaggccaaattcaagccattaggttag

SEQ ID NO: 95986 - DNA, 222 bp, Enterobacter aerogenes
atgaaagaagcagaccaaaaaaaagtgaatgccgtaatggcaattgctgattatctcggtgtgaaaaatcaaatcgaggtgatcgaatactcagccgaatcagtgcaggttgagtggcgaaatcctaaaacaaaacagcttattcatcgtgattacacttttgcaaattcctttgtaaaagactttgaaaaagccctgaaatcgaacgtgaagttttactga

SEQ ID NO: 95987 - DNA, 435 bp, Enterobacter aerogenes
atgtggaaacgtggcgaaaacaaagtgattctgatggggcgtgctggcaaagatgcagaagtgcgttacaccccaaacggaacggccattgcgagcctgacgctggctacagaaatcagctacagcgacaacgaagggaaggagcaaaaagaaacggaatggcatgatattgtcatttttggaaagaaagccgaagcagctgggaagtacttcaaaaagggtatgatgctgtattttgtcgggcgcattcgtaataacaaatggcaagggacagacggcaaaatgcgcagcaataaggaaattgtgatcgataataacggcgaaatgcagatgctgccgggagctgggccacgtaacaccagtgcagaaggccagggaggcattgaaaatcatgatgaaccgccgttcccggatatgaatgattacccgcagtga

SEQ ID NO: 95988 - DNA, 312 bp, Enterobacter aerogenes
atgaatatcagtgaacaatatcgggtggcggtcgtcagtaccggccatgtaaaaaaagaagacgcggaactactggacaaggtctgtaacgatgacttgtccggtcaaggtttgttctggatcgagaaaaatcgctatgggtggatattgcgtatttctgctactgaacaatggcgagtggaattaaccagggcggggatcagtgcaagtgctttggataatatagccgcgttaaatggtgccgggttcgactggatttggtttgaccgggatgcggaacaggtgccagaactgaccgtttgggagtggtaa

SEQ ID NO: 95989 - DNA, 537 bp, Enterobacter aerogenes
atggcggccttatacccttatgaggtttatacccttattgtgtcagaattaatcgtaagccattttaatgatgtcgctatggtatatccgggaagcgaagaaattaaaaagaactacgacagtgaattaagtgctgtacaggtagttaatggcatcagagaaaaactgattgaagatggtgttatacagtgcgaacagtgcccactgctatccgagtgggatgagaacaaggttatcaaccagctaattaaagattaccgcctgattctcaatcgtgactatgaactaaaccgtgttcgtcagcagctggccccggagctgatcgcacagatagaaaactggaaagagcagaagtattccgattctgcgaaggaatacgaggtgctctatgaaaccatcaacatcaacggaaaggaggttacaggcaaactaaacgtagttgcagtaagtcgctttgatgctgttttcatcgtagggcagcgtcacgctaacgataactttttggttctggatgtgaaggaggtgatgaatcattga

SEQ ID NO: 95990 - DNA, 141 bp, Enterobacter aerogenes
atgccattgtggattatacactatgctgaagatgtcgcaaacggagtgcaaacaaagtcgcatccgatgaacgcagcgcaatgggatcacttccgtttctggttggcagtgttccggcggattaaagaagccgcaatgtaa

SEQ ID NO: 95991 - DNA, 366 bp, Enterobacter aerogenes
atgcctgcaaaaaagaaagcattttatagcagtgaggacatcggaaaattcaaaagcattctcgacgacttgcctgatgtgacgtcggaaaggcttgagaaaaagcacgtactcgacgagcttaagtctgacattaagaagctgaaagattcgaaaggatatgaagataaagagatactgaaattcctcaacgatgcgggtttttcagacgttacattacgtgatatcaaggacattactgccggacgagttggaaaaaaaagaaccagcaacagccgaaaaaaaatcactggagttgacgaagagcagcgcacacaaaatagctctaccgctcagaatcctgacgcttcaggtccgcagtattaa

SEQ ID NO: 95992 - DNA, 318 bp, Enterobacter aerogenes
atgagccgtagcgagagcagaaaaacagacgatcgaatccaggtgagatgttccacagaagtgaaagctaaactcaccgaaaaggcccatgaagcagggcttagtcttagtcaatatcttatcaaatctgggcttggaaagcgcattcaatcgaaaggcaattacaatgcacttgccgctcttgtaaagataacagcccttcaaaaacatctgtttaacgaaggtgccggagttcatagcaaggagtattcagagattctgatcgaggtcaaaaaggccgcacagaaactgcaacaggagatggatggtgatacctaa

SEQ ID NO: 95993 - DNA, 1980 bp, Enterobacter aerogenes
atggtgatacctaaaatcattgagggccgaagggacaaaaagtccagctttggtcagctgattaagtacatggcagacaagccgtctcaggagttgactgatacagttcagcctactcctgagacggctttggctgttaaatcagatatgttcgaagggttaaacaattacctgacccgtaagcagaaagtgatcagcacaccggtggatgttgagccaggtgtacagcgtgttgtggttggtgatgttacctgccagtacaataccttctcgctcgatggtgcagcacaggaaatgaattcagtttctcagcaaagcacacgctgtaaagatccagttatgcactatgttctctcatggcctgactatgaaaagccgaatgatgatcaggttttcgattcggtgaagtttacactggcatcgatgggcatgtccgatcaccagtatgttgctgccatccaccgggatacagataacctgcatgtgcatgttgctgttaaccgcatcaatccccagacatataaagcagcctcatcgagctttaccaaagacactcttcatcaggcgtgccgcttactggaattgaagaatggttggtcccattcaaacggtgcatatgtggttaatgaccgtcaacagattgtccggaaccctcacagcaagaaagagcggggcaactggcgctcactcgatcgcatcaacaagatggagaataaagagggggttgaaacgctctatcgctatatcgttggtgatgaacaggtaggcggtagtcgtcaaaacttgatccatgtttcagctgggcttcgtgaagccaaaagctgggatgatgtgcataagacatttgcagacatcggtcttcgtgtcgaaaaagcacaggggaaaaagggctacgtcattacccacgaacatcaaaaccagaagacggctgttaaggcgagtctggtatttaacaaggcgcaatataccctgaagtcgatggaagagcgctttggtgaataccagccttcacatattgaaccggccaaagtatcggtatttaaaaccgcatatacccctggtgcttatcgtcgagatgccaataaacgtctgcagcgtaaaattgagcgcgcagaagaaagaatgctgctcaagggtcgctatcgcgcctaccgaaacaatttaccgatatattctccggataaggatcgcatcgccgatgaataccggaaaattgcccaacatacccggttggtgaaaaataacgtccggcattctgtttcagatcctcataccagaaagctgatgtacaacctggctgagttcaaacgcctgcaggcggttgccaatctgcgtcttagcttgcgtgaagaacgcaacggcttcagggcggctaacccacggctttcttaccgggagtgggtcgaacaggaagcactgaagggtgataaggcagcgctcagccaaatgaggggctttgcctattcctccaggaagaaggagaagtataaacagcaactggttgagcagatcgggttcaaccgtacctttaacgccatcaccagtcatgatcgtgatgatgtggccgtaatggcctcagcacgtcatggtgtcaagccacggcttttgaaagacggtactgttatctttgagcgcgacggtaaaccggtagcggctgatcgtggtcatattgtgctgacagaaagtaatggaatcgacaaagagaaaacggctgaccttgcaattgcattaacgattgctggtaaagccaaatctgttcgtgttgatggtgacggcgagtttaaggaactgtgctgtaatcgtatcgtcgatgcagctgtgaaccacaatcaccctgtcgcgcagggcattaccttcacagatgccgctcagcaggcgtatgctcaaaacgagaaacatcgtttgattcgtgagcaaaataatagtaaaaatgaaatgcaattcagaagtgaaatcgacgacaaattcaatccgaagtaa

SEQ ID NO: 95994 - DNA, 501 bp, Enterobacter aerogenes
atgaaaatcaaaatgcaaacggtcctcgcggccgtttctgtgttagctcttgccgggtgtgcctctcaaagcgaaaaggaaaaacaaatctctgcacagcagctggtagatcaggaattgcgtgagcaagccattaagataaaactcgcacaggatgagctttaccaggctggagccattaacaggacccgttacaaattccctaccattatcaatgcaaacagtcagtatgttcgtgtgagctggcagggtgatgcttacgaattactggagcaactggctaaacagcgtggccttcaattcaccagtcaggggatcaagttaccgcttccactcaatatcgatgttggtggttcgaaggttacgtttgaacagttgctgaccctgatccgacaacaaacgcagtaccgtgccaccatcaaccagaaacccggtgaactgcagctgctttacctcacaccatcgaagaaaggttcattcctcagagggacccgcccatga

SEQ ID NO: 95995 - DNA, 780 bp, Enterobacter aerogenes
atgaaacttaaactgatcgtgcttctgacgttaccgctgcttgctgcgaacgttgcacgcgcggacgactccgatgttaaaggcctggattactacatggacccgccaagccaaagtgacgatgaggccgatgttactggcagtatgctaaacgacgcagcgcacaccattggatttcgcggcggaaaggcagaacgcgctaaagaaattcgcgccgcgctggaaaatcagcgcagcaaccttgattacatgtattcgttccagccgctgatctcttctgaaggctacctgcctccggtcattgctgaagctaaagacgttgcacacattaccaatgagcaaatccgaacggccaaccgtgcctatgacattgtggtgccggcgcgctttgtcagtaacccaccgacctggaaaagctatcttctgaccgggctgatggcgcagcggatcgaattgcctgaaccggctgcaatgccgaaggacgggaaacaacgtgatatctggaaaaaagctgtcgcgctgggctggtctgacggtcgccaaaaagctgatgagatattcactgctaatttcaatcgcctcacacgggattacaccggcatgttgcgctacagcacgctactgcagcagggcatgattaaggctccagtcatcacacagcagcagcaaacagttacaggggataaaaaccgcctcatgctgggcgataaaacgaaacgtatgaagcagcaagctgagtttgacatcaacaaacgcagctggaaaccgaccatacgttaa

SEQ ID NO: 95996 - DNA, 1164 bp, Enterobacter aerogenes
atggaagcattcaattttggtccaacgctgacgccccagacgctggaacgttttctcgtacactgctcaaacaatgaagtgtccgatattctgttgcagggcggagataaaatctgggtagaacgtcatgggcgccagttgcccatgacatcttacccgctcgacaacctggagctggaacgtaccgttgataaggtgttcggtcaggagatcaaagggacgctgaaaagtgctgcggtcgttaataccgctatccagctaagaggtgatgaagcgggcacgattggactcggccgcggcgaaacccgccggttccgcgcgaactttactcaggccgatatttataaaacagaagcggcaatgtctctgacactccgtgttctgaatgaggttattcctcagcttaaacaaatgggtattgagccggacctgtttaattctctgttgccggctgccggcctcggactgatatgcggcgagacgggatcgggcaagtcaaccctgatggccagcatcttccagtattgcggtgaaacgtaccaggaccggaaaatcatcacggttgaagatcccatcgagtatcgcctgggaagtcgagactggattgcgccggcgccggcacagtcacagattgggcgcgatattgattccttccacaattttatcactctctccgggctccgtcgttctccgaagattatgggggttggtgagctccttaaccgcctgtcatttgaagctgctgtactggcaggtaaatccggccacttttgtcttggcacactgcacgtcaaaacggtcggagaagccatttcccgatcattgcagaactatccgccggaaatgcgtgaagctgccgcctttgacctgctgagtatcctttcttacatcatcgtgcaacgcttgcttaaaacaaaagacggccggcgcaaggctgtccgtgaatatctcgtcattgataacagcctgcgccgcaaactctatgacgttgattacagcaagtggggccgctacatcgacgacctgttgatcgctgaaaaccgcagtctgattcagaacgcctgggcaatgcaccaggaaggtttgatcgacgaagcggaagtcatcgaggtcgcaggatatatggactatctggcgttaaaagagggcaagtatggacattaa

SEQ ID NO: 95997 - DNA, 261 bp, Enterobacter aerogenes; identical to SEQ ID NO: 83582

SEQ ID NO: 95998 - DNA, 3303 bp, Enterobacter aerogenes
atggcgaaacctgaaattgcaactgaaagaacccgtctgagtattccctttgacgatcgccaacgtgcaatacgtgcggccggcaaactggctgatggcagtaatgctctggactacgtgaaggaagaaaaggtgtggtatgcacagccgggggccaacctgagccggctgaaagagtggatttttgaccccaataaagtgatcgaagaaccgcccctggatattcaggccattgaagatgaatttacggcgtggcttgaagagcgcggtgccattatcaaagaccccatagagttcgatggccagaagcattatgtcgataccgtggacggtaaagctggttcaagaaagggggtgtatgccgcctttctggatggccgacctgcagggtggtacagggactataagaacggtggtgaaattcagaaatgggtatctaccggcgcagcccctaaccctgaacaaatggccatgctccgtgctgatgctgcggcaaggcgtgaacaaagagctgcagcgcaagcggataagtttgatcagaccgctaaccggttgatggaagaatataaccggcttccggatgccacgggagatctggcatacctgaaaaacaaacaggtcattgccgctaacggccttaaagctgatgagcggggcaacgttgtgatccctctgtttaatgctgatggcgagttcaggacccttgagcgcatctggtccgacggtagtaaacaccttgaaaaagacggccaggcatgggggagttttttcgttgtgggtggtcaactgaaggatggtgacaacctgctttatgccgagggatatgcgacagcagccagtatcagcgaagccatcaatcagcctgtgatcatgacggttaatgccggcaacatggtggaagttgctggccgcctgaaagacacctttccaaacagcactcattacttccttgctgacaatgacatttataaagacgagaacgttgggctagaaaaagcgacagaagctgcagagctgactgccggccatgttctggtccctgcctttagcaacccgaaagaagggcttactgactacaacgatttgcatgtctctgaagggctggagcaagtcagattgcaggtagaaggagccattaatcaaatgaacagggtagacactatgccgactgataacccgaacattactgacgttaatcacagctcgactgacagcgctgccgttgcagatcctgaaaaagccgcgccggtggccagcgcccctgcagctgccgaaccggaggaaaccgcgccggtggccagcgcccctgcagctgatgaaccggtggaagccgcgcaggtggccagcgcccctgcagctgatgaaccggtggaagtcgcgccggtggccagcgcccctgcagctgatgaaccggaggaagtcgcgccggtggccagcgcccctgcagctgctgaaccggaggaaaccgcgccggtggccagcgcccctgcagctgctgaaccggaggaagctgtgccggtgtccagcacccctgcagctgctgaaccggaatacaccgcaccaacagatcgagacggcgatgatgaagagagtaatagcgccagtgatcttgaggcgtatgccgctatgatggcctttggcggtgaaacaactgactccgctcagcaaaagcctgaaaggatagcgcccagcgaatctgtagctaataccgccccggctgaaaatgaaaccgaggagaagaaaaaaacaaacgaagaactggaaaacggcatacgctgggcaaccaacgataatgcagaaacgcccccaaaagaacgtatagacctggaagggttaattgcccggtttgggtacagagcagagaaagactatacggcgtatacgcttgatggacaggatgcgttttacgattacggctcacatctgcgtatggctacccctgaagccagccagagtgacgagatgatcctggcggccgttctaaccgcggataagcaacatcatcgtggtattgaaatcaccggcagtgacgaatttaaagagcgagtgtttaaccttatcagtgaatacaacattgaggtgaaactgactaacccagaacaaagggttaaattgctcgaactcaaaaaagcaaatgaaacagcaaaagaaacggcaaatgaaaatgttgctgattcaaatgcgaataagcaggaaggggcaaacgaaaagacaaattcatcagttcagcagaatggaatgcgctgggaagaatcggcctctgtgcagccgaagaagcagaatgcatctgatactcaaaaggaagataaagctgcaggtgaaccctgggagaaaggcgttatcgtcgcgcatggacgtgctaagtatgagtggaaagaagatgaatccatgaactactttgtcaccctcaaaaatgaacatggagagaagacactctgggggaaagaccttgagagagcggttaaagatgctggtgtagacacagaacgtcttgttacagtcagaaagctgggatttgtggatgttgaggtgaatgcacctgtccgtgatgaaagcaacaagatcgttcgttatgaaactatccagaccaaacgtaatgagtgggaagtaaagcctgtatacccacagccaacagcagggaatgaacaggcctataagccttctgaactggttccgtatgatgctgcaaccttccagaagctccgcacaacaattcagcagattaccggtgttgatctcagccgtgaggccgtgcctgaaaaagaactgtactggttcttgcctaatggtaagccagctccagaaagcatgacaaagcccacaggctataaactccctcaagagtcaaaaaccgcgggtacacctttgctgatcgcaccgcataaaaaaggcgaacgcccagattatttccttgttgagtcgcgtaaaggattcatgcaggggatcgcaaaggataaggagtccggtgagtaccatagcgtgattggaaaagtgaacaagcgtattgataaagacggaaactggaaaacgtatatgactctttcagcaatcaataaaaatgccgaaagtggaattgttttgcatggttatggacatgtagatcaggggggtaaaaatttgctttacaaaaacacaattgcaaatgaaaaacagactcagcatttacaagcggcctcagatgaggtaaaaaacaaaacagtaatgaagcagctttttcatccttcaaatgctgcaaaaagaaaagatgatgaaaggagagaacagactcatgcaccagtcgcaaagtcagcgcctcggccataa

SEQ ID NO: 95999 - DNA, 513 bp, Enterobacter aerogenes
atgcaccagtcgcaaagtcagcgcctcggccataaaacaaaaaccctactcgttgcagtagggttttcctgcatttctgtgagctcatttgcggcaacacagacctgtgcagcatacgaactggcaaaagctggtgcagatgctgcctataagcaggaagtggaaaggattaacaacgccgcaaaaagcgaatccagtacgtctgattctctcggacagtgcctggggtcgctatcggtatcacttaaaatcccacagtttccgtctatcagcgacattattgataaggtgaaggatgaggtatgcaatacggttaaatcgaagattaatgagaagtgggggagcctgactaatacgacgctggacccgtggtcaacgatttcatcccgactgccagatacgtcaggtatcctgcccaacgcatcttctaaaaatgtgcaattaaacaatccggcagctgcgagtggaagtggtgaggatgcaaacagtgatgcattcccgttccatttgtaa

SEQ ID NO: 96000 - DNA, 198 bp, Enterobacter aerogenes; identical to SEQ ID NO: 21570

SEQ ID NO: 96001 - DNA, 411 bp, Enterobacter aerogenes; identical to SEQ ID NO: 21571

SEQ ID NO: 96002 - DNA, 714 bp, Enterobacter aerogenes
atgaaaacacaaaatggtgaaaatattatggatcaaactgactcggatcaaaactcagtcgttgatgatgacagcaacgcccttgctccagctctggctgaagagagtaaccgaacggtacaagaaatcgtatcgaaacatggtttaaaagtaattttgattcaaacgctaatcatattagtcgcaatcattatcattggtcttcagggttactggcttcaccagaaaaaaaccaaatatattgcaacgaatgggggcatgatcacagaagttcacccaaccgatgaacccgcttacacggcggaagaggtgatggactttgccaaccgtacaatgatcaaatcgctttcactgaactttgtgaattacgaaaaccaattaaccagcgtccgcggcgattttagcgctgaagggtacgttagtttccgtaaagcgctgtccgatagtgggctgctgaaagagatcagtgaaaaacgtctgaacgtaaaactttccacaactcctggaaccctgatcacggaaggtcttatccgtggcaccaaaacctatgcctggcaataccgcattccggtgactgttcagcttgttgggcaggctcaggactacagaccgcaaccttacgatttgatggttcaggtacgccgcgtaaaagaagacgaagatccacggggtattcaagtagcacaggccattctcaaaccccggaactactga

SEQ ID NO: 96003 - DNA, 159 bp, Enterobacter aerogenes
atgagtaacctgctgctgtggtggaggaatctgcggcatgggtgcaggaggcagtgcagtagttggctgctgttgggcctgtgcctgtggttgttggccttgcgcctgctgctgaccttgttcctgtgctgtttgctgtggaggctgttgcacctgtga

SEQ ID NO: 96004 - DNA, 432 bp, Enterobacter aerogenes
gtgcttctgaaggggctggctacgccggtcattattaacgtgaagggggcagaaccctccgttaaatcaaaaaccgttgatgttgattatcgtctggatctccgtatcccgaagcgcagtcctgacacaccggtttataccgctactcctgagaaaaaaatctcactgtatgacaagcagctgcagagcgtgctcgatggcatcccgcctgaagatgctcagcggttgaaacttaaaaacgcgccagggagtaccaaagtctggcagatcggtgatgagctctacgtcagaagtaacatgcagctgcaggatgagtttgaaaaaacgctttccgctatcgatggcacacatgtttacgtgctgccggcaacaccagtgctgactttttcggttaacggtcaggcgcgtgacgttgaagttgagctgaattaa

SEQ ID NO: 96005 - DNA, 1350 bp, Enterobacter aerogenes
atggctacagataaaggtaaagaaaccagaaaaatgatgctctacgtcggtggcgccgctgcagttgtggcgcttctgggagggtactggttgtttggctcatcagatgagccggcaacgggcgggtcgcaggtgaaggcccaggggctggaagggaaaactggcagggaaaaagctaatgatccccaatacaacaagctgctgaatgagtggaatgctgataactcagaaaaagcggctctcacgggggatagtttcatatccacgttgtcagccagtaacccggtggccgttgattacggcaccaaagcaccgccaccaaaatattcgtgggaatcgtcagcaaaacagtcgggcgataacagtaaggctaatgatgctgagcagaaagagcgtgagcgtcaggctaaagctgtggctacgttactgcagaaaatagaccaggccagaacaccggttgtcacgggtgttgctcttgcaacccctctgggagcagagggtaatgacaagaacggcggcaccttctcagggtggaccgattcggtctatccgcagaacaaaaagccggatgctgaaaaacaacagggggcgaagaataaggtcaaagataaaggagcccggcttgtatcggcttacacgcttgtgccggcagtaatggatacggcgatggacagtgacgatcagaacagtattgctattgcccatgttccaactggagcgcaggccggcgccaaattctattctggccaaaaccgtcttgccggcgatggtattcgaattcacttcaccggcatggagctgaacggagtgcagtgtaaggtcgatgcgtatggcgtggcttccgactcgttgcgcgcggccgtttcctcaaatgtaaataaccgctggttcagccgtattattctgccggctgttgctaacggattaggccgaactggtcagctgtatgcggacagcaattcgcagatgattatcactgacggcgggaatgcatatcgttcaactggtacacctgatggcaaagcggttgccggtaccattattggcgggatgggtgagcaagcagggcgtgtcctggccgacgatgcagcccgcctgccgattaagcaggttacggttgaccgtaaccaactcataggcatccagtttgtcgcgcctgtgtatgaaagcgactgtggcgagaatatggaaaatgcttctgcagagcaggtgcagcagcaagcaactcccacactatctagtgtgcaacctcagcagatgcctcagcctccggctcctaattaccctcagcaaaactttccaagctaccccggctacgggtatggcaccaataacccgtattaccgttaa

SEQ ID NO: 96006 - DNA, 705 bp, Enterobacter aerogenes
atgaatctgtttgaagatgacaataaaaacgaagcagctcctgcccaggaaccggtgtctgctaagcctgctgaaaagccaaaaccgacagtgacgccagcagcaaaagcgagcaaaaagccgcttaatatcagtgactatgcatggattggtggtatcgctgtcatcgctatcctgcttttagtctggttgtttgggggctccgatagtgatactgcgccagcgacggggaatggggcgatccagtcttcagcgcaacgtccgcgcgttcagtctgcccctgcagggcaggattctggtgacttccgcgagcagatttccgggattctgctgcagcaaaaggaacggctggacgcgatagaatcaacttctaaaaatggaatgatgatcctttccagtcagttacaaagcgctaatgaacaaattaaaaatctgaacaatcaggttcaggaactgaaaatgaaagccgctggttatgggccttcatttggtaatcagagtggaacaatttccggtgcaacgtcacaggcattacctttgttgagaggtttttcaattaatgatttatctggcgatcttgcttgggtaaaatacaaaaaccagacgtatgctgtgaaggtcggaagtcaacttggcggagtcaccattacaggtatcgatactgaaaatagaatcgttacaacaagtaaaggccttatccgctaa

SEQ ID NO: 96007 - DNA, 531 bp, Enterobacter aerogenes
atggatttagaatcggtattaattcaggttgctaacggtggtcaggaaccgctgacaaggctaatcataggtgtcgctgcaatcgttgggatcattggtgttattggatatctgatgagcctgcggaagcaggccaggcattctaccaaaggtgttgaagttggcagaatttttgccgggatcatcttctgtgtatgcctcatcacgctgaaagcacagatgaactcaggcggtgccactttaggatttggcgatgtcagtttcggacccgtcagttatgcgagcgaatctacgtttggcatgggagccgcagcagtcaacgcagtgctggggattgttagaattctcggtgcatactttttttacaggggtattaaggggttgaaagactcttaccttgagggccatacggagctgtcagcttcgggcacgagaggggcatccattgtgaaaattgtatgtggactacttctgatgttcgatacacaaacgctcgatgcgttgcagagcacattaaacattcactggtaa

SEQ ID NO: 96008 - DNA, 390 bp, Enterobacter aerogenes
atgaaaattgttaaatttatcaaagacaaggcgttatctgcatccatcgcagcgtatcagctgcgcggaacggtagcaaaatcgttagtggtattgccgctggcattgctgagcaaagaggctgcagctgaaacgactatctgggaaaagatcaataccttcacggaaggtatggccagtacccagcctggtctgattaccgctggtaaagtggttggtgttgtctgcttcatcgtaggtcttgttgctctgtggctcaaaaacaaacgcgggaaagatatcagtggcggcttcatcttctggtcaatggttgttggagcctgtctggtcggcctgaccgcatggatctcttctgttggttcaactgttggtgttgacgcaaccctgtaa

SEQ ID NO: 96009 - DNA, 495 bp, Enterobacter aerogenes
atgaaagattttaagctcaccaggaatgaacaacctgccagatgccatgtgtgcgggataaagagcaaagatgttttctccctcgcagaagatggacagaaagagagaatgctttgctctgtatgcctgtcgctcgaacacccggagaaaatgaaactagagactcaaaccggacttctgctgaagagaaatacaaaccgaaaactctacagcctgttgtttcgttcaattgcaaaggcggaaaagtcaacggacgattcttaccgtgaaaaggcacagaaacttaaacagatattgctcagtacaactgacgtagttctaaacgaaaccggcagtgatgatggatacgatttactgcacctgataaaaaaacaccatcagttacttcccatgaattttgacgatgagtttgtcacttctgtcgcagagtcagacgaattgccggatgtaagtgactggaatgaaatttacaagggtaagagaggttttaaatga

SEQ ID NO: 96010 - DNA, 3051 bp, Enterobacter aerogenes
atgatttctttctttgaggatgtgatcgaaggtatctcacgcaatcttacgtcaaatgactcgttaaaatactgtgatttgacaacggttgtagggcttacgtcgcaggatcgcgttgagcatcctgaaatcagggctccgtacatactgaccacgaagaacaacgattttcttaccgttattgagattcagggcgctaaatcatcgtttgacgagaagtcgtttaatgacttcatcatgcacctttcaaactcgttgtcgaattcctttattaacagtggccataagctgtctgtggtgtttgagcgcgactttaccaagaaccaggaagagctgaataatgtttataaaccgcaggtagcagcaatagagcgcctgcagatagacattaaagacctgatcgccgatgacgcaaaaaaaatcgctgcccattacagccgtgaacgcgcttacatcgtgctgtatacctcgaaggggatgattgcgaaggatgaacttaaaaacgagcaggcaaaagctgccggcgttatgaaggatatcccgcagactcgcttcagtcagaacccaatcgaatttcagcttgaaggtttgaagatcacgcatgacgcgatgctttggcggctgattggtatgcttcagggggatgatgagtcggggatggggcttctggttgatgtcctcgatgtcaaacacgccggcgcaatgatgcgtcagatgctgttccggaactcaacatcagaaaactggtaccctcgcacgccgtttgaccaaaatctgcgagtctatggcgctccacggaaaggcaatatcgactcagtgctgccgccgcggctgaatatccagatcatggaaggggaactggaagaagatggtggcctgatttactgcgatggcaagtattacggttctgttgcccttgagttgccaccacttcaccctgtcaaatttaagcagttattcaacgcgattaaccggaaaatcccgtaccggataaaatatgactttatgggcgggggcaaaaaagcattgttctggccatcagtgatcgtctctttccttcgtttcattccctcactcggtactatcgcgcgtgatatggattatgtcggggcccagagcgaaaccgatccaacggctatcatggccatcaactttgccacctggggtgacactaaggatgaagccaaacgcaacctggcggctttaactaaggcgattgaaggctggggtgtatcaggtgtgtccaagacatatggcaatccaggtagcgcactgattgcatccgttccggggctgacgacggccacacctggctcattgcattatccgccgttgagtgaaggcttgcggatgttaccttttgaacgtccggccagtccctggcatggtaaaggcaatatcaacttcatcacgctcgatggcaagctgttcccctatcaaatcgccagtcccctgcaggagaaatttaccgatgtcatcaccggtgttccaggttccggtaaaagcgtgctggccaaccgccttaacctgagttcgatttaccgggctgataaaaaactgccttatctgactatcattgataagggctacagtgcaaaaggtatcgccgatctgattagcgctgagctgccgtcagagaaacgtcaccagattgccagtatcaccctgaacaatgacgaatcgcactgtattaacatctgcgatacgcagttaggttcaaggtatctgacgcagtttgaggaagtattcttaaagcagatgcttaacgcattctgtattgatccggcaattggccagccgccagatgcaatgagcgttggccaaatcgtcagtaaggttgtatcaaacgtatacaaagcaaaagcgcattcaagtgctaacttgtttaagtataacgacccggtgattaatgaagctctgaaagaatcaggtctggataaagagctcggtgaagactggtttgaaagagctacatggtgggaagtcgttgataagctgtttgccaaaaaatatcttcatgctgcgacggttgctcagcgttatgctgtgccaactattcacgattttattgctgaactacaaactgaatcatttaaaaaccaatacgctgacgtaaaagttaatgggagtgagcctgtagtaggcttcgttgcacgttgtttccaggctgcagcagctgagtatgccattttctctgggatcacggtttatgatttcagcccggagactcgcattgcgatcctggatatgcaaaacgtcctcggtgacagaacgacacctgcaggtaagctcaagtccggcattatgtatctttttgcgcgccagatggctgtgcgtaactactacctgcctcagtccgcagaaaccttcattcctgctttaccggagcagtacagggcatatcaccaggcgcgcatcagggagctttcagaagaagttaaacataccttttatgatgagtgtcataactttgccggcatcgactttatccaaaatgcgctgaataccgctgaccttgaagatcgtaaattcaacgtccgtactgcgttctcgtctcagtatctgagccatatgccttcgagtgtgcttaaaaccatgaacagcctgtttatgatgcgcctgacggaaggggatgaagagtatctgaagcaattagagatcaacatcccggccgatatcctgcgtcgtttcagacagcttccgcaaggggtttatccggacggaagtggtactgcattcctcggtatttttaaaacaaaacgtggtcttatttgccacattctgaaaaacacattaggtccaaaactgctttgggctttgaactcatctgcaaaagacagagcgctcagagatgtgctttatgaagagcttggaacgaaaaaagcaagggaagaattagcaaatagattccctatgggaagtgcatcaagtatcattgatgaaatggtggtcaatcagggtggtgagcgtgattctgaagaagaatcacaaactatggcgatgaagctcgctaaagaaatcatttctgatgtgagaaggggattcagatga

SEQ ID NO: 96011 - DNA, 1209 bp, Enterobacter aerogenes
atgataaaaatcggaaaagcaaaacggtcagtgatggccgtttcaattctggccttcagcgtacagtcagcatttgcctatacggtcaacgttaacagcagcattcccatctcaacgcaggttatgccggcgttgagcacagctaatggcctgttaggtaatatccaggccacgctgattaacattggtacggcaatcagccagcagggcgatcgccaggcagcattaatgcagcaggtggctgaaactaaccgacagttcgaagtcgagcaaaaacgtaatgaccggctgctgcaggcacaggataagtaccgtgttccggatgatatatgtgcgcagtctattggcggtggcgccgcgggggtatcctctgcggccgctggcggtcagcgaacgctgggaagcgccagttctgcgaaagatgttaaggctatttttgaagtgccggcacgcgcaaccgacgtggatgcatcttcaacggccgaagttcacagccagtactgcgacagttcggattatgctgcatttggcgggacttcattctgcccaagtgtatctgacatgccgcgggcagatacgtcgctgagctcgttgctttatggcgccggcaaagaaggcaaggcacctgatctgacgtttacagatgagcagacagatgcggcgctgcgctatatgaaaaataccgcgttgcgcagtgctggtcgtcagctgagtcgtggggaagttaaaggcgccagcgggcgaatttacctgggcatgattcagcaataccaggcgctcaccgacgcggccgcacaacctcagatggaaatgatcgccaactctaaaccgaacccggccactgatgccgcgcttgcagatgcgcgcaaagtgccggaagtcgaatcctatttccaggcgacggccagtaacagggcgaaacagcttaaccgtatgtctgccagagagtttgaggaattcgaagtaggtcgccgttacagcaaccctgcttaccaggcgacgttgaccaacaagaacaccgaagatttgatgcgtgagcaaatcaatatcgccaatctgaacaactggttagtgttgaaaaccaaacagcagctggagaaacaaaatgtgctgcttggccagatcctggcgaacgacgcatatcaaacatacaaaccgatgctggcagcacagctggagagtgtgaacgcgggagtatccagaaaatga

SEQ ID NO: 96012 - DNA, 651 bp, Enterobacter aerogenes; identical to SEQ ID NO: 83596

SEQ ID NO: 96013 - DNA, 2181 bp, Enterobacter aerogenes
atgagtaaattaaaaaggttgcttctatctcttttcgttgtggcgtcgccttcatattcagcggatttggggattgatggcataactgaagcggctaaacgttcaggtgacctatcgcgtcaaatgttacataccgtttttggtgaggtagttaataatccgtttagcccttccggcgatggcttgcttaataacgttttcttcactgtcaacgaagttatcgcgattcttgcccttgtctatatggggataatcagcattaagaaacttcaccaggcaggtcagttgggaagtttcattgagggtgatggcaataacgcattcaaaattgttaaaacgacttttgggtggttgttgcttgtacctaccgttgtcggttggtctgtggcgcagctgctttttctatggtgcggttcaatcattggcgtaggatctgccaatgttattgcagataaaacggcttcggaattagcgagtggtaaagctgtctatatagcccctgttatgccagaaatggcgtctgttgcaaaagggatgtttgaaacaaacctttgtgctttgggggtaaatcaggggattgctcaaatggaggcttctggccaacattatgagaataacgccagaatgcaataccaaacaggtgacagcacatattctatatctgtaaacaacggctcagctgtatgtgggaccgtttcgctgccacaacgtccagcaggatggacttctatcttcgctagcggttatgcggattccgtctacagcgttcagcaacaagcaacggacacgttgtggggaaaaatgaagactgctgcagagcagtttaatgcagcatatatggcaaaaatgcgttccggggacggtgagctgccagatgttgaaagcgcgatccagactgctgcgcgtgattaccagcttcaggttcaacatgctgctaattcagcagccggtgacgacgaaattgttcaaaaaatggagtcggatatcaaagagaaagggtggctatatcttggtgtgtactatcacacattagctactgcgaataccgagatgaaagatgttgctaacctgaagccggtagtttcaggaatgagtaacgatggcgatatcggctctatcgattactttaaaggcttgttccaggcttaccattctcagctgaaaaatagtaattatacgccgcctcttggcaccgaatctaacgcacttgcaaggaacattgatcaaaaaagccttgaaaatgccgccacaactggagacggaacgtcccttattacaaaaattttcgacttcaacgttacaaactggcttgcaacgagtaactacggcactggtgatggttacagtgacgtgaccaaccctttactcaaaatgaaagctatcggcgattacacgttaggtgtagctgaggttggactcgccagttggaccgctatcaatgttgcagtgaaggtttcagaagggaagagtctacccggttttgctgcgggaatgatgaacaaacttacagggattcgagatgctattgctggcgtattagaatcggtttcgttcttggtttacccgctgttttatagcctctttggtatcggtcttgcgctatctatctggctgccgtttataccgatgatttattggtttgtagctatggcagattggctggttacgcttatgacaggtgtattggcgtcttccctgtgggcagctacccatatcaacattggccagagtaatgatgagcggagtacatatggttatgtgttccttatcgatgtaatgattcggccgatgctcatggtaatggggtttatttttgcttcactggccatcgtagctttgggaacggcgttaaacatgatgtttaaattcgctatggaacaggtccagtctgactctttcactggcctgctgtcatcgatcggatttttgatgttatatgcaaggctttgcacaggtatggtggctcgcgtatttgcacttcctgcgaggatgccgaactatgttataaactggattggacagaagatgaacgattcagtgttgggagatatgcagaaccatgttcatgacatctttgctgcgttcggtcggggagccaaaaatatgaaccgtaacaaccctaagcaatttaatcctgacgcaggtgtagataagagcaaggacggcatcaaaggagcttaa

SEQ ID NO: 96014 - DNA, 654 bp, Enterobacter aerogenes
atgaatgcgttatcaaacactgactttaagaaaattagtaacaatgcgcgtcctaaaaggcttggatactatgcatcatggctctggatgatgtttgtattcctctttctgttcgttagcgctttcgtgtttctgagcggcttatactggacgattagagacggttcaattcaggagcactggtttagtacagtcggtatctttgtgatcgatgcagtgctgatctggatgttgaaaaaggacttcaggagccgcaagctctaccaggtaactgcttcaatgaagaactctggtttcttcgagcctcataaggactgcgagcactatgacctggcccggagaacttacatcggctttgacttcagtactggaatcataggagtagcatccctgtatgccacatccagtattaaacgtgaacggttattttttgaagccgaaacagtcgagtcatgggagtcagtcggcagggagttaatcataaacctgcgaaatacggggcttacgacgataacgatcacagctccaaatatcaataaagcgtacagggatatggaaatcatctgcagaacgcataaaaatagggatgaaaactatcagcatctgaagagtaaactgacagacgctggatggttcataaacagcaattattga

SEQ ID NO: 96015 - DNA, 231 bp, Enterobacter aerogenes
gtgagcagagtagttgagcggcaggtgcataagagtaacctggataagcagaaggattacaggaatcgcatcagagatactcatgaccagctaaatctttatctgcccaaagatgcaaaaagaatgttgatagagatcacaaaagtaaaaaagctcactcaggcagaggttattgaatttcttgtgaaaagttattacgacggcttaaaatttgacgactctgaagagtga

SEQ ID NO: 96016 - DNA, 1056 bp, Enterobacter aerogenes
gtgaatcaaaagaatccatacctacagctttctgacattgagtcagtagaaggtctttcgccggagttcatctcctggcttgaaagccagtcccctaaagaatcgcccctgcagctgcttctcgatgaagacaccaaacccgtgcgcaaaacccgccgtcgtcgcggtacgcactcaacggcgtgtctctgcccggaacccagctggtaccgaccggacaatttcaaaaagctccctggccagcttggccatgcctacaaccgccttgttcgccgcgatcgcaaaaccggcgcgttaagtctgcgtatgcggatcagccgccacccgtacttcgtgcagctgcgcgagcaggctggccggaagcgcgacttccgcccggagcgggagaaattactcgatgcgattgtgccgctcctggtcagcaccgttgaccgggctacccatatcgacactatcaacctcagtaaaatggcgtggcagctcagcgaaaaggacagcgaagggaacgtgatccggaaagtgacggtaccgcgggtttgccggctgctgcagcacatgatggaattcgggttactggcgctgcctgaaggcgtcacatgggacccgtttaaccgcaagtggttccccaagcatgtcgtgctgacggaacgcctctggaagatgatcggtgttgatctcgataagctgtatgcggagcaggccgaacaggtggccgctgaagctgcaggctggataacccgtgatgaacatggccaggcggaagaaatctctgttaaagccgcgcgccggcgctggtatgaaaaaatgatgcacgccacgctggttcgccggcgtgaagccgccctgaagggtaagcgcgagaagaagctgaaagcgctggcagaacagccctatgacgaccgggcttacgccatgtccgttcatctgatacggacgctgccgaaagacgaactgcacgcgctgtcgcctgagcagtttacccagcgagtacgcagccacctgtatcagctcgatctggggctggagagggaatccggtccccctgattatcactga

SEQ ID NO: 96017 - DNA, 558 bp, Enterobacter aerogenes; identical to SEQ ID NO: 25161

SEQ ID NO: 96018 - DNA, 801 bp, Enterobacter aerogenes
atgaaaacatttgccgcatatgtaattatcgcgtgtctttcgagtacggcattagctggttcaattacagaaaatacgtcttggaacaaagagttctctgccgaagccgtcaatggtgtcttcgtgctttgtaaaagtagcagtaaatcctgcgctaccaatgacttagctcgtgcatcaaaggaatatcttccagcatcaacatttaagatccccaacgcaattatcggcctagaaactggtgtcataaagaatgagcatcaggttttcaaatgggacggaaagccaagagccatgaagcaatgggaaagagacttgaccttaagaggggcaatacaagtttcagctgttcccgtatttcaacaaatcgccagagaagttggcgaagtaagaatgcagaaataccttaaaaaattttcctatggcaaccagaatatcagtggtggcattgacaaattctggttggaaggccagcttagaatttccgcagttaatcaagtggagtttctagagtctctatatttaaataaattgtcagcatctaaagaaaaccagctaatagtaaaagaggctttggtaacggaggcggcacctgaatatctagtgcattcaaaaactggtttttctggtgtgggaactgagtcaaatcctggtgtcgcatggtgggttgggtgggttgagaaggagacagaggtttactttttcgcctttaacatggatatagacaacgaaagtaagttgccgctaagaaaatccattcccaccaaaatcatggaaagtgagggcatcattggtggctaa

SEQ ID NO: 96019 - DNA, 534 bp, Enterobacter aerogenes; identical to SEQ ID NO: 25686

SEQ ID NO: 96020 - DNA, 840 bp, Enterobacter aerogenes; identical to SEQ ID NO: 6027

SEQ ID NO: 96021 - DNA, 993 bp, Enterobacter aerogenes
gtggacgaatatcccatcatcgacctgtcccacctgctgccggcggcccagggcttggcccgtcttccggcggacgagcgcatccagcgccttcgcgccgaccgctggatcggctatccgcgcgcagtcgaggcgctgaaccggctggaagccctttatgcgtggccaaacaagcaacgcatgcccaacctgctgctggttggcccgaccaacaatggcaagtcgatgatcgtcgagaagttccgccgcacccacccggccagctccgacgccgaccaggagcacatcccggtgttggtcgtgcagatgccgtccgagccgtccgtgatccgcttctacgtcgcgctgctcgccgcgatgggcgcgccgctgcgcccacgcccacggttgccggaaatggagcaactggctctggcactgctgcgcaaggtcggcgtgcgcatgctggtgatcgacgagctgcacaacgtgctggccggcaacagcgtcaaccgccgggaattcctcaacctgctgcgcttcctcggcaacgaactgcgcatcccgttggttggggtaggcacgcgcgacgcctacctagccatccgctccgatgaccagttggaaaatcgcttcgagccgatgatgctgccggtatgggaggccaacgacgattgctgctcactgctggccagcttcgccgcttcgctcccgctgcgccggccttccccaattgccacgctggacatggctcgctacctgctcacacgcagcgagggcaccataggggaactggcgcacttgctgatggcggcggccatcgtcgccgtggagagcggcgaggaagcgatcaaccatcgcacactcagcatggcctgtcgacaacctctcgcgcaaccaagacatcgcggtcggactgcaagtgatcttgaagccacgggcccgtcccaccccgacatggacctcgatgcccgaacggacgttagatttcgagttctaggcgttctgcgatga

SEQ ID NO: 96022 - DNA, 2967 bp, Enterobacter aerogenes
atgccgcgtcgcttgatcctctcggccacggagcggggcaccctgctcgcgttgccagaaagccaggatgacctgatccgctactacaccttcaacgactccgacctgtcgctgatccgtcagcggcgcggcgacgccaaccgcctcggcttcgccgtgcaactctgcctgctgcgctaccccggctatgcgttgggcactgacagcgagctgcccgaaccggtcatcctgtgggtggccaagcaagtccagaccgatccggcgagttggacgaagtacggcgagcgcgatgtgacccgtcgcgagcacgcccaggaactgcgcacctaccttcaactggccccgttcggcctgtccgacttccgcgccctggtgcgcgagctgaccgaactggcccagcagaccgacaagggcttgctgctggccggccaggcgctggagagcctgcggcagaagcgacgcatcctgccggcgttgagcgtgatcgaccgggcttgctcggaggccattgcacgggccaatcggcgggtctaccgcgccctggttgaaccgctcacggactcgcatcgggccaagctggacgagctgttgaagctcaaggccggcagcagcatcacctggttgacctggctgcgccaggcaccgctgaaacccaactctcggcacatgcttgagcacatcgagcggctgaagacatttcagctggtggacttgcccgaagtcctgggccggcacatccaccagaaccgcctgctcaagctggcccgcgagggtgggcagatgacgcccaaagacctcggcaagttcgagccgcagcggcgctatgcgaccctggccgccgtggtgctggagagcactgcaaccgtgattgatgagctggtggatctgcacgaccgcatcctagtcaagctgttcagcggcgcgaagcacaagcatcagcagcagttccagaagcagggcaaggcgatcaacgacaaggtgcgcctgtactccaagatcggccaggcgctgctggaggccaaggaagccggcagcgacccctatgccgccatcgaggcggtgatcccctgggacgagttcaccgagagcgtcagcgaagccgagctgctggcccggccggagggcttcgaccacctgcacctggtcggcgagaacttcgccaccctgcgccgctacacgccggctctgctggaggtattggagctgcgcgccgccccggccgcgcagggcgtgctggcagccgtgcagacgctgcgcgagatgaacgccgacaacctgcgcaaggtgccggccgatgctcccaccgccttcatcaagccgcgctggaagccactggtgatcaccccggaaggcctcgaccggcgcttctacgaaatctgcgccctgtccgagctgaagaacgccctgcgctccggcgacatctgggtcaagggctcgcggcagttccgcgacttcgacgactacctgttgccggccgagaagttcgccgcgctcaagcgggaacaggccctgccgctggcgatcaacccgaacagcgaccagtatctggaagagcgcttgcagctgctggacgagcagttggccactgtcgcccgcctggccaaggacaacgagctgcccgatgccatcctcaccgagtccgggttgaagatcaccccgctggatgcggcggtgccggatcgggcgcaggcgctgatcgaccagaccagtcagttactgccgcgcatcaagatcaccgaactgctgatggacgtggacgactggacgggcttcagccgccacttcacccacctgaaggacggggccgaggccaaagaccggacgttgctgctgtccgcgatcctcggtgatgcgatcaacctcgggctgaccaagatggccgagtcgagccccggtctgacctacgccaagctgtcctggctgcaagcctggcacatccgcgacgagacctattcggcggccctggccgagctggtcaaccaccagtaccagcatgccttcgccgcccactggggcgacggcaccacctcatcctccgatggccagcgtttccgggctggcggccggggcgagagcaccggacacgtcaacccgaagtacggcagtgagccgggacggctgttctacacccatatctccgaccagtacgcgccgttcagcacccgcgtggtgaatgtcggcgtgcgcgattccacctatgtgctcgacggcctgctgtaccacgagtccgacctgcggatcgaggagcactacaccgacacggccggcttcaccgatcacgtcttcgccctgatgcacctgctgggcttccgtttcgcgccgcgcatccgcgacctcggcgaaaccaagctgtacgtgccgcagggcgtgcagacctacccgacgctgcggccgctgatcggcggcaccctgaacatcaagcacgtccgcgcccattgggacgacatcctgcgcctggccagctcgatcaaacagggcaccgtcactgcctcgctgatgctgcgcaagctcggcagctatccgcgccagaacggcctggccgtggccctgcgcgagctgggccggatcgaacgcacgctgttcatcctagactggctgcaaagtgttgagctgcgccgccgcgtgcatgccggcctgaacaaaggtgaggcgcgcaactcgctggccagggcggtgttcttcaaccgccttggggaaatcagggatcggagcttcgagcagcagcgctaccgggccagcggcctcaacctggtgacggcggctatcgtgctgtggaacacggtgtacctggagcgcgccacccaggggttggtcgaggccggcaagccggtggacggcgagctgctgcaattcctgtcgccgctgggctgggagcacatcaacctcaccggcgattacgtctggcggcagagccgcagactggaagacgggaagtttcggcccctacggatgcccggaaaaccttag

SEQ ID NO: 96023 - DNA, 561 bp, Enterobacter aerogenes
gtgcaggggcaccgcatcggctacgtccgggtcagcagcttcgaccagaacccggaacgccagctggaacagacacaggtgagcaaggtgttcaccgacaaggcatcgggcaaggacacccagcgcccccagctcgaagcgctgctgagcttcgtccgcgaaggcgatacagtggtggtgcacagcatggaccggctggcccgcaacctcgatgacctgcgtcgcttggtacagaagctgactcaacgcggcgtgcgcatcgagttcctgaaggagggcctggtgttcactggcgaggactcgccgatggccaacctgatgctgtcggtgatgggggccttcgctgagttcgagcgcgccctgatccgcgagcggcagcgtgagggcatcaccttggccaagcagcgtggcgcgtaccggggccgcaagaaagccctgtccgatgagcaggctgctaccctgcggcagcgagcgacggccggcgagcccaaggcgcagcttgcccgcgagttcaacatcagccgggaaaccctctaccagtacctccgcacggacgactga

SEQ ID NO: 96024 - DNA, 990 bp, Enterobacter aerogenes
atgagcgctttccggccggatggatggacgacgccggaactggcccaagcggtcgagcgcgggcagcttgaactgcactaccagcccgtcgtcgatctgcgcagtggtgggattgtcggcgcggaagccctgttgcgctggcgtcatccgacgcttggactattgccaccgggccagttcctgcccgtggtcgaatcgtccggcctgatgcctgaaatcggcgcttgggtgctgggcgaagcctgccgccagatgcgtgactggcgaatgctggcatggcgaccgttccggctggccgtcaatgcttcggcgagccaagtgggaccggacttcgacgggtgggtaaagggcgtgctggctgatgccgagttgcccgccgagtatctcgaaatcgagctgaccgaatcggtcgcgtttggtgatccggcgatcttccccgccctggacgccttgcggcagatcggtgtgcgcttcgccgccgatgacttcgggacggggtattcctgtctgcaacatctgaagtgctgcccaatcagcacgctcaagatcgaccaatcgtttgtcgccgggctcgccaacgaccgccgcgaccaaaccatcgtgcacaccgtgattcagcttgcgcacgggctgggcatggatgtggtggctgaaggcgtggaaacatcggcgagtcttgatctattgcgacaagcggactgcgacacaggacaaggcttcctgttcgcgaagccaatgccggcggcggcattcgccgtcttcgtcagtcaatggaggggtgccaccatgaatgcaagtgactcgaccaccaccagttgctgcgtgtgctgcaaggaaatcccgctcgatgccgccttcaccccggaaggcgcggaatacgtcgagcacttctgcgggttggagtgttatcaacgcttcgaagcgcgtgccaagacagggaacgaaaccgatgccgatccgaacgcctgcgactcgctaccgtcagattga

SEQ ID NO: 96025 - DNA, 237 bp, Enterobacter aerogenes
atgaacaaccccgagcgcttgccgtccgagacgcacaaaccgatcaccggctacctgtggggcggactggctgtgctgacttgcccctgccacctgcccatcctcgctgtcgtgctggccggcacaaccgccggtgctttcctcggcgagcattgggtcatcgcggcgctcggtttgaccggcctgttccttctgtccctgtcgcgggcgttgcgggcattcagggaaagagaatga

SEQ ID NO: 96026 - DNA, 366 bp, Enterobacter aerogenes
atgaacgcctacacggtgtcccggctggctcttgatgccggggtgagcgtgcatatcgtgcgcgactacctgctgcgcggattgctgcgcccggtggcgtgcacaccaggcggctacggcttgttcgatgacgccgccttgcaacggctgtgcttcgtgcgggcggccttcgaggcgggcatcggcctcgacgcgctggcgcggctgtgccgggcgctggatgcggcggacggcgacgaagcggccgcgcagcttgccctgctgcgtcagttcgtcgagcgtcggcgcgaagcgttggccgatctggaagtgcagttggccaccctgccgaccgagccggcacagcacgcggagagtctgccatga

SEQ ID NO: 96027 - DNA, 1686 bp, Enterobacter aerogenes; identical to SEQ ID NO: 14371

SEQ ID NO: 96028 - DNA, 1419 bp, Enterobacter aerogenes
atgattactcctgttattatggccggtggtactggtagtcgcttatggcctatgtcaagagagctatacccaaaacaatttttaaaactctgtggttcaaactctatgctgcaagaaacaatcgtcagattagaggggcttgatgtaagtcatccggtattaatttgcaatgagcaacacagatttttagctgctgaacagttaaggcagattaactgtttagcaggtgacataattctcgaaccagttggtagaaatacagctcctgctattgccttggctgcacttcaatctattgataaagacaatgatcctttgctgcttatattggctgcagatcatattattaatgatacatcaacgtttcatatagctgtaaataaggctattccccatgccaggaatggtaagttagttacatttggaattgtccctacagggccggaaacaggttatggctatatccagcgtggcgctcatttaactaatgataaacaagcttttgatgtaaagcgatttgttgaaaaacctgatttaaacactgctgatgagtatgtttcaagtggtgaatattactggaatagtggtatgttcctgtttagtgcccggaaatatttagaagaacttgggaaattccgtcctgatatcttaaatgcttgcattgatgcgttttcagtagttgaaaaagatgttatgcaagattttatcagaatcgatgctgagagatttacagtttgtccagatgaatccattgattatgcagttatggagaaaacagacgaggctgtggtaattcctctggacgctggttggaatgatgtcggttcatggtcagcactctgggatgttaatattaaaaacattgataacaatgccttgattggcgatgtttttacgcataacactagtaattgttatattaatactgatgaaaaacttgttgctgcaattggcgttgataatctggtcattgtcaatacaaaagacgccaccttggttattaacaaagataaggtgcaggatgtaaaaaaagtagtcgaatttttaaaaaaggatgaccgtcgcgagtatagaatacatcgtgaatcataccgaccatggggtgtgcaggataaagtcgttgatactcctcgttaccatgttaataaagtgactgttaaaccgggcggaaaattttcattacaaaagcatattcatcgtgctgaacactgggtggtattgtcaggtactgctgaagttactcttgatgaacaaacatatttattaactgaaaaccaatcaacttttattccggttggtaaaactcatatgcttcataatccaggtaagattccgcttgtcatacttgaaatagtctcaggggcatacttaggcgatgacgatattatccgcttgaaagatcattatggccatttttga

SEQ ID NO: 96029 - DNA, 690 bp, Enterobacter aerogenes
atgcgttttgtgcagcccagaacggaatctcagcaggcaatgcgggctctgcatcgtgtccgtgaatccctggttcaggataaggtaaaaacaaccaatcaaatgcatgcttttctgctggaatttggcattagcgttccccgaggagctgccgttattagccgactgagtaccattcttgaggataatagtttgcctctttacctcagccagttattgctgaaattacaacagcattatcactatcttgttgagcagattaaagatttggaatcccagttgaaacgaaagttggacgaagatgaggttggacagcgcttgctgagcattccctgcgtcggaacactgacagcgagtactatttcaactgagattggcgacgggaagcagtacgccagcagccgtgactttgcggcggcaacagggcttgtacctcggcagtacagcacgggaggtaggacgacattgctgggaattagtaagcgaggtaataaaaagatccgaactttgttggttcaatgtgccagggtattcatacaaaaactggaacaccagtctggcaaattggccgattgggtcagggatttactgtgccggaaaagcaactttgtcgtcacttgtgctctggcaaacaagctggccagaatagcctgggccctaacggcacgacagcaaacttatgtagcataa

SEQ ID NO: 96030 - DNA, 1383 bp, Enterobacter aerogenes
atgacgacagctaaaaaagagagaagcacctcggatctaattcgtgccgcggtatccggctggcttggcaccgcattggaatttatggatttccagctttattccttgggcgccgcgctggtctttcatgagatatttttcccggagcagtcggcagccatggcgctgatattagcgatgggaacctatggcgcagggtatattgcgcggatcgtcggtgctttcatattcggtaaaatgggggaccgcatcgggcgtaaaaaggttctgtttattaccatcaccatgatgggaatttgtaccacgttgatcggcgttttacccacttacgcgcagatcggtatttttgcgccagtgttactggtgaccctgcgtattatccaggggctaggagcgggcgccgaaatttccggcgctggtaccatgctggcggagtatgcgccgaaagggaaacgcggcatcatctcttctctggtggcgatgggcaccaactgcgggacgctgagcgccacggccatctgggcgataatgttcttcctgctcgatcgcgaacaactcatcgcctggggctggcgtattccgttcctcgcgagcgtcgtggtaatgatctttgccatctggctgcgtttgaatctgaaagagagcccggtatttgaacaggtcaacgaagccgatgaaattcaggctaaagccgccgctgcgcaaaacacgttcggcgcaatgttaaaaagcaaatcattctggctggcgaccggtttacgttttggccaggccggtaattccggtttattacaaacatttctcgcgggatatctggttcaaaccctattattcgataaagcgattccgaccgatgccttaatgattagctcagtgattggttttattactattccgctgttaggttggttgtcggataaagttgggcggcgtttgccttatattatcgtgaatatttcggccattattctggcctggccgatgctggccattattgtcgataaaagctatagcgccagcacaattatgctatcgctgattgtcattcataacgtggcggtgctgggcttgttcgcgctggaaaatattactatggcggaaatgttcggctcgcgtaatcgcttcaccagaatggctatctcaaaagaggccggcggtctggtggcggtgggattcggtccggtgctggccggtatcttctgtaacgtaaccggttcgtggtggccgattgtcgcgatgctgatctgctattcagctatcggtctcatctcgtccttgctgatgccggaagtgtgcgaccgtgacctgagtctggaccaagatgcggcggacgcgggtacacgccaggcgctgagggcgaacggccaatacgcgaaatcataa

SEQ ID NO: 96031 - DNA, 459 bp, Enterobacter aerogenes
ttgacaatacgctggtcgcgctggagcagagcggtcagttgctggggcggggcgaataccaatccgctgatacagcaactggacgaacagttttccgccgagctcgccgagcttggcaacgatatctggctcaacgatgcgctgtaccagcgagtcaaacaggtttggcagcagcgcgacgccctgagtctggatccggagtcgcgtcgtctgctcgaggtgagctggcagcgttttcagctggcgggagccgcgttggcgcaagagcagaaaaccgtgctaaaggcgttgaataccgaggaggcgtcgctgcaaagtcaattccagcagcgtctgctggcggcggtgaagtctggcggtctggttgttgattatcaacaccagctcgacggactcagcgcggatgaaattaccgccgccgccgatgccgcgcgcgacaaaggcctgcacgaccgttag

SEQ ID NO: 96032 - DNA, 399 bp, Enterobacter aerogenes
atgtctatctcttgggttataaatgcagtattgacgtttttaattatttttgtgtgtttttatttcgcaaatagaatagtgaaaaattcacaacagagagagcacagtataatggaacagggagatgatgtttatgttacaattttatcaatgaagcaaagcggagttttcataaacaacaatcctgtagtaacaatggacttgagggtggcaaatgctgctgataacaaaacatggctactcgaaaaacatgatgaaaccatacaattaatagctcttgatgcttaccaggttggttctatttatagagctaaactagatagtaaaactaaatccattgtttttgttacagacccttccaatgggaaacctttggcaatttctaatgtgcctcgttag

SEQ ID NO: 96033 - DNA, 228 bp, Enterobacter aerogenes
atgaacttaaatctttttgaatctattaagattttcatcgagatcatcgagtctggcagctttacgcgtgccgccgagaatctgcagatccaccgcccggcggtcactaaagcgctacagcagcttgagcagcactgcggcgttcggctcctgcagcgtaccacccgacagatccacctcacccctgatggcgaggcgttttatcgtcgtagtaaacccctgcgatga

SEQ ID NO: 96034 - DNA, 183 bp, Enterobacter aerogenes
atgcaaaatcgctttcgcctgcctacgcttgccgccctttttattgcaggcgcgttttcggtttcggcggcgcaaacgccgatcaaaggcggcaccttaatttatctggaacaacagccgcatactaatctctatccgccggccgcggtttttaccctaacggcgggatcctcaatcagataa

SEQ ID NO: 96035 - DNA, 990 bp, Enterobacter aerogenes
atgatgcctaaacgtctcggatttttcacccgcctacttgaccgcgccacgccgcaagagcgctatcgcctggcgacggagcagatccgccacgcggaacggctgggctttgatagcgcctgggtggcgcaacaccatttccatgaaaatgaaggcggtttaccgtcgccgctggtgtttcttgcccacgcggcggcccatacgcaacggatccgtctcggtaccgccatcattacgctgccgatggaaaacccgctgcgcgtagcggaagatgcggcagtgctggacttgctcgcagatggtcgcctggaagtgggttttggttccggcggaacgccaacctcttttctcccctttggcctggtctgtgaacaacgcggcacggtcttcgccgatcatctgcatttgattgaaagcgcctggcgcggcgatacgttggctcatcctgacaatcacctttatcctcctgcgccgcagctggcggagcgaatttggatcgccaccttttcgattgaaggcgctattcgggccgcgaaatccggccacgggttgatgctatcgcgcacacagccgcgcccgccaggtcaaagcgagctgccgctggatgcgattcagaacccgattatcgatgcctacctcgccgcgctgcctgccggcgtgtcgccgcgaattctggcctcccgtaccgcgtttattgccgacagtcaggggtacgcgctacaggccgcagagccgggattaagtaaacaggcggcagcccatcgcgctgccggtcatgagattattggtgacaacgtcacggactatgcccgccagcttgatgcccacattggcgatgcgccacatgtgcttgaatcgctggtcaaagacagcgtgctagcccgcgtgactgacatttcgtttcaggtccattcggtggagccatcgcatcaggacacgctgcgttctatcgaactcatcgctaaacacattgccccgcaattcagataa

SEQ ID NO: 96036 - DNA, 285 bp, Enterobacter aerogenes
atgagaaaattttacataatttgttattctgaagttgaattggttttgaaaaagctagcttttctcttgttactcaccggcgtaagcgtgatgctttacggtaatctccctgcccagcgtattagtagttgtgaaagacagggggcaacggcgggcgtttgcaccgcggtagagtgggataatgaacagctaaatttcttgccgcaatataacccggaaaatgctaagactattgctgtgcttcagcaacaactttccggggcgcgcgcgacagttaaattataa

SEQ ID NO: 96037 - DNA, 327 bp, Enterobacter aerogenes
gtgggaaagcagctaacagaagatgatcttcgtgaacatggcttcaccgataaagaaattgcccgcttacgtgaaatcctgacgcggcaagaaagccaaaacaaaagctattttgatttaatcgatgaacttcgcaaaagactttgggctggagtcttaggtttttttattgtttttatagtgctcattcattggtgttataattatgagtcaattaatcattttgcctattttttcattttattattcggtttctcggtagtttacaaactaactccgtttccaatggcgctcaaagcatacaaattgtatctaaaaataagatag

SEQ ID NO: 96038 - DNA, 339 bp, Enterobacter aerogenes
atgaataaggttattgctctacctatgttggtgctgctggtgggatgcgcaaccaaaagcaaatccgtcaatccgaccgcagtgaataagtacactcaaagtgtgcaggatgccgtccgcaaaaattattttgggtttgtgggatatcaagagcatggttgtacgctaaaagtcactcagcctcctggggggaatgttaaacgagtagaggttgtctccgttgacagtttcttgtgtcaacgttcagtagaggcggttaatgacactgtctccgccggcacattccctgagaaaccctcggggctacctgaatcgattctctttgatttcaagccctaa

SEQ ID NO: 96039 - DNA, 258 bp, Enterobacter aerogenes
atgagcatattgaagaaaattaaagatgccatgtcccctcccgtccccgaggagtgtagggaagagagctataaggcagtacttaaaaaccttgatattttgtccagggaatcgtccgaattgaaatccctgatggcggagtttggggaagggaagattacgcaggaacagtgtattgccacaggcgtagcgataatcaccaaagaattactggaattccgctatgtacaaaacaagattgattctcaggcctggtaa

SEQ ID NO: 96040 - DNA, 276 bp, Enterobacter aerogenes
atgtcctgtttgtcttctttttttaaagaaataattaatgaccttaaagtttatgtcattatcatttctctttttacattttatttttttgcaattccaggatactggtttctatgcagtatatttacaataatcatttatggtattattaaaatagttatagcgtcaaaaaaagtaataaaggtgctattaaatgacgatgttacttttggtcgcattcactggcagcctgctcagaataataacttaccgtatcttaccctgacttatacataa

SEQ ID NO: 96041 - DNA, 1338 bp, Enterobacter aerogenes
atgttgtcattatttagtgttcgctactgtattgctagacggtctaaaatctgtcattttatgcaccacccaatgcaccacgatgaaatattacttatgccaaagaaagctaaagaactatctgcactggctgtttctaaacttaaggccgatgcagaatattacgttggtggcgctgatggcctgtatcttcggattatcggacgctcacgagtgtggggcttgcgtattgtaatgggaacccgcatcaataaagcaggtaaaacggttccccgccgcctcaacatggggttaggcccctatccagaaatttcgctgtcagaagcgcgcgataaggcgcgtgaactccgtaagcagatccgtaatggcattgatcccctttcagaaaaacacgctcgaaaagcggctcaagaagctctggcacgtaagcaaaagacatttcgtgaatgcgctgaagccgtgatagaaatcaaaagtagtgagctaaagaataaaaagcatgtggcgcagtggcgatcgacactggaaacctatgcctacccgttcattgggcaaaaagtgattggtgaaatcacaaaagttgatcttctggcaatactggaaccaatctggttaaccaagaatgagacggctaaccgtcttcgtggtcgtattgaagccatcatcgattacgcaaaggctaaagagtattttgaaggtgataatccagcagcatggaaaggcatgttgaaacccctcctccccttaccaagcaaagtgcaagatcagaaacaccatgcgtcattaccttatgaacaaatcggttcttttatgtctgaattgcgcaaacgtaaaggcatctcagcccgtgcgttggagttttctatcctgacagcttctcgatctggtgaagttcgtggcgcagagtggtcagagatcgatctgaaaggtaaaacatggacgattcccgccagtcgtatgaaagcagcaaaggaacaccgggttcctctatctgatgctgctgttgctctgttaaaggatttaccacgattgaaagataataatcatgtcttccctgcccctcgcgctgaaacgcattctgatatgtcattattggctgtattgaaacgaatgggccatagtggcttaactcagcatggcttccgttctacttttcgcgagtgggctggtgaaacaacggactatcaacgtgaggttattgaacatgctttggctcatcagttggcagataaggctgaagcagcgtatcaacgtgggacattatggcctaaacgcgtggcgctgatgaatgattgggcggagtattgtgcaatatattacgcctttaaagcggaataa

SEQ ID NO: 96042 - DNA, 1227 bp, Enterobacter aerogenes
atgctttgcagcatttctaaaataaatattccaatcccatactctaggaaaagagttgaaattgaattaaatggaagaagtttaattattacaggaggtaatggctgtggaaaaaccagctttataacagccatttacaattatctgaaaaaagggattgatgaccctcaaaataatgacattcagcatttattaaatcaaaaaagatcctatgagaatcaattaaagacaattggtagagatggtggaaattataattatttccaccaaaaattaaaggaatgcgaatctcgattagaagaattaaataatttcaatattgaaattagttctcttgacaataaagacattcgctctttgcttaggtttcacagtgcaacaagacaatccgcaatctcatcaccaagccaagctccgaaacactccgtgcttgttgaagaaaataagcattttgctaatgacaaggatggcagccaattctttgaaagctatttgctgagtttaaagaaaaatcagagttatgcaatagcttttgataaagatgaaaatgaagcaaaacgcatcagcctatggtttgataaaattcagttagatctgcgctcattatttgaagatccggatttagttctagagtttgatacaaaagatgagaagttttatttacatcaggatgggaaagacaaatatacctttcagactttatcagctggctattcttcaatattgagtatttacactgatttaataatgagagttgaaatgtggggggtttcacctgataacatacaggggattatatttattgatgaaatcgatgctcatttgcacgtatcattacaaaaacaaatattacgatttttcattaaatcatttccaaaaattcaatttatcgtaacaactcactctccttttgtggttacgtctgttacaaactccattatttatgaccttaccgctaatgaacaaatcatagatgtttcttcatattcatatggtgtagtgatggaagaaattttcggagtcattcctgattctcatgcattaacagataaactaatccacatcgaaaatttagttcaaaatataacagaagaaaacataagcgagttagagaaagttatttcatctttggcatctgaaaaagaaaacatgagtaatgatactcaagcctttcttgacaccgcacagttaaaattaattaaaacaaagaaaaacattagtaagtag

SEQ ID NO: 96043 - DNA, 654 bp, Enterobacter aerogenes
atgtttaatgtagtgaggtcaatgccagctcccggttcactgttgactcaaagaaaatatgatggtgatgatgttcactctgctcttcaggagtgtttttatgaaaaatgttatttatgtgaaacaaaaaaacctttagatataaatattgaacattttgatcctcatatgggtgatgtaagtaaaaaattttcatggaataacctatatttagtatgctcacgttgcaacaatataaagcttgcaaaatatgataatcttcttgactgttgctcgataagtgtatgggacagagtaaaattaactcccggattttctccaaaagcgaaaggatttattatttcccctcaatattcggatgaaaaaacactggaaaccgcacaattattaaatgatatttacaacaatgacaatacgatcaataaaagacttacagctcgttctcttcgagcacaggtagttcaaattacacacaagctaactcagcatatgattacatattatagcgaagattccacagatgaagaaaaaacagatgcaattaacaggatgaagattatgattaaaaaatcctatccttactctgcattttgtcgctggatgataaaagatgatgaagatttagataaattattaacacctcttatggactaa

SEQ ID NO: 96044 - DNA, 792 bp, Enterobacter aerogenes
atgactggcgatctgaaccttggcggtaagaatatcaaaaacattcaagacattacggcatcaggaacaacaacgaccggagtattgaaaacaacaggaaatgctactatcggatcagatcttgctgttggtggaacctcgaccctgaatgggcaggtgaacatcaacaataatttaatagtgaaatctgatacctatctgaacacactttctacaacagggctggctaagttcggaggacgtatagcaaccagcggactcaatccaaacgatctgccgtcaggatgggctggaggtgttcgcacttatgatttgtatgcgtctggaactattggggccggaacggggaaaacagttaatgcttatatgaacagcgcgggtaatattttcgcgtcgggtaatctgacagccggaatgataaaatccaacgggacaattgaatcagttggtaggattaaagttggtgaatatcttcatctgaacggtcaggcaacgctgaatgcgaaatgtacgcctaatggtctggtggggcgagatagtgcagggaaaatgttatcctgtgtcagtagtaagtggtcagagcttacacctgcggcagcgtcaggtatttatgttcgctactataatagtatcaagtggtcttgtacggttcccaacagagcaacaggtggttgttcttgttcatcagggttaaacagtatactaattaactctgattctaacacttggtgcagtggtggtaagaacgatcattgtagaacatcgacacaatatttttatgcttgtgtttaa

SEQ ID NO: 96045 - DNA, 576 bp, Enterobacter aerogenes
atgataaagaaaaaaggatttaccttactggaggtcagtattgtgttgggtattggaacgcttatcgcttttatgaagtttcaggatatgaaaggtaatcaggaagcagtattagctgaaaatgtcggaacacaaataaaacagcttggtgaggcggttaaccgttatatcagtattcgatacgacaaggtttcaacgttatcatccaccaacaatcagagcagcgatccggggccaagaacctgtacggctattggttgtgaaatcacttaccagacgttgattaatgaaggtcttttacctgtaggctatacgggaaccaatgcgcaaaagtccacgtataagattttgttaaagcgttcaggaacagcgcctgattacgtcattaatggcctgataacaaccagcagtccgtggaaagaaggtgggcgcattcgctatgatctgttaggtaaagctgttcaggcggcaggcgttgatggtggtatgagcagagcgacaaagatcgcttctggctatggcggtcagtggagtgagaactctaacaactacagcaatattactgacggtggatag

SEQ ID NO: 96046 - DNA, 558 bp, Enterobacter aerogenes
atgattttattaaataataaaagaaaaagcaagaaaggtttctcattactcgaattattacttgttttggggattatcgcagcgttagtagttgcggcttttattgtgtatcccaaggtgcaagcttcacaaagagcgcaggcggaaagtaataacatcgccaccatacaggcaggtgttaaagcactctatacatcagcatccagtttcaccggtctaacgaatacagtagctgttcaggcgaagattttccctgacaatatgctaagtggttcaggaacggcagctaaaccgattaacgctttcaaagggaatgtgacgctggctgcggcagctactggtccgtcatctgcggcaggttcttctttcactatcacatacgataatgtgccagcagcggaatgtgtgaaaatagcaacagcggcggcaggcaacttttacaccgctaaagtgggttctaaagtggtaaaagccgcagatggaacgctcgatgtagcggctaccgcagcagcatgtaataacgccacaagtaatacattagtattcacgtcgatttaa

SEQ ID NO: 96047 - DNA, 306 bp, Enterobacter aerogenes
atggataatgaaagcaaaagatcaagaacagaaaaaacattaaaacaaaaagtggcttttgctcaacttgagcttaaccgacttaagtcaatagagaaatcagggcaaaagaaagtcgaaacaaggctcaagattattcttggggcggaagtagccaaggctatgaattgtagtattgaacaggtggataaggaaattatattaggtattttactttcagcgtctgagttgaatgatattgaaagaataaaatatataaaagcaggaaggtggtttcttgctcaaatggatggaagacaaaaataa

SEQ ID NO: 96048 - DNA, 1476 bp, Enterobacter aerogenes
atggcgattttccatcttgattttaaaattgtgaaacgaagcgaaggcatgacttccgttgcgaaagctgcctaccatgcccgtacacgtattacagatgatcgcattggacaggttttcgatttcagccacagaacagatctacatggtcatattatattagccccggtttcagcacctgctcatattatcgaaagctcatcagcactctggaatgaagttgaaagagtcgagcgtcaacaaaatggtcaaacagcccgttattttgatgtcgctatccctgtagaactcaacaacgatgacaagaaaaaattagttgccgaatactgccagaagaactttgctgataaggggatgatagctgatatcgttttccacgatttagacggtaagaatccccatgcacatgttatgttgacgctgaaaacaatcaccgctgctggcttcggtaagaaagacagaagctggaatgataagaagatggttgttcagtggcgtgagtcgtgggccacgatatcaaacagctaccttgaagccgctggatgtgaagaacgtatcgatcatcgttctctcagaactcaatgtgccgatgcccttacccaagcagaagaaacattcagccaagaagagaaagccttgtggcttgccaaggcaaccaaaacaaaccgtccagcaatgcagcgtgttcatcgtgccaagtggaatgacaccgagtcacaggaacaacgatctgctgaacaagccctacgcaatcgtcaaattgaagaggctaaaaaggtctatacgacattcagtgagctgccactggaaatagtggttgatgtcagaagctttacggttacacatcttgctgaaccagaagagattgttcttccagactacccggcaacaaaagaaccgcagcctattatgacgacatcagcgataagcagaagaccagcagcaaagtcttatcgtgatcccaataagatcaggaaagttggtgctgcagggaagaaatcccctgttctggttgttcctgaaccaaatgcatctactaaactgaaaaccgcctcttccctcaaaaccagagaaaaaaaccgcgcccccatgcactgtaggaaacagaccaagccacgtcaaaatggtctgtttaagcgatttaccttactggtagtaggatatataagagagaaatttgcgtgggccagaaggaaagcagacactactgacgctgaccatgataagcgtatcgcagaaaactatgtctttgatgaagtgttggggatccatgtttcacgctcagagtttgaaaaacgaaccagatttaacagtgctgacagcaaggcatctgtatgtgaaatcagctacttacctaatcattcacagcaaactttcggtaatagcacaggtgaactctttgaaccatcatcacagttaaaaaacatctcatcttcgaaattaggcttacggctgtttcacaataaaataaaatga

SEQ ID NO: 96049 - DNA, 1386 bp, Enterobacter aerogenes
atgttatctaatatcaagctaaataatttcaaatcattttcttctgaaactgaaattcccttggctcctataactcttatatatgggcctaactcatctggaaaaagtagcattattcaatcgcttctagctttaaaacaaacacttattggtaacaacaaaaatggtgaatttatatcttctggtgaatgtttagatttaggtgattttgaatctgtcattagcaatcatgatttagctgaaaatttatctattagtatagcattcaagaatggaatgaatattaaggaatataatgatgaatttatgtttcaaccaatttttggtgcagacgatataagacacttcagtacaacctataaatattccgaggaaaacccgacgaccaacttgactagcaataaaaattacttatcacatttcaaatatactgttactcaatcaaagtcagataaaaagatatttggaatagatgtattagggagcaagttagggagtttttcttttgataataatggatttgatgatttagccacgttcttcaacaggcgtgatcgtcgctcgaaaaaattagaaataccagagtattataatgaacttatcagtgcaaaaatcttgatatctcctatactatcaattcctatatattcccccgtaagagaagattttaatataataagtaattattttaattccattgcttatgaaatacggcatgagctattaaaaatcaactatcttgggccattaagaactcaccctagaagattttattcttccgaaagagaaaatgtcaaaaaaaataaggggcagacaaatttaggagcagatctttattatggagggagttcagggcaagaaaaagtcaattattggatgaataagtttgatatcccatatgagttaagtgtagagaatattggtaataatattacaggtaatattatatcattaatgctttgtgatacgagaaataacacaagtgttacacctgctgatgtgggctttggaatagggcaagttcttccaataatcacatgtgcagtaactaaaaaaaatcaaacaatatgtgttgaacaacccgaaatacatttgcacccaagattgcaagcacatctggctgatttatttattgaaacatcgagcaatgctgatggaaaccaatggataatagaaactcatagtgaagctctaatgcttagattacagagaagaataagagagaagaaaatagataaaaattctgtaaaagtattgtatgttgatgtcggaatgtctggaacgagtgtcatggaattacctttagatgatgaaggagattttttgaaacattggccagaaggattctttgaagagcgcatgaaagaaactatggggattgactaa

SEQ ID NO: 96050 - DNA, 957 bp, Enterobacter aerogenes
atgttaacagagtttcatttcgatgaattctatcttggaagcaatgaatttgatagagaagattccattttcatccataagaaaataatagatttatggaaagattttggctgtttagtataccctaacatgaaaaaatcagattatattgattgggttaatggccttgacccaaaaatatcaaaattatggctagtagcattttcacattataaaaaaaaccccatggcaagtaattatatgccagtatgtgattttcacactcctctggatattgaagaaacttacagttctgacgaacttgatttaatcatcatacctaataactcttcacttattagtgaaatatcatgtacaacacataatctagaaatatcaaaaaccaacgggattatagatagcatcagctttgctaatagtaaatatttatgtgaacaggatattgcagaaggcgattcaatagatgatatcttagataaaagattcaaaaaattaataaaaaattctaaagtaataaccataattgatcgatattgggccaaaaatcatgtggaggatatctctcgtagaaaacctgcgctactaaaaatattagattttatatattccttaaaacaaaaaatagcgattacgatctacacatccaatgttgaaagttcagatgattataaagaaattctaagcaactatgtaaaccttacattaaaaagaacagtgaattttagtagttttatttcatctttcgaaatttctatttgcgacgactcattatttcgtgagcaaggacatgacaggtatattgcgtttgatgataaggtttgcaccttggggagaggtatcgcgatctttagagattaccctgttcctaactgcacatttagcataaaagatataaatcaaactcaattcaactcaatcttgacaaaactttctaagaatagaaaggctgtaatataa

SEQ ID NO: 96051 - DNA, 840 bp, Enterobacter aerogenes
atgagttataacgctaaggtctttaatgtgatgattgcgtcacccggtgatgtcgcatcagaacgagcaataattcgagacgttatatatgaatggaatgcagttcattctataacaagaaatatagttcttttgcctattggttgggagtctcattcttctccagaaatgggggcctcggctcaaactattataaataatcaggtccttgataaatgtgatctgctaattggtgttttttggacacgcattggtactgctacatcagaatattcgagtggaactgttgaagaaattgaaaagcatataaatacggggaaaccagcaatgctgtatttttccagccaacctgttgctttagactcagttgatttagagcaagttcagaatctaaatttattcaaacaatcttgccaacgtaatggactttatgaaacttatgatagtcatgctgattttaaacaaaaattctatcgacatcttcaattaaaagtgaatgagcatgggttattttgtgattcaatatcgattccgaatactgagattgtcgaatcaaaagttaatataccaaacctagctgctgaatcacgaattttactgaaagaagcaagttcagatggacatggaacagtaatgcatcttcggtatattggcggaaccgatattcaaactaatggtaaaaacttcatacagaaaaatgagcgacgcgaaatcgctcgatgggagtctgcaattgccgaattagttcataatgaattgctaattgaaagagggcataaaggggaaatctttgaggtcacaaatttaggatatcaaatcgcagatatgattaaaatatga

SEQ ID NO: 96052 - DNA, 564 bp, Enterobacter aerogenes
atggatacgcagatgaagaagattttactcgttgctggcgcagctctggcactggcgggatgtggagagaaaggtgattttgaaaaagcgattaacgcgaagatatcaaaatcgaaggtgtgctattcactacaggataatgatcgcgtgtttaataaaggttttcctgttcgggttaatcgtggctatcactctgccggatacaatgaaagtgatgaaatcttaaatggtctgtctgaacaaggactgtttgatgtttcgcaggagtctaacggctttagcaacgttgatgttctggaagtaacggataagggtcaagaggttgagttctgggatcgcaaagatggtgcctgtgtgggtcatcgtgccgtagctgaaattaaagaatggacagaagccgatgcaagtggcatgaagattgttcgcgtgtcgtatacgtggaaactagctgatgtgccgggctgggtagataaaagcgcattcgctggcgtcagaggaatgactgaacctgctgaaagcctcatatctcttgttaagaccagtaatggctggaaagccaactaa

SEQ ID NO: 96053 - DNA, 474 bp, Enterobacter aerogenes
gtggaagcagcaggtatcgtatttttagtagtgctcttcgtcgttatcatgaccgcagtagatatacagaagaaaaagcactacaacagcttcactgaagttctggacggcgacattttatcttatgaatgccaacgaactgggatcgtcatagataccaaacagcgcacaattcgttttttcgataaagaaaaagacaagacatattcttatgacaatatcagagagatcaattatacgctttcagaaggtggtaagttttacggcaatggaacattacgaggtatgaacaatgcggctattgctaactggagagaacaactttcagctaatcaacgttctggcctaaatattttaaccgatgatattaaaaaccccatgtggaaaattaatattcccttgaagaataaaaccacttcaaaccaagaactttgcgaacgctggcttcttgtcttcaaacaacatgttttttaa

SEQ ID NO: 96054 - DNA, 918 bp, Enterobacter aerogenes
ttgaacattaaagcaacaccagtattaatctcacttgtctacgaagctcttttaagatccttttggcgtaaaccggcgctgaagaaatttttattgtcttcacatatttccgaaaacttcatttcaacgtggagggaagatgagtcaaagaggactttcttagatcgtttattccctaaactgcaaagtaatgcaaaaggtaataatgttatttgtctgatggcaattaatctttctgaacagacttcttttcctgatttaagaggctgggaggattccttacaaatgatccagtcggcaaccaatgctgtaagagatttgaaatcctatattacaaaacaaaatgaagagcatcaaagtgaaaaagaaaaacaagaattcagggcgcgagcagaaaaagagagggctgaaataaaacgctccgaaacagatttgattaagttaaaatctgagtttgagtgtttgcataatgaaattggaacacaaaatggtggctatgagtttgaaaaatggttctttaagcttgtagactactgcgaaatcgtttgtaaaaagccatataaaactgatggtaggcaagtagatggagccataactattgatggtacaacttatcttgttgaattaaaatttaaaaaatcacagtctgatgctacagatatagattcattaaaagctaaagtaagtaaaatggcagataatacaatggctgtaatgatttctgtatccggttattcttctgttgctataaaagagtcatccggtagccgaactccactaatattattagactttagtcacttatatttatttctttctggtggcatgaaattcgatgagataatcacacgtataagacgtcattcatctcagactggagaagcttacctacctgtaaatttattcgggggattttaa

SEQ ID NO: 96055 - DNA, 984 bp, Enterobacter aerogenes
atggaaggtaaattaattttttgttccgatgcaatactgcggtttcagtccgattacgatgaaacctcggcggttccattgctatccatccagaacacgatagccaataccgatcccttctttcttcttcgcttcttccaccatacgactctgattgaagaaggaacaacactggcaagtatcttcttggcaatagaaccgtggaaagcactgttagcgtcttatctgaacagagattttggtgcctacatagatgagataagaaaaccgtcagggccaacgacatgggatattgaatggattggaattgaccgtcgcagctcggtttatcgcgcttacaagcgtcagaacatggaagaaggagaagatttttcgacctattttaatcgcgagcggttcccgactgatgagtttgacatagaaagtagctgcgatgcttcaggcttcattaaaggtgataaagaacgctggagtatcagtggtgatgttcatgagataaagaatctgccagtaatcctctatagcaaacagacattgatgacttcagcgaaggacggattgttgaagaagaacgtatcaggggtgaagagttccaagcatagctgctttgtttatggcgatacctcgttttctttcagtgaggtaatggaagctatcttcatcagtgggctgttcttctatgcgccaagaaacgccgccagtagtcttgatgaactgaaagcgagcgtggctgagttggaagaagaactggccgaggtatcaaaaacggagctggtagccaacgaaacagataaagaacctactatagtcgtagccgaaggtgcttttgattcggtcgctgctcatatggagtcagaagctgaagagtggcaatccattaagaagctgtgccagcgagaaggtgagctacccatacgcatcggtagtattaagatggctgagcctgctgagctacgcttgtgcgggaaaattatacgtggatag

SEQ ID NO: 96056 - DNA, 261 bp, Enterobacter aerogenes
gtgaacaacactaaaatcattacactatttcaatacaatgaatatattccatttatgatctgcgtagtaagcaagataaaagaaatcggaaacggaataaaactcactcttgaaaacggtaataacgtctgtattgaagactatggttattactttttgtccgaatctgcaaatacttatgataataagcgaataataaatatctatgcacgttttatttctgaactcagccagataagtgaggaaacaataaaatcatag

SEQ ID NO: 96057 - DNA, 669 bp, Enterobacter aerogenes
atgatacagatagatttcaaatcccttaacgatttatcaccttttgaactaaagcaatatattgataagcatcatttcacctctgaacagaaagtacagatattcgaacactattacagcacacataaagatattaccaacatctattcaagaaaagaaaacatcaaatccatcaagaaagatgttgattatgtccatatgttcactaaaaacttccaacagctcgcagagcttgatatctcaaagaatgagttaaaagtcatcgcaaggatcttaaatatcatggagtttggaaactgctttcatatatcgcaagccaagctatgtcgcgacttagatattaaaaaatcaaatatgtctcttgtctttaaaaagctcaaaaagaaagggatcattattgataaagacggagacctctttatgaattccaacatatttcttaaggggcaagcacattctatcaatgctaaacagcgacctaatgtcaaaaaggcacagggatttgttgttgatgagaaagaaaggtttgagaacgtttatacttttcgatcagatactgatgaaagcaataatatggacagaaatggtgaaccatctacggatggtgaagatttgaaactacagacccctgagaagatgcccaaatacctatttgaagagacagaataa

SEQ ID NO: 96058 - DNA, 405 bp, Enterobacter aerogenes
atgagtgaagctctcaaggcactgaacaatattcgtacacttcgcgcgcattctcgtgaaacagatctggcaactctggaagatatgttggaaaaactctctgctgtcgttgaagatcgccgcgaggaagaaagtgccgtccgtaaagaacaagaagaacgtcaggctaagcttgaagccttccgccagaaactgttagaagatggtattgatccggcagaactccttgctgctgttggctcatctcagcctaaaaccaaatcgactcgtgctcctcgccctgctaaatataaatatacagatgaaaacggcaacgagcagacttggacaggtcaaggccgcactcctaaagcgatcgctgctgctatcgaagctggtaaaacgctggaagacttcgcgctctga

SEQ ID NO: 96059 - DNA, 153 bp, Enterobacter aerogenes
atgacatgcaaatatactattttatgtgatgggcaattatacgatgccttacatttagccagagaatgtattcaactttgggactcttatacttctgaacttaacgccctgaaaaaactagaggttaataatgactctgctaatacactatga

SEQ ID NO: 96060 - DNA, 396 bp, Enterobacter aerogenes
atgggctgggagcttcacatagtaagaacagaatgttggtttgatagcgcaagtgatccaataagccgtgaagaatggctccagcttgttaatgacgatgaagaactatccatacataacaagaacggtgatacttatgctatatggagcggtcagagtgaacatgatgagccttggcttgactggagcgatggaagaatttcaacaaaacatcctgacgaagccctttactgtaagatgttgcaagtagctgagaagctaaatgctatagtcattgatgatgatgatcataaatatttattaccaagtgatcttatgaatccatcatgggcgaaattatcacctacggataggaaacaatcattatggggcaggttaatttcaaagcttaaatga

SEQ ID NO: 96061 - DNA, 297 bp, Enterobacter aerogenes
atgaatatatttaaaaataaatccactgaaatcttttatgttgtgtctttgcatatctatgcggaactttttaactcaaaggataaaacgaccagtaatatgattataacgcatgtaatggatcatgagtttatctgtaggctaatcgatcttgcgatgagaaatgcggagaagcatcttctgaaaaaagcatggaaaaagaacgctgatgaaaaactgtctgaggtggattttaaagaggttaagcaggcattagccaaaatgcattacactgttctggcggaatcaatatgttga

SEQ ID NO: 96062 - DNA, 336 bp, Enterobacter aerogenes
atgaaaataaaacttaatacgacagagcagtttattagtgaagccgaatgtttgtataaccattatatgaataaacgactacgaaaccagtcagtgcattcctaccattttctgaaaaataaggaggatatgaccgaagtgattgaaaatattatcaagaaaacaaaggtctgtttttatgggggcgaaggtgaacaaaaagtggaacggatctccgggagtgttaactatgtgaaagtaaaacagcatcttcgacagctttggatttgtataccgctaatgctcatactcatacaaatattttgctattccaatattaaactaaagaggaaataa

SEQ ID NO: 96063 - DNA, 846 bp, Enterobacter aerogenes
atgaaaagaagtgaaatcaggaaagcactggaagcatggttcgatgtcgagcgctatgaggcgatagagaagctaagccttcaacagttttatgttgagattgagcggcgtatcttggcctataggatgttgctgagccggaatacgataccgaccctgaacagacttttgctggatgactaccgctataaaattttgcgaggcgaaatctttttcagtggtgataccgcgacccttggacatgagcttgccagaacctacgcagtaaatcctacgacacgaagccacgcgcaattttatgcaaaaacgctggaattaaccgaagccactcctgatatttccgcgttaagcgaatccgaatttctgtctgagtatctaaaagagacattgctgaaaaacattgcccgtatcactgtcgatattcatctggaagaggcatcaactgaagagatcattgaacatctgaaagtgctaatcccccaatggaagaggcagctaaagatgaaagctcctgcggaacgggagtatcgttttggtaaaagcacgttcagaaaaattattgaatatcgtcttatcccgatgatggacctgattttctggggtgaggacaatggcgtcaaaatcccgctttcactgatttcttcgctgcttcatgaagacagcgacaacgatcgtgatgaaggaatgctaaaggcaacggactacccgttagcaatggcttttctgactgatgcaagctatctaaaatcgcttgaagattacatcatgcaaaacaatcacttaaaagactcacctgttgataagcatgttgaggactataagaagaagaaaaaagcagccaagtaa

SEQ ID NO: 96064 - DNA, 774 bp, Enterobacter aerogenes
atgaactcatttgaacgaaggaacaaaatcgtcgatatggtgaatacgcagggcagcgtattggttttagagctttcgaatctctttggcatttctgaggtcaccattcgcgccgatctccgtatgctggaagagaaaggactgctgacccgttttcacggcggcgccgcccgcccgggtagcgatctgaccgagagtgataatctggaagtggtgctggaagatcgttaccagcttgccagcgatccgaaaaagcgcatcgcccaggccgccgcggcgatgatccatgagggtatgacggtgatcctcgatagcggcagcaccaccctgctgatcgccgaggcgctggtacgaatgaccaatatcaccgtcatcaccaacagcctgcccgccgcgtttacgctgtcggaaaataaagatattacgctggtggtatgcggcggtacggttcggcataaaacgcattcaatgcacggaaccatcgctgaacgttcgctgcaggggatttgcgccgacctgatgttcgttggcgccgatggtatcgatgcgaccaacggcatcaccacctttaatgaaggttattcaatcagcagcgtgatggccgccgccgcgcatcaagtgatcgccgtgctcgacgccagcaaattcaatcgccgcggctttaaccaggtgctgccgatggacaaaattgactgcgtgattaccgacgacggcatcagcgataccgaccgcgcggcgttaaatagcaagaaggttgaattgaagatcgtgtaa

SEQ ID NO: 96065 - DNA, 1044 bp, Enterobacter aerogenes
atgaaatcagtggtaatccatgctgaggggaacgtctgcgttgaagaacgccccatccccacgctgcaaacggaagacgatgtcctggtcaaagtggtcagctccgggctgtgcggctccgatattccgcgcatcttcgctaaaggcgcgcattactatcctattacgctggggcatgaattcagcggctatgtggagtcctatggcgcgtcggtgaccgacctgcagcccggcgacgccgtcgcctgcgtgccgctgctgccctgcttccagtgcccgcagtgccagcgcgaatatttctctttatgtaagcagtatcagttcgtcggttcccgcagcgagggcggcaacgctgaatacgtggtggtgaagcgcgccaacctgttccgcctgccggatcaaatgcccattgatgacggcgcgttcattgagccgataaccgttggcctgcacgcttttcatctggcgcagggctgcgaaggtaaaaacgtcattattatcggcgctggcaccatcggcctgctggcgctgcagtgcgcccgcgagctgggagccagaagcgtcacggccatcgacattaatccacagaagctggagttggctaaaacccttggcgcgacccgcgtgttcaatagccgcgagatgagcggccaggcgattcaacaggcgctggaggaaatccagttcgaccagctcgtcctcgagaccgccggtacgccacagaccgtcgcattagcaattgaagccgccggaccgcgggcgcagttggcgctggtcggcactctgcatcacgacctaacgctgcctgccgccaccttcgggcagatcctgcgtaaagagctgaatatcgtcggtagttggatgaactactcaggcccgtggccgggagaagagtggcaaacggcgacccgcctgctgacggataaacgcctgcagttggcgccgctgatagcccatcgcggcgatgccgagagttttgcacgcgaagttcaggcgctaaacggcgcgccaatgcagggtaaaatccttctgaaactttcctga

SEQ ID NO: 96066 - DNA, 1383 bp, Enterobacter aerogenes
atgtttagcgaaatcatgcgttatatcctcgatcttggtccgacggtgatgctgccgatcgtgatcattatcttctccaaactactggggatgaagctcggggactgtttcaaatccggtctgcacatcgggatcggttttgtcggaatcggcctggtcattggcctgatgctcgactccatcggcccggcggcaaaggcgatggcggagcatttccagattaaccttcacgtgattgatatcggctggccggggtcatcgccgatgacctgggcgtcgcaaattgcgctggtggccattccggtggcgatcgtggtcaatatcgtcatgctggtcacccgcatgacccgcgtggtgaacgtcgatatctggaacatctggcatatgacctttaccggggcgatgctgcatatcgcaaccggttcgtactggatagggattctcggcgtcgtggtccatgccgcctttgtttacaagctgggcgactggtttgccagggatacccgcgatttcttcggcctggatggcatcgcgataccgcacggcagttcggcgtacttagggccgattgcggtgctcgtcgataccatcatcgacaaaatccccggccttaatcgcattcactttagcgccgatgatatccagaaacgcttcggccccttcggtgaaccggttaccgtcggcttcgtgatggggctggtgattggcatgctggcgggctatgacctgaaaggcattctgcaactggcggtgaaaaccgcggcggtgatgctgctgatgccacgggtcatcaaacctattatggatggcctcaatccgatagccaaacaggcgcgtaaacgtctgcaggctaaattcggcggccaggagttcctgattggtctcgacccggcgctgctgctcggccatacctcggtggtatccgccagcctgattttcatcccgctgagcattctgatcgccgtcgtggttccgggcaaccaggttctgccgttcggcgacctggcgaccatcggcttcttcgtggcgatggcggtggcggtgcatcagggcaatctgttccgcaccctgatttccggggtcatcattatgggtatcaccctgtggatcgcgacccagaccatcggcctgcacactcaactggcggcaaacgccggggcattgaaagcaggcggtatggtggcgtcaatggaccagggtggttcgccgattacctggctgctgatccagctctttacctggcagaacgtggtcggcttcgcgattatcggcatcatctatctggctggcgtcctgctaacctggcgtcgcgcccgccgcttcatggcggtagagaaagcagagaaaagcgccgccgcgcaacaacattcaaccgcatcttaa

SEQ ID NO: 96067 - DNA, 285 bp, Enterobacter aerogenes
atgaaacgtaaagttattgttgcctgcggcggcgccgttgccacctccacgatggccgctgaagagattaaagaactgtgcgcagaccacaacattgagctggatctggtgcagtgccgggtcaatgagatcgagacctacatggacggcgcggaccttatctgcaccaccgcccgcgtggaccgcgccttcggcgatattccggtggttcacggcatgccgttcgtctccggtgtcggcattgaagccttacagcagaaaatcctcggcatcctcgcggagtaa

SEQ ID NO: 96068 - DNA, 468 bp, Enterobacter aerogenes
atgagtcaattgtttgttcgtaccggcattcatttcagctccagccagcaggcgctggaacatattggcgcggagatgctggcgcgaggtgttgtgcatgatagctatccggcggccttgctcgaacgcgaagcgacttttccgaccggtatcgcgctggagcagcacgcagtggcgattccccactgcgaagccgtacacgcgaaatcaccggcgatttatctgattcgcccggacgcgccggtcccttttcagcgtgctgatgacgatggcgatatcgacgtttcgctgatcatcgcgctgattgttgaaaacccggcggcacagttgaagctgctgcgccggctatttagtgagctacaaaatccaaacatgctggaggctctgctcgccgcttccgacgagcagttgccggtactgttccagcaatttatccttgagcccgagcttagcgcccaggcttcataa

SEQ ID NO: 96069 - DNA, 1272 bp, Enterobacter aerogenes
atgaaagatattatctctcgccataaatccggcgaacacatcggcatctgttcagtttgttccgctcatccactggttatcgaagcggcgttacgtttcgatctgccaaccaacaacaaagtgctgattgaagcaacatcgaaccaggtcaaccagtttggcggctataccggcatgcagccagccgatttccgcgacttcgtctacagcattgcccacaccgtcggtttcccggccgaacgcattattcttggcggcgaccatctgggcccgaactgctggcaagacgaaccggctgccgacgcgatggaaaaatccgtcgaccttatcaaagcctatgttgccgcaggcttcagtaagatccacctggatgcgtcgatgtcctgtgccgacgacccggtgccgttgaacccaagcgtggtggccgagcgtgccgcccgcctgtgtcaggccgccgaagagacagccagcgatgagcaaaagcgccagctgacctacgttatcggtaccgaagtaccggttcccggcggcgaagccagcaccatcggcagcgtacacgtcacccgagcgcaggatgccgccgccacccttgaaactcatgaagcggcgttccgcaaattgggtctcgacgcagcgctggggcgagtcatcgccatcgtcgtgcagccgggcgtggagttcgaccacacgcaaatcatccattaccagccacaagaagcgaaagcgctatccgcgtggatcgaaaacaccacgatggtgtacgaagcccactccaccgactaccaatcccgccaggcctaccgcgcgttggtccgcgaccatttcgccattctgaaagtcggcccggcgctcacctttgccctgcgtgaagccattttcgccctcgcacagatggaaaatgagctgatcgcgccggagtcccgcagccgggtgatggaggtcatcgacgaggtgatgctcaacgaaccgggctactggaaaaaatactatcgcccgacctggagtcaggcgatggtcgatatccactttagcctttccgaccgtatccgttactactggccgcacccgcgtattcgtcagagcgttgagaaacttatcgcgaacctgaccgacgctaagctgccgctggggcttatcagccaatatatgccggtgcagtttgaacgactgtcgctgaatgaactgaacgccgtgccgcacgagctcatcctcgacaaaatccaggatgttctgcgcgcctaccgctacggctgttctcctgaaaccgcgtga

SEQ ID NO: 96070 - DNA, 816 bp, Enterobacter aerogenes
atgcagctgacttccgcagatattcatttcgaccatcaggtcaaaacgaaagatgaagcgctacagcgcgtcgtcggttccctaaccgcagccgggcatacacagatggcctatctcgagggaatgcgcgaacgcgagggacaaatcagtacctatctgggcaacggcatcgccattcctcacggcacgccgcaaagccgcgatgcagtgctaagaaccggcgtgaaggtgctggcctgcccgcaaggggtggactggggcgaagggcaaaccgcctatttgattgtcggtatcgccgctcaggacaacgaacatctcgatatcttacgccagctcacccatgcgctaggcgacgatcgggtgcccgtcgcgctgtcgcgggccgataccccgcaggcggtgctggagatacttgctggcgatatcgcgccggcgcaaggcgaagaaccggaaccgccgccgcgctttgatgaagaggcgacctttacgctgcgcaatccgcacggcctgcatgcccgacccagcgctgtactggtgaaagccgtcaagcagtggcagtcgcaaatccaggtcgaaaacctggatacacgctcgtcgattgtcgatgcaaaaaatctgatgcgcgtcgtatcgctgggcgcaaaacagggtcatcgcctgcactttatggccagcggcagcgatgcgcatcaggcgctgaaagcgattggcgacgcctttaacgccgggctcggcgagatcgccgcccaaccacagcaggtttctcaggcggtcgaaaaaagcaaacgcagctggctatcccgattatttagttaa

SEQ ID NO: 96071 - DNA, 1413 bp, Enterobacter aerogenes
atgaaaaagattattgccgttaccggctgccctacaggtattgcccatacatttatggctgaagaagccttaaagaccgcagcaaaaaaattaaacgttgagatcaaagttgaaaccaacggtgcttccggggtagaaaatgtcattacaccggaagatctgaaagatatttatggtgttattatcgctgccgataaagatgttaatgccgaacgttttaatggtttgccggttattgaagtgccggttaaagaggccattcatcatccggcagaattaattaataaagtcgtcagcggtcaggcgcaacgccgtcaggggatctccgccgcagcggatcctgcggagaaatatgagcaggaatcattcggccggcagatttataaacatctgatgagcggtgtttccaatatgctgcccttcgtggtggccggcgggatcttaatcgccatttctttcctgtggggtatctactccgccgatccaaattcagcgcagtacaacgtgattgccgccaccctgatgaaagtcggccagcaggcgttctcgatcatggtaccggtgttcacggcctacattgcctggtccatttccggccgtccggggatggtcgccgggtttgtcggcggcctgctggcaaacgccaccggcgccgggtttctcggcgggatcatcgccggtttcgctgccggttactttatgctgcttatccgccgcctgctcgacggcctgccgcgtcagtacgaaggactaaagtcgatctttattatgccgctgattggcgtactggtgattggcgtgatgatggtgctacttggccaaccggtggcggcgatcaacaacggcatgatgaactggcttagctctctgcaagaagccaatcccattctgctggggattgtggtcggggcaatgtgttcattcgacttcggcggcccggtcaataaagcggcctacgtcaccggtacgctcctgctaggacagggcaactatttctttatggccggcgtctccgctgcctgcattaccccgccgctggtgattgcgctggcaaccacgttcttcccgaaaggctttagcgaagaagagcgcgccgccgggatggtgaactatatcctcggctgcacgcacattaccgaaggcgcaattccctttgccgccaaggacccgctgcgggtgatcccgatgatgatgatcgcctcttcaatctcggccgttctcagctacagcctgcatattcaggttccggctccgcacggcggcttcttaatcctaccgctggtcagcaaaccactggcatgggtattgtgcattctcgccggttccgcctgcggcgcgctcatgttgggatgctggcgattgtggcagaaacgcactcaggaagcgacggcgcttgccggcgccatcaaataa

SEQ ID NO: 96072 - DNA, 915 bp, Enterobacter aerogenes
gtgatccataccctgacactgaataccgcgatcgatatgaatatcttttgcgacccgctccggcctgcggccgtcaaccgcacccggcagacggaatattgcccgaatggtaaaggggtgaacgtttcgctggtattagatcattatcggcaacccacccacgtcatgggcatatttggcggctttaccggccgctatattgttgaagagctgcgcagacaacatattaaagtgacaccggcatgggtcgccgatcctacccgtattaatatttttattaatgacggacacgaagaatataagttagtgaatcccggctcgcgtattaacgatgaaggcaaagagcaaattattcatcatttacagtgcgtcgagcccggcgattatttagttatcagcggcagtctgccgccgggaattgaaagccgattctatagcgaaataatggaattgtgccaaaaaaaaggctgtgaagtcattttagatatcagccacccggcgttgcgccagctgctggagctacgtccgctattgattaaacccaatgacgacgaactcaaagagatcttcgatctcgacgtcggcagcccgcagcaggtacatgacgcaatgtgcacgctccaccagctcggggcccgaaacgtgctgctcaccctgggcgcgcaggggctctacttttcaaacggcgagcagttgtggttctgctcagcgccgaaaatcgagctggttagctcagcctgcgccggtgatgccgcgctgggcgccttcctgagtaaatggcttaacgaagatgatgtcgcccacgccctggcgctggccagcgccaccggcgccgatgttgccgcctccgccgggcttggcaaattaaaccgtacacaagaattattacaacaacttcagatcgtccaattataa

SEQ ID NO: 96073 - DNA, 855 bp, Enterobacter aerogenes
atgtacatcatttccagtaaaaacatgctattaaaggcccagcgtcatggttacgcggtccccgctttcaatatccataatcttgaaaccatgcaggtagtggtggaaacagcagcagagctgcgctcgccgctgatccttgctggcacgccgggcacctacagctatgccggcaccggtaatgtggtggcgatcgcccgcgatctggcgaaaatatgggatctcccgctcgcactgcacctcgatcatcacgaggatttggccgacatcacgcacaaagtacaggcgggcattcgctcggtcatgatcgacggatctcattcgccgttcgaagaaaacgtggcgctggtgaaaagcgtggtggcgttaagtcatcgttacgatgccagcgtggaagccgaactgggccgactgggaggcgtggaagacgatctggtggtagacgccaaagatgcactctataccaacccagaacaggcccgcgaattcgtcgcccgtacaggaattgattcactggccgtcgccatcggcaccgctcacgggctctataccgccgaaccgaaacttgattttgaccgcctggccgccatccgcggctgcgttgacgttccgctggtgctgcacggcgcctccggcctgccggatagcgatattcgccgcgccatttctctgggcgtgtgcaaagtcaacgtcgccaccgagctgaaaatcgccttctctgatgcgctgaaaacctacttcctggaaaacccgggcgccaacgatccgcgtcactatatgacgccggcgaaagcggcgatgaaagaggttgtccgcaaagtgattcacgtttgcggctgcgaagggcaactgtaa

SEQ ID NO: 96074 - DNA, 840 bp, Enterobacter aerogenes
gtggcaaaaccgtcaaccagcctgctgaaaaggcgcttggacatcgcggagatcgttcgtaagaacggcgagattaaagtcgacgatctggctgaaatgctggccgtttccggagtgacaatccgtaacgatcttaactacctcgagcagcagggatatctgaagcgttcattcggtggggcgatttacacggctcaggccggcacgccggtcgcaacggttcgcgacgccccacaggtgacggacaaagcgctggaaacggaaatggcgcgtcaggtggcggtgcaaattgaagatagcgaaacgctatttttaggccagggttccattttgcgtaaagtgatcccgtttctggctaacagtgaggaactttgcctgctgcttaacgatctggcccacgtcgcgctggcgcaggagtttctgaatggagaaacggtgctgctcggcggcgtacttagcggcaacgggcggattgtcgaaggcgatctggcgctgaaagcgttaggtcattaccgaccatcgcgcgcgctgattgcggttgatcacgtcgcagaggacggcaccctgagcgtacgtaacgaaactagcgctcgcctgctgggcgaagccgtggcgcagagtgagcgggttattgcggttgttgcttcccgtccggtttatggcgaaaaacgttatgccatcggcgaacttcagcaaatgagtagcgtggtgacgccgcaggttgtcgccgcggaatatcatgcccgtttcctagccgcgggtctgaccaatagctataccaacaatgaatgcctgacatggctcaacacggctttgcagaagacaaaccaggagcggtga

SEQ ID NO: 96075 - DNA, 951 bp, Enterobacter aerogenes
atgaacgtaaccatttgcaccatcggcgagctgctggtggaatttctcgccaaggaagaaaaccagggattttcccgccccggtgaattttggggcccctatcccagcggcgcgccagcgattttcgccgatcaggtggcgaagctgggttttggttccgtgctgtttagctgcgtcggcagcgacacatttggtgaaatgaatattgcgcggttggagaaagacggcgttaacgttaacggcatcgccatgctgcagaaagcgaccaccggcagcgcgttcgtcagctatcgcagccaggcgcagcgcgactttatttttaatatgcctaacagcgcctgcggactactgaccgcggaccatatcgacgaggcgctgcttaaccagtgccagcatttccacattatgggatcgtcgttattctcgtttcgcattattgatgcgatgcgtaaagcgattgaaaacattaaagcgcgcaacggcacggtgtcgttcgatcctaatattcgcaaagagatgctcaatattcccgagatgtcgcaggcgtttgaatacatcctcgattacaccgatatcttcctgccgagcgacggcgaactggactacttcggcctgaatccggggcggaatgagcaggtactggttgataagctgctgaaacgcggcgttaaacacgtggtgattaaacgcggcccgcgcggcgcgagctactttagcgccgctgaaacgcaccatgttgccggttttaacgtgccggtggtcgatccgaccggtgcaggcgactgcttcggcgcgactttcgtcagcctgttcctcagcggcgccacgccgcaggaagcgctgaagtgggccaacgccagcggttccctggcgattagccaacgcggacctatggaaggcacttcaacgcaggcgcaaatcaaaacctttttggcagcgcaacaccaataa

SEQ ID NO: 96076 - DNA, 792 bp, Enterobacter aerogenes
atgacttcacttgaaagaataatagaagcaataagatcacataagtttgtgtcatcgatcataatcattttcatgacagtgatttttttaatacctcttcacttgtatttcaaaacattccattacgccctctcaacggacccaaatgtttgggccggatttggttcttacatcggcggtgtatacggcccgctagtaacaatcatcagcgtaatcgttctagtaataactgtggtagaaatcaaccagtcaaataagataaatatcacagaatcgaaaaatagcaatcatatcaatggaatagttacattatgtgagattttagataaaagaatagataaaaacccacttattcaaaatagaaattatcagtttgtttttttgaatgatattatacgtagaagaattgcagatgatgactcattaaaagagtatgatatctggaaagaaagcattagaaaatttaataatgatgaactaccctttttcgaaaatgaatcaaaaatcatggaggagattttactaagaatcaactcaagtgaaacattagaattaaaagaacgtgcaataagcattttttatggaatcatacctaatgatgaacgattctggcttgaatgctatatgcatcgttttaaatcacaagagttagagcccttaattccttcatggggaagttttagtcgagttccaacattacttaagaatctcgtcgaacaaaatgaattagtaaacgaattcgctcagcaaagtggcgataaagtggcggtagaaatggcgaataaagggtaa

SEQ ID NO: 96077 - DNA, 576 bp, Enterobacter aerogenes
ttgatacttgatactcaggtgaataacgacgagctactggatagaatttgtcaagtgtatggttttactcaaaaaatccagctagcccggcacttcaatattgccgccagttccctacaaaaccgctacacgcgaggcactgtttcttatgatttcgccgtacagtgcgcactagaaaccggagcaagcctactatggcttcttacggggcaaggctctcaatatgacggcaaaccgtctccaacggatccgaaatcgatagactccttcactctgagtgatggaaagctcgaagaaaattcaccattgagtattgatgccggtttttttagcaagcaaatgtcaaaaggtattgctgttcgcgccgatggaaagctgcacttcatagaacaagatgcctcactttctgatggcctttggttggttgatattgagggagctaccagcatcagagaattgacgctcctacccggtaaaaagttacacgttgcgggcggcaaagtaccgtttgaatgcgggatagatgagatagaaacgattggccgtgtagtgggtgtatacagcgaggttaactga

SEQ ID NO: 96078 - DNA, 264 bp, Enterobacter aerogenes
atggcttctgaaatcgcaatcatcaaagtgcccgcacctatcgttactctgcaacagttcgctgaacttgagggcgtttctgaacgtaccgcttaccgctggacaaccggcgacaacccatgtgtaccaatcgaaccccgcattatccgtaaaggctgcaagaaagcaggtggcccgattcgtatctactacgcgcgctggaaagaagagcagttgcgtaaggcgttgggtcattcccgttttcaactcgtcatcggtgcttga

SEQ ID NO: 96079 - DNA, 510 bp, Enterobacter aerogenes
atgtttgattttcagatttccaaacatccccactatgacgaagcatgccgggcttttgcgcagcgtcacaacatggcgaagctggccgagcgtgcgggtatgaatgttcagacattacgcaacaagctcaacccggaacagcctcaccagttcacgccgcctgaattgtggctgctgactgacctgaccgaagactcaactctcgttgatggttttctggcgcagattcattgcctgccatgcgtgccggttaatgagctggctaaagacaaattacagtcttacgtcatgcgcgcaatgcgtgaactcggcgagcttgcgaacggtgcggtatctgatgaacgcctgacctctgcccgtaagcacaacatgattgaaagcgttaacgctggcattcgcatgttgtcgttgtcggcgctggcgctgcatgcgcgtctgcagactaatcccgctatgtcgagcgttgtcgataccatgagcggtattggcgcatccttcgggctgatttga

SEQ ID NO: 96080 - DNA, 201 bp, Enterobacter aerogenes
atgctgaaaagtgaaccttcattcgcgtctctgctcgttaagcaaagccccggcatgcactacggccacggctggatcgcaggtaaggacggcaatcgctggcacccgagccgctcacaggctgatttgctggctggcctctctactcaaaagcagggggaatcatggctatcgaagctgtttctgcgactgttccgctaa

SEQ ID NO: 96081 - DNA, 339 bp, Enterobacter aerogenes
atggctatcgaagctgtttctgcgactgttccgctaaaagcgggtgaacgtctggccggtctcaatcatgtggctgaactgcgcgcgagatattggggcgatagctggaaagaggttgagcgttttgtcgatgatatgcgcgataaacgtgacccacaatttgaagaaaataatcgggcgctggccgctattttctttctggcaaaaataccggcggctcgtcatgagctcgaattaagtgagctgactactgacgagaaaaaggcgcttattacagcgatgaatcattttcgtgcagtggtgagtttatttcccaagcggctaaccatgccgaattaa

SEQ ID NO: 96082 - DNA, 228 bp, Enterobacter aerogenes
atgcgtaataccgaaatccgtagttttaacactgatagtgatgcgatggccgtattgctgaccgatgcaaaaaaagaagagcgcaaagaccgtgcgctcgcagtttcaatccgccttgaggcgctggcgatacatatcaccaaagaggggatgagcggtaccgaagccgccgaactgctgcgccgtgaagccactcgttatgagaatgaatcacaggagctgcactaa

SEQ ID NO: 96083 - DNA, 222 bp, Enterobacter aerogenes
atggccgacgcaatggatttagcacaactgcgcgagcaggaagaccgcgaacgccacatcagcaacgcgcgcagccgtatcgctgcaccttcctgttttctctgcgaagaatgtgacgcaccaatcccggaagctcgccgcattgcgattccgggtgtggccttttgcgtgacctgtcaggaggtcaccgaattgaaatctaaacattatcggggggtatga

SEQ ID NO: 96084 - DNA, 441 bp, Enterobacter aerogenes
gtggatagagagttaaacgagcacgttatgattgagcgggtcgaaatgattgcgcgtctgacgtcagagggtacttgtaaggaaagagaccgcgaaatcgcattgaatttaattgcggagatagccagagggaacttaatgaaaaacaactccttttcggttgttttctccgcgacgcccgctaaagaacgattaaaaagaggtggtgaagtgagggtaaacattacgttggataaagaccaaaaaattggccagccggttattgatgcttttcaatgcgaattgacaaggcgaatacagtctgtttttccgtcaacgcgcgttacagttagaaagggatccatgacaggagttgagctgatggggttcgataaagactcagaccgcgaagcgctggatagtatccttcaggaagtatgggaagatgagagctggcattag

SEQ ID NO: 96085 - DNA, 1152 bp, Enterobacter aerogenes
atgaacgtagttgatttattctcaggggtaggcggtttaagcttgggggcagcacgagcgggctttaacttagctggggccgttgaaatagataaacatgctattttttctcatcaattaaattttccaaacgctacacatctccaaaaggatgtgagtaaactttgtgcaggagatattttctctgcatgtaatgttacagaaatagactgtgttattggcggccccccatgccaagggttcagttctataggtaagggaaacgctgatgatacaagaaatgatttgtatattcatttctttcgactcgtaaatgaattatctccaatttgttttctggctgaaaatgttccgggtattatgaatgaaaagtatgattccgtacgagaaaaggcattttcgttagtcagagaacgttactctttactacatcctattaaagtgaacgcctcaaactatggggcgccaacaacaagaactcgtgtgttttttattggctttagaaatgattattcaagtctgttaaaagaatctgactttttcccaaagagtttagttgaacaaatttttgttaaagatgccttatatggactgccacgaataataaaaaaagaatggcagagtgagtcacaaggctggagaaaggttaaaatggacagggaaggcgaattctatgaaagactttggggacgaattccacctaatgtaggtgatgctgaatcattaaataatttaaaggacggtctagtatcaggttttttaggcacagttcatacagaagaaatagttaaaagatatggcaacctgtcctttggggaaacagataaaatatcaagatcgcagcgtcttaacccaaatggcttttgccctactttgagagctggaactggtagtgataaaggcagctaccaagccgttcgacctattcatccgactcaggctcgtgttattacgccccgagaagctgctaggttgcaaggtttcccagattggtttcgatttcatcctacgaaatggcatagctttaggcagataggtaatagcgttagccccttagttgctgaagctatgctattacctttgtacaattactgcataaatgttaaaaatgaacttttgaataccatggaacaaccttgtaatattcaataa

SEQ ID NO: 96086 - DNA, 993 bp, Enterobacter aerogenes
atgagtacaggtggaagcatcccatatcatttgaggcaaaataaagccatcgaaaggaatctttttgtagaatccttaagaaggttgaataattacactaacatatctgattatgtttatgttggctttggtggaccttttcttgaagatttcaagcaaatacataacctgttaaaggttaataaaatgatatccatagaaggcgatagaaacgtacatcgccgccagcagtttaataaaccattatcttgtataaatttaggtgaagcgcctgaatttagtggtgattttatcaaccgttttaactttgatgatcagacaataatctggttagattacgcggtaccctcagcactaaatgctcaactaaatgaagtggttaatttaatcacaaaattaaagccaaaagacattttcaaagttacattgaacgcacatccagaaaccttaggaaaagatcctaacgaaagagatccaaaaccatttcgatatagaagaataaatgaaatattaaccgaaagctttatgcccattgatacatccgaagatgatgtcagtttgaaaaagtatcctacgttgcttataaatgctttaaaaagagctgttggcaatggtctaagaggtcgccaagacataagaattcatccgctaacgtctttcgtttataaagatgggcaacaaatggtaactctaacagcaattgtgcttgagaattcagacgaggaagaagcaaaattcattgattcttcgagaataagaaactggccattttatgcaggcgaatggcgtaaaccaaaggacattaacgttcctgcaatgtctttaaaagaaagaattcatattgaatcattattgcctgaggctacagttgaaaatattaatgaacaattaggattctatattggcaccactgctgcaggcgccaatatagatctcagtaattttattgaatattacaaggttgttccatggtattcaaaagttcatttttaa

SEQ ID NO: 96087 - DNA, 1425 bp, Enterobacter aerogenes
atggtttcgccaaatgttaaaatcaaagcctttccagcaaaaagatttttcgtggaaatgcttacaagagatattgaattatctgactcaatattggatttgttagataattgtcttgatggcgtcttgagaaaaaacaacttcacccctgaacaaacctttggaaaaaaagatgtttacaagggatatcacgctcatatcgagttcgacgaaaatagctttaaaataattgataattgcgggggcattccaggtgaacttgctgaggagtatgcatttaggttaggaagaccaactgagcgagaagcagaagaactcccaaccattggagtttacggcataggaatgaaacgtgccatttttaaaatgggcacttccgcgcagatattaagcaaaacagacaccgaacaattctcagtcaatatttcaccagaatggatgactgatgataacaattggtcattagagttagaacgtaaaaacgtcgatttagaaaacacaggtgttagtataatagtcaatgatttaagaaacgatataaaagcttctttatctaaagatcgtgattttgaaagtgaactgataaacatcatcggcaatcattatagcctgataataaaaaaaggattcgaagtaaaagtaaacgacaaaatagtaaagccaaccaatacaactcttatttttgacgaggagtcaataaaaggtaactccgatgggattgcaccttatatatatgagaacaattccaatggtgtatccataaaggtagccgttgggttttatcgtaatttaccgagtgaagaagaagaagaacaacttttgtctggccgctcgacaacagagaaagctggttggactatcatttgtaatgaccgcgtagtcctacatgcagacaaatcaaagctaactggttggggtgaggctggcgttcctcaatatcacactcaattcattggcatcgcgggcattgttatttttacatcttcaaatgctgagctattaccgataactacgaccaaacgtggagttgatggtaattctgaattatatctttcaacgaaagattttatgcgagaagggcttaagttcttcactgactttactaatagatggaaaagtaataatcaagaaagaaaggaaatcatcactacggcatctaacatgatttccacaacagaaactgatttcacaaagtctattccgcaggaaaaatggtcgacagttcgtcgttctattggcggtcaagttttcaaacctaaactcccaatgccacgagaatcagacccattacgccaaattaaatttagccgtaaagagagcgaaataaaattagtatcagaacatctctttgaagatgcaaacataccgccaactgaggttggtcagcattgttttgatatatatttgaagaaggctaaacaatga

SEQ ID NO: 96088 - DNA, 336 bp, Enterobacter aerogenes
atggcaaaagcaccacgtaaaacccctgaatttgttgatacggctggcaatgaaattgacaccgataacccgaatgtcgtgaccctcgataagccaatcaagcgcgccggtcagacaattgagaaagtcaccctgattgagccgagcgccggtaccctgcgcggtgtcagtctggcggcggtggcgcagtctgaagtcgatgcgctgattaaagtgctgccccgtatgacctatccgtcactcacagcggcggagctatccgcgatgagcctgcccgatatgctgcagcttgccggtaaggtgattggttttttgtcaccggcttcggtggaatag

SEQ ID NO: 96089 - DNA, 708 bp, Enterobacter aerogenes
atgtattcacataacagggataaagacaatttcgaaattaaattccagcaactcaatcagattattactgaattgagagcgaaatattttttgtatggcgggtctgagttttactttgaaacgcagaggtttgttcagcaaattaggcgggatattaacagtaactgcctcacctataagggaggaacagcattaattgtgcatctgacagagagtttacaggaacaggactcactttttacctttgagaaagtaagcgaatattatattgtaaagaaagaacaaaaagacaggaatcttcatctcgtattagctcaggtaggttttgttgccggtggcacccaaatttttggaggcgctggtatttgttctgcaacgttaggtgccgcgtgtgctgcctacggggtaccaatgatgctgcatggtataaataatgcttatgaaaatggctattatcttttataccgtaaaagcaaatcaggcggtgtaagggacgcttaccgtattgctgcaaaaaaattaggatatggcaataaacaaggtgatttagcctacggtgcggttgatctttcattaactgcatatggttccttcaggcaaaccctgttgcccagggagaagtcatggagcctgttccggcatgtaaaagcagattacatccgaggtggcaggaggcaggaagaatacctctttctcttgacggattga

SEQ ID NO: 96090 - DNA, 468 bp, Enterobacter aerogenes
gtggtcctactatcagagatcggggcgcatggggatgtacaggggcgtagatatgttgcaggatgtcccttcgctttaccagaaaatcgtaacagggaagggacgttaaacatgaagaacaaaatgttgctgggtgttgtatttctcttaacgggatgtccggggcctggcgatcgaatggtagatcgtgaatctacaacggcattaatcaaagataatcaagtttgtgtggtgtcaccactggagccacaggaacggatcactgctatccaaatcaatagcgataatagcgactctcttcacaagattttggatgacaagcctgtttatataccgaagggtgactgtcttcctgtattcggatttaagtttacatctggaaagaggtataactttgcgtatgacgtccaatctgataaatcagggtcacatttagtcactgctgaattttattatcccaaagaataa

SEQ ID NO: 96091 - DNA, 807 bp, Enterobacter aerogenes
atggatattgcgctgctcaacaggggctggaacagaacatggtcagataccatggtgaatcttgaagcccggaaactcgtcgaaacagcaaaccggctgtcagcattctatttgcaagatggtcttacacgaatcaagtttgtcgaagagataaaacaggttgtagataaagaatttgaaacagcacgacgagctaaaaccgatgaagaatgtattgtatgcatcaaaaatcttcgtgctgaaacagataatttgcaagaacaagaacgcctgttaagaaccagagccgcccaactttatgcaaaggtcgagtttgtcagggaaaacaataaaatcgtcggatacgtgatttcggcaatccatatagtggtatctggagcagcattatttggtgggatggttatgatgtccactatgacccctattggagttcttgcaggagcagttttatttgttgatggtattaacggtataacaaaagaagcaagccatcttcgctatggtgaacaatcaaaatcggaaggaatttttgctgatggcgcaatggagaccgcacaatttatggggtttagcccaaaaagtggattagctctttataatacggtgactctaggggcgagtgtctatagtatcttcggcttagcaaggaaacccggagcttggcgattattccgttggctgccgcgtgattactaccgaaaagttgacacaatgagcaagcctaagctaacgatgaaaatcgctggatatggtgtcaaagcgaaagtcatttttgatcttctggctactgataacagtactaattaa

SEQ ID NO: 96092 - DNA, 384 bp, Enterobacter aerogenes
atgtcgttccgtgaagggaaagaggcgaacggaattggccgtaagacccacacctgccgcgagttcctgatttgtgatgattccaccctgaaaagaatctgccggggcatgggccaactggaagcgatgcgccatgctggctttgccagactgggtgacagcccggaatttcgccagttgtggtgcggggagcctaagtctgttgatgacaatttcaacacgaagaatctgctaaagcttggtgctggctctatgaccgatcatccgtggcgattcagagagatacatcaggtcatccttaacccgacgcatatccagaaggtgattaatctgcgaagtgattcattacgcaggcaaagcggggtgaaaagttatcgccaataa

SEQ ID NO: 96093 - DNA, 171 bp, Enterobacter aerogenes
atgtccgatttcgacatggttggccaccgtcaggtggccttttttttgccttgtcgtcggtcgcaggctctttctcgcattaaaaaccgctattgcattgatttaatgaatattattgggaataatcactcgccgcttcgctggggaggggaggtggttaattttatgtga

SEQ ID NO: 96094 - DNA, 219 bp, Enterobacter aerogenes
atggccgccactattcgccataaccgggcgcgcgggcgccatcagatccacgcgatgtcggaaattgtccgcgagctggccaatctcggctggagcaattgtaaaatcagcaaagagctggggatggatgccgatgaagtactccgcctgaagcaaattaacggtctggccgagatgttcgccgaccgtcaattttctcaggcgtggacggtgaaatag

SEQ ID NO: 96095 - DNA, 1026 bp, Enterobacter aerogenes
atgcagacactacagaccaccagcctgcgggtaagcgaaaatcagctttttattctcgatcaacaggcattgccgcaggaaaaacgctggctggcggcggataacgttgcgctgctggtggatcatattcatgccctgcgggtgcgaggcgcgccgttgattggtctctccgccagcctgctgttggcgctgttagcccagcgcggtctttcccgcgacgagctcactcaggcgctggaaacattgcgcgcggcgcggccgacggcggttaatctgatgaataatctcgatcgtatgaagcaggcgctggcacaggaagactacccgcaggcgctggagagcgaagcgctacgcctgattgcggaagataaacagctgtgcgccagcattgccgaagctggcaatgcgctggtaacgccgggtagccgtttgttgacccactgtaataccggtggcctggcgacggcgggggttggcaccgcgctgggggttatcgctttggcccaccaacgaggcaaggtggctaacgtctgggtcgacgagacgcggccgctgctgcagggcgggcgcctgaccgcctgggagctgggtgagttgggcgtgccgtatcagcttattaccgactcaatggccgccagcctgatggcgcaggggcaggttgatgcggtatgggtcggcgcggatcgtatcgccgccaacggcgacgtggcgaataaaattgggacctattcgctggcggtgctggctcactatcatcgtattcctttctacgtggcggcgccgcaaaccactctcgatcgctactgcccggacggcgcggcaatcccgattgaacagcgtgcggcgcaagaggtgaccggcgtaaaaggcagctttggcgccgtgcagtgggccccagaaaacgcgccggtttacaacccggcctttgatgtgacgccagccgcgttaatcagcggttgggtgctggatagcggcgtggtcacgccacagcaggtggcggacggtatttttgcgccgctggcgtaa

SEQ ID NO: 96096 - DNA, 150 bp, Enterobacter aerogenes
atgaacaaatcagcagcaactaaacgcaacaatcgcaaaatccacgcgaggaagtttctgtcaacgccagagggcaaggcctggttagaacgcaagaaagccgaagaagcggaattaaaacttgtttctgatgcaagaaagtttatataa

SEQ ID NO: 96097 - DNA, 381 bp, Enterobacter aerogenes
atgtttaagaaaattacattgctgggcttttctgctcttttagttgcgaacattgcttttgctgagagcacaggtagctggattcaggttaccaatgcggaggacggaaccttttcaataaaaaaaggctcatttagaaatgcaaaaggtgagtcatctgctttgttcatgtaccaatctaaagataagaaagttgagtattacaaagtcagcattaaagatgctgattgcgataatggatatggggaaatgaagtttttcaacatggatgggcgatttgctttcaaaggggattatgttgctgacggaaacagtgtcggggctggtttaggtgatttcatctgtggcgtaagaatcgcggcaaattcacaaaaaagttga

SEQ ID NO: 96098 - DNA, 558 bp, Enterobacter aerogenes
atggcgaaaacatcagcagttaccccagaacaggcgaaaaaaatcgaagcggcattgcgtcagcgtagcgaggttgctgctgatgcctggaaactcaacctacaactggcgttacgtatcagtgacctgttgtcggttaggtatgatgatgtacaggggagatttctaagactcagggaggggaaaacagggaaacagcgcgagttagtcctcaacacagaggcgctaaaagtgctcaaacgtcgccggaagcaaaatccagaggatgtatttgtattccaatcaaaatccaatcgcgtgaaaggccaggagcctaaaccagtatcacgtgtatttgtagcacaggccataaaagaggcatcacaggggattgtagagacggggattagtgtcgctacccattcagcaaggaaaacccgtgcaagggctctgttgaaagctggaactcccatcgaggtcatctcacggatgctaaaccacagcagcccggcggttactatgacctacttggatatcacgcaagacgaggtgaatcagacctatcagatggtgatctaa

SEQ ID NO: 96099 - DNA, 345 bp, Enterobacter aerogenes
atgagcaactatctattcagcaattatcaaggaatttattttgaaggggattttgaggatgaaaatgcagcattgagagcatttagggaccatcggtcagttccaaagtgggacccagtacataattgccagacatatatgtttcctgagaatgctggggtgtatgcaccatatcctatatatgaggatgatgatattgaagtgatttttaatgattcgagttacatcgtgtcatttgtatgtgatgaccaatatactaacttaaatagcattgatgttattcaactatacgaacagggaaaaattcatccagttcaaaaaataaaagtaactaatcataaataa

SEQ ID NO: 96100 - DNA, 414 bp, Enterobacter aerogenes
atggctgatcctgtttctttagccgctatctctggcacgcttgagcttgttaataaatctgtagatttagttcgtaatttacgtaaaaagggtgatgaagagctaacatctgctgagatgcgtttaacacttctcgatctgcttgatgacctactagaggtaaaaagcgaatttgtgactttaaaagctgtattgttgagcaaagaagaacagattcaagatcttaaagctcagttagaaggaaagaactcattagaacatgatggtcagctttattggaaaaatgaagataaaactccattctgtccaatttgttatgaaaaggattcctcttctattcatttaacctatatcgatgatcgtacttggtactgtcttgtctgcaaaaatactcaaaatttagagaggatgtaa

SEQ ID NO: 96101 - DNA, 372 bp, Enterobacter aerogenes
atgaccttacagcagtggttattctcaattaaaggccgtattggccgccgggatttctggatttggatcgttatctgggtgttgaccatgagcgcgctgtttaccctcgcgggcagcaatttgctgagtttgcagaccgcggcgtttattctcgtctgtctgctctggccgacggcggcggtggtggtgaagcgtctgcacgatcgcgggagatccggcctctgggcgctgctgatgattctggcgtggatgctgctggcgggcaactgggcgatgttgccgcaggtctggcagtggggcgtcgggcgctttgtaccgacgctgattatcgtcatgatgctgatcgacctgggcgcgttcgtcggcacctag

SEQ ID NO: 96102 - DNA, 510 bp, Enterobacter aerogenes
atgataaagcatatccgtattttacccggcggactggcggtgttggccgccgctttgctctgcctgctgacggcctgccgcgatcacagtcgcgacggcatgagcggcgctgatttaaatgtctataaccacggtccggacgccatcgtttcggtgcaggtgaacggttacggcgggccaagggcgaatccctacggcggcggcggcggcttctgctgcgtgatggtgccagatgtctggcggccgggcctggcggcaaaaatcacctggacctccgaccctaactcctggatgaaatccagtaatatgcctgataactattcgcaatattatcagcgccatgggccaattaccgtgccgattgagcgctgggaggaggatcaggcctgcggttttgatgtgcacattttcccctgcgataaggtgcggatagtccgttcctgtcatatgcgtgattcccctgaatacccagtacaacctgaacctgacgaagaaaaaaaaagcagatag

SEQ ID NO: 96103 - DNA, 570 bp, Enterobacter aerogenes
atgataaagcatacccgtattttgtccggcgggctggcggcgctggccgccgtttttctctgtctgctgacggcctgccgcgatcacagtcgcgacggcatgagcgctgctgatatagccgttttaaaccacggcccggacgccatcgtttcggtgcaggtggatggttacggggggccaagggcgaatccctacggcggaggtggcggcttctgctgcgtgatggtgccagatgtctggcgcccgggactgacggcaaaaatcacctggatctccgaccctaactcctggatgaaatcgagtgagatgcccgatgattatgaaactcactatcagaaacatgggccgattaccgtacctatcgaacgctgggagaagggtcaggcctgcggctttgatgtgcatattttcccctgcgataaggtgcgtatagtacgatcgtgctacggtcgtgcagccccggaatacccaatacttcctcatcctgatgaggataaaaaagcagataatgttatttttaaacatatcaaggaggaagttgtatgtccgacaccgcagagtccacgctga

SEQ ID NO: 96104 - DNA, 4104 bp, Enterobacter aerogenes
atgcactccggggctcacttcgacccgcagcttggcctggatatccatacttatccctggccgctgccgacgccgcatatcggcatcgttttcgacgtgtttgattatctgccgctgctgggcactaccgtacacgtcaacagcatcaaacgcgccagcgcggggaccggcggtattgcggtacatattccggtcggcggcgtgtgggtgccgccgctgcgcgcgcccggcggcccgcagatggaagacgagctgtttatgggcagcaaaaccgtcgccgtcgatggtgagccgttttcccgcatcggcatgccggtactgagctgtaacatcctcggaatggtaccgccgttccgcctgaagcggctgagcaaaccaaagccgctctcgctgacgctgccgctgacatttaacctcgcgattcccaacaatgtgattgtcggcgggccgccaaccatcaacctgatggcgctgctgatgcgcgccgggttaagcgggttgggcaaggggttgaagaaagttaaaaaaacgccgcagtggcggctgtttatgcggcggtttaaaaagctgcgccagaagctgtttcgcaacatggatcccggcgtcctgaaatgccgggtgctacgcgccgaaccggttgatatccgcgacggtagtgtgagcctggagcatgaggattttctgttacccggccgcctgccgctggcgtggacgcgaagctactcgtcggcggatctcgatgaagaagggctgtgcggttacggctggtcaaccccggcggacacccgccttgaaatactggccgatgaaggcgtcgcggtgctgacccagccggaagggatgacgctgtttgcggcgctaccgcagtccgacggccgcgatcagggtattgtcggcctgccggacggcagccgcctgtggcgggaaacccgcaatggcgaatgcttctggcatgttgagcaggaagggagcgcgcggctgcagtttcgcggtaaacgcgggccgctggcgatttatcggctggcggaccgtaacggtaacggctggcagttcgactggcaggggcgcgagctcgagcgtattcgcgagttcagcacgcgcggcatgagcggcagggagatcctcgtcacctggcaggatggccgtctgcgggcgctacgcctgcgcaacgcgctggatgacgagatcacgccgctgacccgctatgaatacgatagcgataatcagttgagcgcggagattgatgcgctttcgcatccacggcgcttctactatcaacagcgccatatgaccagccatgtcgaccgtaatggccagggcttccactaccagttcaatgacgagtggcgggtggttcacgcctggggcgacggcggcgtatgggattaccatttcgcctggcacgacttgctcaacgaagtggaaatcaccgattccaacggccatgtaacttctgtcagctttgatgataacggcctgccggtttcggagatcgatccgaccggcggcaataccgtcttccactacgatgattttggccgtaccgtcgaactcattgagccagacggcagcgcgcgtcgctgggagtatgatgaacaggggcgaatgatcgccgaacatctgccggacggtagccagattcaggcggcctacaatgaagacggcgatgtgctgacgctgattgatgagaaaggcgcctgctggcgttcggactatgacgaacgcggcaacctgctggcgggaacggaccctaccggcgtcacctcgcgctatcagtatgatgcgtacgggcaactgagcgtggcggacgtgccgggttccgggcagagtcgctatcgctatgatcggtttggttttttgcaggcgctgagccaggctggcgggggaaccactcaactgcggcattccgcgcgcggcaccctgctggagcgtattgacgccggcggcggtagcagccgtttccactgggacagcaaggatcggctggtggcgatggtcaatccgcagggcggcgaaattcgcgtcgcttacgaccgggaagattcaccgcttcacttcaccgatgaagccggccagataacccgttttcgttataaccgcaccggaatgctggccgcctgcgagacgccggatggcgcgacgcttagctatcagtacgacctggaagatcgcctgctggcggtaatcaaccagaacggtcagcgctggcagctggaccgcgacgcgctggggcgcatcgccgcggagaccgattactggggacaggtaacccgttatggctgggataaaggcaaccggctgatcagccgtgaggatccgctggggcggctggtgcgctacggttacgaccgcggcgggcggctaagcgagcggcgcagcggcgataccctgcaggcgaagtatcattacgatccctgcggacggatggtactgtgtgagaatccgtggcggcggctggcgtggcgctatgatgacgccgggcgggtgctgctggaggaacaggacggttttcagctgcattatggctataacgagcgcggcctgctggtctcccggcgcagcgacagcggtcatcaggtgcgttacgccatggatgagtatgaccggctgagccagatccagctgaatgacgatgcgccgatcgtgctgggctacgatgaggccgggcggcgggtcagcgagcagctgtcggcggaggtgacgcgtcatttcacctacgaccggctcggccaactgacgtcacagcaggtattgcagaatgatttaccgctgttcgccagcggcttcagttgggataggctgggtaacctgacccggcgcgatgacagcctgtggggcagcgatcgttacgcttacgatccggtggggcgtttgacggcccataccgcgctggacggtacgctgcggcagtttgtgcaggatgcggcgggcagccacctgcagacgcagacccgggcggtgaatgagagcgtcgggggctggttccgcgaggggcagcaacgcggggtgcgttatgtattcgatcgcgcggacgagctacgacagcggcgcgatgtccggcataacggcgagaaagaggatttcagctgggacgataaccgccaattggtggcggtgcgcaagggcgagcggctggtgcgttacggctatgacgggctggggcgccgggtgttcaagcagacggcggaagagacgcgctggttctactggcagggcgacgcgctggcgggggaaacggtcactatctcccgtgaaccgctggcggcacagagcatttttgataccggcagccggctgcagcggcagaaagcgcaggaaacgctgttcagcagtatgcgcgagtacgtgtactatccgggaagttttcagccgctggcgctgctgacgcaggaagcgggcaggaaggagagctggcactatcattgtgacccgaacggcgcgccggtccgcctgacgtcattacagggcgagatagtgtggtcagagaagacgggggtatggggagaaaaaggggagatctacgccgatcgtatcagcaacccgctgcgtttccagggccagtattttgacgctgaaacggggctgcactataatcgacatcgttactatgatcctgaaattgcgggatttattagccaggatccgattggattagccggtgggctgaatgtttatcagtatgcgccgaacccgctgggatgggtggatccgtggggattagctaagtcatgtggtggaacaacaaaattttatcgttcaatgagtcatgaagatttcgagtatttacgcactacaggtaaattaagaggaacatctgaaacattcatttcaccaagaagagcattctctgagaattacgatggagttttagtgaggttttaccttaaaaacgatgcattatcagaactaaaatcaattggggttaaagattcagcagtacttaccagtattacttatccggacatgccagatgtagggaagggatggaaggagacaagtgcattctttaaagctgaaggggaacagattaatattggattaggtaaaggtaaggcattagatatattcaatcaagggattcagcgattcgagaggttaaattaa

SEQ ID NO: 96105 - DNA, 525 bp, Enterobacter aerogenes
atgcgcatcgaaaataagcgccgttacgggttctattcctggtacgactggtcatgcgccaaatggggaacaaagtggaatgcctacagtgtagaaatgccgatcgacaggccgcgtgaacgagttaagcgaggctaccagcatcgaccaacacacgtgcgggcatacgataaacgtgttttcaaaaagaagctagcacgtcatgcagcgagcggcgcccctctggtgattcgttttgagacggcatggagttgccctgagcctgtttaccatgagctcgccagcagattcccgcacctcgagtttcatatccgttatgcggatgaagatatgggtagcaactgcggaacagtcctgctgaaagatggtgcatggtcagcagatgacattgctccgcgctggagtgaacagaccgaagaagagcatttcaaatggcgaaagtttgcttttcaggttcgctacccaggcgacacgccgcaacagcatggcatgaatgacctgtacaaatacgacgaagacgactga

SEQ ID NO: 96106 - DNA, 288 bp, Enterobacter aerogenes
atgccaaaccacgtaacaaacgaaatccgcgttatcggcggaactaataaacagcgcctcgcttttatccgatcaatcactaataagcgcgggaatattgatttcaacaatatttctcgcatgccaaagagcctgatgattgacgaaagttcctgggtggaaaaacttgccagcgctatcgctggcgagcacatgggccgcttcgcattcgaagaaattgaaagcccatcagcagtaatcgaaatgatgcgcaagcacggaagcacggaagcacggacaaatacataa

SEQ ID NO: 96107 - DNA, 381 bp, Enterobacter aerogenes
atgatggattacagcgaattgagtgactatgaagttagcaagcgcgtagctatggcggtcggcggcttcctcgaagaggatttttgcaaaacccattcagtgatttttagacgtcatggtcggcatcaatactcgtttttcgaaccatgtacaaacccatcagatgcatggcccatcatcttagaaaacaaaattagccttaattgggctgaaattgaaaagtcatggtgcgcacatgttggcgggatgatgacggatggttgttggtgttgggattatgacccagaccattatcaggacaacgtcaacccgctacgcgccgcaatgattgtattcctcatgatgcaggactcagccaatgttcaggataatccagcctaa

SEQ ID NO: 96108 - DNA, 765 bp, Enterobacter aerogenes
gtgaaagaacgcggaatgatttttaacagtgagatggttcgcgccattctcgacggccggaagacgcagaccaggcggatcatgaaggtgcagcctgagccatcgaaatcgcgaccaggggatttttggttttcatcgaaaaaattagaaagcatggtgcacatttctgactttgcgccgggtaactcacctattgccgattatcaccttttcattcaggagcattgctgcccgtttggtgctgtcggcgaccgcatctgggtgcgtgaaacgtggggagtagtcagccacgaattggatgaggatggtcgaatccaaccatggacgccagaccggccggctacagatattcacgaaatgccgtttggcaacggctattactctggtcacgccatttatgcagctgatggcgatttcacctggggtgatgacgatggttatgaagatggtcgttcgtgctggaagccatccattcatatgccgaaagcagcaagccgcattctactggaaatcaccgacgtgcgggttgagcggctgaacgctatcagcgaagaggatgcggaggcggaaggaatcgacatggaggcactttatgactctcaggactgttacgactgcattgcagaccacaatatgaccggaaggccaacggtaacaggcgcattcaagtacctgtgggaatccatctacggcgaggaaagctggaaggctaacagttgggtttgggttatcgagttcaagcgcgttgaaggcggtgcagcatga

SEQ ID NO: 96109 - DNA, 219 bp, Enterobacter aerogenes
atgacgccagccgatgaaaacgccatccgtgccgcctgccgtcgttgtaccgaggaaatcaaacaggctatgcgcaaaaagccaaagcctaactgggacgcaacggttaagcccatcatcaagaaacaccaccagcaaattacacctctgggagttagcctcctggagttcgtcgtatacacagggcggcttaatcgccgtttcggagtggaatcgtga

SEQ ID NO: 96110 - DNA, 1122 bp, Enterobacter aerogenes
atgacctatcaacttcacgtcgggcgctgcgaggaggtccttaaaacgttgcctgataactccgttgatgccatcgtgacggatccgccgtacgggcttagcttcatgaatcacaaatgggattacgacgtcccgaaggtagaacagtggcaggaatgcctgcgcgttctcaagccgggcggccatcttctggcattcggaggatcacgcacctatcaccgtcttgtcgttaacgtagaggatgccgggttcgaaatccgcgaccagatcctatggatttacggcagcggcttccccaagtcgcataacttagatggtgattttgatggctggggaacggctctaaagcctgcgcacgaaccgatcgtcatggctcgaaagccattcaagcaaaccgtgtccgccaacatgaacgagcacggtaccggagcaatcaatatcgacgcctgccggataccgaccgatgaggcgcttaatggtggctccggcgggctgctttcgcatcagcgtgacggtaccaaaccggttgcagactacgagcaggcaccggaaggacgctggccagccaacattattcacgacggcagtgaagaggtgatcgcctgcttccctgctaatgctggagctgcagcaccagtaaccggcaacgaaccttcagcagcatcaacaggtcaagtacttggaatgcgcaagcgcgtggccacagtccaccacggcgataagggaagcgcggcacgattcttctattgcgccaaggtcaaaccgaaggagcgcgacgaaggcctcgagagattcatcgctacatcagcaagcgacatgacaggcggacgcaaagaaggaagcgtcggtataaacgacccgcgcgccggtgcaggtcgcaccaatggcgctagaaacaatcatcctactgttaagccgctcgctctgatgagctatctctgcaggctgatcactccacctggcggtaccgtgcttgatccgtggatgggaagcgggagcactggccgggccgccatcgaggaaggttataacttcatcggaatcgaccttaacccggattacgtaaccattgcttctgcgcggattgctcactccttcaaaaagaaaacggaggcagcatga

SEQ ID NO: 96111 - DNA, 1122 bp, Enterobacter aerogenes
atgaataacgaaattgaactcacagcagcactggcaacgagcaagaagagtaaagttggcgatcatttctttgagttccccgcatcacgtggaactcagggtggttcaattgtcctgatgctgactgttcctgctcggacactaacgcgagtccttgccagtgataattacggggacactcttgaccgctcacagcgagaactgaacccagcccgggcgaaaaagttttatcagtatctcgttgaagcatacgaaaacaaagagccatttatcattccaccgctggtaggtaactgcgactcgtatgttgaattcgaagagttcggaaacactaatgtcggggtggcccgattcccgatggatgcagagattaaattgtttgatggtcagcatcgcgcagccggtattgcggagtattgccgcaccattgatgaaccgatccatgtgccgatgatgcttactctccagttgccactgaagacgcggcagcagtttttctcggacattaacaacaatgtttcgaagccatctgcggctatcaacatggcctataacgggcgcgataagaacgcgcaggagatggttaattttatcagctcacacgatgtcttttctgaagtcaccgattttgagcataacgtcgttcccgctaaaagcgataagtgggtaagttttaaagcccttcgtgatgctactgcgaaattctctggttcctgctcacaagacgatctggagggtttgtggaatgcgtggctaatgctaaccggattagatgatattcgccgaggtacgaaccaggccgagtacaaacgcgagtatatccagttccatgcagtaatgattaatgccttcggctatgcagtgcagaggttaagcgaaggtcgtggagttcgcggggtcacattgatgattgaagacctggtaatgaataccggcatcactgatcgcgaagattttttcctcatttcttcctgggatggtgtttgcgctagctgtgaaaaatccaggccaacggtcattgctaatgtctccgctcagaaagcagcggctttacgtctgatggatgccatcgtgaacaagaacctgactgtgactaatagtaaggatacctgccatgactga

SEQ ID NO: 96112 - DNA, 525 bp, Enterobacter aerogenes
atgaccaatagccagttaacagacttacgcacgttgattctttcggaagtcggggatttctttgctgtggtcggtagtcccggcgagccggaaactccggaagaaatgcaacgagaactgtccatgcggctggggcgcattctcaataaccacattgttaactatccgcgctgcgaggtgttagttgaaattctgcgtgagtgtcgaaaggcccgtgacgaagcgcaggcagggcttcaggaacgccgaaaggccgcaatggacagcgagccggatgcctatatctttaagcatccgtcaggaaagctattctgggtactgacggatgaaagtaacaaaggaagacgcgatgttatgcctgcttacgcctccccgcagccagcgccggtagtgccagtcgagatgaatagcgacaaggcatggggagagttaaaaatcagcgcggaagattgtcaggcgtggtctgaaggatggaacgcctgccgcgctgccatgctcgcagccgccccgcaggaggtgaagtga

SEQ ID NO: 96113 - DNA, 795 bp, Enterobacter aerogenes
atgcttgaatcacttaaagaatatttttcctcaatcgtcaatactgctgtaaacagaataagtaacccagtgtttggtgcttttgctatctcatggtgtgcatttaattggaaatcaatactttaccttttcctaagtgattacggtgttttcgataaaatcaattacatatcaacaaatagtgactggtacacagtgattatctacccatgcctatcagtattagctttgtgcggaggactgccatgggtgaataatatgatttcaaagtggcaggctaagccactcgacaacaacgactcgattgagaacttcaggaaggccaaacttatccttcgtgccacgcgccttcaacgcctcaaggcaaagcatgatgttacatacgataaagttaagactggagctgaaaagaacattcaggagatgaaggaagagattattcgatcaaagaatagtatgggagaactaactgctgaattgaaagccaaagatgatgaattgagatctgctagtgctcagctagcagctctcaaccattcattaacagaaacatcagatacgcttggaagaatgaacgaagcatataaaaaacttaaaaatgatttcgatgaatataaaattaaataccctactaatcctggattaggcacccttactttgtccaatggacaatctgttagcgattatataaaccgtcaagtattgactggactatcaatagacgcttcgaatatttccaataattctgcaaatccaactggattgtcaggtttaacgggtaaagataaggattaa

SEQ ID NO: 96114 - DNA, 534 bp, Enterobacter aerogenes
atgaaaatcatgcaatctagagggctgtttaaatatactattatatcaatcatgtctggggttgctcctattatattaatatttgtggtttacttttttgataaaagctcacatttattatcagtcctctttgaaatggctaagggatataacagggattattctgagcgtcatcttgtggtaagtacaatagcttcttcatactcaaagctagcacccctatttgtaattttaatgtatgttctttgttggaataagcttggtgtaaaacttaaagactttgatttgaaaaaatgggttaaactgcttccggggtttgttgttcttatggtgggcgtgtattatttgacatatgttggagtagaggatatgtcaaatagtctataccgggtgaagaggattattgctgataatgcgttttttttactgatatattacgtatgcttgtttttaacaaactatgtttttatatggatgtttatgctttatttgtatgccataaaaggattgccgtactttaaaaagcgggcctaa

SEQ ID NO: 96115 - DNA, 1134 bp, Enterobacter aerogenes
atggctaacgaagattcaatgacagttaatggtaatgctggcagcggcgttcactggggtggtggttctggtaatggcaacggcggcggtgcaggtaacactgatggtgttcgcagggatggcccagtagttacatatgatgctgatgggagcatcaggattaatatttatggagcagatccaatcaaccccgtgacctcaggagcgccttggggggatgataaaaatgcagcatcaattatcaatgcaaacagaaataaacctgcaaaatacaaagccaatattaagaattggcatgaaggttatgtgaaaacgggctccatggatagcccagcagttaatattttaaacgacagtggtgataaacaatttttccaagtgagttttggtaaagaaaaatacaacgtaatctatgatagtaaaaaagattcatttactaccggatatgtagatggtggtgcaactaagaaagagcagcttatggatgatcaagctcttgccgttgttaaactttatcttctaaataagaaagaaaaggatcttattgaaaccactttaggaattatcattgacactggaaaaacactcagcggcaaaatgggtgataagtatcatgctctggcacaaggcgtagctaatgatattcgtaatttccagggtaagaaaattcggagctttaaagatgccatggcgtcccttgaagcattcacaaaaaatcctaacatgaagttaaatcaggctgataaagctgctctggttaatgccctcaatcatgtcaatttatcaacgctggcagaccgcttcaaaggactggaacggacctttacctgggcagatcgcgtaaccaaagctcaaaaaattaaagatggtgttgtcactggcgttactaccgggaactggcaatcactggcattcgaagtggaggcaatgtatctcagtggcattgctggaagcgtagcgctcggtatcgttaccgcaatgattagtggattagcagctcttgtttctatccctgccgtagcagtcacagctcttaccgtgactgctgttattggtattgctattgccacgtcgtatatcaatgctgatacagccaaggcactgaacaacgccgtagctgatttattcaaataa

SEQ ID NO: 96116 - DNA, 456 bp, Enterobacter aerogenes
atgactctgccagtagacggcatcaaactccatcgaggtaactttgcagccataggtcagcatatccagcagctgctggatgccgggcagtgcttccgcctgcaggttaagccgtggcgcgagaagcgaagcctttctcagaactcactcagccacatgtggtatagcgaaatcagcgaatacctcatcacccgcggcaagaccttcgctactcctgagtgggtcaaagacgcgatgaagcacacctatctcggctacgaagataaagaccgcgtggacgtcgtgtccggcgaggtcaccaccgtgcaatccctccgccatacgtccgagttggaaacaggcgagatgtacattttcctgtgcaaagtcgaagcctgggcgatgaatatcggctgtcacctgaccattcctcaaagttgcgaataccagcaacttcgcgacaagcaggaggcctga

SEQ ID NO: 96117 - DNA, 171 bp, Enterobacter aerogenes
atgtctactccactttcccgcgtcatcacaaacgaaatcttccgtgttccggcgcgccacaagcgtaagccagatgttaagccttccgatatcccgacactgaagggctacaccgcccacctggtggatcagaaatggctgcgtctcgcggcaaggagggcgcatggctaa

SEQ ID NO: 96118 - DNA, 291 bp, Enterobacter aerogenes
atggctaatttatgcaaagcggcacgcggccgcgaatgtcaggtgcggatccccggcgtatgcaacggaaatcctgaaaccactgtactggcacacatccgcctggttggactgtgcggtactggaatcaaaccgcctgatctgatcgccgctatcgcatgcagcagttgccacgacgagattgatcgccgcacccgtctggtcgatgcggaatatgcaaaggagtgcgctcttgaaggcatggctcgcacgcaggttatttggctgaaagaggggctcgtaaaagcatga

SEQ ID NO: 96119 - DNA, 141 bp, Enterobacter aerogenes
atgagccgcgacgttatcgaacgcatctgcgaacgctggcaaaagctacgcctctgccggcaccgcggaaccgtcttagttgactaccgaattttgaagaatttcgtccgcatctatcaggattcaggagagaaagcatga

SEQ ID NO: 96120 - DNA, 690 bp, Enterobacter aerogenes
atgaatacccagtaccttgagtatgttcgtcagcagctgatagtggccaccgccgatctgagcggtgcgacgaaagggcaactggtagcctttgctgagaacgcaatgtttgaagcgacggcacgcagtaataagcggatgaaggtagtcgacccggcgaccgggagaatggtcaagccgagtaatcctccggttcccggcaagcagtcccgcgccaaaggctcagccatagcactggtgcagcccgttgagtattcgaccgcaagctggcgccgggctttgctgtcgctggaagagcatcagaaatcctggttattgtggaactacagcgacaatatccgttgggagcatcaggagactatcacccggtgggcgtgggagcaattcagccagaagctggccggcgtgcgaattgcaaagaaaaccgttgatcgcctgcgtcaacttatctggttggcagcgcaggacgtcaaagctgaactggttgggcgcaacacatacgaataccaaatgcttgcctccctgatcggagtgaccacgaagaactggtcagaaacgtttacggagcggtgggaggagatgaaaagcactttgcggcgccttgatagcgattcgttattacaggttacgcgaacacgttcacaacaaaaggcgacaaatttagatgtaagtcttgcaaaactggattga

SEQ ID NO: 96121 - DNA, 573 bp, Enterobacter aerogenes
atgatgactcaatacgtttttgccccccaggcgccgattagtatccccgttgttggcagcgatgagcagttcccggtacgccgcgtgtactgcgtaggccgtaactatgccgctcacgcccgtgaaatgggcttcgatccagatcgcgaaccgccgttcttcttttgcaaaccggcggatgcggttgtgccagtagcggctggtgaaacgctggatctgccgtatccggcgcagaccgacaactatcactacgagattgagctggtggtcgccatcggcaaggcgggacgcgacatcccgctggagcaggcgcaggaatatatttggggctatgccaccggactcgatatgacccgccgcgatcgccagatggagatgcgccagatggggcgcccgtgggagataggtaaagcgttcgatctttccgcccctgtcgcgccgctgcataaagccgccgaggcgcgcgaggtgaatcaggccgggatctggctgcaggtgaatggtgaagatcatcaacgtagcgatatacgccaccttatctggtcggtaaatgaaaccatcagctatctctag

SEQ ID NO: 96122 - DNA, 1194 bp, Enterobacter aerogenes
gtggcacggacaacacgccccctgaccaacaccgaagttctgcgcgctaaagcgttagagaaggatctaacgctgcatgatggcgatgggcttttcctgatagtgaaaaccagcgggaaaaagctctggcgtttccgttatcaacgcccggcaacaaagcagcgaacaatgatggggctcggtgcattccctgcactttcgcttgctgatgcccgagggttaagagctgattaccttgccttgttggccaacggaattgacccacaaattcaggccgaagttgcagaggaacagcagcaaatcgctctggacagcattttttcaacggtcgccgctaactggttccagctcaaaagcaaaagcgttactcctgattacgcaaaagacatttggcgctcactggagaaagatgtattccctgctattggtgagatccccgttcagcaaatcaaagcccggacactggttgaagctcttgagccaataaaagcacgtggggcgcttgagactgtacgtcgactggtgcaacgcattaacgagatcatgatttatgccgttaacactggtctgattgatgccaatccagcatcaggtgtcgggatggcctttgaaaagccaaaaaaacaaaatatgccgacgctgcggccagaggaattgccgaagctgatgcgttctttggccatgtcaaatctgtctgttccgactcgctgtctcattgaatggcaactcctgacgcttgtacgcccttcagaggcctgcggtgctcggtgggcagaggtagatctcgatgcaaagctctggactattccagccgaaaggatgaaggccaagcgagagcacgttgttcctttatctcctcaggccttggatattattgaggtgatgaaacccatcagtgcacatcgagaacatatttttccgagtaggaataatccgaagcagccaatgaatagccagacagctaatgcagcattaaaacggattggatatgggcaaaaattggttgctcatggcttgagatctattgcaagcacggcaatgaatgaggctggttttaactcagacgttattgaaactgcactttctcatgttgacaaagacgaagtccgccgagcatataatcgtgctttgtacattgaacaacgtaaagaactcttatcttggtggggtgcaataattgcgagttctaaatga

SEQ ID NO: 96123 - DNA, 660 bp, Enterobacter aerogenes
atggatgagttagcaaaaaaagtccaagaaaaatatatagaggatcttactagtcggtatcctctacatcgttttttgatattgtttatggtgattttctttatgctaacttatcaaaagggtaatgttgatatttacaacattctgaatcaaacatctcttaaggaagtctttgattttcaggggggcgtgttgtcagggctttcaatgttgcaattaatgcaagctctaatcatttctttgattttgaatggttcgcataaaaaattgaatttttctattttcaatagattggttttaataggtaattctaatgggtatgttgaaaaagttcatgaaaaataccaaaacttaaagagaaatgatgcctatgatttctttctcatcaaggagatagataaaaaaatagcagataaaaaagcttgtcttcgtgttaaggtaattaactccgagattatgttttctctgttattttgcatactttggagttttcatctatccgcactaaatatagtgtcgatactatctttattgttattatggttttatgctcaatgggatatttataagttttatacttctgatttctttccattgtatgttgcgaaacaatatttactagatgagcctattgttactacagaaggctttcatgattga

SEQ ID NO: 96124 - DNA, 858 bp, Enterobacter aerogenes
gtggcgattgttgaattgcattttgatggcgatattgcacctgatcaccaagtatctctaagaactctttctaaaagtttaggtcacttgcaaagtgccctagaccgggcttatcttgacataaggcatggtaatctttggaaatatgccaagatgcatcatgactattataaagatgttgaaatgttggtacagcctcctagagagggcggatacattattgacttcttctcaaagaaagaaattacaaaaaaagttgtcgaaagagtttcgaatgcaataaataatgctgttgtagaagcacagcaagctggtcttgaaaatgctgacactatcagtaaaagtttggaaactaaacgtgcacaaatcgctgctcaaaaagttcttccacgtgattatcaaaaacttttagaaaatcctgatccggcagttaatcgacggtatggtgatcgagcgattgtaagagacatagatcaaatgctggcaattattagatcaaatcactctggcgatagttcgttagaaatatcattgacagcagatcgtacagaggtattcgagttcaatagagcgaaagctaatgatttccatagggttataactagaaagaaattgggagatcccgtaatttatcgagtgaaagtcaccgaaatggacttacaatatctttctgctaaaatgaagaataattttaataactcagtaagtacgcttagatttgcctcaaaggaagattttcaagaagtttttccttattttcaaggtgaaaaagaaatggtgtttttgggagcgccttatatagagtatggtgcttttgatccagcttgcggagatgtatattttatacaggtgtattaa

SEQ ID NO: 96125 - DNA, 564 bp, Enterobacter aerogenes
atgactggcccgaccttacaaaatgcgttcgaagcctgtcagacgaacaaagcagcgtggatgaaccgtaaagctgaactggccgctacagagctggaatatcgggatttattgctggacgacgcaacaggttcccgccgtttacagacgctacgtgagctcatcgatataaaaaaatgggagattaatcaggccgccggtcgctatatccgctcacatgaggaagtacagtgcatcggcattcgtaaccggctgcatgattttatgcagcagaacggcgcagagcttgccgccgcactggcaccagaactgatgggggttaagaaccagcccgcgatgataaaaaaccgtgcacttgaccgttcgttggcgtatctacgtgaagccctttccgtctggctggccgcaggaaatgacattagttattcagcaccggataatgacattttaacggccatcggatacaggcctgacgtgccttcgcgggatgataatcgtgaaatatttactcctgcgcagaacatgatttacacccgccgacgcgctgagctggccgcacagtag

SEQ ID NO: 96126 - DNA, 261 bp, Enterobacter aerogenes
atgatgcgctgccctaattgtggtcaggccgcccacgtccggaccagcaaatatatgtctgagaacgtaaaagagagctatctgcagtgccagaatgtgtattgctcaacgacgttcaaaacgcatgaatccatttttgagattatccgctcccctgcggaagagaagaaggccgaacccgctccgccgaaaaccagaaccacccgcaaagtgaaagggtgttacagctcgccattcagccataatcaggagagacgataa

SEQ ID NO: 96127 - DNA, 738 bp, Enterobacter aerogenes
atgaacgataccaccgccattcccgactacctgaaacccgcgatggaacgccttgaggttgcccggtcagcgcatcttgccagtgccagtcgtatggatgaaaccacggcggctatcagccaggtaaaagcacaaaaaaacgaactggagcaggaaaacggcaatgattccggtgcatggcgtactgcgtttcgtgccggaggtgcagttatcaccgacgagctgaaacaacgccatctggcgcgcgtggcatgtcgggaactggtgcaggaatgtgacaatatggctgaggtgctgtcttttgagctggacaaccttaagggagcttgcgaccggacggccagaacgtatcgtcaggcacatcactgcgtcctcagccagtacgcagagcatgagctaaatgctgccctgcgtgacacctgtagtgcgctggtcagggcaatgaaactcaatatactggtccttaataatccgcttgctaatacgaccgggcatgagggatatatcgaaccggaaaaggttgtgatgcagcaggtgaaagcgtggcttgaacaggccgtgaagggctacagtatccgtctgaccaatgagccggtgctgtttaaaacagggttgtcggcttccacgctgccgcatatggagcatgatgttgcggccacgcccgttcagcgtaaggtctggcaggaaaaaatgagggcgcgtgaagccagcctgaaagcaagggggttactgtcatga

SEQ ID NO: 96128 - DNA, 315 bp, Enterobacter aerogenes
atgttctcacgtcttacccatatatgggataaaaacccgggccgtaagtaccctgccatacaggatatgctcactatttattttagtaacgagcacgatgattttggcaattcaattaatgagattatcggcagctatcgtgactacagtatctcatcaattgaaaatgctaaattagaaatttcctctttattagaaattgaagatgaggaagcgcttagctccattatggagaaaattgcgaatgacatgttccatcccaaaccgaggggtgaaacatggcgtagcttcctggaaaaaatccttttttattaa

SEQ ID NO: 96129 - DNA, 222 bp, Enterobacter aerogenes
atgtacacttttgcgtacctaaaatctaaatgtgtactctctatgcttaccgacacaaagctcaggaaggcgttaggtaagaaacgtgaagagattgaaatagtatcagattctcacggacttaatgcgcgaattagtcaggccggaaaaatcaccttcttttatcgttatcgctggacaggcaaagccgtgaaactcaatgtgggtaatatcccgcaatga

SEQ ID NO: 96130 - DNA, 327 bp, Enterobacter aerogenes
atgtgccgcggatatctgcaccacgccgaccaactaagatgcagtgtcgtcagatgcctggaccatcctcatcacctgcgtgcagcccccggtaaccagtcagttaccggggcgtataatgccccggcgtgcgctacggtgattgagaattcagtggcaggagaaagtctgcgcttgtcttacctaaatctgacgaacaacaacggccaggcgcagtgggcgacggcagacgccagcggcacatcgcagtcacttgagatttacagcatgtgtcctgtcaaggattcagaacagacggccgtttctcgtttgataagctcaccctga

SEQ ID NO: 96131 - DNA, 2589 bp, Enterobacter aerogenes
atggcttctctagcaaatcaaactactgcagcttctatttattatgcggttatgggatccgctcctagcgatactgagtttaaaagtatggcgcaaaaaattgaatcaggagaactgactaacgaaagctatgtagcatcacttcttaactcctcagcaggtcaaggtatctatcagggcttaactgacgagcaagcaataagcaaagtttatactcttatatatggtagttccccaagttcatcagttgtaacggagtttctgtcttctggcagcctttcaactgctatcagcgctgttattacggggcttctggagtataaaggcttcgattcgacagttttaactgatcaatctgtgtttgaacagcatattgattcgattctatatggttcaacttcaagcattggttcattagctgttcaggaacaagttgcagcatcttatcttgcaatgttggggcgtgacaggtgggttgattctgcggggttgaaatattggagtgcggatcttaatagcgggactagttatgaggacatgatcaagaagcaactgcttacttctgaatatcaaaagaaagtaggtcagctgaatggtgatgattttattgctaaaatttacaagattactcatggagcagtagctacttctgaacagatagcttcgtttgcggcactgggaactgacaaatctgttattgctgcagcaattattaatgatctgcgttcctcaacagcaaccgataacgtgactgtctctcagcaacattcatttgagaatttaattggtaccagtctggactacaaaacctcagctgttttaaacgcgacatctggcggtggtaatgctactggcacagttaattcctatacaagccatcaattgtcaaatgcagaaattgctgttctaacagatgtgcaactaaatgctaatgtagcaacgacaatcgatttaaaatttgccgatcagttggctaatctggatatagatggaagcagtgcagctactgttaatctatcagataatggtgtcaacacgggtgttaatattaccatcaataacggaagcataactttaaacgctagttctggtgctgataaggtgcttttgacctcagaggcagcagttgcttcgtctacaggaacattcaaactcggtggcggaaatgattccttgaaatggctaggtaatggagtatctaatgcccaaaatactgtatcaactggcattacagccgatggtggttctggtattgataccatctcagctaatttaattaccaaaaatgtcgttatgtcaggtaattcacttagccgtacagcgacaatcagtaccaatacctcacagttcactaattttgaaaagctggatttggctggttatatcggtaaggcaaccgtaagttctggttcaactgctgcagttcacacctttgacttcggcattctaactggtaatgcggtgtctgaatccagtaccacaggtttgactaataatgtagttcaggcggcaacttcgactattggttcacaaggctttgttctgtctggccttgccgatcaggtgaaagtaattaacgctgcaggtggaaattcagcgcagttggaagttactggcgatgcaacatcagaaagtagtgtgggcattaccttccttcaaaacgctacgaatcattttgatgttaacttcactgcaattagtgatactgatattaatgctggatccttggcattaaatagtagtagcagcgctcttttaggtacggcactaactgatctaaatatttcgtcaggtggtacaggtgaatttgacaacatactttctcttactggtaccaatacacaagttcagaatattgacataacaggagatcatgttcttaatcttagcttgggttctggattcagcaatgttcgaaccatcgatgcctcagataatactgcaggattatcattggattctgcacatggtggtacaggtgatggtataatagtgcagttactaaatgctttacctctgagtgcggttaccacagcattactaactcctgttttaaatacacttggtcttaatggctatcaattagatgtaacaggtagttcggctaatgatactttcagtattatcggaaatacaaccattacagggggagggggcgaaaatatatacgagttaaaaacaagtacctcccaggcaggggttacaatcactgattttgatagtacaaatgacacaatagtgaatgtgtcaagtggcttgaaaatatctggtgattcatctggtgaggcggtagcagattatggtacgcgttctgcagatgcattagatgctttattaggttcgttacttggagggcttaccacaggagtagtgggcttattaggcggtatcttaggcctggatagcagtaatgctctgacatcgaaggtcggaattgcatcggtagtattcagtggttctggagataattcagattcatatgttattattgacaataatgacaaccatactctagatgcaaacgatactgtagtgttacttacagggcagaatcatcagcagttggttgatgcattacattatgcttaa

SEQ ID NO: 96132 - DNA, 1068 bp, Enterobacter aerogenes
ttggttagcatacaaatcttaaggtgtcttgccgctattgttgtcgttctttatcacataggtgaaaaaataaaagttgatagtgatacaggttttttccaggttggggcgattggagtagatattttttttattgtttctggcttcataatgatgcttgtttcacagcgagaaactaaagccaccgttttcttgaagaaaagatttgttagaatattcccaatatattgggtttatacaacaatagccctcatggtatttgttctatttcctggtgcaataaactcaactcaaggtgggactgctattttgcagtcatacttcctaataccagttcaaggaaagtctttccttttacttgtggcgtggaccttgagttatgaaatgttattttatatcctgttctctataggtttgttttttaaattgaatcaactttattttttaactgccactgtaacatcgcttgtagttataggcgctatatctgatgaatattacacccataaaatgctatcacctattatgctagagtttttggtcggtgtgtggatgtattacctatataattctaaaataactactggtgttaataatttgaaaaatattttgtgtattgcacttccattattgatattgttatcttttgtttttataaataatgccgagcgtgaagtttacacaacaataatgaataatagatatttattcctgtgtattcctgctgtatcgttatttggttttgtagtgttagttgagaaaaagttggatggaggtaagattgttaatggtttgtcatatataggtaatacatcttactctctttatcttagccatctctttgctataaatgccgtgtttatgatttttaaattcatgggattggattacagaagtactggctctgctattgctgcattctttattgcgatattggttggtattgcttcatatgaagttattgagcggagattgctaccatattgcataaaaaaaatattgtcaaaatactatatgcttaagttcaatataaaaaacatgattaacatatcaagaccagttaaataa

SEQ ID NO: 96133 - DNA, 441 bp, Enterobacter aerogenes
atgcttcaacaatcaccgttctatgaagctactggcataatccagcacgccaccttcgtcgatacacagcgcggagtcgctgtggttgagcgatcttcagcgccgttagcagcatcggttttgcttatttcatattttggggttcagcaatttgccaaatttagtgagcatcagttttgccgttacatttccacctttgtgaagacatttccctttgcgctgaacgaaaaatactacggcaacagcggctccattaagttgctgacgcaaacgcaggatagctgggatatcatcaatgccgcggtaaattgtcttgatgcgatatggggcgacgggcaccggtatcagaaagcggggatcatgctcggcgatttctatagccagcgtgtcgcgcaattgaacctgttcgacgataatgcgccaaggcagaacagcgagtaa

SEQ ID NO: 96134 - DNA, 468 bp, Enterobacter aerogenes
atgaataaagaagatgcagttaaaattatcgcctttccggtgaagttgtatggtacttatcaggatgaagagaatcttgatgcacttaaagctcttcttacaaactggaataatgtataccctgatcacgtgatcatcgagattgactactctgatagccaggtgcatatgtatcttgatttcatgacctcggttgagggttactatgagattcagggcatggtttatacggcatttgagaaaggagtgctggttatcagagatgttctcgtacaagccgttatgctcaggaatgacgccggtaaacgagctaaatacgaagtgtttaaaaatggggatactaagtatgcctttgtaactgtttacgaaagcacacctgatttccatgtgaaaaattatttagatttaattttaaataatgcggtaaacattgatgcgcagattaattcacacttcaacttgctttaa

SEQ ID NO: 96135 - DNA, 258 bp, Enterobacter aerogenes
atgagcctactgaagaaaattaaagacgccgtgtgtccccccgttccggaagaatgtcgagaagagagttacgatgcggtgctgaaaaaccttgatatcctgtccaaagaatcatctgaactgaaagccctgatggcggagcttgacgaaggaaagataacgcaggagcagtgcattgccactggcgtagcgattatcaccaaagaattactagaattccgctatgtccaaaataaggttgattctcaggcttggtaa

SEQ ID NO: 96136 - DNA, 123 bp, Enterobacter aerogenes
atgataattgtggtaaacccgcttgtgattaacgtaaagaccttcacgccgcagaggctgccagatacgccggtaaccaaaacgccggcgttcaagtgccagttctgtgttgcggacagataa

SEQ ID NO: 96137 - DNA, 1191 bp, Enterobacter aerogenes
atgattcttaacatttacaatcatacacctttgggtaaactgatgtctcaaacaaaaaactggactccagagcttgacggtttgcgaggttatgcctcactgtgggttgtcctagggcacatatgcaacctgactaactgtaacattccgattctaagaactcccagtatcggtgttgatgtgttcattttattgtcaggctacctgatggcgaaaaactatacagaacgccagcattttgaaccctgggactcaccaaaaaccatcactacgttctggttgcgacgcttctttcgtatagcccctcttttttatattctactcatcgtcgcactatttttcggtgaaacatttggccattatcgtgatttaatatcttcaatgtggattgaaacacaggctgacactgataaatatgatgatacatcgttcattaatttatttacccacctgtcattcatgtttggttttttaccttacttttcggcgagaaccgcgatccccgactggagtatcggtttggagatgcagtattatgcaattttccctttcattatgctgctgataatgaagtttggctatatccgctcatcggttgtattgatggcttcatgcgtagttttgtcatatttggccccggattatttttcagcattccctcgcccatcaatgatcctttttaaactgccgttatttatatctggaatgctaatttacaaatccgtaatggagaacaaaaaacacttcattctcatagcactacttgccccattattttcatggtttatgggatatttcatgtccagagggctaatcatcattgagatgtttatcattattgctctggcaacattgctcatgaaacatagagaaaaaactttaataaatcgagtagcctttactggaaaatggttcctttctattagattgagtcggttccttggcgaagtttcatactcagtatacttgttacacttgatgatagtaattccgacaatagggattcttgttcagtatccatggtttgctgaactggcaccaacattacgttttttacttgtcactgtaactgtacttccagtaacgtattttttatcgacacttttatttaagtatgtagaacaaaaaggtattatttttggtaaaaaattaatcaaatcaagaagtgtaaaaaccagtgagatagcctga

SEQ ID NO: 96138 - DNA, 654 bp, Enterobacter aerogenes
atgaaattaataaattattccatcgcggctacattaatgttaaaccttttactatgtaacgaatgcaacgcggacgtgtcagtaaagagcagccccgaatatataaaagtcaaagaaatgtattcactgcatcctgggcattttgattacatcatgctgggtgatagcataacaaaaagtgggaaatggaatgagttacttcctgagtattcaataggcaatagaggaattagcggtgatgataccgctgggatgctagacaggattaaagatgtagagagaaccaatgctaaagttgtttttataatggctggaactaatgatataacaaggaatattgaaccggacaatatcgcaaataacataataaacataacaaaagaacttaaacaaaaagacattaaagttgtaattcagtccactatattatctggtgaacaaagaaaagataaaaatccttcgataaaaaaactgaatattttacttgaaagtttcgcaaagaaatctgggataccatttttagatttaaatagtaagttatcaaaaaacggtattctgagtagtgagtataccattgacggaactcatcttacagctaaaggatacgaggtctggagagacatacttataaatttcttaaaagatatccagtag

SEQ ID NO: 96139 - DNA, 240 bp, Enterobacter aerogenes
atgtttgctctggttgatgtgagcagcttctatgcgagttgcgaaaccattttcaggccggatctgcgagggaagccagttgtcgtattgtccaataacgatggttgcgtgatagcgcgctccgccgaggccaagaaacttggcatcaagatggggatccgtatttcaaatgcaaagaccagttccgcctgcatgaagtggtttgcttcagttcaaactatgaactctacgcggacatga

SEQ ID NO: 96140 - DNA, 1014 bp, Enterobacter aerogenes
atgacgatactggaggaaatgtgtcccagagttgaaatctacagtatcgatgaggccttttgcgatctcactggtgtacgcaattgccgtgtgctggaagagttcgggcatgagctgaaagatacggtttaccgcaacaccaggcttccggtcggggtggggatagcacaaacaaaaacgctggcaaaactcgccaatcatgcggcgaaaacatggaaagccactggcggggtagttgacctgtcgagtgtggagcggcagcgcaaactgatggctttacttccggttgatgaggtgtggggtgtcggccgtcgcattagtaaaaaactggaggctatggggataaaaaccgtcctgcagttagctgatacggatatccgatttatccgcaaacacttcaacgttgtacttgagagaaccgtccgtgagcttcgcggcgaaccgtgtcttgaactggaagagtttgcgccagtgaaacaggaaattgtctgcagccggtcgttcggggagcgcattaccacctatgaacaaatgcgccaggctatctgttcatatgcggccagaggtgcagagaaacttcgtggagagcatcaatactgtcgttacatttccacctttgtgaagacatctccctttgcactgaatgaaaaatactatggcaacagtgggtccattaagttactgacgcccacgcaggatagccgggatatcatcaatgccgcggtaaagtgcctggatgcgatatgggtcgaagggcacaggtatcagaaagcggggatcatgctcggtgatttctatagccagggcgtcgcgcagttgaacatgttcgacgacaatgcgccacggcagaacagcgagaaactgatggaagttctcgaccacctcaacgcaaaggacgggagggggactctgtattttgctgggcaggggatccaggccacctggcagatgaagagagaaatgctttcgcctcgctatacaacccgcttcgctgatttgccggtagtcaggtga

SEQ ID NO: 96141 - DNA, 1299 bp, Enterobacter aerogenes
atggatcgctatctggaaagaagagtacagttaagtgataaaatggatgtaaatagcgtggcagtggtgtttggcgctacgaaatttatacggaatggagatcaagagtatccattcagacaagacagtgatttctggtacctcacagggattaatgagccaaacgcaattctgatcatcgagaaaaaaccctcagaaatacaccattatttgttttgtaaagaaactagtgagaaagaaaagcaatggttcggcgaatcaatattaacaaaaggagagttcagtagttttgataatatatttgaattaaaagagttggaagataagctttttaacaaattaaatcaagccaatacactgtatcatgcatttagccgggatgttaaaaatgatgagtgtgttttaagtgttattgaaaaactacgcatctatggaaactggagtgaagaatggaaagcgccagaaatcataaaagattacagaagcattgtgcatgagctgcgtgtatttaaatctttagaagaacaaagttgcctgtcacaggccgctgatattactgccaggacggcgaaaaaggttattgatataattgacagtggtgtaagtgaaagaaaggtagcggcatttatagagtatgaattcagaaataagaatgcatcagggtgtgcattcgaaagtatcattgcgtcaggatcaaattcttgcataatacatcatctgcatagcgacaagaaattaagggatggggagttattactaatagatattggatgcgaatatcaaaattatgctggtgacatatcaaggacttttccagtcagtgggtatttcacggaagagcaaaaaagaatttacggaattgtattaaacgcgcaaaaaaaagccataagccagttacagcctggagtaagcttatatgacttacagcaagaggttcgacaattttttttatattctcttgctgagctcggactcatttcttctcaagaaagaaaggatgacattttgaatatatggtatccccatgatatcggccattatattggacttgatttacacgatgttggcttatccggaattcagcaaaatcgtcctcttgaggaaggtatgttagtcacaatcgagcctggattatacttcacatcaaaaaactgcccagataatcgttactgtaatattggtatccgtatagaagatactgtcctgattactaggaatggacataaaatactgacaaacggctgtccaaaagaaatagacgaaattgagcagttgatgggcaataaaaatagggggtaa

SEQ ID NO: 96142 - DNA, 573 bp, Enterobacter aerogenes
atgttttatccttttaataagagtgtttttgatagccttgagatcaaagaacaaccttttcggcatatttttgctcaaaatattttgcacgaagattttttaaaacgatttgaggaaattactggcgatattgaggcagagcattatggtaaacatgcgtcaggatatcagtttgctcattatcctgaccctgactttataaaatatgtttactcacaaccatttttacaatctgttggaaatctttttggacgtcctgtacgtcccagcaaacaatatttcttgccgcaggtatacatctttccggatcattaccgaggtttgcctcctcatacagatgcgtctgacaagcgtgatttagctatgattttctatatttcagaaggatggaatgaagagtgtggaggggaattacgcgtgctagagaaaaacaaatcgccacatagttcctttgcccctgtttttaactctatgagttgtatggaacttttcgagaattcttggcatgaagttttaccagtcaaatcaaactggataaggaaaaccctaatcattgattttgactattgttaa

SEQ ID NO: 96143 - DNA, 882 bp, Enterobacter aerogenes
atgactgaacgttataagccagatatgtctgtaatacatcattcacatatgttgaatgataaggttcgtatcgataaatataaaaaagcaatttctgagacgattgcaccacatgacaacgttgttgatataggctcaggatgtggaattctgtctatgttaagtgcccagaaaaccactggacaggtctatggcatagaatattttgaattcgctatttcattatcaaaagaactgtgtaataaaaaggataatatagaatttattaaaaattcatctttccagacgtctcttagtgatcacatccatgcaatcgttactgaaaccattggtcaaatcggaccagaggaacatatggttgaagccatatgggatttttgtcgacgccatccttccattgaaaaaattataccatcgacactgagtattttcgctcaaccagtacatagcgcatggtttgatgaattcagacaggaaaaatttttttcgtacaatgctctagctgaatataatatgagcagcaaagattctgattatattattaatgactaccttggcagaattatatttcagaataatctttcttctgcacatattttcaatacagatacctcaacattacttacgtcctataaattagggatcacatcatcttcttcctttactaaggttataacactttctgagcatcatactcctgttgctaatgcactccatctttactttgaatccgaacttaatccgggtaacattttagacacacattattcttcacctcttacacactggcaacatagctttgtactaataccacctggaaagcatcgcgcgatgataagctaccgtgcaggcgatcgttttatttcatgtgaatgggaatag

SEQ ID NO: 96144 - DNA, 915 bp, Enterobacter aerogenes
atgatcactgctaaagagttaatttatataaatcaatcttacgacaatcatcaaaatattttgcatgagaacttacttgattcagtattatacaatgagaacctggtatttagaaacataagagataaaacattagagctcggttatgtttatgggtgccaacctaatgaattgtggctacagtaccgttcatttcctttaatggcacttaacgacatatttgaacaaaaatttatacctttttgtgataatgtttcatttttagagaaaacaataaacgccggtcttaattttgacgtggatctaccattcttaacaaccgggatgacaagaaatcctatatttcatgagtcctgtcactgtgttgctgattcagttttatttagtgatgcagataaaatttccgataatgaaaagtccattagatacttattcgctgaagcctatggcttctgtcttttccagttctgtggtttacaggctaaaagtaaggaaagcattatcggttgtataattaatgatatcgcaatactgacgcctgagttgaatacttttaaagatgcattacaacgattcggtcagcataataccatgatgatttatatgatttctcatatgttatgtatgtctcaggttgcaatgagtgatataaaagcttcatttttttcacaatatgtagacatctctttgactacggaaaatgagagttccattaataagcttattgcgatgggatattctattttaccgtctttttcctccaccgtgcagtcaattttttataccctcgtgaatttacccagacctacccctgaaatgacgttggaattattaatggataataaattcaataatacttttcaacagcaatcttattttttagcggatattgcattgcgaggccatcatgactga

SEQ ID NO: 96145 - DNA, 915 bp, Enterobacter aerogenes
atgtttttatatggcattactaataagggcgagcttgcacaatattattatcagcgttgtcctgactttaaatttaatgaactcccgccctatctttgcaagatcttaactgaggaaagattagcaccaataggtatattggataaatggtgtggttctcaaggtatcacttatccgattaatactttagagtgggaggagaataagatctttttttatgatcgtcaagcgtctgcccttttggctaattatgtatcagtcaatccagaacatgttactgaattgagctctgaaaaagtaaatctaatacagacaagcattaaatatatggcctacttttttccatcacagactcaaattatatttgaatttacgtccgttatcgtctggttaaaagcaaatgaatgtggttttagtggtgcggcatttcatgagctacctcattgcactttcttaagtgatgcattctttatagcggtaacaccatcagcaatacttgaacctatccatcggccatatattatatttgagaatctatatcatgaagccttacatcatcaattatcagcttcagtaatgcttcatacaaaaggttattatgagcctgaaaaccataacaatcgattttattacatcaaatccagaaataaaagttggtcaataccaaatatcctgcaggcagcatatgtatatctgaatgtattatcaaccagaatcagctatttgcaaataatcataaaacataatcttccatgtgaaactatatataccagtataacgcaggccattaactactgtcgtgaaatgattaacgttctacttcaagatgatatgttaaaacaggatattcaagactatatatcaaagatggacgcgcaccttaacttattgacgaaggaatataaaaagttatga

SEQ ID NO: 96146 - DNA, 792 bp, Enterobacter aerogenes
atgaaaagaatacgagtggttggtacaggtattaaaggaataaaacatattacccttgaagccgtcaataacttttccgagtgcaagaaaactttattgtttttccctcaaaatgaactgttaaaatattttgagaaaaatagacttccttacgatgacatcacgaacctgtatgttaatggtaatgaagatatgtcaaactatacttctcttttaaatcgtgtttttgatgaggtttcactaaatgatgatatcgttttttgtatacccgggcacccacgatttggtgtaactttaataaaactattgaatgcgcgtgcgaatcagtcgggtattaagttaacagttacacttggtttgtcttcttttgataccatgctaaatgatatcgaacttgatcctattgagcaaggcgcggcaacactcgatgcaaatttgctgatattactggattataacatggagccacgaattaattatttcctatatcatatttgttccgttgggaccacgcgtacctttattaaagaccctgcacaggataatgccattcattaccttaaagctaaacttctcaagcattatccagaagaccataccttaaaaatggtaagctcagctgagtttggccgagaacaggcaattatcagagaagttagactcggggatctcgaaagtttgttgccttacatcaccttctcttccacattatttgtaccttacatgaagccgcatgcaagccagattaatcgtgaatttctgaagaatcttcagggctccgccacttcttag

SEQ ID NO: 96147 - DNA, 510 bp, Enterobacter aerogenes
atgacaatggaaaatctgcaatgtggtccacgtatgtttgcgccgttctcagaggatgttcagaagctgatcagtgatatcgatacagcccaaccaattgaatgtggtccacgtatgttcgcgccgttttcagaggatgttcagaagctgatcggtgatatcgatacagcccaacccatggagtgtggaccacgtatgttcgcgccgttctcagaggatgtccagaagctgattagtgatattgatactgcccagccgatggaatgcggcccacgtatgttcgcaccgttctcagaggatgttcagaagttgattggcgatattgataatgctcagccgatagaatgcggcccacgtatgttcgcgccgttttctgaagatgttcagaagctgatcggtgatattgaagaagaccagccgatgcaatgtggcccgcgtatgttcgcgccattctctgaagatgttgtaaaacttattaatcagttcgaagctccgcaaactcgtcaataa

SEQ ID NO: 96148 - DNA, 2040 bp, Enterobacter aerogenes
atgactattcagatgaataacaaaggaatttgtattgctctggcagaacaaatgatggctgccgggcctcagttaaagagactggaaagtattttcagcaatcgagtccttcaacaaaaggattctcttccctttgatttctgcgagggaaggttggtcgatcctttgaatcatatacctcagcagataggaatatggtccccggtctttgagggtaccaacctgaaatactataagcgtaataaagaactgtttaaccggttcggcggaaatgatgcatcatggtcggaaacagaaatgttatatcgggcaaatccaaataagaaaacgattatctacatgggagaatctgtagctcgtggttttgtatttgatcccgttgtaacacctgcaaaattattaaaagataaaattgcagaccatgattatgaaattgttgatttggcttgtaccggaatgaatgcttctgctttacttcaaaccgtacaggaagcacttgagcttcatccggatatgattgtcattcatgctggtaataactggtggaattcctggtggggaaatccgtcagcagaggtcacgacctcattaataggcttagatagccttcagattaaagatgttattactcaacaggttaagctttatatcacgtttattctgcaatcaatcgttaacctttgtaagaaaactgaagttaaattatatttcgttttacctgaatttaactacgctggctggcaaaatgaatttgctataccggcatggttagacgaccagacatcagcatgttggttggaacatgtacaaaacgctaataatttattcgccctacaaaaattccctgaaatgcaagccgaatgtaataaggctttggtactggataacgaaacaagtcccttatcattagagctaatggctaaagcagaagaaggtttaggtaataccgtcattgctaaagaatattatattaaagcaaaaaatgccgtggtctggcagtacacaactcatactccacgctgcccaagttttattgaagatttaattcgcgagataataggacaaaatcctgattgtgagctcattgacctaccggaaatattttatcaacgctccggtaaaattataccagataaaacactttttgttgattacgtacatcatagcctgaagggtatggactgggtaagcgatgcgctagcctctgccattaccaaaaaaaataccattatcaatctttctgaggtttatgataaagattgtgcaggtagctatttactggcagcactccataatgctaattatggtcaacaagaggatgttattgaatattggctgaataaaaccctggaaatgagaaaacttacatcatcaagctcaaatgagttatcttttattactaagcattactcagccgatcaaaaattacacaaagaaatgtacacatcagccaacgcatcaataaataaatttctgcgtgcttttcacattagcgaccattcagggataagattatatgagctcatcaaaaaatatcatcctgaacaacttgaaatcaatgaaaaaaaccttccctctgagaagagcgatgttattgtcataaacagtagaaatcaccatattttccggttttaccctgaacgctacgcagtttttactgcaatgacatatcaaaataagcttttgatgaatgaggtaaatccctattcatttttttgcgtaaaatctctgccttctggcgaatatgaggtcactatctgtatcagatcgacgtcatcagagcatagtcaaagtgcgactatctctattaatggaaaggatacaagcgctaatttaagctcagaatggcataatttcattttttcgacatcccttaatgaagggcaggatattaacatcagtattatgtggccaatcatctcaggttcctgtgattatcacagagaattacttgcaaaagatatgattgaaggtaataggcagttaccagtaatgcgaattaccggagttattggacaaattatcattagaagtatttga

SEQ ID NO: 96149 - DNA, 1758 bp, Enterobacter aerogenes
atgcttatcgttggtgtatcagcactgaaccatgattctgcctgctgtattattgagaacggcgaggtaatcgcagctgtagaggaagaacgattttcccgaaaaaagcacgaccctcgcttcccgtacgcttcacttgagttttgtttgcgtaaagccggaaaaacctatgctgatattgattgcatcagcttttatgaaaatgaaaaattaaaacgtgctcggcagttatggagtgcaattcatgcgccggaaatcatgtccagattgaacctggatggtgaaagtgttgttgataaaattcgcacactttttggcaatgataaacctgtcaaaagttattctcaccatatgagccacgccgcagctgcaaggtatctttcaggttttaatgattgtgcaatattgattaacgatggtgttggtgaatgggaaactacgaccatgtgggatgcctgtggcggtgtactaaatcaggttgcatctacacattttccacattctgtcggtttgttttacgccaccattacgggcttccttggctttaatgttaacaatgatgaatacaaagttatgggcctggcatcatatggcaaacctgctcttgtagaaaagcttcgggaaataattaaaattagtgagaccggacaaattgagctggatttggcttattttgatttctgtgctggcgtcaagatgtactctgagaagttatcagttctgctgggtttcacggaacgaccggctgacagccctctttctcaggtccattatgatctggcaagcagcgcgcaatacattctggaagaggttgtcgtaaagcaattacagcatttaaaaacgttgtctccctcaaaaaacctgtgtttagcaggtggcgtagctcttaactgcgtggccaatgcaacgataagacgtagtgggctctatgaaaatgttttcatccctcctgcggctggagactctggtggtgctattggtgctgcctttttggccgctcaggaactgtatgataaaaaaaatattgcattggtaacgaagggtatccagcactgcttttggggaccatgcgtggggaatcatgagattgtttccaccttaaaccagttaggtatagggtaccaaagtttatcccgtgaaaattgcaaccgcaaaatagcggccgatcttgccgatggttatgttgtaggaatttttcgtggggcttctgagtttggaccccgggccctcggtgcaagaagtatcattgcagatccccgcaatcctcatgcacaggatagggtaaatctcgttatcaagcagagagaaaaattcagaccttttgctccagtggtcctaaatgagtataaacatgattatttcgattgtgattttgaatccccttatatgacagaagtttgcccggttaaaaaaaatgcgaacttgcctgctgttacacatattgatggcaccgcacgtattcaaacagttaacattcatgacgggaatcacccctttgttgaacttcttaagtcattttatgatttaacaaattgccctgttttattgaatacttcattcaatttgcgcggggagccgattgtcaataccattgaacaggcgttaagtaccttcattcattctgaaatggatgccttagtattagaaaaccatctcatatatcgtgaaaatatcccgttaaatcttgccaacatcagaaagcctatattatcagaacgtgatgatgaagcacgaacaacagtttatacttttttttaa

SEQ ID NO: 96150 - DNA, 240 bp, Enterobacter aerogenes
atgcacttctatttgatgctgtttgcccatccgggtataagccatctggcttttcagagcctgtattgctgcgtcggtgagcactatttcccggtttccgcattctgttttaggcggggtgaaatgtcctttaatggcaatgttgcggcttacagtgattgtccattttttcaggtctatatcttcccaggcaagcgcactaatttctccgtgacgtggtccagtgttaacggccagtaa

SEQ ID NO: 96151 - DNA, 141 bp, Enterobacter aerogenes
atgagcccgtacgtaattgaactcatccgcgaacgttggcaaaagctccgccttttccggtgccgaggaactgtaatcaccgattatcgacttttgaaaaactttgtccgtatttataagtctctgggagaaaccgcatga

SEQ ID NO: 96152 - DNA, 1653 bp, Enterobacter aerogenes
atgccagaaattactagttgtaatgttattcctacgccaagtgaaataaaatctgatgacttaaacactggattgcatagcaatgatggttcattaagtatgcaaggtgcgtttactactattgctgcgggtgacaataattatgtgtctcccttgatgtttggtggtatagggaatagtccgaatacagataatacaaaggcggttttagcggcagttgacgcggctgttaatctcgggcttaggctcgatttaacaggcggaccctggagaataattgaaacaatagatttgacaaatgtaaaatccattataactgattggactgggcgttttttacttgatccctcaaaattcacatgtaagcattccgcaaaatacgtaattacatttggaaacccagatactgcattttcagattcgcgcagtgtgagtgcttgtgttattgggttgtttgcagtgatcgctgatgggagaggagtagaattaaatggtgtctttattaaggggcatttgttaacatttgactccatcaggattactaattttaatggttcgggtttatacgccggtgcagtttgggatagtacagtcgggtccatttctgtagagctttgtggaaatgttgcaaactacgctctgtctattgctccttttggtgatacctcaaattgcctgcacatagggcgcattcagtgtgagcaggcttatcataaacagatttatctaaacgttattcgttcagagattcatactgtacatgctgagagaatgtacatattgacaactgatgacggcacaactgaattgccttccgggttaaattatgagaatagctattttttattaagtaactcagctgtttatcagtgtatcatagacgcaacatcatcttcggatattggtacggtcacagaaataccatccgtaaggttgaatctttatgcaagtaaaattactgcatttagtttggttaattgtgaagtgtcatcgatgtatggtaatcattcgaccgtggataacagtgttttttataaatattataatttggcatatccatataaatatacgtcatgccgatttgtaagttcatcgtcggacggattgctaacaccaggcgttggtagtgtagataattgcgaaatagatactttcctccctgcctatggaacgacatctgttctgctgatgaaaagtattattaataataattataataataccaggacaggagtaagtggggtgctattcgactcttgtaccttcaaaaaggatgtgatgcagactggttctacagagtcaaatcagccaactaagcttcgggattgtcttgtattggggaaactgtcaggattttaccaacagaggttgattgtcgaaggtgggtacattcagagtgtgagtttagctagtcgcgcttacgtaaccttggacggagtgaaaggtggaagttttagctactctggcgataaggcttttgtttccagaaactgtcgtttcaatagtgttttagcgtgggctgttccgacttttggaaattatccggcaggtgaaagaacacagctactgggtgcaatatctccgggggattgtgttgagtatattaacattcaagataatggtgctgtattcaaaccattgctctatgtttaa

SEQ ID NO: 96153 - DNA, 1491 bp, Enterobacter aerogenes
atgacattgataaccccacagcagtttggtgctaaagctgattataatttttctaccaagcaaggaacagacgatactcaggctttcatcgatgctatttcggcggccattgctgctggatatcaggaggtctatattcctgctggaaattacttggttacaaaagaaattaacctgggtggtatcaacagctccgcaagggaaggtattaggttacgtggagctaactggagtaagagtcaattggtattcaaagcatcaaatatagatgatgtatgcatatcattacggggtgcaccaggttcacatacatcaaaagcagtgtctaacattaatataacggcccacggtgatagccaaaataaaggcattggtttgcttttaaataacgtatgctttgcgcatgtagatgattttatattatcaaatctttttgtcggtattaggcttagtaactcagggggcgtagggggatttacagaattcaattatttcaaaaatgggcggttgttaaaaaataatgtgaatattcagttttatcgtaatggtggtgatccaagttttcatgggaataactttgataacatccagaatcagatcatgccaaaaggtggcgtaggcatacaagtcaatggggtttctggaagttgttatttgtataatcaatattggcaaatgcagttttttggcggtgaggaatgtactgcgattgatttgattaactgcaatacggactacataggtgggaagtttactgctgagttacccctggtgttgagagctgatgctaatagtcggtgggattttcacggtaattttaattctataagcccagtgtcatttgattgcccgacggaatcaaccaccactggagggcgctttgtttttgcaaatactacatctttgcaaaatacaccgatgactaatgctgcaaatagattgcctgataactccaggtttttcccatttacaactaactttgcggataaaaataacaacggcatttttccgtcaatatttaacataaaggcttcaaacattgaatctttagggtttgctacatataacctatcaggtaatgcatttttctttgggggagtggcttataataaaggattgacagatttctctcccacattttggtttgaacatgatggaaccaggcttacaacagtttctgcaagctataatctgaatttaagctcttcaaaatcatcggatggtgatgggtttgtatttacaggctcttcttttagaccaaagaaagatgcgtccgtagatatcgggaatgaaactacacagttcagggatggatatttttctggtagggtggttgttgctaatgaacctgtttctacaattagttctggtgcggtttctaccagcgactccggagtgattggccaaatgaagatatctccggatgctagtgagttatacatttgtgtatcagaaaataagtggaaaaaagttactctaactgatatttga

SEQ ID NO: 96154 - DNA, 396 bp, Enterobacter aerogenes
atgtccgatcctttaactggtaccggcctgatatttggcggcggtttaattggttccgtcgtatatggcgttatcactcataccgattttggtgtggtatttggggcttttggcggcgcggtgttttatgtggcaacgaccgcaaacctgacacgtggaaggcaaatagcttacttcatgacgtcgtttattgtcggtgttctggctgccggattattaggctcaaaatttactacctggacaggctatacagaccgaccgctagacgcgctcggagcggtggtggcatccgctgttaccatcaaggtcctgactttcattaacagccaggacctaagcagcctgttcggattgctttcccgattaagggggggaggttcgagtggtaataaatga

SEQ ID NO: 96155 - DNA, 171 bp, Enterobacter aerogenes
atggttggctataccgcggacgcggcattatttagatcactgggctggggaattatcgcaattgcggcaatggacttaaggtcgaccttgttactcagccagaactacttgcgaatgatgcctatgcagccagaagtgccgcttggttttttactaccaaaggttgcctga

SEQ ID NO: 96156 - DNA, 1788 bp, Enterobacter aerogenes
atgacacctccgatgtatatgcgcctgaaggagctgtttgagagcgaaggtctgactgctggttttaaggttcaatggcggcagtggcgcgacaccgggaaagatgctgaccagttcatcgtattccatccttccggcggtaccgatattacttatgacctcggcggcgactggtatgtgatggtcgacgtaatctcttcgaaagctgatccggatgccgctgactccgcggctaacgccatcgttgaatatattagcgcgcaatccggggctgatgattgcgtaggtgcgcttatcgccaccgcgctgacaaagtgctgtgcagtttactggaatactaccggggcgtttgagcaaaaaacggcgcaggttaaagagaagataaacgataaaacttacacgatgacctatcagtaccagtatctcggcgctgatgcatcccgcgtgtatcttggtgtgcggaataccctgtctaatgctgatttctacgtgttcaacaccaacgtggccacatcagcaaacgcgatcaccaacttatcgaaaggcctggtgcgtgatccgatgctgaatgcctatattgcatctcaggtatctgcgtcagtcagcccttatccacctttactggccgttaatagcccggtcgcaaatgctgaagattatatccttctgcccgatcagattttcgttcatccgactgaaccgttactgattcagtgtcctcagctactgatgaactggacggcggatatgggacagtttcttgactggtcgatgcgagggacaaatttaaatggacgcccttacagctacgagacgagccggacaatggagtttgatccggcaaaagtgggaactgatgtcagcttcggctttcataaccggcagaagccaggccaatggtcgcggagagacgtcacgctggtacgcggcccggcaacggtcactgtgtcaaagtccatttcacttattggagactcgttaactaaccgcggacaagtcgcgcgcctgacgacattacttaccgcggcgggcgttaccgtcacgcagattggtacgatgacgcagcaggagggagggaaaggagaagggcgggaaagctgggcggcggcgcactttgttggcaagcgcacattgcttaacagtacccgaatcaatatcagttccgataacccgtctggaacaaacaaaaacccgttcctgttcgaagcgacggaggcccaaaaaacagcacatccggagatgtgtttcctgaacactggggcggcttctgagaaatcgtatgcagatacgcaaaccgggacgttttacacgtttgattatcgccgttatctggatgctcagagctttgctgacccggatgttgtatcaattgcgcttgcatggaatgaccaggctaatggccagacgcctgatgcctatatcgcgcaaatcaactacatggtggagcagattaaggcggcctgtccgaacgccaggatagccattgccccatattgtcatccgtactcaagccgtgccgtgtggaacgccaacacctcgcagtatgtgcgtaacgtcatcggttcgttcaaagggcgccagagtgaaaagctgcacatcattccttcatgggggatcatgccagccgataccgccaggagtagtgacggcgctaatattacgcgggatgcgttgacgggaagttatgtcgatacgcgtagcgataacatccactgggataagtggggaagacagtacatggcgtacaattgcctgtatccattttatgtctgggcctgcgctcagtag

SEQ ID NO: 96157 - DNA, 1914 bp, Enterobacter aerogenes
atggacacgattttttttacatcaattgaagattttatgacagaagcgagtaataatgttgacgatgcgcttgatttagcactcaattattgtaatacgcacgattgtaatgttataaaactagcatcaggagtgaagtaccccatctaccggacacataacattccggataatataacatttataggcgatcgaaccggtcactttcagcaaggttctacaagttatggtcctacagtaccaattgatcctgccaatccgaaagattcagcattcctgtggtatggtccaagtgctacagtctggtttaactgcggaaaccaagttacatttgacgggatagttatagggacaccactacagaactggaaggcatcttcaaaaacacaactaattgactatagcactgctattaaagggaaaactaatattaatattatttcatgtatttattatggaatgcgtaactttgttgaagctactgggcaaacacaagtatttaaggagaatgttgggttctcatatgaatgtgattattacattaaagagtcaagggatataaatcaaattataaactgctatagcaaccctggtgttattcgtgcaacagagagttttgcgaaatgcctaattgacaataacagtgtttttgcaaaacttgaaaatcatgacggcacgcacattcagaattgtctaacatttgcaaaaaagattgctataaaaaatacagtctcatccaattatattggccatgttatggttaatgtagcctcttttgatcaggttggtgttattcttgacaataacccaacagggtctggcgcggtgatcctcaacgacgtttttgctgttggtggctcagcagcagatttcggtacatccattccatcttctgattccgcatttatcataatgcgcaaacagtctttagattcaatagcctctgtaacgctaagtaattgcagatttaatctcgccgctaccccatatactgcacacccattatttgcactaaatttccaggtagaccagggttatgtagttaacttatcaaatgttgagtgcttccagcctacagacaatggtgcaggaacattttgtacaataaatggtaccgtaacttccgctgcaacaagccatagttctcaaccaatccgggaaaacctcattccaaatgctggatgggcatatcgtcaccctagtcacagccaacctcgtggctggactttcaacaactgtacgtttgaaacgtctctttcaagaagagtaactgcaacatcttcagatgcatactttggaactgctttccgtcaggacattagcagtcgaacttatatatttacagcttctcagatcggctcaagtacaggagttacagtaacaagtacatcagttgatggtagtcaaactacatcaggtaatccatggataagaaagggtggaaagtactattgtgttatttacttatcttcaccagccagattccataacgtacagatctctgcaggaaacactgggtcaacaatcagctttgaatacgcagcattagttcctggaagtgtaaatagttatggaggttcttatttagaacgcccagccaaaccgactcaaactggcatttcatcatacagcattcaattatcaggaggagcatcccatgctatttacccagattatgccgggaaagcaggggcatatagcatttatatatcatcttcaattggggtaatgatttgtagaatcttaaaactgacccccacaagcacaccaaatataaccatagaggaagcttcttatattggcacaaattcatttactgtgacatggccagataatagcactcctgttgtattaacaacctcaccaaccgcattatacttaaccctaacaggggcaacatatataagtgattag

SEQ ID NO: 96158 - DNA, 291 bp, Enterobacter aerogenes
atgcttcaacaatcaccgttctatgaagctactggcataagccatcacgccacgttcgtcgatacacagcgaggagtcgccgtagtagagcgctcatcagtcacgttagccacgtcgcttttacttatctcatattgcggagcgcagcaatttgccaaatttataggcggatcactgattacggaagatggggaagccatagaaggtgatgcgctcgcagatgtagcgctgattggtgtggttacccacatcatcagcaaagctggctttgatgactgcccggtgatgtga

SEQ ID NO: 96159 - DNA, 1746 bp, Enterobacter aerogenes
atggaaaattcaatctcatcctttgtcacaaaactaatacctttaattgatacagatcgagacggtttattatttattgatggtgcttggggtactggaaagacgcattttatcaaaactaggcttaaggatttatataataaaaacacatatttttatatttctctcttggggatttcttcgctagaagattttaaatcaaagattattgaatgttactatcttgccgacgctgaaaacatcacacatcagattaattcaatagctgatagtgccagcttactccgcggaagtcctgatgactctggcgtcataaaatctttatttaactccataggggctagcatcaaaggaaaagtattatcaagcctttctggaatatttattttagatgatattgagcgcgtcgacaaagaagaagtcacatcattaatccttaattactgtcatactctctattctcagaaagagagccgagaattagattttatagtagttgggaacacctctaaagaaaccaactttgaaataacgcataaagaaaagttaatttctgacactatatcttttacaccaaattttgaagagctttgtgatattatcctccctagattatcaccacttccagaaactgataaacaagcttttttgaacataattaaaaatcaagacatagttaatcttcgtattattaatagatgtatcgataaaatccttcctttatatgaatacattaataacaatcctgacaaagaatggaatgttcgctcaagtgacgttattggttgtataacctcaacaattatcctccaccatagccacaataaaagcatagaaatactgcataagcactcaccaaaaaattacctcataaatcaagacgacaacgactcatattctgaaaaagaattgtggacattatatagaaaatatgcaatccccgatattgttagagattacagcatggggctggaatcttcaaaatcaacacaagaagtgatattttcacccccaaaaaaaatgtctatcgaagatattgccattgcagatcaacctcatatccatgaggttgatgaaatttcattatcccaatgtttccatgaaataatcacaaagaaaaggattgtgccaatatactcatggatgttaatggtacgaaactacatcttcctcactgaaaatgaatatttaccgacgaatccgttattaagcaaagattgcattgaacaaatggcaaatgactttagccttgaagaaatctctgatttcattgataagaaaggtggctttgatcacctacgacgctacggtttatcatcgatgaaccaagatccttacatgaatatttttctgaaaaaatatgaaagccacattaccgcagctacaattaaatcactacgccatgcagttgctaatgatggatggtacagcattgataccactaaaagcattgatagccttgatgattattcaaggttcagacctttgcagattattggcagctcgttcttgttaaaacacctattattatcctggaaacctatagatatcgaatcatttgattcctacttagctaacctatatgcctttagtaatatcagagagtatttaagtgaagaaaaaccacatttaatacgattagaaatacatacatatatttatttgcaatctaaaaaaccaaatttcaaatatggcgcaataaaacgattaaacggtacgttaaatgaaatattaacaagactttaa

SEQ ID NO: 96160 - DNA, 342 bp, Enterobacter aerogenes
atggaggagggcccctatgccaccctgcttaaaaaaatagccaagcttcaggaacgactaccgatccgcgttgagtattctcccgtccgtatcgcgctggtgacggccagaaacagcccatcagaaatgcgcgtcattaagacattgagaagctggggggtatatgtcgacgaggcgttttttcttggtggtgtagagaaaacgaaagtcctgaaggcctttaaaccgcatattttctttgatgaccaggatgtacatttggttgctgctgcaaaagttgttccttctggtaaggttccttatgctagcaattccgagctttttaaaaaggaagcattgtaa

SEQ ID NO: 96161 - DNA, 2361 bp, Enterobacter aerogenes
atgactaacactaacttttctcaaacggctgcgtttatctggtcggtggccgatctattgcgcggtgatttcaaacagtctcagtacgggcgcgtgatcctgccttttacgctgctgcgtcgtcttgagtgtgtgttggcggagaccaaagatgcggtggtggcgaaatatgatgaattaaaaaccagcccactgccggaagatgccaaagagaagtttctgctgcgcgcaagcacgctttccttcttcaacacctcgaagatggatctgggcaaaatgggtcagaacgacatcaaagccaacctggaaagctacgtacaggcgttctcgccagatgcacgtgaaatcttcgagcacttcaaattcagcgagtttgtcggcctgctggaggatgccaacctgctgttcaaagtggtgaagaaattcgccaccaccgaccttagcccaaaagcgatttccaactatgaaatgggcctggtgtttgaagagcttatccgccgtttcgcggaaagctcaaacgagaccgccggtgagcactttaccccacgcgatatcgtgcgtctgaccacttcgctggtgtttatggaagatgatgaagccctgacgcagcccggtattatccgcaccatttatgacccgacggccgggaccggcggcttcctctcttcaggcatggaatatgtgcacgagctgaaccctaacgcggtgatgcgagcctttggccaggagctgaacccggaatcctacgcaatctgtaaagccgatatgctgatcaaaggtcaggacgtcagccgtattaagctggggaacaccctctctaacgaccagctgccgctggatcagttcgactacatgctctctaacccgccgtttggcgtggactggaagaagattgagggcgagattaacgacgaacatacgcagaaaggttttaacggtcgctttggcccgggcctgccgcgtgtttccgacggctcgctgctattcctgatgcacctgatcagcaaaatgcgcgacaaccacaatgtggatggcaccgtgagcaacggcgggcgtatcgggattatccttaatggttctccgctgttcaccggtggtgcgggtagcggtgagagcgaaattcgtcgctacattctggaagccgatttgctggaaggcattgtcgcgctgccaacagacatgttctacaacaccggcattgccacctacgtgtggatcctctccaacaagaaagcgcctgagcgtaaaggtaaagtgcagctgattgatggcaccaacctttgcggcaagatgcgtaaatcactgggttccaagcgtaacctgatgggcgaagacgatatcaagctgatcaccaagaccttcggtgactttgaagtggtggatgccacccccctggaagaactgggtctggaaaaagccgccgagcaaaaatccagccgcggccgtcagccagcaacggccaaaaccgaagcgacgaaaaccttcgccagcaaaatctttaacagcaccgactttggctatcgtcgcctgaccattgaacgcccgctgcggttatccgcacaggtgaccgatgaggcgattgcgacgctgcgatttgcaccgaagccgtttaacgcgccaatggaacgcctgtatgacgagttcgcatcccaatggcatgaggaaaactatggtgatttctcagagctggaagccgaagcacgcgccatcatcaaagccgaatttgccgagctgaaagagaagcagattaaagacctgctcgacagcaaactgtggctttcccagcgcgggttaatggaaaaagcgcagcaaatacagacggcactgggtacgcagacgggtggcaaaacgctggtgagcaatgatttcaaccagttccagttgaccctgaaaggggccatcaaaacggctggcgtaaagctggacgcgaaagaaaacaagcagtttatcgatgccatcaccaccaaaaacccggatgccgagccggtggtgaaaaaggtactgaaagaagcagcccaaccgctgtacggtgcatttgaatacaaaggcaaggttgttgagtttgaacaggatggtgagttacgcgataacgagaacgtgccgttgaacccgtcagtgtccaccagcgacctgattgaaaattacttcaaagcggaagtactgccgcatgtaaatgacgcatggatcaacgccgataagcgcgatgtgaaagatggcgaggtggggattgtcggttacgagatcccgtttaaccgccatttctatgtctaccagccgccgcgcccactatccgagattgatgccgatctggatgcggtcagcgccgagattatgaagctgctgcaggaggtgcattcctga

SEQ ID NO: 96162 - DNA, 1416 bp, Enterobacter aerogenes
atggctaagtataaggcgtatccggagtataaggattctggggttgagtggctgggggagattccgaaccattggattaggtccaagtttggttatttaaagacaatattgactgattatactgccaatggttcttttgcagatttaaaatctaatgttacatatttagatgagccgtcatatgctagattagttcgcttgacagaccttaggcatgatttaaataatagcaatggagtttggattgataagaattcgtataattacttgggtaaatcatcgctttatggtggagagtttcttttagctaatgttggtgcatatgcaggattgttttatcagatgccttacaacaaaggccctgcttctttagctccaaatatgtttatggcaaagttttcccctgaaaaaacctcgagaaaatttattgcatatgttggacaagctgacaacatttctaaacagttaatgttaaaagcaaccgcatcatctgcacagccaaaattaaataaagatgattttaaatctatattttgttgttatcctccattaaatgaacagacaaaaatttctgttttcctcgatcacgaaaccgcaaaaatcgataacctgatcgagaaacaacagcaactcattgaactactgaaagaaaaacgtcaggcagtgattagccatgccgtcaccaaagggctaaaccctgatgtgccgatgaaagattctggtgttgagtggctggggaaagtgccggagcattggactatcgctcaattaaaattcaatactattgaaatgcaaactggcccatttggtagtcaattacatgctgaagattatgtggtagatggtattccattaataaatcctgcgcatatgaatgcagggatgattataccagatccgaaagttactgttgatgaagcgacccaagaaagactagggcgacataaactatcagaaggtgaaattattttctctagacgtggcgagttagggcggtgcgctgttgtaaagaaaaataacgaaggttggttatgtggtacaggtagtttgaaagctaagcttacaaaaaaaataattccagactacgcttatactctgatttcttctgagggcgttgtttcagaactgacattggaatctaaaggttcgacaatggcaaatttgaataccgagactttgggtagaattcgattgccagttcctccgattagtgagcaagaggcaatattggattatattaagataatttcagataaatatgattatctaattcgatctgcagacactgcaatcagacttatgcaggaacgccgcaccgccctgatctccgccgcagtcaccggaaaaatcgacgttcgcgactgggttgcccccgacacgcagaacgttgaggagccacaggaggccaccgcatga

SEQ ID NO: 96163 - DNA, 3249 bp, Enterobacter aerogenes
atgagcatggacagcaccaaagagctgattttccagaatgagatgattgctcagatggaggctaaaggctggatttgtggcaaaacggacggctacgatcgcgaacgtgcgctgtactcacaggatgcactgacctttgtgcagaccacacagccacaggagtgggagaagtttgccaaaatttacccgaccgataccgagcgtcatttcctcgatgcgctggtggctcagctgaaaaaagcggatatcaacgccaccgatgttttgtctcgcacttacggcacgctcggcgtactgcgtcacggcatcaaaagccataacgcacgcttttccctgtgccagtttaaaccggaacataacctcaatccggaaaccctgactcgctataaacagaatatctgccgtattgtgccagagctggtttacagcccgcatgcgtcgaatgccgcattcgaagaaacgggtaccaaggcaaagaaatggcgtatcgacctggtattgttcgtcaatggcctgccggtagcgacgctggaactgaagtctgaatttaagcagacggtgcaaaacgccattacgcaatataagaaaacgcgtttgccaaaagatcctggcaccaataaacctgagccgctgctgacttttaaacgcggcgcgctggtgcactttgccgtcagccaatacgacgtgtttatggcgaccaaactggatggcgataaaaccttcttcctaccgtttaacaaaggcacccatgacggcggcgcggggaatgatatcccggaagatgccaacgactacgccaccagctacctgtggaatgaggtgctgctgccggacaacctgctgaaaattctcgcgagcttcgtgcatctgcaaatcgtcgaaaaagaaaacgccattggcctgaagtacaaaagcgagagcctgattttcccgcgctatcaccagtgggacgtggtgaacaaactgatcaccgccgccaccgtggaagggaccggcaataaatacctgattcagcacagcgccgggtcgggtaaatcgaactctatcgcctggacggcacatcagctttcccgcctgtacgacgaaaatggcgagaagcagttccactcggtgattgtggtgacggaccgcaccgtgcttgacgaccagttgcaggacaccatctatcagtttgaacatcaggacggcgtggtcggacgtatcaataacaaagaaggcgatggttctaaatcggagaagctggcgagcgcgctggaaaactcgcagccgattatcatcgtcaccattcagaccttcccgtttgtcctgaaggcgattgaaaatagcgtcagcctcaagcagcgaaaatacgcggtgattgccgatgaagcgcactcctcacagagcggttctacggcgcgtcaactgaaagaagtgctgatgaccgaagaggcggatgacgatgtggagatgtcttcagaagatattctggacgccaccgtcgccgcgcgtaaaggcagcaacaacctcaactattatgcctttaccgccacgccgaaggccaaaacgctggagctgtttggccgtcgtcctcatccgcaggaaccagcatcgaaaaccaacaagccggaagcgttccacgtttactccatgcgtcaggccatcgaagaaggctttattctcgatgtattgaagaactacaccaactacaaagtggcgtacaagctgctgcaaaagctcgacgatcctgaccgggaagtggacagcaaaaaagccaaaatcaaactgaaccagtgggtctcgctgcacgatcataacgtgtcgcagaaggtgaaggtgattgttgagcatttccgcaagcacgtgatgcatttactggctggccaggcgaaagcgatggtggtgaccagttcgcgtaaggcggcagtgcgttacaaactggcgttcgataaatacatcgccgagcaaaaatacgacaagatcagcgcgatggtggcgttctccggggaagtggaattccacgaagatgaccacaacagccttgcgctgctcaaccagaaattcaccgagatcactatgaatccaggcctgaaaggccgggatatgcgtaaagcgtttgataccgatgactaccaggtgatgctggtggccaacaaattccagactggttttgatcagcccaagctgtgtgccatgtatgtggataaaaagctgggcggcgtggagtgtgtacagacgctgtcgcgcctgaaccgtacctatccggggaaggcgcagtccggcacctttgtgctcgatttctacaacgaacccgaagatattttgggggctttccagccgtactaccagactgcggaactgactgatgtcagcgatccacagttggtctttgagatttatgaaaaactgcgtaccagcggcattttcctgtggaacgaagtggagcagttctgcgaggcgttcttcagcaaaaataaatccaacgcggctattagcaatatttgcaaacctgcggtggagcgttggaaacatcgctacacctcggcgattgaggcgtatgtgctggccaaagagatgttcgaacgcactaaaaaaaccggcgatgttgtgctgatcaccaatgcggaaaacacctttaaggactgcgagaaagaaaaaagtaagctggatatcttcaagaaagatctcggcagctttgtccgtttttacgaatttatgtcgcaaatcgtcgattacgatgacaaggacctggaaaagctgagcctgtttgcccgccatctgcgtccgttgctgcatgaacagcgcatcgaagaagatgagattgatttaagcaacgtggagatgagccattatcgcctgtcaaagcttcacgagcagcatttgaagctacaggaagatgcggcggaatacaaaatcactccgggaaatgatgttggaacggcgaagccgaaggacaagaaagaagagtttctgtcgaatatccttgcgcgtcttaacgagctattcgttaccgataatctcaccgataaagacatgatcaattacgccttcgcggtgcgcgacaaactgtcagaaaaccaggcggtgatgacccagattgcaaacaacacgcgtgaacaggcgatgctgggtgatttcccgaaagccattgatgatgccgtgatggacagcaacgacgcccagcaggagatgatggtgcaatatctctctaaccctgagctggcgaaaggctttgcccgcgtggtgtttgatatgttgaaaggggcttaa

SEQ ID NO: 96164 - DNA, 1983 bp, Enterobacter aerogenes
atgctgaattctttcgagatatatcaggcactgaatgaattgggttaccgacttgaggctggaaacttcgagccaagctatgcttctgaacatccgctcgggaatggaaagtatctgtatgtcaaacgcagtcgggacggcgtagttaacgagagcccattggttcttgcaccagaaacccttaccttaaaagcggaaattgatcgcattgcgggtatccactgcctttgggaaaaagtaaaaagcaccagctaccgccgttacccgaaagataatggtacgtcccaatatggttttgcggcagatgttgaatcaattgaagcgttacaggcgctggtagctttgctgggtggccaaccatctataactccccaaccgggactaaaaagagacgacaaaaacaaggagcaatcgttcatgtatcccttaaaccagattctcttcgggccacccggcacgggtaaaacctacagtaccactgaaatggcggtcaaaattgccgatgatacctggtaccaacaggctatacgggaacatcatggtaatcgcttacgggaattggtaaaagaacgctatagggcgttggtagaaaagcagcgcattatgtttaccaccttccaccagagcttctcctatgaagactttatcgaagggatccgcgcgactactgatgaaaaatcgggcacgcttcgctacgaagtggtcgatggtatttttaaacagctgtgcctgaatgctgaagttaaaacgcgtggtagttcaacccagtcattgtccttgaatgggagacggatttggaaaatgtctcttggaaatacgcttgacggtgaagattatattttcgatgaatgccttgtaaataattatattctattaggttggggggataatcttgattttagtggctgcacgacagcggctgatgtccgactgcgcatagatggagcgagtgatagtctggttgagcgaagcgaatacatgctgactgcggtcaatatgtttaaaaacatcatgaaaaatggtgacctggttattatttccgatggcaatcataaatttagggccattgccgagatcgctggcgattatcaatatctgcccaatgatgaacgcgtaggctatcatcaaatgcgtaaggtcaactggctacgaacctactcgccgagcttaccgaaagaacagctgtttttaaaagcgctttcacagatgacattatatgagttgagggacacctcaattgatcgggaaaaactgtcccaactactggccccggttgaaacaactgacaatcaagcattgccgcacgtactcatcatcgatgaaataaatcgtggtaatattgcccgcatcttcggtgaattaattactctgttggaacccgataaacgatcgggtgccgaagatgcccgtaccttaatgttaccgtattctaaacagctgttttccgtgcccagaaatgtctatgtgattggcactatgaatacggctgataagtcgttaattcaaatggatctggcgttaagacgccgctttagctttaccgaaatgcctgcacaaccggagttgctagccggggtcactgcgtttggcattgatgccgcacagttgctaacgcgtattaatcagcgtattgaagctctgctagatagtgagcatatgattggccatgcttactttatgccgctaaagaaattagaaaattccgccgaccgcgaagcctgtcttgccagcatcttccagaacaaaatcattccattactgagagagtatttctttgatgattatgaacgcattggatgggtacttaatgattcggtgaaagcgaaagaatatcgttttatcttgttacaacagtcagcacaactgccatcattttctgcactattcccgaaagatattgctgatagtttgtctgacaggcgttttcgtatcaataaacatgctttcaagtcggcagaagcttatcaggggattgtcgcatga

SEQ ID NO: 96165 - DNA, 1320 bp, Enterobacter aerogenes
atgatccaggtccgggaatatgccctgcttacttgtgataactctcaaccagccagtatggatttggggattgtctctgaggcaacgttttcctggcttgagcagttacaacaaacgtggagtggaacctctcacattctcagccgagaagggaagcggtttttgcgtttgggaagctatgtcggttatctacaatccccgaatggcgagtcaattgaaattctgccaaaaaccacatttgaagcgccaactgaggtagtccctctacgtcagcttttgcgccgaatgctaagcgcctctttagggattataccccgtgaagcgaaccaggcggcattgcaatatagtgaccagcctctacatgaatggataattagtgagttcttgcggcatcttgctgatttagtgcgtaaaggacttcgtttcgactatcacctcatcgaggacgaacatagcgcgtttatccgtggtcaactgaatgtcactgcgcaaatgagaatgccgccgggccgaggcacttattttcatgtgtgttatgccgagttctctcctcagcgcatcgagaaccgtctgctacggacggctttggattgggcgcttaaaatgaccaggcaagggcaaagctggaggcaggcaaattctttaagccatcaactggatgacatagccccaatttgtgggagcacaacgcaaccaatgaggcaatggagtgacggcaaatatctcctcggctatcgcgctataaagccgtggtgccagctcattcttgaacagatgaatccagattttcaacatgggtcatatcagggtatttccctgctgttccctatggagaagttatatgaaggatgggttgggtgcggcctggctagtgcgttacatcacgattatcagctcataagacagaccaggagccagcacttgttagagcatgttccagttggtgaaaagtcatctcaacgatggttcatgcttaagccagattttattataaccggcgggcagacgttggttcttgatgctaaatggaaactattagatagcagagtcgatgacagtctgaggaaatatgaaatcagccagtcggacctgtatcagatgttcgcctatgggcaaaagtatcttcatgggaaaggaaatatgatgcttatttatccacgtcacctgtactttgatgtacctctaccggtgtttcgtttcgatgaagacttatctttatggtgtgtgccctttgatcttgaatcgggtagattagtgaaaggtgagtggcaaggttctttccactgttttccctgtgaagaggctgtaacagtctcatag

SEQ ID NO: 96166 - DNA, 306 bp, Enterobacter aerogenes
atgatttataaagatttttaccatttaatgttggagtctttttcccaaccagttaagctgttcaccgagtcaaggaatgtaccttttactctctatgttgaagaacaaaaactttttgttcgaaatggaaaagataataccagccgtattggccccaaagaagtcgcagcatttattgagcggtttgaagaaaatgaaagtttggctgctaaagactatcaggatgtgacattcaaagcctcctacttattggctgcaatgaaatatatcactataaaaaactcactgaatactgataataagtag

SEQ ID NO: 96167 - DNA, 1044 bp, Enterobacter aerogenes
atgatctggctatcccgactggagtcgacagccactaaacatcgtcttgccgttggtaaggccgcccgtacagtgaaagctaatgcggtgctggatgaggtattacgcgcacacaatcaagaggccttgagccaggaggcgcctgatttgctgagtcaggctgttacgctattgcttgagagggactggcgggctcagcctaagcacaaagcgagttggcagcgctactggcggggtatgagcctgccaagtacttttgtttacgaaggtgccatcgttcctacgaagacaacatcagaaatagcctggcatccttggttggctcgacgtattacaggacaactgacccagccaatcaaggcacgcttacaacagctgaatacatatctttttcgccaaaccgagggcgacaagtcactattcccgggcttgcttgggcatcgtgagcggtctctgcttatatttggtgacgaaaaagcgctggactccttgccacctgatggctggaagcatgtcgctctgactttggctgatatgggcgcgtttcgacgtgcaccgcctttaccgtatgaatcatcatgttgccatgatcttccggctatcattgttgaaaactccgatgtgtattatcgactatgtcaacttaatcgagttcagactcgctggtcactggtcatttacggcgcaggtaacaaagtgtccggccaggcggaatgcgtgtcacaactccttgaggtcgaacaggtaaaacagctactttattttggcgatctggatgtagcgggcttaaaaatcgcccatcagttgcggtgtaagctgcttagtgattacggtatcagcttacatttggatgaatggctttataatgaactgattttaaatggtctaatgacgccagaagggaacgccaacaacgaacggtttgattttgaattgcagtgtaggtggatgccacagtttgttttacgagaaatgaagactcttctggcgaaccatcggcgtctacctcaggaaggtgtggcttctttaggtttagtcatatag

SEQ ID NO: 96168 - DNA, 4437 bp, Enterobacter aerogenes
atgtggctgattaaacgggtttatatggatggcgcaggccatgaagaagctttctacaaggacctcacactggactatattggcctgtctcaagcggtcggtagccctgttgttgaaggcctgcgctcgcccgtcagaaatgcgaaggtggtgaccagtacttatcagcagcttgtaaatgggggcggtaagtcaacctacatcgcgctgctgttatcgatttttgagccgtccgttagtgacttcacccaatatctggcaaatcatcgccagagtgaataccactaccgcaattacttctataaagaactctctgttgttttggttgagatggtcaatgaatcaggacaaacgttattactgggacatgctcatcagcgtaatggagatgatgttgaccgcacactgtttatttgtgatgcgcccgactccctgatgggcgcgccgtttgatgaagtcccttcttattcccgcgcggaacgcaattctgagctgcgcccctatgctaatagcctgcgcagttttgatagctggcttagtctcaaggccagtagtgaaggcggcatgcattggcgtaaaaccaccagacagaacgagtggcgcgcatttttactggaacaacaaattaacgttgatcttatcaaaacaatggtgaccttcaactccgaagaaggtggcctgacccgttttatcgaatacaaaactgaacatgatttccttggcgcgtttttcgcctgcaccatgtctaaagatgcggctgagcggctgcgggaactagtagcgcatgaagttgaacgtcagggagagttagaggggatccgtcgtaacgagtccttcctgaaggatgtgctggctaactggctggcgtttcttgagccggctaaacagctggaaagcatccaggcgcagcagcaactgctggatgatggcttccgggaagcaatgcgcgatctcgcagcctttgtcggggatgctcaggttgaacagacgcagcttgaagataacatggagagtttgcaaacgcatattggtcaggcgatgtctctgcgtgagcagttaggtaagcgcagagctctgcttgaatatgatttcgtgcagtatcagttcgacaagcaaaaagcgatagtcgatgcgcttcaagacgaagccgataccaatcagcgccagattgagattactcaagctgctatagactacaaagcctatgctaaggccctgaatgagtaccgccaggcagatgaagatctgaaggtattccaaagtgaaacggaaaggccgctacaggtgattttcgagcgtactgctggcgaagccttgggcacattagagtgggcaatcgacagacatcgccagcaggaggctacgcttgaggaagaattagggcagatggatagggaaagcaatacccttaaacaatcatacgacgaactacaaaagatgctgggtggcctggaggcggatcgtgagagatataaaagagacaaacggcagggcgaatcgcaacggggccaactatgtgaagctgggttgatccagaaggatgaaacaccagtagcagcccaataccgactggaattaaccttacgcaatgcacagcagagtgaagagctggctcatacaattcttcatcagaaagagcaggcgctggaagcacagctgaatgttgtgcgggaggcatcaattgagaaaagtgaggcccagcaaaaactcattctggctgaacaaaaacaccagtcagctgtggatagtgctttagttttagcaaaaacctatcaaaaactgccaacgtcaatgcaacatgatctagatattgaagacacgagttggcacagcgagctgtgtggattgcagctcgacaaggtattgaatgctaactctcacacgctgaatggaatgaaagagcgtttactgcaagcccggcacgaactggacgagttaaggatgacgggacatgaactggtcgcaaagcaggtcaatgaggcacttgaagcgttttatgcggcgggtattgcacgggataagctctggacatttccacactatttggcctctgtttacaacgatgatgcacaaaagattgctgcggtgatcgatcaaaaccctggccgctacctgagcctggtcgcactcgacaatgtaacgtttgaacaggtccataaaattagtgagatcttgccctggaagaaggcacctattgctatttacctgctggatgaagcacaagatctccgccgagaaacgtctgaattagtacaggtcgtcctctcaaaccacgataagcatggatatagccaggctgcttacgaagcccggctgcaagacctggagaatatcgtagcgtcgcaggaagtcagtgtgaaggctgcaaagagcgccttcaaagtactggaatatttcagtaatgaatggcgtctgcattatgaacagtatggtaagcattgggcgggactgcttgaccaacaggagcaggctctcttaatactggaaaatgctgatgcagtacttaagcaagctgagcatgatgagcaaacactgcgtgacgagaagagagatgccctggtgaggttaaacaacgcccgacagcagaaaattcgggcagaaaaagcacatgataaactgagcctttttgtagaaacagaatgggcgaagcgtgaaacggcgataatgaaaatggagcagttagctgcacagattcaacgaagcaaggacactatttgcacccagaaagagagactggaacggctgaacgaaatcgagaagaacaagctctccgagaaaacccttttaaatatccagatgggcaactggagtaatctgtgtaacgagccgttctattcagagattacggcgactgaaggtatggtaggacgaagccccgaagatgcccatgagatggcagctcaggcgcacaaaaaattgctcgaagcagccagcggtgatcaagtgaccgctctcaagcaacaactgaaagatgctgaacaggcacaacgttctgcctctgagcgtttgatcgctcaccccacctacaatacatatccggacgaggtaaaagcggcggccatcaatgagctaacggtcattaataaccgcatcgtacgcctcaacgaacagcagaagcaattcacgcaaaatctaattaattctcaggtaactctgcaaaatttttcccaaagctgcgaggaggctagtaaagcaattgacgaggattttgtctgggaagagaagcccattgagatagagacaatccaaacgtctctggctgaaatcgtcaacagcctccatgaaattgaataccagctaaaacttcacctggagcaaaagaagctgcagttgcaaaagattgaaaatgtgaaggaacggctacagaacgccaaaacagctcaagcgatgatccagcacattacgccgacctctgcggcgggtctacctggcaggatccagagcatcactgaatatgctgacaatctggcgacacaatgccaaatgtatgccggtctaaatgaaacgctaaaacagcaaaatatacgcgtctctacggtctggggaaaattccgcaaacggatcgaagaagagttggccaaggatccagacgcccaagccagtcaggaatacttacgccagttggactcaatcgcaacttatcatgaagtgctgggcgatttggacagggtcggtacagggatcacgcaggtattcgaagctgtgcaggatagcctggaacaattccagcgttcgattgatctgactgtcacccatctgactgctcatctggaaggggcgattaaacttctcaagcgcgcgatgtcggtcaaaattcctgaggattgccccgtactgcctggccggcccattatcaaaatgacggaccggctgaatgatgttgccgctgatctcagggggtttgccagcagccgcttgcagcagtggatagctaagggacagatacctcgagcgcccaatcgggatgccttgacagctgatttggttcagtcggtatttggcgaaggggagctggaggtgcgtttgctgaagacgaatgccagccgtccacaatggactcctgtcacccgacttgaaggttcaggtggacagcgccttacatctgcctttttactgtttgtgacggttggtaaagtacgagaatacgatacgggtatttcaagtgcaggattcttgttagccgataacccgctgggtaaatcgaatgccgatgatctaatgcgaattcaaacccaaatggccaaagcctataaaatccagctcatctacctgactggtatttcggatgaaaatgcccaatcaatgtttgataatcatctcttcctgaataaagttcaaaaactgaggcggcgcgatttggtcaccgttgataaagaacgccatgccctgtgggcggcttctctggctgctaagccacagttcgatcccgtcatttaa

SEQ ID NO: 96169 - DNA, 897 bp, Enterobacter aerogenes
atgtacgacaacacgcatcaacaagctaaacgctacgccgagattgccacgcaggcaattatgaattcactgggatataagatgggagacgagctgattcaacgtgcgcttgatctgcaaggtgatgccctgttcgcagagattatccgtggcgtggcgacaggtatgaaattgcggtacctcgggattcatgagacctacggggtattactggctgcagatggccgaggtccgttttccccatctttgggttggctgaacaaacgcttgctacctgaaacaatggctgagcaacagggtaaggaacggaaagaacagcgcctgtttgcaggcttaacactgattgcgttgttggctgatttgtttccaactccagacaccgttcgtgtcgagttcggtcagagtaatgccattaatgccgcctcggtggtagccaggctcaataatgttgccgaccaggtgattgcccagcgcaaggccgagggggacgataccgtagatggcctacttatgacggccaggtttgtgcaggaagaacgtattccccgtattcacgacgaaaaggtggggcgtgtctcgagtattcgctcgcaaactgaaatggcaacgcgctggatacaactgctgcaggaggaaggctttctggccgaagacagcagtctgtcgggagagtccgactggtatccgacccaaaaactcaaacattatctgcgccatactggcattgaagagacggtgcgttttgtcatgagtatcagtccagccgtagaagaacggtcgtccgatttagctgaaagcgatattgcagcattagcagataccctggagtttccttcgctcaatgaacgtccagttacaactggaaccacagaaacgcaacgcttgacggagatttaa

SEQ ID NO: 96170 - DNA, 1467 bp, Enterobacter aerogenes
atgtcactagggtttttggagcaggctcgtaatgaatctatggcacgccgcgagctgacgattcaatctcacgcgttgcttgtagttcggacgctggattcaatatacagcgccctacagcgcaatccgtttgatggcttcaagcttgatgcactggcggcaattatgtatctctttgacgccatgctttattatgctgaccgcgagcgccagcctggtatgacgcgtaaagaagccgagctatgtctggttgggcatctcaatgaagcctatccggggcaagaagcgtccgactacgcgcaagttgccagcaagatttttgcggcgatcaaagaccctttccgtctcagttattacgacttctcgcaacgaacgcattccgaagagcagatagtccgtctggtacgctatgatcagctatccggctcagatgatattctctggtcgctgactgatgaaggaatgcttttctataccctccgtttggatgaaacgccgatagaacgcgctgcgattctggcctggcgcacgcttaaaaccatccgtcgcggtgagatcgacaaggcagtacaccagatccaatcaacgcagcggcaactggagcaatatctcattgggatgcggatgaaagtacgtgctgcccagtctggtgatttgagcgcatcttatgcacacgatatccgtcccgtactcaatgattcctttgataaaacccgagaggttttggaacatatccagaactcaatgtcggccattaccgaaatgctggttgaaggaagttcgaaattaaatcccgacaaattaaataagctacgtaaggcacaagagatttttgctgaggtctgcgcttttacgcagcgctatcaagactgcttacttgatgttaacaaagattttgagcgagctcgtctgaaactcattattcccagagataatacccttttccgggaaacgctggaaaaaggtgtactcaagcccttgctgtctcattcccctgacactgtcgaaaaggaaatcgatcgtctcaccgcacgcctgttggctccccgaagacaggatgatgatcggcacattctgtttgatcctgaagcgctgctgaacctctatctcgatagatttgaacaggcgcttccacatgagatacaggaccccaccgagcagcctgtagctattgaaaccaacctgcgaaatatccctgaatccgtcattaaaaaatgcagcgattgggttagtgaccgattgaagaattgggggcatgtgagctttagagatgttttcgatgcctatgagtgcgaagaattatctgaacaagaacaacaggtttgtttacttcatattggcagcctggcagctaacagcgatcccgcaatagaagtagagatagacgacgctatcgaaacaacgctctggcgggctgacaatatcaaactgttaaaggtcgctcccttacacccctttgaggagtag

SEQ ID NO: 96171 - DNA, 894 bp, Enterobacter aerogenes
atgtactactcaatgtttcttgataaacacaaatcccccctcagccacgcacaatggttgcgcttgcgctatattgaacgccagctactgtgggaacgaaaagtcacttcgcgcatgattgctgaagagtttggcgtctcggcgcaacaagctcgtactgatgtaagaacctatatggaggtcgctccaggcaacgctattgagaagggagccggccgaaaagggtatttccccagtatgacgttttcgcctgttttgcttggagacaacgatctggtctggcgtgcgacggtagaatttcaaccgccacaagcggcccacgcgcaggaaattccgctcatccatcgcgcagtacatagccgcacgctggcaatttttttgtcagcaatcgaacagaacggacaagtaaaagtgacttatgcgtcaatggaaaacccggaaggcatatcccgtacactaagcccaacggtaattattaccgttaacgggcgccagcatgtgcgagcctatgactggggtagttcggcgtttaaggactttgttttggcgcgatttctggactcgccggaactgattattcctgcccctccccctccgcgcaaagataccgcgtgggaggtcgtaatccccgtgcgttttatcgccaatccaacactaaacaaagcgcaacaagaggtaattaagcgggattacatacttgaaccatctgaattcagcattcgtgcaccaatgattttttatttatgtcctgaaaacaatctgccgaaaacagatgatgaatatgcacaagctactgacgccagcagccacggcccctttgtctaccctgttctagctgtgcacgcccaaacaggtgagcctattcataagtaccgccatgcaggtgaaaaatag

SEQ ID NO: 96172 - DNA, 330 bp, Enterobacter aerogenes
atggcctgtagcgcgctggtggagtcaggcctgtggtcaagcgacgcggtagagcgccgggagatgatgcagtggtgggcggattatctggatgcaaaccggttcaggcatgtggtgccgtatggcttcaaaaaatcgccgggaggtgcacttgaccatatgagcttccaggagcgcaatgaccgacaactggaggagctaaaagcccggatactggccgactcggaatggctgacagcatctgagctatcggcgaaagcgggtttccgttctgccgatcctgaggcaggcccgaaaggttcgaaagccgccgggatacttacagtttaa

SEQ ID NO: 96173 - DNA, 888 bp, Enterobacter aerogenes
atggcgcttacagatcgcgcaatccggcatgccaggccgcttggcaagtcatacaggctctctgactgtcacggtatttacattcaggttaaccccagcggatctaagctgtggtatctgaaatttcgctttggaaacaaagagaaccgtatggcattaggcccttatccgcttatttctctggcactggcaagggagaagcaagcagatataagaaggcttattttagaaggcattaatccggcggaaaaacgcagagaggaaaagcggggtggagagcccctttatacgttcgagtccgtggcgcgcgaatgggtctccagcaacgtgaactggtcagcggagcataagaagcgggtgttgcgttatttcgaactttacgtattccccacgaacggcagctgcgacatcaccaagatgaaggtcaaagagctgctggtgcccatcaaagaggtggagaaagcgggcaaactggatgtcgcttctcgtctccagcagcgtaccgcctgtgtaatgcgctacgccgtccagaacggcattatcgatcataaccccgcatcggatttaaccggcgctgtctccacgcccaaagtgcgtcaccaccctgcactggagcttaatctcatccctgatttcctggaaagagtcgacgatttcaaaggacgtaagctgactcaactggcggtaaagctggcgctgttgctgtttattcgctccagcgaactgcgctttgcccgctggggtgaaattgacctgcataacgccatgtggaccattcccgccgagcgagaaccgatccccggcgttaagtactctgcgcgcggtgcagcagttcgatggcctgtagcgcgctggtggagtcaggcctgtggtcaagcgacgcggtag

SEQ ID NO: 96174 - DNA, 1968 bp, Enterobacter aerogenes
atgattaacaccgtgcgttacagtctgctgaccagcggaatattactgagcagcatggcgcttgccgccccggcaggcgatctgccgctgatgccgtggcccgcccatgtggagcgcccacaggcgcagggggcgttggcgctaaataatcagctgacgatcaacgtcagcggcgacgatctgggcgaggcggcaaaccgctggcgtgaacgtcttgcgcggcaaaccggctggacgctacagccgcagacggcgccggcaaaaagcccaactattaacgtgatcgtcagtaagaaagtgcctttcctgccgcagcctgatagcgacgaaagctatcagctaaccgttaacgccgaaggcgcgaccctgaaagccaatacgcgttttggcgcgctgcgcggcatggaaacgctgctacagctggtacaaaacggccctgacggcaccaccattccttatgtcaccattgacgatgcgccgcgcttcccgtggcgtggactgctgctggattccgcccgccactttatgccgctgtcggcgatcaaacggcagattgatggtatggcggcggcgaagcttaacgtactgcactggcatctgaccgacgatcagggctggcgcttcgcctccagacgctattcgaagctgcaacagcaggccagcgacggcctgttttatacccaggcgcagatgaaagacattgtgcgctacgctgccgaacgcggtattcgcgtggtgccggaaatcgatatgccgggccacgcctcggcgatcgccgtggcttatccggaactgatgagcgcgccggggccttacgcgatggagcgccactggggcgtgctaaaaccggtactcgacccaacaaaagaggccacctacgcgtttgccgaggcgatggtcagcgaactggcggctatcttccccgatccgtatctgcatatcggcggtgatgaagtcgatgacagccagtggcgcgccaatccggccattcagaaattcctcaaagagaaggggctggcggacagccacgcgctacaggcgtacttcaaccggcgcctggagacgttactcgaaaaacatcaccggcagatggtcggctgggatgaaatctaccaccctgatttaccgaagagcattctgattcagtcctggcaggggcaggacgcattaggcgacgtcgccaaacacggctatcgcggcattctctccaccggtttttacctcgaccagccgcagtacaccgcctatcactatcgtaatgagattatcccgcaggggctcaacggcgtggataggattaccgataacgacagcgcccagagctggcagttttcgatgccgcgcctgaagggcagcgcggttgagggcagctttacgctggtaaaaggcgatagcggctggcgggggtttattgattttaaagggaaatcacgacgtgccgtgcaggagattgaatggctcggcgacaatcaggtcacgttccgcgtggattcctggatgggcgagacccgcccggtgctaaccattaacgatgacaagctcgcaggctacttcctgcttggcaacacccgttatcccattgacggcaagcggctggatgccgtaccgcagggtattcagccgacgttgcccgacgcgcagcaacaaaagaatctgctcggcggcgaggcggcgttgtgggcggaaaacgtcgccgcgccggtcatcgatatcaagctgtggccgcgcgcttttgcggtggcggagcgtctgtggtcggccgaggacgtcaaagacagcgacaatatgtatcagcgcctgcaggcgatggacagttggtcaacggtctccgtcggcctgcagcagcatactcagcagctggagcagttcacccgactggcaaacagcagccatacgctggcgttgcagattctcgccgaggcgctggaaccggcgcattactacacccgtcagcatctcaagttctag

SEQ ID NO: 96175 - DNA, 882 bp, Enterobacter aerogenes
gtggtatttagcgcccgcatgatcgaccgcgtcggaaaaggtatccgcggagcgccacgcgatgcgctggtcgccgacgtaacaccgccggagatccgtggcgctgcttacgggttacgccaggcgctggataccgtcggcgcctttctcggcccgctgctggcggtgctgctgatgttcatctgggccaacgattttcacgctatcttctgggtggcggtcattcccgccgtactatccattgctctactgggttttggcctgcaggagccgaaatcctccatcgcgcacaaacgtagcaatccgctgaagcgcgaaaacctgaaaaagctctctgccgcctactggtgggtggtggcgatcggcagtatcttcaccctcgcccgcttcagcgaagcttttttggtgctgcgcgcccagcagatggagatcccgctatttactattccgctggtcatggtcgcgatgaacctggtctacagcctcacggcttaccctttcggtaagctctctgacagcatgagccacagtaaactgctgcaatgggggctactggtgctgatcctcgccgatatcgtgctggcgctcagcggccactggagcacgctgctgatcggcgtcgcgctgtgggggattcacatggggatgactcaaggcctactggcggctatggttgcgcataccgcgccgccggaactacgcggtaccgcattcggcatgttcaacctgatgagcgggctggcgctgctgctggccagtaccggcgcggggatactctgggaaaccttcggcgccgcatcgacgttttacgccggcgcggtgatttgcgtggtcacgctcatcggcatgcgctgtatgccatcggcctatcgccaggggtaa

SEQ ID NO: 96176 - DNA, 912 bp, Enterobacter aerogenes
atggcgcacgcggtatggggagcgatagcggcggcatcgggaaataacagcgcgctggcgggagcggcaggcgcggtgagcggcgagctgctgggccgctggatagcggcggaatattatccggatgttaagacagaagagctgtcggatgagcagaagtcgacgataagcgcgctgagtacgctggcggcgggactgatgggtgggcttagcggaggcagcagcgcggatgcggtggcgggtgcgcaggccgggaagaacgcggttgagaataatttacttggcggtagtgaatggcttcagacggaaaaagccagggaacatggtgctgatgtactttcctgtaatgatgctccaggtggtgaagcctgcaagcgaggcgaagcagttaataaagcttatgccggagcattggcttccgctgggttaatttatttaccaggcgggatgcaagcaactgctgggataggcggtgcagcaaatgcaggaatacaatatgcattaactggtgaaattaaaccgacagatgttttaatagccagctatacaggtgcagctactgctaatacaggattattgggaacgattggatggaatgcggcgggtggtgcaacgtcaaattatttgaaaggtgatgacccgctgaatggtgctggttggggggctgctggttcagccctgggttacgggatgggtaagtatcttattgaaatgccgttaaataaagtactcaatcctacatggaaaaactatgagtgggttgatatggggatggggataagtaagcctttacagtttgacgctcgtcccagtacttggggggcaatatctggctctgctgcttcggaagcaacctctcagggtggaccaaaggttgaagacgctatcacaaaaaaaggtttaataaaatga

SEQ ID NO: 96177 - DNA, 906 bp, Enterobacter aerogenes
atgaaatctgatatcagaaacctcgatctcaacctgctgaaagccctggatgcgttgctcgatgagcgcagcgtcacccgggcggcagcgcggctggcactcacccagccggcggtcagcggcatgctcactcgcctgcgcgacgcctttaatgacccgctgtttatccgcgccccgcacggcatggtgccgacgctgcgcgcccaggcgctggcggctccggtaaagcaactgctgaccgatgctgaaaccctgctacaaccggtcgttttcgatccgctggaggctgatttcacctggaccatcgccgcgacggattatgcgttgaaagcggtgatcgtgccatttatcgccgcgctgaagccaatggcgccgggtatccgcgtgcgcattattcccgaatctccggccacgctgctggcacagaccgaacgcggcgaagtggatattgcgttgttaacgcccaacgatacgccgccggaactgcacagccgggcgctgtatcaggaagagtatgtctgtctgctgcgcgaagaccatccacaggccaaccagccgctaacgctagaccgtttctgtgcgctggaacatgttctggtttcatggcagggcgatagctttcgcggcgtgaccgacgacgcactggcggcgcttggtcggacccggcgagtgggattgtcggtcagcagttttctggtgttgccggaagtgctggcggtgagtgaaatgattgccgtagtaccacgcaggctggcgaaaatggccagcggcatgaaaatcgctgctccgccgctggcgatcccgggtttcaccaaaagcatggcctggcacgagcgtaaccatcatgacccggcgcagcagtggctgcgggagctactcctgcaatccagccagcaagaacaataa

SEQ ID NO: 96178 - DNA, 525 bp, Enterobacter aerogenes
atgaaacagtctctacagcaaagcgcaatcgtctggccggaagagtatctgccgggcaccaccgacaattttgcctccaatgaaattatcgtcagcggcctgacggcagctcagatttgggcgcagctcgatgacaccacgctgtggccgggctattacagtaacgttgccgatatccatttccatgacggcagcggcccgaccctcagcgccaacgcccgattcagcttcagcaccttcggcttcccgattgaggcgcagattaccgaatatgttcctcccgttgccggacaggcggcgcgcgtagcctggcacggttgggcggagggggatgcaacaacgcgtcttgatgtgatccacgcgtggctgtttgaagatttgcccggcggacgcgtgcgcatcctcacccaggagtcgcaaaagggcgttccggcgcaggaactggcgcgtacgttgcccaatccgatgattaacggtcaccaggaatggatttgcgggctggtgaaatcggctcgcggcgagtaa

SEQ ID NO: 96179 - DNA, 417 bp, Enterobacter aerogenes
atgaaaaaatcggtagacaaccaaaataatttttttaaatcacattacaacatttttaaaatcaacactatcaacggcaaaaagttttcaatctctgcaaaatccatctacagttacctaaaaagttttagtgatgctggtctgaaagtgtttcctagccataacgaaattgctgacacttttggtattacccgaaatgctgcgataaaacagatagaaaaactgattgaactaggtttgatcgaacgtgagacacgtcccggtaattgcaatgagtaccacgtcctccccattcaaacagagaatacatctggacgaacatattcggaaaacagggggaccaggcacgaggttgtcggcgatttcgggaatgagtcaggaatagtattaattgaagatgatgatttaccatggtaa

SEQ ID NO: 96180 - DNA, 360 bp, Enterobacter aerogenes
ttggcactagcgagaaacactgtttttgaggaaacaacagagattggatttaatagcagaacaaaaaaagtaaaaattcccaagaaattaaaacctctacaaataatcaaactctacgaaccatccccgtcattgacaccagacgaacaatcaataattaactctatgaatggtgttaaatggaagccacgccaacgttatgccggattcaagttcaatcgtgaaccgctcaaatttgagtacctatttgataacatcaatgagtatgagggctggttagaattcaatcgccttgagaatgaaaactttaatgggaatgatcttggattagattttgattcaccaggcatctctgattaa

SEQ ID NO: 96181 - DNA, 291 bp, Enterobacter aerogenes
atgaaatacgattacgaacagattaaacatatttatgaagcatttattgaagaaaattttgatagtgttaacagattagtaactgcaacatatatcagcgctgactattttgttgatgaatttgaaactgtcataactgctctagataagctaccggaaacagattcagactttagcgaatggttgatttgtgatgacccccatctcgcaatcctattaacacattttaaatctacgctaggcggcattaatgcaacgttcaaccaaatccaggttgaggaggtgcgttga

SEQ ID NO: 96182 - DNA, 198 bp, Enterobacter aerogenes
ttgagatttccagtgataaccatgggcatttaccacacacaggacgggaatatttatatccaacgtaatgatggtatctggaagcaaaatgttaactacctcgctgctattcctaatcagtacggatgcaccacctacgaggaacaatttgaggagattataggtcacatcgaaaacggtaaattaaggggcgcataa

SEQ ID NO: 96183 - DNA, 351 bp, Enterobacter aerogenes
atgtcactaattaaattcccacaacctaacctcagcgtctgcgacgttctgagtcgtgaattaaacggctatagccgaaaagtgaaagtttttcccaaaattccagattgcgtccctggtactgtaattgatgatagtggcgaaattgtcggttcggcctctacctctgcgaacgttgtgcttgagtataaggatgctgacgctacgcctgttgctgttctggtagccaatacgaatattcatattaaggatttcagtttggtttgtgatgatgtagccaaggctaaagaacttctttctgctgatcccgctgtttatttcagcactggcaaatcattgccaactacctga

SEQ ID NO: 96184 - DNA, 1041 bp, Enterobacter aerogenes
atgttttcttatgacgcctataaaatggtagacctcgccccgatttttgaagtcgcccctagcgagggttatctgctacagaacttgaatattttcgataaatcttcgagtaatggtatttacgttatgattgaccgacttatcgaagataataaaactctcctgaaccaaccgaaaaaacgttacagttttgaacacgattcaacggctcggactcctgctaacagtttccctgtagaactcttacacctgcatcgcgaggatactgtgagtgctgttgatttccagaaatctggacgcaaaccggggacagatgttcaggaaaccatgctcgacatcgtcgcagactacaccctcaaacacgctaaggcgtacaaacgctatatcgaggctgcatacggtgatgctctgtttcgtgggctggttcagaccccatacacccaggaagcgccagtaattgattatgctgacagtttcgatgctccgatgatgacggatactattactctgtccaacggctctaccgatgcgctggaggtgtttaatgggttcctggataaaattagcagtgctaccgatggtttgtggaccgatgttcgccgtgtcgtctgttttgcatctgcgagtttctacaacagtttgcgtttccacgcctccatgaaaagtgcttaccagtacgttgacccgtttaacgaaatgaatattgtttatcagcgcaaagaggttttgccaaatgtgcaaaccttcaccttgccaggactgagcatcgacgtaatcaaggttacggatccgctcctgactccgtttatcgctgatggtacagcggtcatgttgccagtattccagagcaacacgaacgtttatcaacatctgtatggtcctgcctcagttgatactaatttagcggcgtctggcatcactcaggaatatttttcttatcagtacgagaaagcgcgtggtgaggttgaaattgtatcagaggcgtcggtgttgcccgtaaaccacggtaccaatttcagtctggttattactgccaattaa

SEQ ID NO: 96185 - DNA, 1821 bp, Enterobacter aerogenes
atggcaactaaggtagaagccgcaacactggttaacaggattgtttataaatctgatttaaatagtctgaaaaaagtcagaaacgacatgaagaagcttcaaaaggagttttctaaatcaaacaaccaggtagctaaagcgaaacaagcagcagataaacaagtatatcaagcacagattaaacaacagcgtgatattgataaacagcagaaacagacagctaaacaagctgctgtagatgcaaaagcaaaggctaacgaacagaagaaattagcggcagcgcaagcacgtgctttgaaaattcaacagcagcaggcaaagagggtggcaactcaacaggaaaatgccgacttagcaagaaaacgtgctgcattccagcttggacgcctccagggaatggatggagcctccagatatcaagcaataaaacaggctaatgccattgtggatgcttatgcacgaggaaatcaaagtctcaaatcgatgaatcaagctctgagccagcatctgactacgcaacgtagtattgccagaaataatgccaaacaggccaaacaatcaggtaaggcgaaaaaatctggatcatctggctggctgagtcgccaggcaagcgcatttatccccggtgagatactcgggccaacagccgccgcttatgctgcccaacaggcatatcagattatggcggggacactacagggagccattgagagaaaccagggcaggaagatgatcagttcgatgggcttaaatcctctggaggctgatgcagctattcaggaaactctaaaacgaactggctttaatataagctatgaaaagatttctgacatagcaaaagatacccaggacaagatcggccaattgagtcttggcgagtggaaaacagataagaaaacaggacaatcaacatattcaggcggtggagaaatgggagattggctccagatgatggttagtcgtggaggctatacccagcagggagcgctaaaaactctccaaaatgtgaaaggtccggttgagttagctgtgttactggaagggttacgtaaaagtgcaaaacttacagactctgaattcactgctttagcagaagtaataaacgacttctcctatctggctaaatcggtagatgccagcgggcaaaacgtcattgatactatgaatacgatggttaacagtggcctagcacttaatagccaacagcagaaatctatcgataacctctcgcaaatgtcgattgtattcgataacgccagaaatgcattaggtgatcaatttgcggcatcttttagcaaaggtcttgatgatttaggaattaatactcaaaatctatcttctgaaatgggttcactggtgcctctggttaaggatttaggaacggggacggctcagactgttaagggatttaaagaccttcttgatgtcctttctattatcacagaatggaaaaatagacttttaggtgagaaaccagaagagcgaaatatctttcagcaaggtgcaacatttgttggggaatcgttattaccgccgggcgtccttgatatggcaagtaaagttaaaaatcttgtcagccctggcgctgactcttcatacgctaatcaggttcaaagtggtggttggtataatcaaattatgccagcaacgccatctatgcagtaccaacccgtcattccggatttaaaagctgattttaatcttaccgtaaatccatctccagaatttggaataatggtagaggcggtagcagataaacgcatagaatgggcttttgatgatcagaatttccagattaaccaaagcattttagggcaataa

SEQ ID NO: 96186 - DNA, 1260 bp, Enterobacter aerogenes
atgaaattcaagcatggtcgctacagacctaatcaatatctcatttgtgatccgtatggtttttatcatgtgagaattgcaatacctgactatatgcaatcgctgtttagtggaagaaaaacgctagttcgaactctatcaaccagtgaactaaaaatagccagaatgaagcgtgatcagatagcggatgagtttcaccgtttgcgagatgccatccttccagacaggccagatagtgtggcagacgtgatcgagttatttcgaagcaaggcaaagtacgcgaagacagcaacgaaagcgcaagttattaataaatgtcctgctttacgtgggatgttggatatttaccttctacaaaatagcaacaaaaagaaagtaacaacgttatctaaaactaaaaaagcggtagaggtatttctcgatcatcttcgtaaacgtgatattgcactcaacgaggtaaaccgaaccacagttacagcatggattgatgttctccagaagaagagatcgcaacaaacaatcgctaactacattagtgctatggctcagatttgggatttggcatcatcacgatatgaagatgcaccagaccgggcacaatcaccctggcggggtcataaactggatgttgcaaagagtagggctagttatgaggtttttactcctactgaactggcgaaagtcttctctgccctggaaggtgatgaagaaatgcagaatgtaacattgatcggaatgtacagcggcatgaggttaaatgagatttgctctttacgtattgaaaatattagagaaatagaaggtgttttgtgtttcgaagtcaccgaaggtaaaacaaaatcagcgtccaggatcataccagtccacagcaggataatagatatggtgaaagggcttgtacaaaagccccataacggctttctgttttacagagcgtcaatcattgaccgtgcagacggaaagcgctcaacatggcatacacagcgttttacacgggctaaacgcaaggcattgggagagcaggggaccgaaagaaaagtcttccacagcctacgccaccaggccgcgcaaattttggatagaggcggcataggtaagaatttaaaacctgtaccagaggataggattgcccttctcctgggtcatgagcgaggctctacagaaagtttcaaaacctatagcaagaatgcagcatcaccaattgagctatcaagatatgtcgaattgatacgctatccagaaatagaaaaggggcattaa

SEQ ID NO: 96187 - DNA, 786 bp, Enterobacter aerogenes
atgttttcagcgatctatcgctaccgtggttttattattgacagcgttaagcgggactttcagtcccgttaccagaccagctttttaggcgcggcatggctgattttacaaccgatcgctatgatttccgtctatacattaatcttttctgagttaatgcgtgcccgcctggcgggaatggacggcccttttgcctacagtatctacctatgttccggggtgttaacctgggggctgtttactgaaacgctcaacagtctggtcaacgtttttctgactaacgccaacattcttaaaaagctcagctttccgcggatctgtttaccgatcatcgtcaccgcttcggcgttcattaactttctgatcattttcggtctgtttgtgctgtttctgatcgtcacgggcaatttcccgggcatgattttctttgaaatcattccggtgctgatcgtccagatgttgttcactctgggcctgggcattatcctcggggtgctgaacgtttttgtccgcgacatcgggcagttcgtcaatatcctgctgcagttttggttctggtttacgcctattgtctatgtgtccaaaacgttaccggaatgggtatcaggtctgctggcgtataacccgatggcgactattatcggttcctaccagaacgtgatgctctatcaccagagccctaactggatggcgctgcttcctgtcacggtggtgtcggtcattctgtttttatttgcctggcgtttatttaaaaaacatgccgctgatattgtggacgagatttaa

SEQ ID NO: 96188 - DNA, 1296 bp, Enterobacter aerogenes
atgagtatcaaagttcagcacgtcggcaaggcgtataaatattacccatccaaatggaaccgggttattgagaaattactgccgggcgataagccgcgtcacagcaagaagtgggtattaaaggatatcaatttcagcattgaacccggtgaagcagtcggcattgtgggggtgaacggcgcaggtaaaagtacgttgctaaagctgctgaccggcaccactcagcccaccaaagggagcattgagatccaggggcgcgtcgccgcgctgctggagctgggcatggggtttcatcccgactttaccggccggcagaacgtgtatatgtccgggctgatgatgggcctgagtcgggaagagatcgaacgcttaatgccggagatcgaagccttcgccgatatcggcgactacattgaagagcccgtgcgcatctattccagcggcatgcaaatgcgcctggcgttcgccgtcgccacagcctcccggccggatattttgatcgtcgatgaagcgctctccgtgggtgattcccgttttcaggcgaaatgctatgctcgcatcgcggacttcaaaaagcagggtaccacgctgctgctggtttcccatagcgccggggatatcgttaagcactgcgatcgcgccattttccttaaaaatggtgacatttgcatggacggtaccgcccgtgacgtgaccaaccgttatctggatgagctatttggcaaacctggtaaagacagcgcgacgaaaagcgaaacggctacctcgtcagccagtggcgaaagccagatgtcgctcgatgagattgaagatgtgtaccacacgcgtccaggctaccgtccggaagaatatcgctgggggcagggtggcgcgaaaatcatcgattaccatatccagagcgccggggttgattttccgccctcgctgacaggcaatcagcagactgattttctgatgaaagtcgtgtttgaatacgattttgattgcgtggtgcctggcatcctgattaagaccctcgatggcttattcctctacggaaccaactctttcctcgcctctgaagggcgcgaaaatatttcggtttcccgcggcgatgttcgggtctttaaatttagccttccggttgatttaaacagtggcgattacctgctgtcatttggtatctctgccggcaacccacagacggatatgacgccgctggacagacgttacgactccattattttacatgtgaccaagagcatggatttctggggtgtcatcgatcttaagtcgtcctttactagctaccaatga

SEQ ID NO: 96189 - DNA, 2127 bp, Enterobacter aerogenes
atgactaaagacttaaacacgctggttagcgaattacctgagatttatcaaactatttttggccatcccgaatgggatggcgacgccgctcgtgattgtaatcaacgcctcgatttgattaccgaacagtacgataacttatcccgtgcgctggggcgcccgcttaacgttctcgatctgggctgcgcgcagggcttttttagcctgagtctggcaagcaaaggcgcgactatcgttggtatcgatttccagcaggaaaatattaacgtgtgccgtgcgctggccgaagagaaccccgattttgccgccgagttccgggtaggcagaattgaagaggtgatcgccgcgctggaagagggcgagtttgatctggccattggcttaagcgtgtttcaccatattgttcaccttcatggtatcgatgaggttaaacgtctgctctcgcgcctggccgatgtcacccaggcggtgatccttgagctggcggtgaaagaagaaccgctttactggggcgtttctcagccggacgacccgcgcgaactgattgagcagtgcgcgttttatcgcctgatcggtgagtttgacacccatttatcccccgtaccgcgcccgatgtacctggtcagcaaccaccgggtgctgatcaacgattttaatcagccgttccagcactggcagaatcagccctatgccggggccggcctcgcgcataagcgcagccgtcgctacttctttggcgaagattatgtatgcaagtttttctattacgacatgccccacggcatcctgacggcggaagagagccagcgtaataaacaggagctacataatgaaataaagttcctggctcaaccgccagagggctttgacgcgccagcagtactggcccacggcgaaaatgctcaatctggctggctggtgatggaaaaactcccgggtcgtttgctgagcgatatgctggcagccggggaggagatcgatcgtgaaaaaatcctgggtagcttgcttcgttccttagcggcgctggagaaacaagggttctggcatgacgatgtacgcccgtggaacgtaatggtcgatgcccgacagcatgcccgcttaatcgacttcggctctatcgttaccacgccgcaggactgcagctggccgaccaaccttgtccagtcgttcttcgtgtttgtgaatgagctgtttgctgaaaacaaaagctggaacggtttctggcgctcggcgccagtgcatccgttcaacctgccgcagccgtggtcaaactggctatatgcggtctggcaagagtcggttgacagctggaactttgccctgctgttggcgctgttcgagaagaaagcgaagctgccgtcagctgaacagcagcgcggggcgacggagcagtggattatcgctcaggagacggtgctgctggagcttcagtcccgggtgcgcaatgaaagcgccggctcggaggcgttgcgcggccaaatccatatcctggagcagcagatggctcgactgcaggccgctcaggatgcgttagtcgagaaagctcaacagccagtggaagtcagccatgaactcgcctggcttggtgagaatatggagcagctggcggcgctgttgcagtcggcacaagcgcactcccaggctgacgttcaacccgagctgccccctgaaactgctgagctactgcagcgcctggaagccgctaaccgggagatccaccatttaaataacgaaaaccagcagcttcgtcaggaaattgaaaaaatccatcgcagccgttcctggagaatgaccaagggttatcgttatctgggcctgcagttccatttgttgagacagtatggttttgtgcagcgttgtaaacattttattaagcgcgtcctgaggtttgttttctcatttatgagaaaacatccccagttaaaacataccgcggtaaatgggttacataaactgggtctttatcagccagcctaccgtttctatcgtcgtatgaatccgctgccgcacagccagtatcaggctgatgcgcagattttatcgcagactgaactgcaagtgatgcatccggagcttttacctccggaggtttatgaaatttatctcaaactaacgaaaaataaataa

SEQ ID NO: 96190 - DNA, 2523 bp, Enterobacter aerogenes
ttgcatattttgattgatgtccagggttaccagtcggaaagtaaattccgcggtattggtcgcagtaccctggccatgagccgcgccattattgaaaatgccggtgagcatcgcgtcagtattctgatcaatggtatgtatcccattgacaatattaatgatgtcaaaatggcctatcgggacctgctgacggacgaggatatattcatcttctccgccgtcgcgccaacggcctattgcaatatcgataaccacggtcgtagcaaagccgcacaggcgacccgcgatatcgctatcgccaatatcgcgcctgatattgtctatgttattagcttcttcgaaggccatggggatagttataccgcgtctattccagcggacaatatgccgtggaagacggtgtgcgtatgccacgatctgatcccgctgttaaataaagagcgttacctcggcgacccgaatttccgcgagttttatatgaacaagctggcggagtttgagcgggcggacgcgattttcgctatttcgcagtcggcggcccaggaagtgatcgaatataccgacatcgccagcgatcgagtgctgaacatctcctcggcggtgggcgaagagtttgcggtgattgattattccgccgagcgtattcagtctttaaaagacaaatacagcctgccggatgagtttatcttaacgctggcgatgatcgagccacggaaaaacatcgaagcactcattcatgcttacagcatgctgcctgctgaattgcagcagcgctatccgatggtgctggcgtataaggtgcacccgcaggatctcgagcgtattctgtgtctggcggaaagttatggcctctcccgcagtcagcttatctttaccggcttcctgaccgatgacgatctgattgcgctgtacaacctgtgcaaactgtttgtgttcccgtcgctgcatgagggattcggcctgccgccgctggaagcgatgcgctgcggggcggcgaccctgggttcaaacattaccagcctgccggaagttattggctgggaagacgccatgttcaatccgcatgacgtgcaggatattcgccgggtcatggaaaaggcgctgaccgatgaggcgttttatcgtgatctgaaggcgcatgctctcactcagtcggccaaattctcttgggccaacaccgcccatctggcgatcgatggtttcactcgcctgctgcagtcgtccaacgaggcggatgccgggcaggcggaaagcgtgaccgcatcccgcatccagacgatgcaaaaaattgatgcgctgagcgaagtcgaccgtcttggtctggcatgggctgttgcgcgtaatagctttaagcgccatacccgcaagctgctggtggacatttcggttctggctaagcatgacgcgaagaccgggatccagcgcgtttcgcgcagtattcttagcgaattactgaaatccggagtgccgggttacgaggtatctgccgtctactacacccctggcgagtgttatcggtacgcgaaccaatatctgtccagtcatttcccgggcgaatttggtgccgacgaaccggtgctgttcagcaaagacgatattctgatcgccaccgacctgaccgcacatctcttcccggaagtggcggcgcaaattgacagcatgcgcgccgccggggcgttcgcctgcttcgtggtgcatgatattttgccattacgccgcccggagtggagcatcgaaggcattcagcgtgaattcccgatctggctgtcctgcctcgcagagcatgccgaccggctgatctgcgtctctgccagcgtcgccgaggatgtgaaagcatggattgcggaaaatagccattgggtgaaaccgaacccgctgctgaccgtcagcaacttccatctgggggccgacctcgatgccagcgtaccatccactggcatgccggacaatgcacaggcgctgttagctgcgatggctgcagccccgtcatttatcatggtgggcaccatggagccgcgcaaaggccacgcccagacgctggccgccttcgaggaactgtggcgcgagggcaaagactacaacttatttattgtcggaaaacagggctggaacgttgatactttgtgcgaaaaattacgccatcatccccagttgaacaaaaagctattctggctgcagaatatcagcgacgagtttttggccgagctatatgctcgctcacgcgcgctgatctttgcctcgcagggggagggctttggcctaccgttgattgaagcggcgcagaaaaagctgccggtgattatccgcgacattccggtgtttaaagagattgctcaggaacatgcctggtatttctccggggaagcgcctgccgacattgctaaggcagtcgaagactggttagccctgtatgagcaaaacgcgcatcctcgctccgagaatatcaactggttaacctggaagcagagcgcagaatttctcctgaaaaacctgccgattatcgcgccagtcgcgaagcaataa

SEQ ID NO: 96191 - DNA, 204 bp, Enterobacter aerogenes
atgcattatccctctgcggagggatttcatcttgtcggagtgcctattttccacacgaaagctgaagtggaaaaggctgagaccgtttattcgggatccgcggaacctgatcaggctaatacctgcgaagggaacaagagtaaactgctggtcgcacctgcctgttacgggctggtcgcatctgttactccatccgtcgtctga

SEQ ID NO: 96192 - DNA, 2169 bp, Enterobacter aerogenes
atgtcatcggaaatttcaaacaaaaatagtaagtctgattcagatgaattcgatttagggcgtttaataggcgagatacttgaccataaaaaattgatcgtcggtattacttttgtttttacagcattagcaattgggtatgctttatttgccacaccagtatatcaatcggatgctttgatccaagtagagcagaaacaaagtaatgcaattcttaatagcttgactcaaatgctgccagatggtcagccacaatctgccccggaaatcgcacttctacaatcgcgcatggtattaggtaaaactgtagatgacctgaacctacaagctgaggtttctgagaattttttccctttgtttggtaaaggctgggcaaggataacaggtcagaaagcaaataatattactgttgagcaattatatattccgccagttgcagaagaaacacctacaattacggtcgtggtagagaaggataataaattcctggtccgtggtgaagatttcgaagacgttggagagataggtgtaccatttgataaaaatggggtgacacttctcatcagcaagataaattccgaagtaggaactgaatttgaagtcaaatatctgacaaaacttgaagcaataaccaatctccaaaaatcatttgcagttaatgatcaaggtaaaaatacggggatgcttgagttaacttacgttggtgataacccagataaaatatcacagattttaagaaaaataagtgacaactatctggaacaaaacatcacaaggcaagcagcacaagattcgaagagcttagagtttcttaagcaacagttacctcaagttagaaataatttagatatctctgagcaaaaattaaacgattatagaaggcaaaaagactcagtagatttaactatggaggcgaaatctgttctcgatcaaatagttaatgttgacaatcaattgaatgcattaacatttagagaagcagagatttcacagttatataccaaggaccatcctacatataaagcgctaattgagaaaaaaggcacgcttgtaaaagaaaaagagaggctaagcaaaaaagttaattcaatgccagagactcagcaagaagtattacgactaagtcgggatgtggaatctggtagagctgtttatatgcaattgcttaatagggagcaagaattaaatatcgcaaaatcaagtgtaattggtaatgtgcgtattgtagataatgctattacatcaccccatccaattaaacccaagaaaactattattgcgctcttaggtattattttcgggttgatagtatctattggtctcgtacttttgaaaatcattcttaaaaagggtattgagaatccagagcaacttgaagagattggtctaaatgtatacgcaagcgttcctgtttcaaaatggatgaccggttctgatagtcgattaaaaaaagccaaatctggtaaaatgccaaaatatcaaattggcttattggctacgatgaacccaactgatttggcaatagaagcaatccgaagtttgaggacaacattacattttgccatgatggaagctcagaataatatccttatgatttctggtgcaagtccaaatgcaggcaaaacatttattagtagtaacctctcagctgtgatatctcagtcaggtttgaaggtgttatttatagacgctgatatgcgaaaaggctatatccatcatgtgcttggagtctctgaggaaaacggattatctgatttattgtcagggaagattaatgctgaacaagcaattaagaaagttaaagaccttgggtttgattttatttcgcgaggcaaaattccacctaatcctgctgagctattgatgcatcctcgctgcaacgaatttttgaaatgggcgtcaaaagaatatgatctggtaattattgacactccaccaattctggccgttactgatgcagcaattatcggccagtattcggggacttcattcctggtagttaaattcgaacagaacacgctgaaggaaatagcggcaagtaaaaaacgatttgaacaaaatggagtgataataaaaggctgtgtccttaacggtatagaaaaaagggctagtagccattatggatatggatataattattatgattattcttatactgaaaagaaataa

SEQ ID NO: 96193 - DNA, 132 bp, Enterobacter aerogenes
atgttgtttggccattggttaaatcaacaggaaatccctgacccgtatcggaaaagtgatgaggcatttagctatgtctttcaattgcttaataaagcatcacagttatgggtcgaaaagctagcgcgataa

SEQ ID NO: 96194 - DNA, 1386 bp, Enterobacter aerogenes
atgagaaattttaagcacggacatgtcaacgcttctattatttcaatgacccagcgtttttctgatataagtatcatattattctcttatgtagtaccctattattttttctatcatcaatttaaattgaatgatattttgattcctttgctttctctcgttgtcttccaaatgataggagggatgacagatttttaccgttcctggcgtggcatcaagatatctatagaaattcagctgattattaaaaattgggtgcttacagtactcattacacttggcatcgttgttttaattagcgagaatggattttctgtaggattatttattgcctggctaattttaggcattgctggatttattatcagccgttcttccataagatatatctgtggtaaattacgtaaggttggttacaatacaagaagagttgtcgttgccggaactttgagttctggtattgatcttcttcgtggttttaataaagctccatggcttggctttatcgttcgcggtatctatgctgataatgaattttctgatccggaaattgagtatttaggtaatttttctaaactagtcactgatgctagagctggtgaaattgataaaatttacatagcgttaagtatggctgaagagactaaaataaaaagtttggtacgggaactaactaacactacatgctctgtcttattaattccggatttgtttacttacaatatacttcaatccagaactgaagaaataaatggtgttccagttgttcctctttttgatacaccactcgatggaattaacagaatcattaagcgtatagaagatattattttatctgccataattcttgcgttcatatctccagtgttaattgttatatcgctattaataaaattcacatccccagggccagtaatatttaggcaaaaaagatatggcatggatggaaagtcgattaccgtttttaaatttagaacaatgactgtgatggaaaatgatctcaaggttgttcaagctacaaaatcagacccacgtataacaaaagtaggtcgttttttaagaaggacctctcttgatgagttgcctcaatttttaaatgtactttttggacaaatgtctattgttggccctagaccacatgctatagcacataatgaacaatacaggatattgattgaaggatatatgctaagacataaagtaaaacctggaattactggtttagctcaaattaatgggtggcgaggagaaactgatactcttgataaaatggaaaaacgtatcgagtttgacctattgtatatacgtaactggagcgttttattagatttaaaaataatttttatgacgatctttaaaggttttgtggggaatagtgcttattaa

SEQ ID NO: 96195 - DNA, 954 bp, Enterobacter aerogenes
atgaagaaaactatgttatgtattattttatgtttgatgaatttcaagacattagcttttgagagagggatcaacattcatattaaacattatccacaagaaagccaattctatatagatctagccaaaaagtatgggtttacatctgtgagagatgattatccgtgggagttagttcaaaataacggtagtgactttggcatgcatggtaatctgaccaagtcggattattttttctcgaaaaaaaatgaattatcaaagatgatgattcttgcctatggtaacagtgttttgactaaaggcgattatccgcgtactgatgctcaaattaaagcttttactaattatgtaacttatacagttcaaagatataaaggaagtgtcaagtattatgaaatatggaatgaatggttagtcgggacgggtatccctttccgtagcacacctccagatgcgaatattttttataaattagtagtcgaatcggcaaaaattattagggaaaaagatccttctgctattatagttgtaggttcaattaatcccctaaagcaaaaagatagagattggatggatcttctgatcgacaagggaatactacgatatgtcgatggtatttctttgcatccttattcttatggtaatccggatttgaaaatgaggttgccagagaataatttaaaaggaattgatgcctatgaagagtatctaaaacgtcaccttaacaaagaagtgcctttgtatatatccgaatttggttatacctcttataaaggtgctaatggcatacaacctaacttaatagttaaatacatgtttgattacatggatcatgcacaaaagcgatcatatattaaaggtgtatggtggtatgaccttattgatgatggaaataatgttaataataaagaacatcactttgggattttaaataggaatttattgatgaagtga

SEQ ID NO: 96196 - DNA, 585 bp, Enterobacter aerogenes
atgcatatacctaagcaaaaaatagaaaaaataaataacccattggatttcaaatatatacaaaaaatgtgtgcattcggctcggagattgtcctgcctaacaataagattaatattttaacaattggacggttgacttatcaaaaaggatttgatttgttgttaactgccttttcaaaaattgaaaatgaaaaataccatctcacaataattggtgaaggtgaacaaaaaagtgagttgataaaattaagtaatgatttgaatatcgcagataaagtctcttttattagtgagacaaataatccttatgctgtaatgaggtctgctgatgtttttgtatctagctcccgatgggaaggatacccaaatgttgtaatagaagctatcgcatgtggattacctgtcgttgcgaacgattaccctggtgggattaaggagatcattaattcgaataatgggattatttgtaatattgagcagcagtttgccaatagtctagaacattgcttgacattaaaaaatgtggcattagataagaatacgattgataaaatatatatccaatatgaacaggtactatattga

SEQ ID NO: 96197 - DNA, 1608 bp, Enterobacter aerogenes
atgaatggcgagactcaaaccattatcggcgtcgatgtcggctccggcagcgtgcgcgccggggtatttaacctcagcggcgaactactggcccacgctacccgggagatcaccctcttccgcagcgccggcagcgtggtggaacaatccagccgcgaaatctggcagggggtttgcgactgcattaaacgcgcggtcgaaaaggccgctgtctctccgcattcggttgccggtatcggcttcgacgccacctgctcgctggtggtaatcggtgagaatgacgcgccgctggccgtcggccccagcgaagaggcggaacgcaatatcatcgtctggatggatcaccgcgccaccgaacaggcggaacgcatcaacgccagccgccatccggtgctgcagtacgtcggcgggactatctccccggagatggaaacgccgaagctgctgtggctgaaagaaaaccgtccgcagatttttgccgccgcgcgtcatttcttcgacctggccgactatctcacctggcgcgcgaccggcgatctggcgcgttccgtctgtaccgtcacctgtaaatggacctatctggcccatgaaaaacgctgggatgccgactactttcgccagattggcctcgcagagctggcggaggaagacttcgctcgtatcggccagcgcattgtcgatccaggaacgccctgtggtgatgggttaaccgcggcggcggctgaagagatgggcctgcctgtcggaacgccggtggcggtcgggatgatcgacgcccacgcaggcggcatcggcaccgtcggcgtactcaacggtgcggtgaataatatggcctacgtcttcggcacctcctcctgcaccatgaccaccaccgagaaggcggtgttcgtcccaggggtctgggggccttactattcggccatggtaccgggttactggctgaacgaaggcggacaaagcgccgccggcgcggctatcgaccagttactgagcttccatccggcggcggccgaagcgcgtgaacaggccaaagccgccgccgttcctctgccggtctggctggcggatcgcgtgctggcgcaggttgcctcgccgtcggaggcggtgcagctggctgatggactgcacgtcgtgccggagtttctcggcaatcgcgcgccgcttgccgacccccacgcgaaagcgctgattgccgggctggggatggagcgggatcttgataacctgaccgcgctatacgtcgccggattatgcggaattggctacggcctgcggcagatcctcgatgcccaacgcgcctgtggtattgagagcgaaaatatcgttatcagcggcggcgcggggcagcacccgctggtacgccagctgttggccgatgcctgcggcgtgaccgtgatcagcaccgccagtagcgaaccagtattgctgggctccgctatcctcggcgccgtcgcgggcaacgtcgccgcctcgctaccggacgccatgaagcggttcaccagagtggataaaacctatcgcagcgaaacggcgtttagctcgctacatcaacgcaggtatgaggcctacaaagcgctacaacaggccggtcgactaatccgcgaataa

SEQ ID NO: 96198 - DNA, 843 bp, Enterobacter aerogenes
gtgcgcactcatctcaccgccgtagatggcgtcttcctggcgcatccgctctttgataaacgcatgcccggtcttcgacatcaccggctggccgccgctgcgggtcacgatgtccaccgtgttccacgtcaggcgcgggtcgtgaatgattttcgcccccggctgcttctgcaggaacgcttccgccagcaggccgacaatgtagtacccctcaataaacgacgcctcgtcatcgaacaggaagcagcggtcgaagtcgccgtcaaaggcaatccccatatccgcctgatgcgcgcgcaccgcgtcggcggtgtcctgacggcactccggcagcagcgggttcgggataccgttcgggaaatggccgtccggctggtgatgcaccttgataaaggtcaccggcgccccggccgccgcgaagcgtttctccacctcatcaatcacatgccccgccgccccgttgccggagttaaccaccagcttcagcggacgggtgaagttcgccaggtccacgtagcccatcaggtggtcaacgtactccttcagcaccgaaatctggcgcagggtcccgcgacgtgccgggtccaccggcgggaactggttttcctccgccaggcgctgaatatcgcgcagcccggtatcgccgctgatgggcttcgcattctcgcgcaccagtttcatgccgttgtagttcatcgggttgtggctcgcggtcacctcgataccgccatccaccccgaggtggaaggtggcaaagtagatctcttcggtaccgctcaggccgatatccagcacgtcggtgccggcgtccatcagccctcgggccagcgccagcttcagtga

SEQ ID NO: 96199 - DNA, 486 bp, Enterobacter aerogenes
atgaatgacgctaaaagcattattaataaatatagatcaatgagtgactctgagaagattgaatatcttcgagggtttaatagttcactagatctaatgcttgctaattttttggttgatattgtcaaagacaaatcagaagatgaacttttacgaatagaagcagttaaaatattagggctctatagaggggagtataatgatgagcttatcaagaaagaattattaaagttgattgttgatgaagatgatgatgaagaactcaaagtatacataattaatgcattttcactaatgaacatcagtgaatcggacatagattttttcttgagtgttattcgtggtgagtattatattctagtaaaagaggcggcattttctttgttggtttatcataaaaattccactcctgctcataatgcattgaatgaattattaaatgatgagacttttgggaaatcagctaagagggaattaaacctttaa

SEQ ID NO: 96200 - DNA, 204 bp, Enterobacter aerogenes
atgggtgcagtgtatctgattatgtttatgaagactctattcttaagaaaatatatgttcagcaaaaagaacatgcagaatcatcttttacagaatttgaagttgtattttcgtataaaaatacgatcatcgataccattaaaaatgtatttcctaatggttatgaagaacaacgttatcctgcacgctgaattagctaattaa

SEQ ID NO: 96201 - DNA, 543 bp, Enterobacter aerogenes
gtgtcgcccaacaggctccagcgacagttcaatccggatactccggatgagcgttgggtaacggatataacctacatcagaacccacgaaggctggctgtatcttgccgtggttgtcgatctgttctcacgtaaaattatcgggtggtcaatgcaaccccggatgacaaaggacattgtcctgaatacattgctgatggccgtatggcggcgtaatccccaaaaacaggtgctggttcactcggatcagggcagtcagtacacaagccatgagtggcagtctttcctgaaatcacacggcctagagggcagtatgagccgtcgcggtaactgccatgataatgcggttgcagaaagctttttccagttgctgaagcgtgagcggataaagaaaaagatctacggaacgcgggaagaagcccgcagcgatatttttgattacatcgagatgttttataacagtaagcgtcggcatggttctagcgatcaaatgtcaccggcagaatatgaaaaccagtattatcaacggctcggaagtgtctag

SEQ ID NO: 96202 - DNA, 279 bp, Enterobacter aerogenes
atgagcggtaagcgttatcccgaagagttaaaaattgaagcagtcaaacaggttgttgatcgtggttattctgtttccagcgttgcaacacgtctcgatatcaccacccacagcctttacgcctggataaagaaatacggtccggattcttccactaataaagaacagtcagatgctcaggccgagatccgccgtctccagaaagagctgaagcgggttactgacgaacgggatatattaaaaaaagccgcggcgtacttcgcaaagctgtccgactga

SEQ ID NO: 96203 - DNA, 141 bp, Enterobacter aerogenes
atggtatgtaacattgtgaaaagaattggcgtcaacagaaagctcagttacgccaggctctataacagatatgtaatcgcttccattatctatggcctgcatgacaaaaaaagggcaggaagcgttagatgtggggaatga

SEQ ID NO: 96204 - DNA, 1575 bp, Enterobacter aerogenes
atgggcattatgataaagcctaccaaagaccgaaatggcacctattacatccgtaaagcggttccacaggagctacgtccaactattggcaaaggtgaactaaagctttcccttaagacgaaagacctcggacaagccaagctcaaagcccctgccgctctggcagaaatcaactctatcatccagaacgccaaagcagagcgctccgtaacgcaggacgatacagaggtgatcgcttcggtatggatgaccagaatcctccagcagccagaaaccatcaaagcacgttatgtacggcaatacgattatggttatggcctgaccgcagataacgtgcaattaagcaaatgtctgcgtaagggagagcaggcagacgaggcagatttccagcttgtcacccaacttatgcagtctgaactcgaagaggctcttcggtggacgccagcagtactgacgcccgcatggagacaaaagctcgcatggcgtctggcggagtacaggctcagtacggcagaaatgtatattattgatgaactacctgtctacaccgccatcaacgccacgcaacaaaagaaaagcatgactttcgccagtcttttcgagcattacaaagcacatatccggctaaccgacaaggacagagctgagtcacgtatacgggattacacaccatcggctaaccgattcatcaaattcatcggtgataaacccatccgggacatctcgaagagtgacctcgcggcgttccgtacgctcctggagctgaccccggctaaccgcagtaaggccgtcaacttgctgtcgctggagaatcaggccaaagctcagggcaagaaactcagcgccaacaccgtgcgaaacaacttcatgcacctctcggccatgttcactgttgcactccaagacgatctcgtggatgaacatcccttcgatagtttcaaaatgcgtaaaaaagtgcagacgatcaatgaggatatcccgttcaccgacgacgaaatcagggtgatgttccggctaccactgttccacggggagcaatctctctatggcgaaatggcctactggatgccgataatcctttactataccggtgctcgcgttgaggaaatcgggcagctacgcagggccgatatcgtggatgctttcggtgttccctgcttcaaaatccagatggggaaagagcaatcagtcaaaacggctggctccgtgcgttacgtcccgatacacagccatatactggagctgggttttatggatttcgtcaataccagagaagtccagctctttgctgagaaatctgtcgttaacgataaatacgcctacaactatggccgctggtgggggcggttgatccgtaagcacggcatccgtaaggaagttaagccctcacacagcttccgtcactatttcattacgcaatgccgtgctctggacgtccgcgaagacacgcagaacaacattctcggacatgtccccggctccgttccacggcgttatggcagctatctgattgaaacaagccgggtactcattgagaggatccccagactggagctaaagcggctggaaaactga

SEQ ID NO: 96205 - DNA, 936 bp, Enterobacter aerogenes
atgttaagaattcctgactcagactggcggaccgtagacggggtcccccagatttctgttgctttcttgcggaaagtgacgcctcaggcagccagatttacgcagtggatacagcggacacataccagattgctcagggcccccgacaacgtcctgtcgtgctgcacatcgggcctgattgatggtgacattcccgacaaaaacggctggctttctgctggtgacgcccttgccctgctgacttacagcgtccactccagccagaacgggcttctcattgatgccattgaacaaaattctggtctgatactcccggtgaggcccggtgaaagccgtcttgaggggcaatttgccgtcagattacaccatttgatcgtcgaactaaggcaacaaccacgattcataagctatgagcttgaacggcaaaagcaggtcggcccctacagagtggatttcctcctcacagagcagtggtacaccgatatggcaaaaggggaaactgctaaacgccagttcaccattgaatttgacgagaaggctcacagaacgacacgttatcagctcaatgataagcgacgggatcggtggttacggaaaaatcggcccgatataaagctaattagggtccgacatgaagagcaggaaacttggctggaagcggtccgccagctaaagcggttcgtcagtctggaggattgttatgcccactgcctgcgaatggcctgtatcagcctttcagactccacgctaaagataggcagcgagtcagcccgaaaagcctatgatgcagcccataacgaatgcagtttcctgctaaaaagcccacggcagcctctaagtgagatgggtaaactgctggacaggctgacaatcccctttgataaacgcagggacatatacttccagcgtgcaaaattgaggtcatacggcatataa

SEQ ID NO: 96206 - DNA, 132 bp, Enterobacter aerogenes
atgcatgatgaaatcattaatcaggcccgcgaaatcctcactcaacggctctaccgtaccgacacactggcatcaccgcaggacaccgcgagctatctggctttacagcttggcgaaaggggctggctatga

SEQ ID NO: 96207 - DNA, 552 bp, Enterobacter aerogenes
atggctacagtcggctacgcccgcgtgtccaccacagggcaaagtctggatacacagctcgaagccctgtccggctgcgagaagattttcagggaaaaaatcagcggggcgaaggatgaccgtccagagctacaggcgatgctggagtttgtccgggaaggtgacaccgtccaggtcacgaaactggacagactggctcgtaacacccgccatctgttagaggtatctgaatatcttcaaagcaaaggcgtagcattaaatatcctcaatatcggtatcaatacggcaactccgaccggaaagctaatgctaaccatgattggagctatcgccacatttgaacgtgaaatgatgcttgagcgtcaggctgagggcatcgcactggcgaaacttaaaggtaagtacaaaggcaggaaggctaccgctcgcagcaaatcgcaggaagttatcgagatgctaggccaaggattgagcaaacccgaaatatcccgccagttagggatcggcatcaccagcatttacaggattgtgcgtaagcaatctgacaactaa

SEQ ID NO: 96208 - DNA, 339 bp, Enterobacter aerogenes
atgagaaaaacaatcggcttaatcgccatactgctcgtaagcagctccaccaccgcaacagccggcaacaacgtatatgtaaagctctcatgcgaaaacaacaccactgtggacataacgctcaagcaacaggaacaagttggttgggctgacttgtctaccccaaacggaacgcggcgggctaagttcttcatgggagcagaggatgataagggggttaatagtctgacattttccagtctgggcattgcgttcaacatcgactatacagcggataaaaaattcacactcaaaatgatcagtggtggcagcggtgagtactcttgtaacgtgttatag

SEQ ID NO: 96209 - DNA, 1077 bp, Enterobacter aerogenes
atgtcagtgaaaatctatgcgatgtacaacaacaaaggcggcgttgggaaaacaacgcttggcttcaacatagcgacacaatacgctgatgaaaacccaagtacgcaagtcttagtcatcgatttatgtccgcaggcaaacatctctcagtatttgctgggcggaggtgatcgagggtatgaaaccaaccaagaactacagtcatccagaaccaggaaaaatgttgttggatttttagactggttactggatgggaactccgatttcaccagtattcgtcgccccttcaaggttcctgtgcatagatacaacgaccacatcagtgagaacctttttttgattgctggtgactccttccttgaatcactgactctcgcactgaactatgctgtcataaatcctgcaaacagatacgcttggcgtgagtacatgacggcaattcgtcgcctatgtcacttggagcacgatactgatcagtatgatgatttagtggtcttcattgactgcaatccgagtttctcaatttatacccagatggcgctcctatcagcggataggcttgttgtgccaatgatggctgattacagctcgttggagggtatgaaggggatcatgatgctgctgtacgggcattacccatcctccgcagcccagacgtatgctgagaagtttgtgacgttccatagccaagcggctgacaaccatcttgaattaccaaaaatggatcgattcattttcaataactacacatcgaataatggtgtagccacagcttatgattcaatcaaggaagctctaagtaacttcgcttttgagcagtatgccagcttccccgacctgttcactcctcgtagccgatcaattagaacgcggggaagatgggagcaagaatacctctctgaagtaaaagatttccatacttcaggtaaggtatctgcgagtctaggaatccctctgttcaaactaccagcccaaactcactatgagatgccaaatggtgaaatcattaatgtcgttcgggaaagatatcgtgaagctcgtgaacacattgatgagctcgtcgggaagttttgctaa

SEQ ID NO: 96210 - DNA, 549 bp, Enterobacter aerogenes
atgataaagctctgtcacatcctttgcccgataccgcacagggctggcgagttgttcaacaaaggacgcagcagtatcgccgagcgtaccaatatcagtcataccgtgcttgccggtggctgcacgttgtttgaccttaaccagctcaaacgcgaaaacagcacagaagactttaaaaatctgtttatgtgcgaatctgtcgacgacaaagcgtcggtgttcccgttcgaagagctacaacgctgcatggtcgacatgatggaatcatggaaagactttgccccgttcgccgattatccattcggatcccgcccggtctggattggctacgacccgtcacacactggcgacagcgccgggtgcgtcgtacttgctccgccggtggtctcgggtggcaagttccgcatgctggagcgccatcagtggaaaggcatggactttgccgcgcaggcagaggggatccgcaagctgacagagaaatataacgttgaatacatcggcattgacgcgaccggcctcggcctcgacgtttatcagttggtactctaa

SEQ ID NO: 96211 - DNA, 402 bp, Enterobacter aerogenes
gtgaccgacccggcgcagagcgcgaccgacgtcgaatcgctgcgcgaggcgatgcgtaactcgaaggggctcggcaactttaaaaacctgtttttctacgctcccggcgggaaaccggacggcatcaaaatcgtgccactgagcgaagtcgccacaaaggatgatttttttaacatcaagaaagccagcgccgccgacctgatggacgcgcaccgcgtaccgttccagctcatgggcggcaagcccgagaatatcggttcactcggtgacgttgagaaagaggcaaaagtctttgtgcgtaacgacctgtcgccactacaggacagattcagggaggtaaacgactggctcggcacggaagtcatcaggtttaaaaattacagcctcgataacccggaataa

SEQ ID NO: 96212 - DNA, 2451 bp, Enterobacter aerogenes
atggatatattaaataaaatcatccaggacgctaataagctttcacttgcttctgcaaacgaggctgaaacccgacttaaaatcatcgatagtattttatttgatgttttgaaatggacaaaggatgatgtaaatgtcgagcctagagtgagcgaggatggtcacactacatttgcagattatgtaatcagaactgcaagcactgcattcatagttgaggctaaaaaaataggtgaagcatttcatacaaagcaattcgatcgacgtctaaaactaaataataacaatcttgaaggggcctttggggatgcagtaatccaagctcgtgattattgcagaaaacttagcatacagtttgccgtagtaacaaatggagagcaatggattatatttcctgcaaacagaacagatcaaattgcattcaactcatcttatgcaattgtgtttaacaatctccaaagcgctctgaaagatgactatactgaattctatgatctattatcgagaaaagcagtaatcaattctagtttagaagtaacattacttggcaacagagaagaccaaatagaagagcgaagattaaaaaacaccactcgcaaaagcgcttcatacgatgccaaaaacccaatatatcctttggtagaagaagctataataacatcattttcagacactataactgagatagattcagatttatttgaaaggtgttatgttaatacacctgacaggatgaaatttgataggcgtgtgaacatgcacatatcaaaaagtcagcatctgtttaacacaacgcctatcagaccaatgcaaagaagggatgcgaatgcttttaaagattctttgatgcgcgcaaaaagaaacgccaagcctttagcgattgttattttaggaactgttggcgcaggaaaaacaacattccttcattatacaagaaacgtttcagcagttgattttttcactaaatcccctgacaaaccatatccacattggataaaagttgattttctacaatatacaaatgacatcactccaattgattatatttacaacaccatcaaaaattacataatcaacgacgatttctttagcaattatgaattatgcatacaaaatgcctacaaggaagaaatagcatcaattgtaaaaggcccggcatttttgatttccaaagacgaacaaagaataaatgaactaatcactcacaagcttagctctgactacgaaaaagttaagccatatgcagaccagctaataagttatgcggctaaaaacacctcagttttcttagtcgtagataacgttgatcaacttaatgaagaagcgcaatcacaaatctttactgactgcgtagcattctcccaaagattaaaatgtaatttagttatttctcttcgaagttccacctatgtggagcacagaaattccgcagcatttaacgcgttcgacttcgatccaatattaattgaacctccaaaggttgaagccgtactgtcaaaaagattttttttggcaaaaaatatgttagagggagaagatggtgatttcgagtctgataatggaatgcgtttccatgtagataataaggctgatctaatcagcctactacaaagttcagtattagggactgaaattggtaatttattagaagtgctagctgctggtgatatacgcaatgctttaagaatgactcgcgaattcatcgagcatggatatactaaccccggaaaagccatgagggtttacaaagaacatggaacgtatgtattaccaaaacacgaagccctacgagcaattttgttaggaaatcaggccgtgtattctgaggcatattctttagtcggaaatcctttcgactctcgaaaaggaaaaacaaacttacaattactacgactttttgtacttacggcactggtacaatatagtgcagatcctgcattccaatacatagacggaatagacattcgtaaaaacttaagaaaaattggcattggtgatgatgacactctaagtgtattaaaagacttgtgcacattaagatttatcagcaccgctgggcacgacgttccagaatttaaatcaagttattacccaacaagattaggagggtatataacaaaagagctaataagcaatttcacatatattgaatgcaccatgatggacacatttatagccgatgaaaagatctgggaagaattaaagaactttgagagactaatagtgaactcatcaaatgatgtaattaaaagactaagtttcagaaaggaaagagcatcgattttctataattatatgacaacactttatagttctttatttgaagaagcaaataaacggttactaccaaaagaatggcgttcaaatccattagcagaagcacaatatgcttttgatgaaaatctcaataaggcacttcaatcagctcagcgtaactatggtgagcgctaa

SEQ ID NO: 96213 - DNA, 189 bp, Enterobacter aerogenes
atgttcttttttttgctttttatttcaatgattttatccttttcaaagggcggaggatgcaatatactgatgtcctcagaaaaaggaatcctcccatttcacatgttaaggagccacactctcaggtgtggcttttctctttttagcgctcaccatagttacgctgagctgattgaagtgccttattga

SEQ ID NO: 96214 - DNA, 600 bp, Enterobacter aerogenes
atggcccctaaaaatgatgctacagtgccatttagcgcgaatgctgctgtaaatgtagatgctaaaaaaagccagtcagtgatagttattctcggtatcattacaggaattttatgtgtgattggtagttttttgatttatgtggataagtctttgttttgggttccgtttctagcggcggcagtctcattgtttgcatgtgtttgtcttgcccttttaacgcacagaaataccgatcttgcgggagcccatcccacagtgattgaagtcactggtgccggtgtatttaagtttgtgacagacccgagagttgaggttgcttcaaaaagcatagcgccattagtaacaattttggcaaacatgcactccctcccacaagctagtggattactggacgagaatctaaatccaataccaaatacagaagccgaggcagttgctaaagttgagataattaataccgcagcacaggaggcatgcgcggatgctctgagcagtctgagtccacttccaacccctgaacatattgctgtacctttcgccgatattcaggaaagtgaaattagcttgctaacaccccaaaaattcactccttcgtaa

SEQ ID NO: 96215 - DNA, 135 bp, Enterobacter aerogenes
atggtgggggcgaaggaattggcggcggcacaaatgcccctgttctgttattcttattactgggttgtccgaagcgctcaattgctttcgctagcgaattcgctgcagcatcaaaagaatttgatccatcgttaa

SEQ ID NO: 96216 - DNA, 402 bp, Enterobacter aerogenes
atgacgaaggtcatcaaatttagttcgctcgcggttttggctgtcgtgttgtgcgggatatataaaaccgcgtcgattgccatggcggctagcgccgattactcgcgcgcggactggctcaccttctatctgattgcaccgagcgaagttaaacatgcccccctcatcaatgacagcacgccgattcacttcagggctgctgatggcgcctccccccagatagacgagattgaatacgccagggatacggacgaaaacatcttgtctgaatacctacgcgctttaggttatcgccaggaaaaagatccggtattcggcacccgctggtctttgcaaggcaccgataaaagcgcctatattgctgcgactgaaaattcaatcaggctgacgtttacggattga

SEQ ID NO: 96217 - DNA, 258 bp, Enterobacter aerogenes
ttgtcaggaggcagccgaaaaaatttgccaaaatgggttcgcccgcgggtatccagcgggctttttttgtttacgagcgtctgtcgcgggcataaaaaaaccgccgtggtgaacggcggtttactgtttcagagtgaatatgcgctcggcgtattaactcttcactttacggtagataaacagcacaacgattgcgccaatcaccgccacaacaaagctgccgaagttaaaaccgtcaaccttgccaaagccgaataa

SEQ ID NO: 96218 - DNA, 126 bp, Enterobacter aerogenes
atgtatctggtcaccaggatagacgaactggaattgcaaaccctcgaacgtctctcgcctggcataatgtgggcttccaaaatcctcaatcagaatactcatccagccccccaggtgctcacttag

SEQ ID NO: 96219 - DNA, 1197 bp, Enterobacter aerogenes
atggaatggtggctatattctgagcaggaagatattcaggatgagatgcctgtattggctgtcgtgatgatttatgtagcgcttatcgcggtatgcctgtttatacaagcgctagtctggcctgaaaataaaccggtcacgtgtgagttcttcattccttccgtattacttcctgcctgtgttttgaccacgatattgttcttcgtgaagatggtattgagtgcgacagtgtgttacgccgaaatacgcaaatatattgccaaatcctgggaggtggagcttaaaacctatgcccgaaaaaatatcgcgctagccgcctggactgctctaacccctttagaacagcctgcgctcaatatgctgaaactggagggagagtttccgttagcgccgaaaacccctctcaggatagaaattgaagatcttttcgagcagacccgtaatgagcaaattttcacgaaattgcttaccccaatggctatgatgttgaacggtaataattaccgcggaattgaaattatcgtctgggtacgtgggggagataacttctgtgtagatgcattgaggagggtgctggagcatctgaatatccctaacgccaacgcctgtgaaatcgaataccttaccgagtgtccggagtacggcatggtggataaatggatcgctgcgcccgatgacaacgtcattaaccgaatcgtcattactgtcgatatgcatgaagaagatagcgattctaaaagcatggaaagcgcctgtgcgtttttgttcacaaatcactatgtcagaggagcgggcgaaaagccggtatatctttatcagccgatgtccggcgttactgatgtagaagaaaagatgccggtctatctggaggttaagtccgttactgcacctaaaacactgtggtatacaggattgtccagagtggataaatacccattattgcaggcgttaaatgcaaaaaatctggcgtcagaacgcctggatatggaggcctcactaggggaaaagagtgccggttatcgatggctggctttggcgctggctgccgatgccgttagatatgcgcaaggcgagcagctggtggcgacatctgaaaataacaagtttgctattacttccttgtcttcaaagaagacgaatttacccgacaaagctaagtgggccatacgataccacctgttgtgcacagcgttatag

SEQ ID NO: 96220 - DNA, 687 bp, Enterobacter aerogenes
atgaaaggattattcaccgctctggcggccatgtttatggtcgttggatgtcaggcgcaacaaccgccgacgcaggtcatttatcgtttcgatgaccaccgttatctggagctgaagggttgggattgtgagggcgaactctggtacacggatacactgagggggattcacaccgaaccagttagccaattttacagaatatatactaaaaaatttattcatccgtctgagcgttacattgcgctgccaacttgggattccgcggggtttatagtgtcaaaggactacggaaaaacgtggtatccatcctcatttgctcccagagaaaatgagccaaacggtgattcgtcccccccatatgatgaccttatctctttcaccgtcgtcaacgaccagggttttttgcagaccaggcaccgcctgtatatgtcgtccaaaccgttcgacgatccacgtctggccgcaggtggcccgggtatccaatatgtcattgaaggggaaactcacactataaccccccagtttccaggttggtcatgggggatggtttatatgaccaaacaaggacttgagaacgatacggcaaaataccacaccaattaccagggactccccgacaacgtgcccgaagtaaaaggctacaccggctgggatcgtatgcgttgtgatatggatgcaggacgttaa

SEQ ID NO: 96221 - DNA, 171 bp, Enterobacter aerogenes
atgaagccaaaattcatcttgctgcacaaaacgaactcacttattttcttcaataacggatccgttaataaaattacttttatgtgcatgattaccaaaggaatgatcatgaagaaaatttcaaaattacggttcctccagtttcaggagtgcctttccccccttaggtaa

SEQ ID NO: 96222 - DNA, 792 bp, Enterobacter aerogenes
atgcgattactgatttcagggctgatattattcatggtccaaggcgcttatgcggccgacagctgcaatattgatgcgattatcaagcaggcctggcccgatgctcaatcgacagctcagggggtcgtcacgccgggcaagcaactgatcaaaacacaaaatgaatcgccttttagcgccatttgtcgtatctggccggcgcatccagagcttacgctggctgccgttccactcatggaactggaacaacgtgattttgaccacactgacgatttggaactgctggtgcttgataccgcgaccctcgcggttaagcaacgtttacatcttcccgaacgcatgaacgatgacgcgttctatatcagcgaccttgcaattgataccgcacgctggaagatagccccagggcagaccgcatttggcgtgcgtatacagaaaaggggaagctcccgcgtcaaccccatgtatgaagaggcgctgtggctttacaccatcgatcgcggccagctgcgcatggtactggatggcattgtgctacaagacaacggtggagagtgggatggcaactgcgccggggagtttaatgatattaaacgcacgctggcaatagacgccgcaaaacatcacggctttagcgatataaaagtcagcgaaaaaaataccgcctcaacgtcctggctgaacgacagtgacgaatgcacatcgaaagacactctgacgcaagcatcctggacgctgcaatatgatggtcagcaatatcgcgttccggctaagttacgcccaataccgtag

SEQ ID NO: 96223 - DNA, 141 bp, Enterobacter aerogenes
atgatggtcagcaatatcgcgttccggctaagttacgcccaataccgtagcgatattgttatactcaccatagcaggcctcgatggggtaaccccattgaggcttaaaggatatcaggcgtgtgccaccggcgtcggatga

SEQ ID NO: 96224 - DNA, 687 bp, Enterobacter aerogenes
ttgagtatttcacccgccgctaccaggtggtgcgctcccggcgctgagcgctggcggccccagccatgcccgtttaccggtagcccggacgaggcgcctgcgccgactccgggtcatattcatcagccccggctccagcctttatgccggatggcggctgcgccttatccggcctacaacgactgctgcctgcgggatagccaggacgaggcgcctgcgccgactccgggtcatattcatcggccaaggctccagcctttatgccggatggcggctacgccttatccggcctacaacgactgctgcctgcccggtagcccggacgaggcgcctgcgccgactccgggtcatattcatcggtccggctccagcctttgtgccggatggcggctacgccttacccggcctacaacgactgctgcctacggggtagcccggacgaggcgcctgcgccgactccgggtcatatttatcggacctggctccagcctttacgccggatggcggctacgccttatccggcctacaacggcgaaactgcgctttcttcgccgtcgtcatcagcgttacttcccggcttccggatgggtatcgaacgccgccatcactgctgccagcgcggcttcgctgaagccgtgcttcgggtcatcaacaccaagtccgaagcgggtttgcagcgtttcataa

SEQ ID NO: 96225 - DNA, 165 bp, Enterobacter aerogenes
atgtccgacaccgcagactccacgctgaatgccctggctgggcgcccatttggatgtacggctacagctgtatgtggcccgccatttattaccggctgcgcaacgctcttgccaacccaaaaacgcggcgcggttagggcggaccgcggtaccgcgcccgcttaa

SEQ ID NO: 96226 - DNA, 570 bp, Enterobacter aerogenes; identical to SEQ ID NO: 91951

SEQ ID NO: 96227 - DNA, 144 bp, Enterobacter aerogenes
atggattcagaaaataaaatcagactctatatgcacggaatcaaatacaaagaggacggtacagaagccgaatacgttgaggttgaagaatcgcaacaatatgctctgtactctttggggtggcgagtgcccaaagatagctag

SEQ ID NO: 96228 - DNA, 2298 bp, Enterobacter aerogenes
atgtcggtacctaaccagaccccctataacatttatactgcgaatggtcttacgactgttttcacgtatgagttttatatcatcagcgccagcgatctgcaggtgagcgtaaacggaaatgttgttaccggtgggtacaccgttgcaggcgtcggcaacaaggacggcggcgatattacctttctgacgccgccggcaaacggcgctgtcgttatgcttgaacgtgtggtaccgactttccgactcactgattaccaggacaacggcgacctgctggcggataccgtaaacaaagacttcgaccgtatctggatggctatccagagagcgtttatcgatctgggatttgcgctaacgcgcccattatctggtgggccattcgatgccaaaggctatcgtatagccaatcttgcccctccgattgacgcacaggatgcggcaactaaaggatttgtcgaatcgcatacatcgaatcagctacgccgggttttaagagtcccggaaagctacgttgatgaaatttacccggtgtccgggcgcaggaattcgctgtttggctggaataacatcggtcgtcctgtccctattttttcaatgacggataccgccgatctggccttaaaactggcagctaacgaagatggtttaggcgctgatttgattggtttaccacagggtggaaccgttggtgatgcaattaacacggtcaggccagaagcccatggcgcagcggctgatggcattacagatgatactctgtcatttactcttgctgctgcgaccggaaagcatctctatttgaccccgggggcaacttaccttatcgcttcgccttctgtattgccttttatcgctgggtataaagctggcgagcgtagaaatatatatggtaacggcgcaacgattgttacaacggggccttatgagccttttcaccagtatgcggatgaaacaaatatctccacacgtgtaattaaatatgggtggaatatttttgatgttaactttaagggatacgccaataaaaatagtgtctgggccattgttaataagtccattgggtggacatatgcttatggtcgggctgagcgaattaagggaattggccttaatgctgtagccagaggatatggccatacacttacccgggattgttacggtgatgacctgcgtaataatgtgctctccctttataacgatccaattgatgggattggctacaactacgcatttaatataaatgccggatggtgtaccggcgatgtggttattatcaaatgtcgaaacttctatgttgatggtgtgacatatgaatatgctggatgtgtcactgccgaaaacgccgacgagatagccaaggttgctgcgggttctggtgaaccgcgtggcgttcctgtttctttaggcgctgatacaacccctggtggtgatggggtaatcctgaacgtgtcgggtaactatttcggtgccggcgcatttagtcttaatggagaccgggttaaggttggtggggttcttgatgtagggagccactggacaggaaactttaatgccagtctcagcggtgcggctgtatggctgaacgttaaagattcatctattggctttattaatgccaaagatgtttattcagggattggattcaacgccggttgcgaaaatttccgcgtggatggtatgtcagtccgtagcaagatggctattgctggttctgtattatgctcggctacggactcaagttcttctgcaataactcggggctcggttggccccatttaccttcacggcgaaagcagtattaacaacgatgtttaccttaacactgcggggatcgtttttgagggaatttatatagctcaaatgaataaccaacaaggagggtacagcgttgagtttgccagagcatgccgcgtaaaagacttaagcctggttgccactacatcggctgtcactagtacgtggattcggttctcggctaatgccagggtggatagcttaatggccgaacgttgcttcggttccgtctttgaggttcgcgcaggggccgttccttcctttggggatatcctgttgcgtaacaaacaaggtgatgccccaccagtcaaagtgctgggtgatggaagcgcaagccatttctggggttctctcacgattacggggccgacttcgggacatccggttatttcaggcaaattaacactcgaaggatatacaggtttgacgtggcgactggctacggtcggagtcgacggaatagttaattatccggataaagtttcccacacaataacaagttag

SEQ ID NO: 96229 - DNA, 1119 bp, Enterobacter aerogenes
atgatctcgttccttgcgttcttcctgatgtgggcggagcggatgaactgggatgttcccgactgccactatcgcgcctgccactggctggagcatcgcggtgatctcgcggtgcttcgctgttttcgtggctttggtaaatctaccatcctcgcggtgtataacgcctggcgatattatcaggacaggcaataccggatcctgcatcagtctgaatccgacggcacagcgtataaaaccagccgcgatacccagaacgtactgcgcaatcacccgctgactaaaggtatgctgccggacgggcagggtactgtcgagcaatggtgggtaaatggcgcactggatttgcgtaacggcagcatgtacgcaaaaggcattctgtctaacgtcacctccgcacgcgccaatgaatgccagaacgatgacgtagaagtgccgcgcaacatccagacaccagaagcgcgcgaaaagctccggtaccggctcggcgagcaaacccacatcctgatccccggcggccgtaaactgtttattggtacaccgcatacccacgatagcctgtatgacgagaaagaggccgaaggcgccgactgtctgaccattaagttattccgcgatgagcaccggatcgaggcgaaagacgccacgcagctgcgctacgaaattccgttccggccagattatgttttcgttggcatccataaggcggcgcggctgcttgtcgagggtgtcgattatcagcttactgacaccggtgtagagttcgccgcagctcctgatgcacttatcgacttttatgctggctgcgaatggccggagcgctttacccgagaggaaatggaaaagcgacgtagggaaacgcgcaccattaacgaatgggatagccagtatcagctgcatagtaagccggtgggtgatgttcgcctcgaccctgaacgtatccgcgagtacaacgtccagcctgaaattcgctatgcaaaccgttcctgctcgatgtggctgggtcagacgcaaatcgttggcgctgtcgcctggtgggatgtagccaccggtaaggttaaagccgacgcctcggcattttcccttattttcaccgacatccgcgggcatctttactag

SEQ ID NO: 96230 - DNA, 342 bp, Enterobacter aerogenes
atgcattcagattacaaaactcgccttaccgcgctgaccgataaattaaccgatgtggtgctgcaggaggccgacccggctaactggcccggtgctgataagaaagtgagtgagctaacgaaggatgagcgcggcgatcgctactgggataagaagaatgcggcggcatcgctgacgctacttatcaaagtgcattcgcttatcggcatgcagacacgaggcggcaccccttcagacaatccggggcaggatgatgaagcgttcgagctgggccagcaggtatctaaagccgaacgcgaagcggccgccattattgagcgtttgcagaaaggtaagaaatga

SEQ ID NO: 96231 - DNA, 165 bp, Enterobacter aerogenes
gtgagcgataagaaacaacctttgaccatggagcagcaggagttcattttccgaaccaaagcggaattgttggccgagcttattaaattccaaatccccggtaaatccgaagcggaagaactggccgaagtggtcaatgtcgcattcgacaaattaacggcttaa

SEQ ID NO: 96232 - DNA, 237 bp, Enterobacter aerogenes
atggctaaatcatccgcagaacgcaaagccgctctcgaagagctgaccaaagaagactggaggttcagggagttctttcggcttggtcgcctccactcaaacaacggcaatattaagcttgctgccaagtgctcatcttcgattaacaagtggaaggctatcacgataattaatcacgacagagtgctgcatggtaggcctgtgcttttcggaaattcggagaatgacaatggctaa

SEQ ID NO: 96233 - DNA, 234 bp, Enterobacter aerogenes
atggccgggcaatcagattacctgccgcccggcctaccgctcaatcgcgccaaatggccgcaggagtaccagctcaaagagcactacgacatgcgcgcctcggcactcatacgacagctgtttgagaagaaagtcactcggcaggccatcgtagatcagattgcagcgacgccggaaagctaccgggagtttttcaaagaacgattaaatttttggcgggagaaacgaacgtga

SEQ ID NO: 96234 - DNA, 1389 bp, Enterobacter aerogenes
atgactccgcaggaactggaagcttgtgtgctggccggcctgctgaatggcggcgccagcccggacgcattcgacgtgatcgcctctacgcctgaagaatctttcagcattgggtttcaccgtcgcgcgttctccgaaattaaaaaacaggcgctggcgaacggtctgatcgacatgttgtttgtcagtgaagcgctgggcggtagcagcctggctgatttatcagaaattacgcgcatgcctgccacggtaccgaacctgaagggttacgccggaaagatggttaaggcgtggcgcagtcgccgtatggctgaattactgcagcagggtgctgacggtatccgccaggccaataatcaggagcaacgcgatcaggttgtcgaaagtgcagtggcgcagctgctggacatgaccggcgatactggagacgtgcagccggttcacatcagcgatttgctgccaacctacatggagacggtacagaaacgcatggacggcgaagccggtacccgaaacctgaagaccggcatcgacgaactggatgatgccactggcggtattaacctgcaggatttgattgttgtcgctggccgcccgggcatgggtaaaaccgaattcgcgttgaagattgtcgatggtgttaccgctgccggcggcggggcgctgatattcagtatggaaatggccgctgcgcaaatcgtagaacgctctctggcaggctctggcaacatgtcggtgtcacgcctgcgcaatcccctcgatatgcaggacgaggactgggcgcgctttacagcggccatggagaccatgaacgggcgcgatatctggattgttgacgctaccgatctgacgattgagcaaatccgcgccgttgccgagacgcataaacgccgttatccgcatctggcgatgatcgttgtcgattacctcggcctgattaaaaagcctaaggcagagcgtaacgatctggcgatcgcccacatttcccgaaaccttaaaactatggctatgcgtctgcatacgccgacgtttgcactaagccagctttcgcgcgcggtggattcccgcccggcaggccagcgacgcccggttatgtcagacctccgcgactccggttctattgaacaggatgccgacagcatcatgtttctgtaccgcgatgaagtctacaacccggaaagcccggcagcgggcatcgccgaaatcatcctgggaaaaagccgattcagtgccgccggcgcggttatctaccaggagtttaaaaacggccatttccttcacgtcgatcagcatgtcggcaaagagaaaacccgtattcaactggaggcagcaaaaccacgaaaacaaccgcgtaaatacgcagagaaatataacaccgatgcattttaa

SEQ ID NO: 96235 - DNA, 138 bp, Enterobacter aerogenes
atgggtgggaacgaatggagccagggtagcatggcgcagatgttctctcatgcgcagataacccgtctggtgaagcctgccagcgaggaattgctgagaataaagcttatgcaggtgcgttggcttcagcggggctaa

SEQ ID NO: 96236 - DNA, 327 bp, Enterobacter aerogenes
atgagctggaacgcggcaggtggtgcaacatccagctatctgaaagaggataatccttttacaggtggcttaattaatggtttggcctctgggatgggctatggtgcaggtaaactagttgaattgccgtttgataaagtccttaatccaatgaagccatggaaagactggatctggactgatgtcgggatgggaatatccaaaccgctgccgattaatccagtacctggtattgctggtaatgcctcgggtagtgcggtgacagagatcctcaatgatcaagcgggtaaaacaggtgtgaaattccaaaaagggaaccaaaaatga

SEQ ID NO: 96237 - DNA, 1467 bp, Enterobacter aerogenes
atgaaaaagattaaccattggatcaacggtaaaaacgttgccggcgcagactattttcataccaccaacccggccaccggcgaggtactggctgaagtcgcctccggcggcgaagccgaaatcaaccaggcggtagcggcggcgaaagaggccttcccgaagtgggctaacctgccgatgaaagagcgcgcgcgcctgatgcgccgcctgggggatctgatcgatcagaacgtcccggagatcgcggcgatggaaaccgccgataccggcctgccgatccaccagaccaaaaacgtgctgatcccgcgggcgtcgcataacttcgaatttttcgccgaagtgtgccagcagatgaacggcaagacctatccggtcgatgacaagatgctcaactacaccctcgtgcagccggttggcgtctgcgcactggtgtcgccgtggaatgtgccatttatgaccgccacctggaaggtggcgccgtgcctggcgctgggcaataccgcagtgctgaaaatgtccgaactgtcgccgctgaccgccgatcgtctgggcgagctggcgctggaggccgggatcccggcaggcgtgctcaacgtggtgcagggctatggcgccaccgctggcgacgcgctggtacgccatcatgatgtgcgcgccgtctccttcaccggcggcaccgctaccgggcgcaacatcatgaaaaacgccggcctgaaaaagtactccatggagcttggcggaaaatcgccggtgctgatttttgaagacgccgatatcgagcgcgcgctcgacgccgcgctgttcaccattttctcgatcaacggcgaacgctgcaccgccggttcgcgcattttcattcagcagagtatttatccggagttcgtcaaacgcttcgccgagcgcgccaaccgcctgcgcgtgggcgatccgaccgatccgaatacccaggtcggcgcgctgattagcaagcagcactgggagaaagtgtccggctacattcgcctcggcattgaagagggcgccaccctgctggccggcggcgcggataaaccatcagatctgccggcgcatctgaaatccggcaacttcctgcgcccgacggtgctggcggatgtcgacaaccgcatgcgcgtcgctcaggaagagatttttggcccggtcgcctgcctgctgccgttcaaagacgaagcggaagggctgcgcctggcgaacgatgtggaatacggcctggcgtcgtatatctggacccaggacgtcagcaaagtgctgcgtctggcacgcggtattgaagccgggatggtgttcgtcaacacccagaacgtgcgcgacctgcgccagccgttcggcggcgtgaaggcctccggcaccggccgcgaaggcggcgaatacagctttgaagtgttcgccgaaatgaaaaacgtctgcatctcgatgggcgaccatccgatcccgaaatggggagtctga

SEQ ID NO: 96238 - DNA, 363 bp, Enterobacter aerogenes
ttgagcggcgcggataaagcggtgatcaattttagcgcaccagagagcgacaaagatgcccagtatgtcgttagcctgaccgttagcgatggcagtttatccagcatggccacctatactctgaatgtgaaggcgaaggcggcggcggatgacgcgaaggatgagccggcaggcgatagcggcgttatcaactatccagcgtggagcgccagccagagctggaaaccaggtgacatcgtcaataaccacggcgcgcttttccagtgtaaaccgctgccggaaggggcatggtgcaacgtggcgccaacctactacgaacctggcgctggtctggcctggggtgatgcgtggaaagcgctgtaa

SEQ ID NO: 96239 - DNA, 2139 bp, Enterobacter aerogenes
gtgaatatcatcgccatcatggggccccacggcgtctaccataaagacgaaccgatcaaagagctggaagccgctctgcagaagcaaggattccagactatctggccgcaaaacagcgccgacctgctgcagtttatcgagcacaacccgcgtatctgcggcgtgatcttcgactgggacgagtacagcgttgatttatgcagcgatatcaatcgcctgaatgaatatctcccactgtatgcttttatcaatacgcactcgacgatggacgttagtagccaggacctgcggatggcgttgtggttcttcgaatatgcgctgggtctggcggaagatatcgctacccgcattcgccagtataccaatgagtatctggacaacatcacgccgccctttaccaaagcgttgtttaattatgtgcaggaggggaaatataccttttgtacacccggacacatggcgggaaccgcctatcagaaaagcccggtcggctgcctgttttatgatttcttcggcggtaatacgctgaaagccgatgtttctatctctgttaccgaactggggtcgctgctggaccataccggcccgcatctggaagcggaagagtatatcgctcgcgcctttggcgccgagcagagctacatggtgaccaacggcacctcgacgtcgaataaaattgtcggcatgtattcggcgcccgctggcagtacgttgctgatcgaccgtaactgccataaatcgctggcgcatctgttgatgatgagcgatatcgtgccgctgtggttaaaaccgacgcgtaacgcgctggggatcctcggcggcattccgaaacgggaatttacccgcgatagcgtccagcacaaagtagagacaactcgcggcgcgcagtggccggtgcatgcggtgatcaccaactccacctatgatgggctgttgtataacaccacctggattaaacagatccttgacgtgccgtcgatccacttcgattccgcctgggtgccttatacccacttccacccgatttatcaggggaaaagcggcatgagcggcgatcgcgtaccggggaaagtgatcttcgaaacccagtcgacgcataaaatgctggcggcgttgtcgcaggcttcgttgatccatattaaaggcagctacgatgaagataccttcaatgaagcctttatgatgcatacctctacctcaccgagctatccgatcgtcgcctcgatagaaactgcggcggcgatgctgcgcggcaactccggaaaacgcctgattcagcgctctatcgaacgcgcgctacatttccgtaaggaggtgcagcgcttgcgtgaagaggcagacggctggttctttgatatctggcaaccagaagaggttgaagaagcgcagtgctggccggtttcccctggagaagcgtggcacggattccaggatgccgatgccgaccatatgttcctcgacccggtcaaagtcaccattctcacgccgggtatggacgagcagggcaatatggcggaagaggggatcccggccgcgctggtggccaaattcctcgatgagcgcggcgtggtggtggagaaaaccgggccttacaatctgctgttcttgttcagtatcggtatcgataaaacccgggcgatgggcctgctacgcggtctgaccgagtttaaacgcgcctacgatctcaacctgcgggtgaaaaatatgttgccggatctctatgccgaggatccggacttttaccgcaatatgcgcatccaggatctggcgcaggggatccaccgtctgatccgtcagcatcagctctcacagctgatgctgcgggcctttgacgtgctgccggagatgaaaatgaccccgcatcaggcctggcagcggcagattaagggcgaagtcgaaaccatcgaactggagaatctggtggggcgtatttcggcaaacatgatcctgccgtatccgcctggcgtgccgctgctgatgccgggggagatgatcaccgaagagagccgcgcggtgctcgattttctgttgatgctctgctcgatcggtcgccactatccaggttttgaaaccgacatccacggggccaaacgtgatgaagacggcgtctaccgtgtacgagtcttaaaaaataattag

SEQ ID NO: 96240 - DNA, 1188 bp, Enterobacter aerogenes
atgggctacttatctttggataaaggacctcgcgtcagaacgttctcattttcaggcaaggggaggcgttattttattatatgtattgtgaatcttttactcactatcatcaccgcaggtgtttatttaccatgggcattaatgcgcgctcgccgttatgtttatagtaatatgtcactggacggccatgctttcatttataaagccaccggcggtagtatactattgagcctggttattatttttataatctatcatattggcacatttttaattgttaattggttttttattcctggattgattatattagcgctactgttcctttctataccctttatgatggtcaagagcgtgcagtaccaggcctcgatgacctcgcttaacggtgttcgtttcggctttcagtgccccatgctcagcgcctggtggtatacctttgcgcttccgttgctccttataatgttactctgcatagtgttttattttctcgccaggtttagcgcgtcgtgggacagcggaatgctgcggttattcatgctgattgtttgcggtacagcgggcttaggcgcaatttatggcattagttatggcaaatggattaccctgtttggcaatggtatccgttattctacgtattgttcaacggctaatattagtctgatggagtgcattaaaaagggtgttattgcttatctgatatcggcgccatttatcattgtagttatattgcttatgggcaatgtattccatgaggttatggtgagccgtatgttacgtaatgacgatcatattgccgttatttatagccagaattattggcgtattacgctctgttacatgctgtttttcgtcgctatgattattacctcctgttatttccgtgcaatgttgcgtaaccagtttctcaataacctgacgttggccgatggcgcgattgctctacgttcttccgcgacggtgacgggtattgtactaagagagttagggctgttgctggtttctgcgatcacagcaggtcttgcctacccctggcttaagatgcgctacgtgcgctggctggcagaacatactcatgtggatggcgatctggatgcgctagagctaaaagacgacccaaccccgccgcaaagcggcccggcgatgtggatttcgcgcggcatgatggcctatatcccgttcctgtaa

SEQ ID NO: 96241 - DNA, 2397 bp, Enterobacter aerogenes
atgaaaattgaatatattgatatccagaactacagaaagcttaaaacttgcagagttcgtctcactgaggaagaaacactgctcgtcggggcaaataacagcggcaagacgtcagcaatggatgcgcttattttctttctggatcaaagaggaagaacggctgcgagcatcgcatctggtaaatctccatcttcacgaaaattaggcgcagccgatttcaccctatcaaattggcatcagcttaatcaatttggtcaagcatgggtgaacgccgaagaggttggcgaaaaaatcagtgactggcagcccttatgcccaacgctggatgtctggttaaaagtcgagaaaaatgaagtccatcgggtacggcacctaataccgacattaaaatgggatggcggactgttaggcatccggatgatttatcaacccaaagatcttgatgccctaaaagcagactttattgcccacttcaaggccgctgagcagcttaaaatcacggcagaaaaaaacgccgaaaaagctctaggtggttcagcatctgagctcagtgatttcaaattttcagtctggccgggatcgttgcgtgaataccttgaaagagaggtgtctaaagcttttgagataaaatcttacatcctagatcccgcaaaacttatcacggaccaaggaagtaaattcctaccccaggttcttgttgaggggcaaattccactggatttttatcctttcaatggactgttcaaagtcgatatcattgatgctacccgtggattttcagatccctatgtggcaaccggctctcagcatggtgcctctaatctggctagccagattaaccagtactacaaccggcatttaaaccctaccgactttccttgtgacgaagatttggatgctctcgaagccatcgcctatgctcaacactcctttgatggaagactcaacaaggtgtttaacaaacccttgaaagagatagagacgctggggtatccggggttcaacgatccccatatcagattatcgagcagggttaatccgatcgataatctggaccacgaagcggccattctctttgagatccagaaaaccagccacgtcgcaggggggccgctgatgagtctgtcagagaaatataacgggcttggttataagaatctgatatccatggtctttacaatgatgagcttcagggatcaatggatgcgcgtcggtaaagccggcctaagaaagccagaggaggatgcctttgttgagcctcttcacctcattctgattgaagagccggaagctcacctgcatgcccaggttcagcaggtgtttatcaaaaaagcttattcggtgctacgcaatcatgatgatttgcggacatccaagaggttctcgagccaactggtggtcagcacacattcaagctaccttgcgcatgaagtgggctttgaaaagctcaggtacttcaaacgtaaacccgctacaggtccgcatgacgtgccgactgcggacgttattgatctgtcctgtacttttggcagcggtaaaatccgctcggatgatgtcttacaaacggctcagttcgtggctcgctatctcaaaaccacacactgcgatctcttttttgcgaacgggattattctagtcgagggggcggcagaacgtatcctgatgccgcattttatccgtaataatcccaacgctaatacaagcctagacaacagctacatttcgattctggaggtaggaggagcccatgctcaccgactgagggcattgattgacatactcgggattcccacccttgttgttactgatacggatgcccaaaagcctcccctcaaactatcggcagatgatcaaaaagttagctcaggaaataaacccaaagccatcaggcctgaatttggcaagggatacattactggcagccataccatcaaaatttggctcgatgttgagggagggctggatacggtccttagaatgccggagcatgagaaaattcgtggtaaggtcaggattgcatttcaatatggtattcctattaaatttggaaaagagggggaggccgaggctttcccgtacacatttgaagacgctattgcattgacgaatcctgagttgttcaaaaaagtagaaaaacctactgggatgatgaaaaaaatgcaggatgctcttaacctcgatacgcttgaacagtgctgtgaaaaactctatttggcactcaaagatgacaaagccgagatggcactcgatttattgtactgtgctgaccccgccgaactcgtcgcgcctaaatatattcaagagggactggactggcttaaaaaagagctggaagtggcgagtagagaccttacgccggaagttccggaagtcactgacgtttgggagggggaataa

SEQ ID NO: 96242 - DNA, 1869 bp, Enterobacter aerogenes
atggagacgccatccacgaacgaacctgtggtagaagagcttttcagttatcttgatctggataatcccagaagttttctgctttttgccggtgcgggatctggaaaaacccgtacgttggtcagtgtgctggagaaaatgaaacaaaggtattcttcggaactgtctagatgcggaaaaagaataggcattattacgtatacaaatgcagcctgcgaggaagtacaaagacggttattttttgatgccaatttcatggtttcaaccatacacagtttttgctgggacttgatcaacccatttacatcagacataaagctatggcttaaaaatgaacttgagaagagtattgatcaactcacccgcgacattgaaaaaagcagaaaacctgatggtattacggcgcaaagaaacaggcggagtttagtcagcaaaacgaagcggctgcaatacctcgataaaattcaaaaattcagctattcccctacaagcaacaggcctgaaaaaggtgcgttaaatcatagtgaagtgataaatgtcaccgcttatctcctccaaaatgaagctctgctcagagagatattatttagcagattcccagtacttttgattgatgaaagccaagacacgaataaatatcttatcgaatcgttaattatgacgcagcaggagcatcccaccaaattctgcattgggttgttcggcgatatgatgcagcagatattcagcgggggaaaatccgacttagcctctcctctaccccctggatgggcgtcaccagagataacaattaatcaccgttcaccagtgagaattgttactttgatcaactccatcaggcaattcaatgatacacatattcaggagccgcgccctgacgcacagcctggaaccgcacgcttgtttgtggttgacatgaacacccacaaggaaagagccgatattgagcgtcaggtcgctgaatatatggctaaacaggcggctgatactgaatggaataacaaaaaatcagtcatggtactgacgcttgagcaccatatggctgccagacgcggtgagttcgaaaacttctttctgccgcttctagaggttgaaaaattgggtgatgcagcaatcaatgggcatagtcaagagataacattcttatcctcacagttatggccacttattgacgcaattcgcagtgatgatgattttaaaattgctactatcatgcgtaaatactcgcctgttttttcgagttcgcgcctcgaatatgctgacgatccactattgctcttccgcgaagcacaatgccaaatagacaagataaaagtgcttcttggcgagaacctggctttccccattctagaagtgtgcaaactgattcatgaaggggaattgctgatcttacctgaggctttcctgcttcacctgacgctggtgccacataaggatgatgaatccacggaggaagtggatatcaacaaagagcatgaagcctggagccgatctctgagcgcatccacccgtgaactggaaaattacattagctatatttcatccacatcttcctacgacactcatcagggagtgaagggactgcagtttcctcgagtcatggctattctggatgatgaagaggcccgtggattcatgttcagttacgataagctactgggcgtcacaccacactctaaaacggatcaggaaaacgaaagtgcggggggggactcttcgcctaaaagatcgcgccgccttttttatgttatctgcagcagggcacaggagagcctcgctgtcgtcgcgtatactaaagcgcccgatttagttgaacggaccgtaattacgtcaggttggttcgtaaaggaagaaattatgcatatgtga

SEQ ID NO: 96243 - DNA, 1029 bp, Enterobacter aerogenes
atgactcgcggaaactttgattttataaactctaacgtggcctactcagaatccgataagtcatggtggatagatctcataaacaccgattgcatctggtatgatatgatgattaatcctcccgatgatatcagaacaaataagataataaaaaactatctcagcaccatcgagaaacatgtgagggaaaactgtgaaaagagatttgtttatttcttaggttcaagaaagaaagtgaggttttcaaccaagaggaagcctaggtataaccctttcacaaaaaatgttgtattcactctgttgattggcaaagaagaacgaaagtttcgtgtaaaatatttctttcgcaagcttacgcaggatggggaaataaagataacgccaaatattagagtaactgaaaagtttctctacattgaacatgaagatggcaattcatttgtgatttcagtccatgacttcgtgaaagaaaattacatcgatttaggcatccatactgaagtgcattacgtaggatatacacgtcatccgcatagacgtcctgttgatttcattcaccgtggcttatcgaagatgctgtatagtgtttcaaatgacgataatgatttttttgtttattttagtttgtttaatccaagagttatatctctgaataataactacaatataatttttaatatttcaaactctcaattggatgagattgaagttgataatgaaggtaggattgttgaaaactgcttcatacgctactttgaccctaaacttcaagatgatgacaaggaaagtaaaaggtcagatttaaataaaatgtttatggatttagtgaaaaataaaaaaattaaaaaaatatctgtaaatttgcaatatgaaatggacaatgagtacttctgcttttactctaaagttgtcccaccgcaaaatgatcatttctttgtgctggatttcgctgatgacaaggtcaatattgacagggaccaggatatgacgactcagatggcattatacatgggagattgtaattattaa

SEQ ID NO: 96244 - DNA, 2574 bp, Enterobacter aerogenes
atgaagttcactctcaaggactaccagcgcgatgcagtgcgtgattcgctgatgaatctaaggaaggctcgccgctactggcataatgagaacgacaagagcgccttctctttaactgctgtcacgggggcgggtaagaccgtaatggctgcagctgcgtttgaagcattgtttcatggcgacgacgaatttaattttgatgccgatcctggtgcagttgtaatctggttcagtgacgatccagcactgaacgagcaaactcgttttcgcctgatggaggctagtgaccgtatcaactacaacgatatggtggtggttgagcaccctttcagtcggcgcaaatttcaggcgggaaaaatctatttccttaacacgcaaaagtttggcaagaatagcctgttggtgcgcggctttgatgataaaggcggacttttcgaggccgccccagatgcacaggcttacactctgtgggatacgatccaaaacaccatcgaagacccggatctgaccctctatctggtactggacgaagcgcacagaggtatgggttcgtcaacggtttccagtgaagctgctaagagtactattgtgcaacggctcatcaatggttcggctggagtgaagggtattccagtagtgtgggggatttccgccacagttgaacgtttcgacaatgctgttgccaatgccggtcatcatgtcaaactgccgaacgtggtggttgactcggctaaagtgcaggaatcgggacttatcaaggacgatatcattcttggtgtaccggatgaagccggtgacttcgatactgtatgggtacgccgtgctgccgacagactcagggaagtgaccgatgcctggtcagagtatgcaacacagcaggcaactgtgcgcgaagtagtaccgctaatggtattccaggtacctaatacgcctgacccgaacgaagtggggcgttggctggatacgctattctctcgttatcctgaattgcccattgacagtgttgctcatgtcttcggtgaacacacgacacaacggttcggccaacaccaagtaccttatattgaaccgcagcgggtgcaagaatcaacttgggtgcgtgtactgattgccaaagatgccatcagcactggctgggattgccctcgtgccgaagtgatggtctccttccgcgctgccagcgacaggacgcatattacgcaattgctggggcgtatggtacgtactccactggcgagacgtattccgggtaatgagcgcttaaactctgtcgaatgcctgttgcccaagtttaataccaataccgtgagagatgtcgtcaataccttgtttaagggcgatgatacatctcctccaagcggacgcatcctgattaaccctgtggagatgaaacccaacccagcggcttcaactgccatatgggaagtatttgaagcgctaccttcgcaaacccgcccacagaaaggagccagaccagccagacgtctgaccgcgctggcacaggaactggttgatgacggcattcttgatggggcagtcagcaaagcccacgctgctttgcacgctgtcttggacaagttccagacagaaaatgctgaaaaaatccaaaacaagcgcaatgcagtactcgttgtggatggtaaggcggtggttgccagcctgaagaacaaagcaatgactttcaacgaattctgggaggaggcggacgtagcggtgatcgatgacgcctaccggcgtgcaacccgaattttcagcccggatgtttcacgtacctatgtcgaatatctggccgataaggtcgcggatcgagaagaggatgcagaggaatatcttgaagcaataatggaagctcgtgtgaccgttgctggcatggggctggtgatagaggtgcaggattacttcgatgcagaggccgataaactggcgaaggcgtggctgaccgagtacacaccgcggatcaagtctttgaaagatgagcgtaaagaggcctatcgtcaaatcgtcgaaatgagtaccgaaccgcaggacgtagatttagttagaccagagaacaagtttgaaatgaccagggctcgtgaaggagagaaggaaactgaccttccaacctggaaacaccatctattgtgtgatgaaagtgggaactatccggctcagttgaaccattgggaaaccacggttttcgagaccgaaaccaaacgtgaaggatttgctttctggtatcgtaacccacaatacacagggcagtcgtcactaggcatcgcatatattgaaaccgaacaatacaaaattgttcgtcccgatttcctgttctttgccgaacaggatagcgaagtggttgtggacttaatagatccacatggcctacatctggcagatgctttgcccaaactgaaaggactagcgttgtatgccaaacatcattccgatgcttacagacgaatcgaatccgtcgctgaagtgaaggggaaattgcgggttttggatttgaaacggcgggatgttcaggatgctgtggctgcggctgaaaatgcagaatcattattcaacagcagccttgctgattattatcagtaa

SEQ ID NO: 96245 - DNA, 2157 bp, Enterobacter aerogenes
atgtccaggctgactgatttaattgctaaagcgaaggccaaagacccacaactgggtgctgacctagatcgagaaatcaagatcctgtcatcacgccttcccttcgggctgaatttcgaacgacatagccctgaagtagtagaactaccattgcgacctattcgcaagggggacaaggtacgtattctgccggagcgtggctctcctaagaaaagtgatcagcggctatggcaagtgaaaaccatccacaaggcggagaagaccgctgaccttgaattgctgggcgcggcagacgtcgagactcgaactgtagctctgagtgacctagtggttgtagcagaatttcgtgacacgatctggccgggcctggtcagtacgggaaaagtagagcgtggtggcgataaaccctttcactcagtcatcaatggcgaaaactaccatgttttgaaagcattgacatatacgcacagaggcaaggtggacgccatctatatcgacccaccttataactcaggggcaaaggactggaaatacaataacgattacgttgaaggtgacgatatctatcgacacagcaaatggctggcgatgatggagcggcgtttgctgatagcgaaagagttgttgaatccagcggattcggtgctaatcgttactatagacgagaaggaatatttgcgactagggttactcttagagcaaactttcccggatgcaaacactcagatgatctctactcaaataaacccaaaaggggtttctcgagaagggagctttagacgttcggacgaatatatatatttcgtaatgtttgggcggtctcgtcctattcgattgccgctttcaatagaatggtccacctcaacacaagacaatgaaaaaaatgcagaagaagtcgactctgacaagaaagtaaatccaggatggacttcaatgatgcgccgtgggtctgaagctcgtcgaagtgaccgtccgtccatgttttatcccatttacgcagatccaagtgaaaggaagattgtagaaattggcgaaagtttgcctgaacatgaacatgtcccccctcatcgagaaggattagtgccgattcttccaattagaactgatggttccgagggaagatggcagattggtgccgaagagttaaaagaaagaatcaaacaagggcgtatacgactaggaagacagacgtcttacggttttgtcgtgaattaccttccggatggcgcttacgcagaagttatgtcggacagattcattatagaaggacatgcagcggacggatcattgatcgcgcacagtgccagtaatgagacatcgcgtattgcaccaacgcaatggaagattgcctcgcataatgcctctgaaaatggatctactttattgggagcatttatcccaaaaagaaagtttccgtatccaaaatctctgtatgcagttgaagacactttacgtttctttgtcgctaacaagcctgaggcaataattcttgatttcttcagtggctcaggaacaacagcccacgctgtcatgcgcctaaataagcaagatagtggtcgtcgtcagtgtatttcagtcactaacaacgaagtcgcagctgacgaacagaaaaagttgcgcgaacaaggtttacgccccggagatccggaatgggagaaatggggtatctgcgactatattacaaagccgcgtgtgcaggctgctatcacaggcaagacccctgacggtaaaccgattaaaggtgactacaagtttaccgatgcattcccgatgtctgaaggctttgaggaaaacgccgagtttttcaccttgacttatgaagcagagaagtcggttagctacaacttggcttatgcccgtattgcgcctctgttatggttgcgatcaggggctcgtggcaaacgtatcgacaaactgcctgctgaaggatgggcgctgactgatgcttatggcctgctgacggcgatggatcaagctccacttttcattgaagcaatcagtcacatcagtgatgtgcaagtagcctttatcgtcaccgacgatgagcgtcatttccagtctgttgccaggcgtctgccaaaaggtgttgaaccagtacgtttgtacgaatcgtacctgaccaatttcagcttcaccagtggggaattaacagaatga

SEQ ID NO: 96246 - DNA, 438 bp, Enterobacter aerogenes
atgaattttaagaccattaccagtgagaaacagcatgccggaattcgtatgctgaaatgctacctcgccagtgaccaccgtaggcattttgtgacgaccagtgaggcggcaaacatgccggggcaggtatggggctgcgcatcctgtggttgccgactcatcttccataccggcactcacgcctggttcgaacatgaccaagcgacagtagctgccaacacgttaatgagttgtgtgcatattgacccggtagtgaaagcagagatacgcagaagaacattacgcagtctttttaataccccggtttccccggtaatgtcgctggcctggtactgtgtctggtgcgctaaccattacagcggggaaaaacgctgcactgcctgcgggaccggtatttacagcattgaggaagcctgctggcagaataattacacctga

SEQ ID NO: 96247 - DNA, 219 bp, Enterobacter aerogenes
atgaccaaaaccattaaccccattctttgcgcagaagacccacttatcgacatgatatacatcaccacatacaccggtatgaccgacaagtggttctacaagcttattcaggatggcggattcccgaaacccatcaaactgggacggagttcccgttggtataaaagcgaagtagaaagctggatgcaacagcgtattgcagactcgcggggaacctga

SEQ ID NO: 96248 - DNA, 570 bp, Enterobacter aerogenes
atgaattacatctttaacgatttctggcagaaacgtattgccgctacctttcagaatgccctggatgcctatccacgagtattaatgctgagggttgatctacgcctgcctgatgcctctgccgccactgacgccgctgtaatatcccgttttacagaatcccttaaagccaaaattaccgcctgtcagttgcgtggaaagcaggagagcaagcgtgtacaccccacaacgctgcggtatgtctgggctcgggagttcggcgagcgtagcggtaaaaagcactatcacgctgttttactgctgaaccgagagagttggtgtggagctggtgattacaattcaccgcacaccctggccgggatgattaaacaggcctggtgtagcgcgttgcaggtggacgtgcagcagcatgccacactggcgaatttccctgagaatccagcgctgtggattgacagggggaacagcgcccaacttcaacaggccctagctcgggctgattacctcgctaaagaccacacaaaagtcacaggtgatggcgggcgtaactttggctgcagtcagggctga

SEQ ID NO: 96249 - DNA, 960 bp, Enterobacter aerogenes
gtgacagtgttcaacatgtctgatgatttttattttatattcccgaaaaaggcagacaggtataagaacgtgatggccacatctgttgattttcgtcggctggaaaaggaatattgcatttgtttttatcataaatctaatgatggtagcattgaagaggttttcaatattattactgttttaaggtccgagtacgcaggccttcagcatgggagactgatttttaattcagaaggtaaggaaaattgtgaaaaacttaaaaggcttttattgggggcgataaaaaaagatatagataaaaagatgagaatgttcagtgctgccagagagtttcataacgagatgaaacgcaggcataaaaactcgggtgcactctgtttctctttattcgccgaaggtgtctccggagagcccattccagagcacatgaaaatactaaaagcgctaagttcccgcttttttaataatatccgatccagaactacatttaagcaccatgttctgggctatttctgggttgtgttaaagaacatatatgataatcggccttacttacatgttaatttttatatagatactcgagattttaataatgttattggtgaggaaataaatgcttgctggtttaatgctcttaaagccatggaggacagagaaggaggagtactacaccttactgtgacaaaagaatttcagaatgggttactcttaagaagtaccagtggttacagtgagcagtctggtgagaatcacgctatttttaatcgtttcaattctgatgcaagtgtgattactcaagatttgaatgctgctaattcagaaatatacaagcagtttaccaataataaagataaacagtatttcatacattatctttatgcactcgctaaggagtcttactttattgctgaaaacactcatttctttggttcttcctcagtggtaaaacggttgaaataa

SEQ ID NO: 96250 - DNA, 729 bp, Enterobacter aerogenes
atggctgtctaccgtaacgaccctgatttgaatctgctgggcaagtgcagcaatgaagaactgcaattactggtttccatcctgaccactgacccacgcgatggcgacactcgctggacagagagtctgaccagtaccccggagtaccgcctgttagcaccagaccaccgtcgctactggcaactgatagccgctgagtttcagcgttatggcgcgaataccttggcgagtctggtccgactgggacaaggcgtgacctatcgggaaatcctcgtcgatgtctgtgacaagcttgatgtgaattacaaccagaaaagcactaccgaaaccattgagcttgctctgttgatgaaggtactggaaaaaagcctggatcagatgacaccggaagagctggctgttttttctcgcaatatgcatctggatctgacaaaccccacgccgcaactcattcttatcgccgttcaggctgccatacggacttcctcgctggctgcactggagctggcaacgatgttgtctgccagtgtcatcacctctcttggcggtattgccacctggggaactgtggtggtcgcttcacgcgcactttccgtactggctggtcctcttgccatcgcactgagttcagcgtggatgatttccgacatcgctggtccggcttatcgggtcacgataccagcatgcatcatcgtgtcctggctgagacagcagcacctttcccgttaa

SEQ ID NO: 96251 - DNA, 678 bp, Enterobacter aerogenes
atgtctgaacaggaacaacgctatgaccgcctggcaagccgtctcgccatactggtcagccgcctctttatgggagaaacgctcagtatcaggcaacttgctcaggagtttggcgtctctgagcgtaccgttcagcgcgacctgcgtgaacgactgcgctatatcgacacggaatatatcgacggtcacgtcagtctccgggatgctcggggcccctttcgtaccaacagcgacattatccgttttgcccaaataaccagggtggcacattactttccggcacttgaccctaagttgttgtctgtcctgctcgacaacggtcaggactccccctgcactatctggaatgcgccaccccgtcaggctccggcattgtttggcggttttcaggtcattatccaggccatcatcagcaaccgccgcattcattttctgcaccacggataccatcagtccgccgttgccccttaccggcttatctgtctggaaggcgagtggtacatgacggcagtaactggcgagcggattcaggtatttaccctttcagccattaccgatgtggtgatgaccatcgggggcttcaccagaagcagtcatatccggcggatttttgaagacccacgatttattcaggccctgccgcattttcagtacatcagtgggctcatccgggaatga

SEQ ID NO: 96252 - DNA, 465 bp, Enterobacter aerogenes
ttgaaaaaagtattactcagcgccctagtactggtaggcagtcagctgccagttatggcacaagcatttggcagtcaggacacctggtccagtggttggggccagggcgtatcggagtttgtcatcaaggggaaaggtcaatcacaactgtctctgacctgtgaggattacggatcgcaaccggccacggtcatatttactgacgccagcgggcatcaggtcagtatggatgaagataaaagccttcaggtcagtatcgacggtggagcacttattgatatcagcgaatctggcagtcgagtgggcggtaataacctggcgctggcctgggctcagttacgtaatggcaaacaggtctcagtgacaggagacggtgttaagcctgccacattcacgctggccggtgcggctaaggtactaccggcattcgggacacacggctgtgtgggtaaagatgcactctag

SEQ ID NO: 96253 - DNA, 360 bp, Enterobacter aerogenes
atgaaatttaaacacatgctggtatccgcactgcttgcattgtcagcccaggcgctggcagagccagcgccgcccatcaaagtggagaccagtaatcaggttcaccctgccggaacacgctacgtcactgttgtggtcactgcgctggataataccgtgaaagtcgaaaatattgatgttaaccggggaaactgtcatatcgccaaccagaaatatctgtactccagcaataaggaaaccattctgcccgccacattacgctacggacagtcagttgaggtgagtttttataataactgcgtagcctcggaagtcgtcgtcaccactgataaaggcgcatggcgctatacctacaactga

SEQ ID NO: 96254 - DNA, 213 bp, Enterobacter aerogenes
atgacctttctgaaaatgctggtgatggccctgagccaggctctgacctggtgcggcgggcatcaggcccggcagtatattgaaattcgcctgcgtcaggcaggctacgatgacagcagcattgatacagcccgggaagcggtcacgttgctggtcactgcacttatcaccgccctgatggcgcagatattgaagattctggatacgctgtag

SEQ ID NO: 96255 - DNA, 822 bp, Enterobacter aerogenes
atgcgattagccagccgttttggtcgggtgaaccaggttcgccgtgaccgtcccttaacccgcgaagaactgatgcagcatgtccccagcgtcttcggggaagacaagcacgactccagaagcgaaaagtacacctacatacccacaatcaccctgctggagaaccttaaacgcgaagggttccagccattctttgcctgtcagtcacgagtgcgcgaccagagccgacgggaacatacaaagcatatgctgcgcctgcgtcgtgccggtcagataaacggccagcaggtgccggaaatcatcattctgaattctcacgatggcgcatcgagttttcagttgctgccggggatattccggagtgtctgcaccaattctctcgtctgcggacagtcgtttggcgagatccgcgtgccgcacaggggcgatgtcgtcgggaaggtgattgagggggcctatgaggttctcagcgtctttgaccgggtggaagaaaaacgtgacgccatgcagtccctgcaactaccgccaccagcacagcattcactggctacagcggcgctgacataccgttttggggaagagttccagccagtgactgaatcgcaaatccttgcaccccgccgctggcaggacgagagcgatgacctgtggaccacttaccagcgcattcaggaaaacctgctgaaaggcgggctaagtggccgtaccgcacagggtaaacgtacccacacccgcgcagtaaacgggattgatggcgacgttaagttaaaccgcgcgctctgggtgatggcggagaacatgctgaatctgttgggcaggtaa

SEQ ID NO: 96256 - DNA, 480 bp, Enterobacter aerogenes
atgaccgacattattaatattaacgatgacaatcagcgacctctgcagactggtgaagatggctctgaaccggcactgacagccacgcccgtaccggacgaacaacgagtggaattctggccgcagcactttggcaatatcccgcagtggataacccttgaacagcaggtctttgcgtggatggaccggttctgcgctgactacagcggcggtatctggaatttttatactctcagcaacggcggggccttcatggctccggaaacggacagcgatgccttctggtcgctgttcaacgccttgaatggcaacgccgcagacatgagcgccgaagctgcaggaatagcggtctgtcttatcgcttacagtcatcacgcatgccgcacagaatgtgattctatgatggaacattactggcgtctgcgtgactatgcgctgcatcaccctgaatgtaacgcgatcatgcgcattatcgactga

SEQ ID NO: 96257 - DNA, 234 bp, Enterobacter aerogenes
atgccgtatgaaccgtctcacctgaatgccctgtgggatgcgctggggaaaacaacggtcagggatgaggacggtgacgttgtgaccgacgaacccttcctgcatttcccgacgggtacccctctcttccatatatgggcatggttcgaatccctgcacgacgagttcgtcgttgccgtgaaactgtcaaacacatcccctcccgacgcgtcaacagacaggaaaagcaaatga

SEQ ID NO: 96258 - DNA, 483 bp, Enterobacter aerogenes
atgaataccaccacttgtcctcccggcagcggggaaatatctcccactgcacagcgcaccatcagacgtgcactgaccttactggaacgccagttacgcgagcccggcgttgcatttacctccagccaggcggtccgcgactggcttcgtctgcagctcgccacgctggagcgcgaagtattcatggcgctcttcctcgataaccagcatcgtcttattgctcatgaaacgctctttaccggcaccatcaaccatacacaggtacatccccgtgaagtgataaaggcagcactgaaatacaacgcggctgccatcgtgctttcacacaatcatccgtcaggttatgcggaccccggccatgctgaccgacttatcactgaccatctgaagcaggctcttaaactcgtggatatctgcctgctggaccacctggtcgtgggaggcatggacatcgtctcgtttgccgagcgtggctggctttag

SEQ ID NO: 96259 - DNA, 222 bp, Enterobacter aerogenes
atgaaaatcatcagtaaacgtcaggcaatggcgatataccgccagcattctgagtcccggctgtttcgcttctgtaccgggaaatataaatggtccggcagtatctgccattaccacggcagggaagtgcaggatatccggggtgtgctggccgtgtttgctgaacgccgacaggaccgcaacggtttgtatgtgatcctgcgcagcgtcaccctgaattaa

SEQ ID NO: 96260 - DNA, 360 bp, Enterobacter aerogenes
atgcagaaagcaacctgtgtaatcaaccataatatcgcggaaccctggtggggcctcagacgtaacatcacgccgtgttttggtgcccggctggtacaggagggtaaccacctacattaccttgctgaccgcgccagcattgctgggacattcagcgacgcagatttacgccatctggaccaggcatttccggtactgatgaagcagatggagcttatgctgaccagcaacgaactcacgccccacattcagcgctgcatcacgctccacgcaaaagggctgatatgtgaggccgatacgctcggctcctgtggctatctgtacatcgtaatttatccgacacctgcaacaaccgcataa

SEQ ID NO: 96261 - DNA, 375 bp, Enterobacter aerogenes
atgcaaatacaatccctgccccctcaaagggcggcatcgtcacgtctgtcatcagtcgaaatctggcaaaaattactggagtatctgctggagcaacactacggccttaccctcaacaacacaccgttttgcaacgacagtgtgatccagaagcacattgatgcgggtatctcactgtgtgacgcggtgaattttatcgtggaaaagtacgagctggtacgtactgaccgtcacggcttcagcgtgaaagagcagtctccgtttatcggcagcattgatatgctccgcgcccgcaaggctaccgggctgatgacccgcaagggatataaaaccgttactgacatcacaggtggcagattcagcggagggaaataa

SEQ ID NO: 96262 - DNA, 192 bp, Enterobacter aerogenes
atggctcccggagaaatgtttcattttactgaacgccccggaattaagcccctctttacaggcgatacgactcccgatattctggcggcgtcctgccgcatcctcttctacctcagacggatacctccattaaggtgctaccgccatacgcgctgtctgagcgaacacctgtatcaaatgatggagatctga

SEQ ID NO: 96263 - DNA, 741 bp, Enterobacter aerogenes
gtgttcctcgtgcttagtggagagggttcttctgatctgggttcctgccaaaacaggcagggtgaatgtacaatacctgattttagatatggccccatggcgttgcttgttgataaagagattgagaaaaaccatcagtattctcctttggaagtttatcaagagagctatatattcatcagcaaggtaaagttaaccgaactcatgcgcgccaaaagtgccagaaaggtcgctttcagaggcaagaaacaacctgaagctgaaagaggttttttctttgacaatgcgtggatgctgggtgaggaagccttgagacatgcgaacgcgcgggaagacgcggtaatcgccgttctttttcgtgactgtgatggtaacaatcaaagtggcctggaactctggcgcgctaaactagagtccgtacggcaaggatttaaacgttcgggtttgggggaacgtggtgtagcaatgattccccgcccaaaatctgaagcttggatgctttgcgctattcgcaatggctatcagcactgtgcaatacttgaagatacattaccaggcaatgacgatgcgcccaactcagcaaaacagcaactagatgaagctatggcacacgtctcaagcggccaggaccaagtcaattggatcagggaacatgatttaaatgtcactgcccttgccaacgagatggatagctatcgggaattcagtctggacctcaagcgtgcccttgatagcttgtag

SEQ ID NO: 96264 - DNA, 1209 bp, Enterobacter aerogenes
atgttcactaaaattcatgttcgtaatttcaaatcactggttgatgtcaccttaaacctttcatcgtttaactgtcttgttggcatgaacggtgcgggtaagagcacacttttgcaggtcattgacttcatttcccggcaaatgcatggtgacctggagggatggcttgaaaaccgcagctgggagtcaaaggatctttattctaagaccggagacaagcaggcagccaagaaggcaatcttgctgggggtcgactatacccttgaaaatggtgattgtctcaagtggagggcctcttttaaccgaaccagcatgcgcattacccgtgagcagatcatgcacgttgataagaagaaaatcatcttcgaagttaacgaaggaaaatgccgtgtgggagactctcatttccctattgcctttgattattcaggatccgtgctgtctcaactcaaggatagctacctcacggcagagattaaaacctttcgcgatgctgtgcgaaacattaaatccctggagctgttatcacctcagtcgctcagaaaacgttcccgtctagccgataccgatatcgggcctggtggcgaaaaactttccggtttcctgagcactctgacacctgacgccagaagtttgcttcttgatgagttacgccgtttttatcccgaagtaaacgagtttcgcatagcaactagcaaaggaggctggaagaggctgctcatatctgagtcacatctgacagaggaccacgaacaggcgatcaatgagattgatgccagtcagttgaatgatgggctgctgcgtatacttgcggttcttgcacagaacacagcatccggaacaagcatgctgctgctagacgaagtagagaatggcgtcaaccctgaaataattgaaaagctggtcgataccttggttgccagtcctatgcaggtcattgttacaacccatagtcccatggtcctcaattatctcgatgacaacattgcagaaaaaagtgttcagcttgtttataaatcggaatcagcacagacgcgtgttaggccattctttggcatcgagtatacccgggaaaaactcagctatatgggccccggtgaagcgctgatcgatactgaccactacaggttgagagatgaatttctgaaaatggataagcttcaggagaagaagaatatcaaggagaccaaccgtgttcctcgtgcttag

SEQ ID NO: 96265 - DNA, 246 bp, Enterobacter aerogenes
atggcacgcatttataacgtcgagattgaagggaaacgtttctatgataccgaggacagatatcgtctggattatctgagaagaaaaggcaatacacctcacagcattcacatgaccatgactgaggggcagactgaagatttcattggtgcttgggatgctgatgaagatgatgttgataacgaagaaaaccgtttttactccggctcaccctcatcatggcaggacatattcgatattccctga

SEQ ID NO: 96266 - DNA, 267 bp, Enterobacter aerogenes
atgcccgcactcaaaaagcagcgtatagatttgagattaaccgatgatgataagagcatcatcgaggaagctgcggcaatttcgaatcagacgattacccagtttgtggttgccagtgcctcagaacgtgctgcggaagtgattgagcagcaccgcagaatggtcctcaatgagcaatcatggagcctggtgatggaggcgattactcaaccgccagcaccgaatgatcgactgaaacgtgcagcgaagcgtctacaaaccagataa

SEQ ID NO: 96267 - DNA, 534 bp, Enterobacter aerogenes
atggatcagctactgacgattgagatgattgccgatgagttccgctacgacatcactggatttgattgcggcgaggaagcgctgaatacgtttttaaaagaacatctcaagcgacagcacgatggacagatcttaaggggttatgcgctggtctccggggataccgttcccaggctgctgggttattacaccttatcggggagttgtttcgagcgcggcatgctgccgtctaaaactcagcaaaagaaaattccgtatcaaaatgcgccaagcgtaactctggggcggctggccattgataaatccgttcaggggcggggctggggagagatgttggtcgcccatgcgatgcgagtggtgtggggggcgtctaaagccgttggcatctacggattgtttgttgaagctcttaatgagaaggctaaagcattctatcttcgtctggggtttatacagctcgtggatgaaaatagtaacttactgttttatccgaccaaatcgattgaacagctctttactgatgatgagtcataa

SEQ ID NO: 96268 - DNA, 897 bp, Enterobacter aerogenes
atgaagaaaagttttattttcattgtgacatttttggcctcttcagtgtctttggtcgctcatgctcaaggggaaccaagggactttaaaggagttcttcagtgccgaacgatagaggatagctctcagcgtctttcttgttacgataattcgatccccccgacacgaacgaagagcgctaaaaaatttgaaagtagagatcaatgccctgacgaaaaaacggacaaagggcgtctgacctgttatgacagatttttctcaccaacgtttaaaccagcgagttcacccaaaaccgcacctttaagccaagaggttggcaagaacgaggcgatcaataaagcaaagctccttgaatgccgctcagaaataaatggcaccaaacgattagcatgttatgacgagcttttccctcaagatggaacagaggatgttgtgccttcctcagttgagccagccccgaaccctggaaagtggctgactcatataacaacttcaccggttgatgattcaaaaaatgtggttttaatgctacctagcaatgattccattaggacaccatacggcgagaccgttacaccgactatttttgtggcttgtcgtgaaaagaaaaccgaagtttttattaattgggatgtgtacctaggactagaagaaacgagcatgctttaccggtttgataagcaaaaagccgtggaaagaggatggtcgatttctactgatacaaaggccgttttctaccgtggaagagacatcgattttgttaaagccatgatgaaagccgataagatgttcgcaaggataaccccatataacgaaagcccggtgtcggtaacgtttgatttgtcggggcttaatagcgccgttaagccactacagcaggcttgtggttggaagtag

SEQ ID NO: 96269 - DNA, 333 bp, Enterobacter aerogenes
atggctttggttagctgcccggaatgccggaaagaagtgagcgattcagcattgaagtgtccatcttgcggtaaacaactaagaaaaccgcgtcgctcaatttttgggttcctaataaaatggatcttcattctgtttaatatcttcatgatctatgccctttttaaaggattaggtggcacaggtgaggttattaaccatgccacaacggaagctgaaagggccggggccgctttaggtgcaggtctggggatgatggccattggtactatttgggttattggcgacattgtcattggaatactggtgtttcttacaagaccaaagggataa

SEQ ID NO: 96270 - DNA, 1077 bp, Enterobacter aerogenes
atggcagggaaaaaatatacaacattgctgacgcctgccggagaagcgaaactggctgaggcagcgttaactggtgagccagtgggctttgcttttatggcggttggtgatggtggcggcgagtcgttgccgccggacaccgcacgccaggatttaattaacgagatttatcgcgcgccacttaaccgcctggttattgccgatcaggcggcgaatgttgttcgtgctgaactggttatattgccgcaggttggtggattctggataagagaggcggccttatacgatgatgacggtgtgtgccttgcggtcgcgaacctgccggaatcatacaagccgcaactttctgaaggagcggggcgcatgcacgccgtcaacctttggattgcggtaagcaataccgcagatgttgtgctaaaagccgatccgacagtcattctcgctacggttgatgaagtgaataaggcaaaggatgaagcgaaggactacgcggatcaggtggttggggatcttgataccagcattcagcaggttattgccgaagctatcaccgcggcgcgtcgggatttctgggaagaagaaaacccgccgggaacagtgcgcttctttgctcaaaatgtcgatccaaatgaaaaatggccgtggtcgcaatggacttacaccggcgagaataaaacaatccgtgtcggcaaggctgacggttcggacgtcggaagcaatggcgggcaagatgaaattactcttgcagaggaacacttgccgccgcacaaacacagggtaaagggaaaaacccaatcttttcattttgaacggattgaaaccgaagacgcgggggagcacagccatgaatttccgttgaccggggacgccagtaatacgggcatggctgatggcggtgatccggcaaaacaagatggcactcagagaacgtcaacacaaccggcgcaccggcatggtgttaacatccctgatcatgggcatgaaattgactttgaatcagagagcgcagggggcggaaagtcattcagtatcgttgaagctcacaccctgctgatgtgctgggctcgggtggcatag

SEQ ID NO: 96271 - DNA, 744 bp, Enterobacter aerogenes
atggttatggtcattaaatctaacgtgccgtctaatatcattgctaacccggatggatggaatccgccgttttctaccgagggtttgttatatgccggaatttatgggaggggtagtctcactaagaattttgctaaaaatggtattgatgctgtgattaacggcgcgccggtagtgaataatcattttgctgaatttaatgcaaatgattttttggataccggcattgttaataccaaagaggcaactttgattgttgtggctaaacgcaccattaacgcacgtcgtcaatttttagtttccagttataccggcgatgctaagtttggtcgttccattcttattggtagtggtgacgtgcaggctttaaccgtgtactcgcattatcaggggcaggatgccagcggcgcagataagagcattgcgttttctacggcggttcaactgggggtgcaggcaggtagtccgggttttatgtatgcgaaagacacaggcaaaaccatttctgtaaaggacattacttcgaacaaaagcagtagcgtcactgctacggggacgatggaatctattgtgaccgccgggttaacttaccgtattggccggagccataacaatgcggaggcgcaaggagataacgctgttgcggccgcactgatttttgaccgtgcactatctgatacggaaataaagtcaatttacgattacttccaggcctactacgcccgccgtggcataagcatttaa

SEQ ID NO: 96272 - DNA, 2265 bp, Enterobacter aerogenes
atgaccaatattatcgaaacacctatgtggggtgacgttcctcttattacccgtgcagataaagtcgagggcggtcgtggtggcgctgcaaatattcaggcgcaggagctggcaaaccgtacattgcttttaatgcaaatgctggaaggctattccgttggcgaaaaaccttacgacaatgaagcagacgcgcaggccgatatagataaaggactaattaagcctgatgctttttttaccgttcgcacgaatgatgccgattactggctggatgaatataaaaatattaatggcattgccacgcctaccgggaaaaagttacccagcgataaaatgctgcaggaacttaaaaataactttttccagtctcgtcaggatggcgatgtgatgctggattttgttgatgatgactggttttcgtttttccgcgtgatggcaagtggggcgttcggggctattaattgcatggtcgcgccagatggcttgtatgttaaagatatggcgatgtcacacgaggaaggcgggacggggctggtttatcgtgatccggaagggtttagcgtaaccattgtcgggcctgatggtatcgggcagcgtccgggaacgcttaacggcggtggaaaattccacactgaaaccacggacagtgcctggttgcgtctggaagatatcgacgggttttattctgacgtagccgaccagtcagggagagctgcacctcatgcgttgagcggtgacggtgagttcacgacgaaagccggtggtatgggatggctgaatcttgaggatgaagaaggctttttcaaagcgctgaccgatgcggatggcgagccgatcggggttaaagaaaaccctgttgaaaaccttaacctgattgctgctgatgcacaaaataaagcgtattcgcagaatgttcgtgcccggtataacgctgccgttcagcgtctggttagtggactgaatcacctgatcatttacagtcaaagcctcggcacgcaacaggaggggtggcccgccctgagcaaaacgccggttgagggattcgataacctgatgctgggtgattcaatacgaccggcaagccggactaatgcggaattctcccctgtcggaagcgctacgcttaagcctctgcgggcagtggtgcagtctggcaccggtaatgatctgctgacggatgagcaaattgccgcgctgacaccgggtgccgggaatgaaggtgaaggtggtgtagcgatggctaatgcgctgcgtcgtctctggttgcaacgtaattgcctggagcgtgacacctcacgccggttcgtattatccagcacgggcgtaaacggtcgcagtattgaacagttatcaaaaggggcatcccctgaactttatcaacgccctttacaggcagtgcagcaggttaaagcgctggctgaccagcttggtgttacgtattccgttgcagctattctctggatccagggggaatggaattaccagaaaagggatggctcaaacgataaagaaacttataagcgcaatctcggtaagctgtataacgacatgattgcagatatggccgttggtattgcaggacaaaaatcacctccagcactgtttatgtaccagaccggcgcagggtatacccgcgatgatgcttatctgtctatcggaatggcacagtgggagttttgccaggaaaatgaaaacgcttatatggtcgggccggtttatcactactcggataaaggtggtcacctggggccaaatggctaccgctggtttgacatgaaagtcgcgcaggttaagcacctggtattaaacgaggggcaaggctgggaacctctggggccaattaagattgtgagcagtgggcgggaaatttacgtgttttatcatgtaccgtcaccaccgctgacgttcaggccgtcatacatgaaaaacgtcgctacgatgtatgtcgataaaggttttcgggtgacagatagcgccgggacagtcgccatcaccgctgttgaaattgtggcggatacgattattaaaatcacggttggccgggatatatccggtaatgcaaagttgtggtatggcgataaaaccacccacgaaggaaacggtaacgtttttgatagcgacacttttaacgcactggatgattttatttttgaagcgggtactggacagtatgagactgaaaatataccggagctggttggcaaaccttacccgctaaataacgcatcagtgcaattctgcctttctattccttacggagaataa

SEQ ID NO: 96273 - DNA, 603 bp, Enterobacter aerogenes
atgaataacacgcttcttcctccttctgccagcgcgtggatgcgtggcgccgaagctgccacggcgaagctgtccggaatcacggtagccattcgcacgctgtggacgccgacggcatgcccggttgatttattgccgtatctggcgtgggcgctgtcggttgatcggtgggataagaactggccggcagagaaaaaaatagcgtcaatccagcaatcctactggcttcatcgcaggaagggtacgcgcgcagctgtgcggcgagtaattgaagatatgggcttttccgcgacgtttgcggaatggttcgacgtcggcgacgagccagggacgttccgtcttgaaattgatttgaacgaggtggggataacaccaaaaactctggatgagttaaatcgactgataggggaagcgaagccggttagtcggcatttagcgcaaatgacgctttcaacaagcgcaaggggcttcgcgtggatcggagcgacggtaattgatggtgaagaaattacggtttacccggaaaactatcaaccagacgaaagcatttactacaacggtatagcgagcttcagcggaaattatcattattctggaaaataa

SEQ ID NO: 96274 - DNA, 432 bp, Enterobacter aerogenes
atggtgtttgtcagatccggtgttcaagggggcgaagtgaaagagactgctattgcaacattgattatggctgttttgggcgtagctgctggtttatatgtcgcgcgagaaggcgtgaagcgcgaagccgcagaaaaagccctggcagacgctacccaaaaactgaaccagaccggcgatgtgctggccgaagtacgggcgctgcgccaggacgtcagcgagattgaagccagtgtgaaagcgctggggcaaaagcgcaacgaagccggggagaaacgtcgtgaaaatatcaaaactgaactggccggcgatccctgcgctgctgctcttgtgcctgacgctgtcgctgacagcctgtaccagcgcgccgccgaagtcgccgccggtgatcattcaggaacctttgccagaaagcctgacggcaaaaactga

SEQ ID NO: 96275 - DNA, 921 bp, Enterobacter aerogenes
atggatcagttggaagagataatccaaatacttagttctggtgatgctggagtcactaacgctcttttgaaaaccaaaatacttcttttttcaatcggtaaaaaagagctagctacatgggttaaccatgaactcaatggataccctgatgattcgatccttcctgactaccgcgttgtcactacaaggatactcgcagacctaaataatggagcgcggctttattccgcattcccgcttccgcttggatacctagatgaagatgattatgaggaagccactacatgcaagatttatctttcaataagtcaggttgaaaatttagtgaccaacgctgatgaagctaaaacgctgcaacaaccgatacccatcgattatgcttacattaagtactgcaaaaaaattgaacgagggtatgagctaacccgatgctataaagagattgccttacataattttgtttcaattttaacacaagtgagatctaggctgttggactttgttcttgagctttcggatcaactagcgggtattccaggagagaaatcgatgactgaaaaactcaaaacgatcgatacatcatctttatttcataattcgatttttggcgataatactgtcatcaactttggtaatgaaaactcattcaatgttaacaataacatagaaaaaaatgacattgagattttaaaacaaaaacttgcagacaaaggtatccctcaggatgacattcaggacttacagttagccattgatgcagacggccctatcgcatccagaaatggtgattttggacattcagttagcgcctggtttgcaaagatggtaagtaaggcagctcaaggtactattggtatcggtatcaatgtgtttacgcaaacagctacagccgcattaaaaaaatattatggaatagagtaa

SEQ ID NO: 96276 - DNA, 264 bp, Enterobacter aerogenes
atgggggggcggaggttcaaatcctctcattccgaccaaaaccttaggaaaaccagcctcctatggctggtttttttgtgcctgtttttcatacggggagttattggggtgaaaccccgtcaaaatttacataacagggccatcatcaaactcccccaaacgtgcatcattgatgatataagtaataactccaaatacagcgtgctgattgttgtagcattcgtcatcgtccctggggagctcttcccttcgtcctgtctgtaa

SEQ ID NO: 96277 - DNA, 255 bp, Enterobacter aerogenes
atggaccatttagttatccgtagaagtaacagtaatccagtggctgcttatgagggggtaaaattaggattatccatcgctgctgacaaagagactgaacctaaaatcatttgtgctacatttcagcgggccgcaacctctagcgtactaagagaggctatggatgaggacattttcaattgtctcaatcgaaacaagaaatgtaaaataaagggcattgaaacctctttggaaaccatcaagaccatcaaatag

SEQ ID NO: 96278 - DNA, 558 bp, Enterobacter aerogenes
atgaaatacacccagcaagaaaaattacaaattcaaatgctaacggaaatttttcgtgcccttaaaatcgaaaattcatttgatcctgaccttattgatgaagctgtaagcaccgacaattactgggctctgtcatggcaatactctagccttgacacgggtgaagataacccagaggaagtcaaactgtttgttgacgttatcgatatgtacgaaattcttaaatatacctatgaacgtttcagtgctgaggacaaagcagaagtagcagaggctattccacatttcaacgagagcacatccctgtcgttcccgggatttgacggtaataatgaaacgaaatatctcgttattggtggaatcctgaaacgcatgggccgtttttcaggtaaagacgaactaacacgtaattcacatatgcccactgtagatatttaccgcagaatgcttgaggttttcttacctgctcgagcaaacacatggatgtatgaagtaggaatttcaaaggagaactttattaatacattaaatgcacgtatccatccagagaatcgttaa

SEQ ID NO: 96279 - DNA, 198 bp, Enterobacter aerogenes
atgcttgagaactattttaaaaacggtctggccactactgatgataaaacacagcgtttacttgctgttcaggcggctcttgagatagctaaggcctcagcaaacgcaggtaacggtgtgatgcacagtgatttagaccaagcagctgagcgtattggaaaacttgccgatgcaattcaggctgccttaaaagcttaa

SEQ ID NO: 96280 - DNA, 540 bp, Enterobacter aerogenes; identical to SEQ ID NO: 11731

SEQ ID NO: 96281 - DNA, 435 bp, Enterobacter aerogenes; identical to SEQ ID NO: 11730

SEQ ID NO: 96282 - DNA, 273 bp, Enterobacter aerogenes
atgaacaccttgtttttactgatggctgaattcaataccccaaacattgagctgtcagctgtatgccaaaagtatttcggtatgagccctaacacagcagaagcgaaagcaaatgcatgccagttgcctatcccgacttatcgtgttggtacatcacagaaagcaaagcgctgcatcaacattcaggatcttgctgaatatatagataaacggcgtgaagaaggcagaattgaatgggagagagtaagaacaaataggaaaataaataactaa

SEQ ID NO: 96283 - DNA, 573 bp, Enterobacter aerogenes; identical to SEQ ID NO: 11729

SEQ ID NO: 96284 - DNA, 729 bp, Enterobacter aerogenes
atgacaactttcaccgacaaagaactgattaaagaaatcagggagcgaatcggcagcctggacgtgcgagacaatattgagcgccgggcttatgaaattgctctggcatcgctggaagcagtatcggatgaacgagcagcctatgaattatttatggagaagcgtttcggggaatctgtagatcgccgtagggcaaaaaatggcgatagagaatacatggcatgggatatggcgcttggctggattatctggtgtcaccgcgccgccatgcttcagggtagccaacctgtaagccaaacttacaagttgccagttaatacaccttgccaagatgcgccagcccatatctggctgcaaacggctggagtatggccagaagatggcgagttaagcgaattaacgtggtgcagccacaatcagcaccatgatgacacgctatatgttcgagctgaccttgtgaatggcaactatccggtaactccggatggttgggttatggtgccgaagagactaacagccgagaacggcgctaagggggtgctatccggtgaattttcagaaactacgtttataagctgccaggaatgctttggcgatgatgattgcgatacctgtgacgggagcggacgtattgaaattaaagtgccagtcacgtggtcgaccataaaatctatctgggataaaggtatcgagtattttgcagcaaaaccatcacaagaggtgaagtga

SEQ ID NO: 96285 - DNA, 288 bp, Enterobacter aerogenes; identical to SEQ ID NO: 11880

SEQ ID NO: 96286 - DNA, 618 bp, Enterobacter aerogenes; identical to SEQ ID NO: 11807

SEQ ID NO: 96287 - DNA, 249 bp, Enterobacter aerogenes; identical to SEQ ID NO: 18561

SEQ ID NO: 96288 - DNA, 204 bp, Enterobacter aerogenes
atgagcgtgataaaaactcatacaggaattgttatcacccgagacggtccgcaggtaaaaaaactgcaccagacaaagcggatgtgggtcgtcggaaaaaacgagttttaccacaaagaaaccggacgccgccactttgcagaaaatactcgccgccgactgctgatcgataccatcaagcctatcgaggtgaagcatgtttaa

SEQ ID NO: 96289 - DNA, 363 bp, Enterobacter aerogenes
atgcgcatgaatgttttcgaaatggaagggtttcttcgcggaaaatgtgtaccgcgagatctgaaagtgaatgaaacaaatgctgagtacctggtacgtaaattcgatgcgcttgaagctaaatgtgcggcactggaaaacaaaataataccagtgtcagctgaactgccgccagcaaatgaaagtgttctgttatttgatgctaacggagaaggctggctaattggctggcgttctctctggtacacctggggacaaaaagaaaccggagaatggcagtggacatttcaggtcggggaccttgaaaacgtcaatatcactcactgggcagtaatgccgaaagcaccggagaataagaaatga

SEQ ID NO: 96290 - DNA, 537 bp, Enterobacter aerogenes
atgtcatttattaaaactttttccgggaagcatttttattatgacaagataaataaagacgacatcgtgattaacgatatcgcagtttccctttcaaatatctgtcgctttgcaggacatctttcacacttctacagtgtcgcccagcatgcggtgctttgcagccagctggtgccgcaggaatttgcttttgaagcgttaatgcatgatgcaacagaagcatattgccaggacatccccgcgccactgaaacgacttcttcctgactataaacggatggaagaaaaaatagacgccgtaatccgtgagaaatacgggttacctcctgttatgagcacgccagtgaaatatgccgatctcattatgctggcaaccgaacgccgcgatctcgggcttgatgatggctctttctggcctgtactggaaggcatcccggcaacagagatgttcaaagttattccactgtcaccaggccatgcctacgggatgtttatggaacgttttaacgagttatcggagttacgcaaatgcgcatga

SEQ ID NO: 96291 - DNA, 825 bp, Enterobacter aerogenes
atgtctcagaacttagacgcaaccgcaattaatcaaatccatgcccttatttctgctcagggtgttaatgaaattatcagtaagattggtgccgacgcagtggcattacctgaaaatttccgcattcatgatctggaaaaatttaatttaaatcgcttccgtttccgtggtgcgctttccactgccagcatcgatgactttacccgttattctaaagatcttgcggatgaaggcacccgctgctttatcgatgccgataatatgcgtgccgtcagtgtgcttaacctgggtactattgatgagccaggtcacgcagataacaccgccactctcaaactgaaaaagacagcaccgttctctgccctgttgtctgttaacggcgagcgtaactcccagaagtcactggcagaatggattgaagactgggccgactaccttgtgggctttgatgctaatggtgacaccattcaggcaaccaaagcggctgcggcagtccgtaaaatcacaattgaagcaaaccagaccgctgattttgaagacaatgacttcagcggcaaacgctccctgatggagtctgtcgaagcgaagaccaaagacattatgccagtggcatttgaatttaaatgcgttccgtttgaaggcctgaaagaacgtccgtttaaattacgcctcagcattatcactggcgatcgtcctgtactggttctgcgcattattcagctggaagcgatgcaggaagaaatggctaacgaatttcgtgatctgcttgttgagaaattcaaagacagcaaagtagaaacctttattggtactttcaccgcctga

SEQ ID NO: 96292 - DNA, 363 bp, Enterobacter aerogenes
atggctagcgaacgcagtactgatgtgcaggcatttatcggggagctggacggcggcgtatttgaaaccaaaatcggcgcagttctcagtgaagtcgcttccggtgtgatgaacacgaaaaccaaaggtaaggtctcgctcaacctggaaatcgaaccgtttgatgagaaccgtgtgaaaataaaacacaaactctcatatgttcgtccgactaaccgcgggaaaatttccgaagaagacaccaccgaaacgccgatgtatgtcaatcgcggtggtcgcctgactattctgcaggaagaccagggacaattattgactcttgccggtgaacctgacggaaaactccgcgcagcaggtcattaa

SEQ ID NO: 96293 - DNA, 675 bp, Enterobacter aerogenes
atgaaaacagtccatgacatccggcggtctaacgccagaaaactgagagatggtgttggcgggaattcttcctttgccaccatgattgatcgcgagccaacccagaccagcaggtttatgggagatggtgctactaaaaatatcggtgacagcatggcacggcacatcgaaaaatgtttcgacctgcctgtcggatggcttgatcaagaacaccagacaacaaacatcacaaaaaaacctgatgtttcaattactaacaaacaaataacgttagtccctgtcatatcatgggtacaggccggagcatggaaagaagttggctattctgaggttgatttgagcacagcagaaacttatccctgccctgtaccctgtggcgaaatgacttatatcttgcgggtgattggtgattcaatgattgatgagtaccgcccgggagacatgatttttgtagatcctgaagtccctgcctgccacggtgacgacgttattgcattgatgcacgatacaggcgaaaccacctttaagcggttgatagaagatggaacacagcgttacctcaaagcattaaacccaaactggcctgaaccttacattaagatcaacggtaattgctctataattggtacagtaattttctcaggaaaaccaagaagatacaaaataaaggcctaa

SEQ ID NO: 96294 - DNA, 201 bp, Enterobacter aerogenes
atgaaagcgtattgggactctttaaccaaagaacagcagggcgagttggccggaaaagttggctcaacaccaggctacttacggctggttttcaatggttataaaaaagccagttttgtgctggctaaaaaacttgagcaatgcacgtcaggtgcaattacgaaatctgacttaagaccggatatctatccgaaagattaa

SEQ ID NO: 96295 - DNA, 552 bp, Enterobacter aerogenes
gtgggtaagcatcactggaaagtagaaaaacagcctgagtggtacgtgaaagctgtcagaaaaactatcgcggcgttgccggggggttacgctgaagctgctgagtggctggatgtaacagagaacgctttattcaaccgccttcgtgcagatggcgatcagattttcccgctgggatgggcaatgattttacagcgcgcggctggcactcactacattgcggatgctgtcgcacagtctgctggtggggtgtttgtatcgcttcctgaaattgaggaagtagagaacgccgatataaaccagcgcctgctggaagtcatcgaacagatcgggagttactcaaagcagattcgttcggcaatcgaagatggggtagtggagccacacgagcagacagcaattaatgatgagttgtatctgtcaatttcgaagctccaggagcatgcagcactggtctacaaaatcttttgcgctccagaaaagagtgacgcccgcgagtgtgcagctccgggcgtcgtggcgttttgtgtctgtggagaaactaacgcatga

SEQ ID NO: 96296 - DNA, 837 bp, Enterobacter aerogenes
atgaacagtttaacggcaaataaccgtttgtcgcaacagctggtggtcagtgtcgctgaacacctgttgttacggcatgaatgcagattaccaaatcacctggctgtaagtaaccacagagaactttacctgactgtggggggcgagttgtgcaggaacttaaccgctggtttcgtgacggaagaggactttatgttcatgttattcgttgggagccagaaacacagcgcgttatctatcttcgcaaagactacccgcatgagtgctttagtcctttgtggaaattcaggcgtgattttgttgagtgtgaaggaccaccagcacattgattctgccattccgggacgttacactgttcaggcaccttataaagcgggtgccgggattggcgtcctggaattgatcaaggcgatatatgacgcgccagcgtcttttttatcgtccgcatttgctcacatcaaagttatggtgggctgggcgggggcatcgaaagatgcgccggtttccttgatcaccggttacgccaaccccgttcagttcaccaccagcgaaattggcgtttccggtggtggaagtatttcaccgatcaaggaggctgccatcatggctactgtcccagccctcactcgtctgaatgatgaagacttacataaactcagttatgtaacaactgcactacgtgctctgcgcaaggtaactctttcggatccgcaggcgcatcaggttttggtagaaacccttcttaacttgcaggctgaacgtattcgtctggcggataaggctaattttcatattcaccgtctcctgaatatcagcggagggcatcgtcatgcttaa

SEQ ID NO: 96297 - DNA, 237 bp, Enterobacter aerogenes
atgcttaatctgttgagcctcaatattcgccgtttacttcagcgtaaaaaaacatcaattcctacagttgggcagtggtacaccacgcctgcagggcatgttctacgtgttagcctggttgaccgtgaatgtcagaaggtggtttgtgaaccgctgggccgtaattaccgcgtcagtatgccgcttatagcctttcgctccggaaaaaacatgaagcatctcggaggtgcagcatga

SEQ ID NO: 96298 - DNA, 819 bp, Enterobacter aerogenes
atgagtatggagctgatggttaaagcgatgaaaattcgagtgggtaatccattgcgaaaactggttctgatcaagctggctgataatgccagcgatcagggtgagtgctggcccagctaccagcatattgctgaccagtgcgagattagcaaacgttctgtgatgaatcatattgcggccctttgtgagtccgggctggtaaaaaaagtcacccggaaaggtgaaaaaggtaactcaagtaatatctatctccttcatctggatggtgcaggagattcactagggggtagtgcaaataattcactatctggtgcagcaaattcaccaggtagtgcaggagttgcaccagggggtagtgcaggagattcacccagaaccagtcactcttttgaaccagtcaaagaaccagtcaatgaaccaatagctgttggtgcatcagttgatgagtccgtgcgagttcgttcaaaccgaccggaatactctccggagtttgagcaggcatggctggtatatcccaaacgtgctggtggcaattcaaaatctgcagccttcaaagcctggaaagcccgtttgaatgagggggtaaaccccgaaaccatgctggaaggtgtgaaacgctacgcgggctgggtatctgcgatgggtaacagcggcacacaatttgtgaaacaggctgtcacgttctttggtccggatcgtcatttcgaagaatcctgggaagttcctgcggtatctgcagccagacgcgaggacccgtacttcaaagccagttacgacaacgtggactacagccagatcccggcaggattcagggggtga

SEQ ID NO: 96299 - DNA, 489 bp, Enterobacter aerogenes
atgagtcttttgaatgaagttcagaaattcattgaagcccatccggggtgtacttccggagacattgcggatgcttttgcaggttactcacggcagcgcgttctgcagtcagcaagcaagttacgtcagagtgggcgtgtggctcaccgttgtgaaggagatacacgcagacatttcccgcgcctgactgagagagcgcaggaaccggaaccacaaccagttcgagaaaccagacctgtgcgcaatttctatgtcggcactaacgatccacgggtgattttgtgcctgacccgccaggctgaagaactggagtccaggggcttataccgtcgtgctgcaaccgtgtggatggcggcattccgtgaaagccactcccagccagaacgaaacaattttctggcgcgtcgtgagcggtgcttacggaaaagcagcaagcgcgctgcatcgggtgaagagtggtatctgtcagggaattacgtgggggcttaa

SEQ ID NO: 96300 - DNA, 654 bp, Enterobacter aerogenes
atgagtaataaatattgccaggcgctggtggaactgcggaacaaaccagcccatgaactgaaggaagtgggcgatcagtggcgcacgccggacaacattttctggggaattaacaccctgtttggcccgtttgttctggatctgtttactgacggtgataacgccaaatgtgccgcgtattacacggcggaagataacgcgctggcgcatgactggtcagaacgtcttgcggagcttaaaggtgctgcctttggtaatcccccatacagccgcgccagtcagcatgaggggcaatacatcaccggcatgcgttacatcatgaaacatgccagtgtcatgcgtgataagggcgggcgctatgttttcctgatcaaagcggccaccagcgaagtgtggtggccggaagatgcagatcatattgcttttattcgcgggcgtattggttttgaactgcctgcctggtttataccgaaggacgagaagcaggtgccgacaggcgctttcttcgctggtgctattgctgttttcgacaagacctggaagggaccggcaatcagctacatcgggcgcgatgaacttgaggcatgtggtgaggcgtttctggcgcaggttcgccagcaggcggaaaaactggtcagggagatggcggcatga

SEQ ID NO: 96301 - DNA, 327 bp, Enterobacter aerogenes
atgacgacgttaactcaatgccagcagcaggtgctggatatgctgatttcttatcagaaagaacgtggcttcccgccaaccaatcaggaggtggcaaccatgctgggataccgttcagtgaatgcagcggtggagcatcttcgcgcactggagaaaaaaggcgtcatcacgataaagcgtggtgtggcccgggggatcacgcttcataccgtggtgaaggacgacgacagcgaggcggtcgggattatccgatcactgcttgccggtgaggaaaacgccaggctgcgtgcagcccattggttacatgagagaggcctgaaagtatga

SEQ ID NO: 96302 - DNA, 396 bp, Enterobacter aerogenes; identical to SEQ ID NO: 35561

SEQ ID NO: 96303 - DNA, 816 bp, Enterobacter aerogenes
atgaatcagttgcttgtaattgatggcgtttctgtgcgccagtacttcgaatctaactactgtcttaacgaccttcagaaagctgctcttcttgccgctggtgagaatcgctcctcccgttcgctggaagttcacgagtttatgcgtcgtcctgaaacgaaggctcttgtggaattattggaagaagaaactacgggagattcccgtagtattcctgtcatcaccattcaggggcgcaatggtgggacgtatgtctgtaaagagctggtctatgcatatgcaatgtggatcagcccggcattcagcttaaaagtgatacgtacttttgatgcgcttcataattcatcaccagaagaaaccacatccgacaaaattaaatccggggtcattctgcttgaatcagcagcaaagactctaaatctgtcaaactcctcgaaacttggtgcataccagaaattatcaaaggtagctggtcttcctgaacttatgccgatctatgccattgatgcacctgctgatgcgccagatggttcaagccgccctacgctgtcgctgagtgcactgctgaagcagtatggtatccgcctgacggctaatcaggcatatcaccagatggcgaagctggggatcgttgaacaacgcgaacgatacagtcgtaccgcgattaacaacatcaaaatattctggtcgctgaccgcgaaaggctgcatgttcggcaagaacatcaccagtcctgcaaatccgcgcgagacgcagccgcatttcttcgaatcccgattccctgagctgttaaagctgctcgataccgttcattga

SEQ ID NO: 96304 - DNA, 990 bp, Enterobacter aerogenes
gtgagagcactactgacccctgaaattgccccgcgtatggggatcgtattgttcagaccaggttcagagctgatgcccttgtttatgcaggggcgtgtcctgctggagcctgagccggaacgttattcatctttcgccagtggtgccgttccggcggcatcacaaccgctggcggatgatcctgccgttcgggccgtgttccgcaatgaggcagtgatccgtcgtgctggtggcgtggaatgtcttgaaagctggttacttcgtgaaaaaggctgccagtggcctcattccgactggcacagcgagaacatgacaacaatgcgacacgctccgggcgcaatccgtctgtgctggcactgcgataaccagctgcgcgatcagttcacggaacggctggaatcaatggcaacggataactgtgcccgctgggtgttgtctgttgtgcgtcgggatctcggttttgatgacagtcatgttgtgacaatgccggaactgtgctggtggctgattcgtaatgatctggtggatgccttaccggaaagtgcagcccgtaaggcactgagattaccgaagcctgttgtgccgtctgttacccgggaaagtgaccttgtgccttcggttcctgccaccagcatcatccaggataaggcgaaaaaggtgctggcgctgaaagtggatccggagtcgccggagtcttttatgttacgcccaaaacgtcaccgctgggttaatgaaaagtacacgcgctgggttaagacgcagccgtgcgcatgttgtggaaaacctgctgatgatccccaccacctgataggccacggtcaggggggaatgggtacaaaagcgcatgacctttttgtgttgcctttgtgcagaaagcatcacgacgagctgcatgcggataccgtggcatttgaagagaagtatggctcccagctggagctgatatttcgttttatcgatcgtgcgctagcaataggcgtactggcgtaa

SEQ ID NO: 96305 - DNA, 753 bp, Enterobacter aerogenes
atgaaccttgaagccttaccaaaatattactccccaaaatctccaaaattgagcgatgacgcaccggcgacaggctcaggtggtttaacgattacggatgtgatggctgcgcaggggatggtgcagtcgaaagcaccgcttgggtttgccttattcctggcaaaagttggtgttcaggatcctcaatttgcgattgaaggtctgctcaattacgcgatggcactggataacccgacattgaacaaattgagtgaagaaacccggttacagatcatcccttaccttgtgaattttgcctttgctgattattccaggtctgcggcaagtaaggctcgctgtgagcattgtgctggtactggatttcataatgtattgcgcgaagtggtgaaacactccagaagcggggaatctgttatcaaggaagagtgggtgaaggaactatgtcagcattgccatggtaagggagaagtcagcacagcgtgcagagggtgtaagggtaaaggtattgtcctggatgaaaaaagaacccggcttcatggtgtgcctgtttataagatttgtgggcgttgcaatggcaaccggtttagccgtttaccaaccacactggcgcggcatcatgtccagaaactggtacctgacctgacggattatcagtggtacaaaggatatgcagacgttattaataaactggttacaaagtgctggcaggaagaagcgtatgctgaatcgcaattgagaaaagtgacaagatag

SEQ ID NO: 96306 - DNA, 216 bp, Enterobacter aerogenes
atgaaatccatggacaaaatttcaacgggcattgcctacggcacctccgcaggcagtgctggctactggtttttacagtggcttgatcaggtcagtccgtcacagtgggctgcgattggtgtactggggagtctggttctgggcttcctgacttatctgacaaatctgtacttcaaaataagagaagataagcgtaaggctgcacggggagagtaa

SEQ ID NO: 96307 - DNA, 315 bp, Enterobacter aerogenes
atgacacaaaaatatgaactgattgtgaaagggatccgcaattttgagaataaagttacggtaactttagcgttacgggacaaaaaacgctttgacggtgaaatttttgacctggacatctcgctggaccgtgttgaaggtgccgcgctggagttttatgaggcagcagccagaaggagcatcagacaggtcttcctggatgttgctgccgggttatgtgaaggggacgagctgttgccagaaacgcgcccctgttcagaggcgcggtataccataaaaattaacagttctgataactcgattaagggttgttag

SEQ ID NO: 96308 - DNA, 534 bp, Enterobacter aerogenes
atgagcgcaaaaatcaaatacggcctgtcagctgctgttctggcgctgattgctgcaggcgcgtctgctcctcaaatacttgaccagtttctggatgaaaaagagggtaaccacactacggcataccgcgatggttccggtatatggaccatctgtcgtggtgccacaatggtggatggtaagcccgtcataccgggaatgaagctgtcgaaggaaaaatgcgaccaggttaacgctattgaacgtgataaggcgctggcatgggtggagcgcaatattaaagtaccactgaccgaaccacagaaagcgggtatagcgtcattttgtccctataacattggccccggtaagtgtttcccgtcgacgttttataagcggctgaatgccggtgatcgtaagagtgcatgcgaggcgattcgctggtggataaaagatggtgggcgcgattgccgcatacgttcaaataactgctatggacaggttattcgtcgtgaccaggaaagcgcattagcctgttgggggatagatcagtga

SEQ ID NO: 96309 - DNA, 468 bp, Enterobacter aerogenes
gtgagcagagtcgccgcgattatttatgctctggttatctgcatcatcgtctgcctgtcgtgggcggtcaatcattaccgtgataacgccatcgcctacaaagaacagcgtgataaaaaagtcagtgagctgaagcaggcgaccgccaccattactgacatgcagcaacgccagcgtgctgctgatgtactcgatgctaaatacacgaaggagttggctgatgcgaaagctgaaaatgatgctcttcggcgcaagcttgataatggtggtcgggtgctcgtcaaaggaaaatgctctgtgccatcctcagccgaaacctccagcgcctccggcatgggcaatgatgccaccgtcgaactctctccagttgctggacgaaacgttctcggtatccgggacggaatcatcagagaccagacagcactgagaacgcttcaggaatatatcaggacgcaatgccttcgatga

SEQ ID NO: 96310 - DNA, 153 bp, Enterobacter aerogenes; identical to SEQ ID NO: 3602

SEQ ID NO: 96311 - DNA, 177 bp, Enterobacter aerogenes; identical to SEQ ID NO: 3601

SEQ ID NO: 96312 - DNA, 492 bp, Enterobacter aerogenes
atggatcatgagttgaaaaacctggtgctgaatattaatcaactggctgctttatctggtctgcaccgccagactgtcgtggcaagactgaaaaacattcgtcccgctggtggacatgacaaactcaagctataccggttgaccgatattctgactgaatttatggggttaccaccgccggttgctgagggcgaaatggatccacatgaacgcaaagcctggtatcagtctgaacgtgagcgtcttaagttcgaacaggaaacggcacaactcattccggccagtgatgtcagacgggagtttgccatctgggcaaaagcggtcgtgcaggtgctggagacattaccggatattctggaacgtgactgcggcctgcagcctgccgctgtgagccgtgttcagtccattattgatgatctgcgcgatcagatagccctgcgggtgaccgaagcaggtgcggatgatgaggaggaattacagcaggaggagtaa

SEQ ID NO: 96313 - DNA, 2103 bp, Enterobacter aerogenes
atgctgaatcaggaaaccgcaaaggcagcacgaaccgattcaggttatatccttcgcgcaccgagacgaatgctggttgctgatgccgttgctcagtatatgcgggtgcccatgggggccgggaactcagtcccgtgggatccgctggtggcaccgtatgttattgagccgatgaactgcctggcctcgcgtgaatacgacgcagtgatatttgttggcccggcacgaactggcaagactatcggcctgattgacggctgggtgatttacaacgtgatttgcgatcctgctgatatgctgatcattcagatgacggaggaaaaagcccgcgaacactccaaaaaacgacttgccagaacgtttcgcgtcagcccggaagtggtcagtcgcctgagtccgaacaaaaatgacaacaacgtttatgacagaacattccttgctggcaactacctgaaaatcggctggccgtcagtcaatatcatgtcctcatcagattataaatgcgtggcgctgacggattatgaccgttttccggaagatattgatggcgagggggatgccttctctcttgcctcaaaacgtaccaccacatttatgtccagtggtatgacgctggtggagagttcccccggcagggatgtgaaggatgtgaaatggcgacggacttcaccgcatgaggctccaccaaccacggggatactgtcgctctataaccgtggcgatcgccgtcgctggtactggccctgtccacactgtggtgagtattttcagccctgcggcgatgtggttgctggtttccgtgatattgccgatcccgtgctggcaagtgaggcggcttatattcagtgtccttcctgttcaggacggattatgcctgaacaaaaacgtgagctgaacggacgtggggtctggttgcgggatggtgaatccatcaatgcggatggcagtcgttatggtgatccccgacgctcacgtattgcgtcattctggatggaggggccggcagctgcttaccagacactctcgcaactcgtttacaaactgcttactgcagaacaggaatacgagacaaccggaagtgaagaaacactcaagacggttatcaataccgactggggattaccttatcttccccgtgccagcatggagcaacgaaaaagtgaactgcttgagcagcgggcagagccagttccttcccgcagtgtgccggatggcgttaatttcctggtggcgacagttgatgtgcaggcgggacgtcatcgccgttttgtggttcaggtaacgggctatggcagccgtggcgaacgctggattattgatcgttacaacatcacgcagtcattgcgcggtgacagcgacggggagagccagcgaattgatccggccagctatccggaagactgggatgtcctgctgacggatgtttttcataaaagctggccgctggcctccgatccttctcaacaaatgcgactgatggcaatggcggtggactccggcggtgaagacggggtcactgataatgcctataaattctggcgtcgttgccgtcgtgatggccttggtaaacgtatttacctgtttaagggcgacagcatccggcgcgcaaaactgatcacccgtacattccctgataacaccggacgaacgggccgacgggcgcaggccgcaggtgatgtgccgctctggcttcttcagacggatgccctgaaagaccgggtgaataacgcgttatggcgtgactctccaggtcccggctatgtgcatttccctgactggctggggagctggttttacgacgaactgacgtatgaagagcggagcagtgacgggaaatggagtaagccgggtcgcggtgccaacgaagcttttgacctgatggtgtatgccgaggctctggtcattctgcatggatacgaaaagatccgctggccggatgcaccggagtgggcgagccgggaaacctggctggagtgtgtcccggacagtaccgaaccgtcaccctcaccggagccggtatccacgcctgttaaaaaacaaaaacggaagaaaacagtaactgacgatgttaacccctggctgacttccggaggatggttatga

SEQ ID NO: 96314 - DNA, 213 bp, Enterobacter aerogenes; identical to SEQ ID NO: 4467

SEQ ID NO: 96315 - DNA, 1509 bp, Enterobacter aerogenes
atggcaattcttgatgatgtgattggcgttttttcaccaggatggaaagcggcaaggctgcgttcccgtgcggtgatccaggcttatgaggccgtaaaaacgacgcggacacacaaagcccggcgggaaaaccgaactgccgaccagttaagccagtacggggccgtgtcgttacgtgagcaggcccgttaccttgataacaaccacgatctggtcattggtgtatttgacaagctggaagaacgggtggtggggaaaaacgggattattgtcgagccacatccggtattacgcaatggggccattgcccgtgatctggcagcggagattcgcacccgatggagtgaatggtctgtcagcccggaagtcaccgggcagtttacccgtccgatgctggaacgtctgatgctgcgtacctggctgcgcgatggtgaggtgtttgcccagatggtttccgggcgcataaacagcctgacgccttctgccggtgttcatttctggctggaggcgctcgagccagactttattcccatgaccagtgatgagagcaacaggctgaatcagggcgtgtttgttgatgactgggggcgtcccgaaaaatatctggtgtataaaagccgtcccgtatccggacggcagatggaaaccaaagaagtggatgcagagcgaatgctgcatcttaaatttgttcgccgtctgcaccagatgcgcgggacgtctttgttgtccggtgtgctgatccgcctcagtgccctgaaagattatgaagattatgagctgactgcagcaaggatcgccgctgctctggggatgtacatccgcaaaggcgacgggcagagctatgaaccggatggtaatggcagcaaggagaatgaacgcgagcttaccattcagccaggcattatttacgacgatctgaaacccggcgaagaaatcggaatggtgaagtcggatcgtcccaatcctaaccttgaaacttttcgtaatggtcagttgcgtgccgtggcggcgggcagtcgtctgagtttttccagtacggcacgcaactataacggcacttacagcgcccagcgtcaggaactggttgagtctactgatggctacctgatcctgcaggactggtttattggtgccgtcacccgcccgatgtatcgtgcctggctgaaacaggctgtggcatccggtgttatcaggctaccccgcgatcttgaccgttcttcactgtataccgcggtgtattccggaccggtgatgccgtggattgaccctgttaaggaggctgaggcctggaaaatccagattcgtggtggagcggcgacagaatcagactgggtacgtgctggtggtcgtaatccggatgatgtcaaacgtcggcgcaaggccgaaattgatgaaaaccgcaagctggatctggtatttgataccgatccggccagtgataaaggaggcagcagtgccgcaacgaaacgacaggagccgcagcacaccgacgaccagtccgaagaataa

SEQ ID NO: 96316 - DNA, 2028 bp, Enterobacter aerogenes
gtgccgcaacgaaacgacaggagccgcagcacaccgacgaccagtccgaagaataattcctggttcaggatgcaggctggtcaccagagtgacgcggatatttatatttatgacgagattggtttctggggtgttacagcgaagcagtttatcagtgatctgaatgcactgggcgatatcacccacattaatctccatattaattcaccgggtggcgatgtctttgaaggcatcgccatttttaatgcgctgaaaacacatggtgcgtccattaccgtttatgtcgacggtgtggcggcgtcaatggcgtcggtcattgcgatggtgggaaacccggtcattatgccggaaaacaccttcatgatgattcataaaccatttggctttacgggcggtgatgcggaggacatgcgcacctatgccgacctgctcgataaagttgaggcggttctgttacccgcttatgcacagaaaaccgggaaaaccaccgatgaaattgctgccatgctggcggatgagacctggatgtccggtgccgaatgtctggcacatggatttgctgatcaggtaacgccagccgttaaggcaatggcatgtattcagtcaaaacgtacagaggaatttaaaaagatgccggaatccattcgaaacatgattactccgccacgcaacagtgctccacgcgtacaggataatgaacctgtagcctcccggacgccagtgcaggcagcagcacccgtggtggatgaaaacagtatccgtgcgcaggtactggcagagcaaaaagcgcgtgtaaacggtattaatgatttgtttgccatgtttggcgggcgttatcagacgctgcaggctcagtgtcttgccgatcctgaatgttcgctggagcaggcccgcgaaaagctgttgaacgagatggggcgcgagtccacgccatccaataaaaataccccggctcatatttatgccggtaacggtaattttgtgggggacgggatccgccaggcgctgatggcgcgtgccggatttgaaaaaaccgaacgtgataatgtctacaacgggatgaccctgcgtgaatatgctcgtatgtcactgactgaacgggggattggggtttccagttataacccgatgcagatggtcggtgcggcgttcacacacagtacgtctgacttcggtaatattctgctggatgttgcgaacaaagccattctgcagggctgggaagatgcccctgaaacctatgaacagtggacgcggaaaggtcagttgtctgattttaaaattgcccatcgtgtgggtatggggggcttcagtgctctgcgtcaggtgcgtgaaggggcggaatataaatacgtcaccaccggagataaacaggccactattgcactggcgacctatggcgagctgttcagtatcacccgtcaggccattatcaatgatgatctgaatatgctgaccgatgtcccgatgaaactgggccgtgcggcgaaatccactattgccgatctggtttatgccattctgacgtctaacccgaaaatctccacagataatgtaagtctgttcgataaagcgaaacatgcaaacgtactggagagcgctgcaatggacgtggcatcgctggataaagcccgccagttgatgcgtgttcagaaagagggggagcgtcatctgaatattcgtcctgcgttcgtactggtaccgacggcgatggagtctgttgctaaccaggtcattcgctcctcaagtgtcaagggggctgacattaacgccggtattattaacccggtgaaagattttgcgaccgttattgcagagcctcgtcttgatgataacagccagaccactttctacctggctgcgtccaaaggctccgatacgattgaagtggcttatctcaacggtgtggatacgccatatattgatcagatggagggcttcagtgtggatggcgtgacaacgaaagtgcgtattgacgccggtgtcgcgccagttgatcaccgcggtctggtgaaatgtacggcgtaa

SEQ ID NO: 96317 - DNA, 324 bp, Enterobacter aerogenes
atggcaaagaattttgtagaagaaggaaaaacggtggcgattgttgccagtgcagccatcagcagcggagatctggtgcaggtgggcgatgtttttgcggtggcgctgaccgatattccacagggtgaaacaggcgacggcatgaccgaaggtgtgtttatgctgcctaagctgaaaacggatgatatgaaaacgggtaagaaggtttatctgaagtccggaaaagttcagctgactaacagcggctctgatccgctggtcggggttgtctgggcagatgctggaaccagtgcagaagaagtgccggtaaaactcaatgtctga

SEQ ID NO: 96318 - DNA, 579 bp, Enterobacter aerogenes
atgaaggggcttgagaatgccatccgcaatctgaacagccttgatacccgtatggtgccacaggccagcgcatgggcgataaaccgtgtggcacagaaagcggtctcggttgccacccggcaggttgccgggaataccgttgcgggagataaccaggtgaaagggatccccctgaaactggtacgtcagcgtgtccgggtgtttaaagccagtccgtcaggaaaaatgacggccaggatccgcgttaaccggggcaatttgcccgccattaagctggggacagcccgggtcagactggcccggcgtggtggaaaactgcagtaccgtggcagtgtgctgaaggtgggtaaatatcttttccgggatgcgtttattcagcaactggcgaatggtcgctggcatgtgatgcggcgtattgatggcaaaaatcgttaccccattgatgtggtgaaaatcccgctgtccggaccgctgacacaggcatttgaagatgcccgcgaccgcatcattgctgcggaaatgccgaaacagctggggtatgcactgaaacaacaactgaggttatggctgacccgatga

SEQ ID NO: 96319 - DNA, 402 bp, Enterobacter aerogenes
atgaaccgacatacacaaatccgccaggtcgtactggcacgccttcgggaacagtgtggagacagcgccacgttttttgacgggcttccggcatttgttgatgcgcaggaactgcccgccgtggcggtgtggctgagtgatgctcagtacaccggaaaaatgacggatgaagatgactggcaggctgttctgcatattgctgtcttcatccgggcacaggcaccggattcagagctggatatgtggatggagagcaccattttcccggccctgaatgatgtaccggcactttccggactcatcgacaccctgatcccactcggttttaactatcaacgtgataatgagatggccacctgggcgatggcggaaatcacgtaccagatcacgtacacgaattaa

SEQ ID NO: 96320 - DNA, 744 bp, Enterobacter aerogenes
atgaccacaccaaatccactggcaaagacgaaaggtgcggggacgacgttctggatgtataccggcaacggcgacgcatttgcgaaccctttgtcggacactgactggctgcgtcttgcgatggtgaaggatctgcaacctggcgaaatgaccgctgatgcagaagatgatacttatctcgatgatgaagatgcagactggaaaacgacaacccaggggcagaaatcagtcggtgatacttcggcgacgctggcctggcgtccgggtgacagcgggcagaaaaaactggttcagttgttcgactccggtgaagtctgcgcgtttcgtatcaaatatcccaacggtactgttgatgttttccgtggctggctgagttcactgggtaaaaccattgcctcaaaagacgtgatgacccgcactgtgaaaatcagcggtgtggggcgtccgtatctggcagaggaaggcactgaaacagtgagcgttaccgggctgacggtggcaccggcatctgccagtgtaaaagtgggagcaaccaccacgctgacctttacagtaaaacctgacggagccagtgacaaagcgatcagtgtgcattcgacagatccacagactgccacggtgaccctgaacgggcttgtggccacggtgaaaggcgtgaagcagggcagtgtcagcattgtgggcatgacttctgacggcgattttgtggctgtggctgcggtggctgtcagcgccgcaggttaa

SEQ ID NO: 96321 - DNA, 387 bp, Enterobacter aerogenes
atgtttctgaaacagggcacgtttaattatgaaaagcagtccgtggtgctcagtgagctgtccgggctgcagagaattgaatatctggcgtttgttcagcagcgaacggcaaagtttgatgccgaagagggagaactgccggaggctgaacgacagattgcttttctgcggatggggatggatatcaatgcctggctggtttcccgctcactgtggaatgcggaacagtctcaggatgttgagacgctttgcgcatccgttattacaacatggtcgtatgatgccctgggagcgggggcggagatggttctgtcgctgagcagtatgggagccattgagaatgccggggatttggagcatgaggtgctgacgccggaaaagtcctga

SEQ ID NO: 96322 - DNA, 330 bp, Enterobacter aerogenes
atgcagtttgtcatgcggcttgcccgggagttccggcgggcagactggcggcggatgctgtcggaaatgtcggccactgagcttggtgagtggggcgattatttccggatgcagagcttcagtgatgtgtggatggatgcgcagtttgcctcgctgaaggcattgatcgtgagaatggtgtccggcagcagtgatgctgcggtggctgatttcagccttttaccggaagagaacgggataccggagcgaacggacgaagaactgatgcatcttggggaaggtatttccggaggtgtgcgttatggaccagatagccaacctggtcattga

SEQ ID NO: 96323 - DNA, 3066 bp, Enterobacter aerogenes
atggaccagatagccaacctggtcattgatttggggattgatgcggcagagtttaaaaatgaaattccccgtatcaaaaaccttctgaatggtgcagccagcgatgcagaacggtcttctgcccgtatgcagcgttttatggagcgtcagactcaggccgcccggcagacaatgcaggcggcttcttcggctgcaacagccgcatccgtccatgcgcagacggtggagaagagcgcacaggctcatgaacgcatggcccgcgaggtggagcaaacccgccagcgtatggaggcactgagccagaaaatgcgcgaggaacaggcgcaggccatggctctggcggaggctcaggataaagcggctgccgcgttttatcgtcagattgacagtgtgaaacaggccagtgcggggttgcaggaattacagcgtattcagcagcagatccgacaggccagaaacagtggcgggattggtcagcaggattatctggcgctgatttctgaggttacggcgaaaacccgtgttcttacgcaggctgaggcagaggctacccgacagaaagtggcgtttatccgtcagcttaaagagcaggcaacccgccagaatctttcttcttctgagttgcttcgtgccagggctgcccagctgggggtaagcagtgctgcagaagtgtatatccgcaaaatggagcgggcaggaaaagccacgcattcgctgggtctgaaaagtgcagcggcccgccaggagataggcgttctgataggtgaactggcccgcggcaatttaggggcgctgaggggatccgggataacgctggctaaccgtgccggatggatagacacactgatgtcaccgaaaggcatgatgctgggcggggttattggcggtattaccgcggccgtctatggtctgggtaaagcctggtatgacggtcagaaggagggggaagaatttaaccgccagctgtcgctgacggggcattatgccggagtcactgccgggcagctgtggacgctcagtcgtgctatttccgggaatggtatcacgcaacatgctgcagccggtgcgctggctcaggtggtggggagtggtgcatttcgtggaaacgatatcggtatggtggcgagagctgccgcacagatggagcgatcggttggccagtcggtcagcgataccataaatcagtttaagcggctgaaggatgatcctgtaaatgccgcgaagtctctggacaatgagctgcattttcttactgccactcagcttgagcagatacgcgtccttggagagcaggggcggtccagtgatgcggcacggatagccatgtctgcactggcagaggaaaccggacggcgtactgcggatattgataataacctcaatgcgctgggcagtacgctgcaaaccttgtctgactggtggaagcagttctgggatgcggccatgaatattggtcgtgaagattcgctggatgcgcagattgccactttgcaggagaaagtgtcgcgggcgaaaagactcccctggacggcatcatcttctcaggttgagtacgatcagcagcgtcttaacgagcttcaggagaaaaaacgccagaaggatttgcaggatgcaaaagagcaggcagagcggaattatcaggagcaacagaaacgccgtaatgctgaaaatgctgcactgaaccggatgaatgaaacggaagcagcacgacatcagcgtgaaattgcgcgtattaatgccatgcagtacgccgatcaggctgtcagggatgcggcgatacaacgtgaaaatgaacgttacgagaaagccctggcatccggtaagaaaaaaacacgcgaaacccgtaatgatgaggccacccggttattgctgcagtacagtcagcaacaggcacaggtggaaggacagattgctgctgccagacagtcagcaggcattgccacggaaaggatgacagaagcgcataaacagcttctggctctgcagcagcgcatcagcgacctggacgggaaaaaactgacggcagatgaaaagagtgtgctggcccgtaaagatgaactgattcaggcactgacgctgctggatgtaaaacagcaggagcttcagaaacagacggcactcaacgagctgaagaaaaaaacaattcagctgaccagtcaactgactgaagaagagcgcgctcagcgtcagcaacatgacctggatatcgccacggtgggtatgggtgatcagcagcggcagcgatatcaggtacaactgagtcttcgccagaaataccagcaacagctggagcagttgaggcgggatagtgagcagaaagggacatataacacggatgactacagaaaggccgagcaggcgctgacggagagcctgaaccgacaactgaatgagaatcgccgttactggcaacagcttgaagttgtgcagggtaactggaaaaacggagtcctgcgtgcatttcaggattttaccgtggatgcagataatacggcaggaacagcagaacaggtgttctcgtcagccttcagcaacatgggaaatggcctggcaacttttgtcactaccggcaaactcaatttcaaatccttcacctcttctgtgctgtcagatatggcgaaaatcctggcgcaggcaaccatgatgaaatcgataaaagggattggcagtgtactgggatttgatctcagcagcctttccctgaatgccaatggggggatttatcagtctgctgatttgagtcgctacagtggcacggtggttaaccgtccgacgttttttgcttttgcaaaaggcgcgggtgtgatgggggaagctggacctgaagccattctgccactgcgtcgtggtgctgacggtaagctgggggttgtggcggatattggtggttcaggtatggcgatgtttgccccgcagtacaacatcgagatcaataacgatggcacgaacgggcagataggtccggctgccctgaaggtggtttatgaccttgggaaaaaagcggcagcggactttatgcaacagcaggcccgtgatggtggtcggttaagtggagcatatcggtaa

SEQ ID NO: 96324 - DNA, 330 bp, Enterobacter aerogenes; identical to SEQ ID NO: 7611

SEQ ID NO: 96325 - DNA, 699 bp, Enterobacter aerogenes
atgcaggatattccacaggaaacacatcatgagacgacacgccttactcagtcagccctggtggtgctctgggaaatcgatctgacagaggtcggtggtgaacgttattttttctgtaatgagcagaacgaaaaaggtgagccggtcacctggcaggggcggcagtatcaggcataccccattcaggggacaggatttgaactgaacggcaagggcagtgctgcccgtccgacactgacggtttctaacctgcacggtatggtcaccggtatggcagaagatctgcagagtctggtcggcggaacggtggtccggcgtaaggtttacgcccgttttctagatgcggtgaacttcgtcaacggaaacagtgatgccgacccggagcaggaggtgatcagcagctggcgcatcgagcagtgcagtgaactgagtgcggtcagtgcttcttttgtactgtccacgccgacggaaacggatggcgctgtttttccggggcgtatcatgctggccaacacctgcacctggacctatcgcggtgatgagtgcggttataacggtccggctgtcgcggatgaatatgaccagccgacgtccgatatcacgaaggataaatgcagcaaatgcctgagcggctgtaagtttcgcaataacgtcggcaactttggcggttacctttccattaacaaactttcgcagtaa

SEQ ID NO: 96326 - DNA, 744 bp, Enterobacter aerogenes
atgacacagacagaatcagcgattctggcgcacgcccggcgatgtgcgccagcggagtcgtgcggcttcgtggtgagaacgccggaaggggaaagatattttccctgcgtgaatatctccggtgagccggaggcgtatttccggatgtcgccggaggactggctgcgggcagagatgcagggtgagattgtggcgctggtccacagccaccccggtggtctgccctggctgagtgaggctgacaggcggctgcaggtgcagagcgatttgccttggtggctggtctgccggggtgagattcataaattccgctgtgtgccgcatcttaccgggcggcgctttgagcacggggtgacggactgttacacgctgttccgggatgcttatcatctggcggggattgagatgccggactttcatcgtgaggatgactggtggtgtaacggccagaatctctatctggataatctggaggccacagggctgtatcaggtgccgttgtcagcggcgcagccgggcgatgtgctgctgtgctgttttggttcatcggtgccgaatcatgccgccatttactgcggcgacggtgagctgttgcaccatattcctgaacaactgagcaaacgagagaggtataccgacaaatggcagcgacgcacacactccctctggcgtcaccgggcatggcacgcatctgcctttacggggatttacaacgatttggccgccgcatcgaccttcgtgtga

SEQ ID NO: 96327 - DNA, 549 bp, Enterobacter aerogenes; identical to SEQ ID NO: 21430

SEQ ID NO: 96328 - DNA, 3480 bp, Enterobacter aerogenes
atgggtaaaggcagcagtaaggggcataccccgcgcgaagcgaaggacaacctgaagtccacgcagttgctgagtgtgatcgatgccatcagcgaagggccggttgaaggtccggtggatgggttaaaaagcgtgctgctgaacagtacgccggtgctggacagtgaggggaataccaatatctccggtgtcacggtggtgttccgggcaggtgagcaggagcagacaccgccggagggatttgaatcctccggctccgagacggtgctgggtacggaagtgaagtacgacacgccgattacccggaccatcacgtctgcaaacatcgaccgtctgcgctttaccttcggtgtgcaggcactggtggaaaccacctcaaagggggaccggaatccgtcggaagtccgcctgctggttcagatacagcgtaacggtggctgggtgacggaaaaagacatcaccattaaaggcaaaaccacctcgcagtatctggcctcggtggtggtggataacctgccgccgcgcccgtttaatatccggatgcgcaggatgacgccggacagcaccacagaccagctgcagaacaaaacgctctggtcgtcatacaccgaaatcatcgatgtgaaacagtgctacccgaacacggcactggtcggcgtgcaggtggactcggaacagttcggcagccagcaggtgagccgtaattatcatctgcgcgggcgcattctgcaggtgccgtcgaactataacccgcagacgcggcaatacagcggtatctgggacggaacgtttaagccggcatacagcaacaacatggcctggtgtctgtgggatatgctgacccatccgcgctacggcatggggaaacgtcttggtgcagcagatgtggataaatgggcgctgtatgtcatcggccagaattgcgaccagtcggtgcctgacggcttcggcggcacggagccgcgcatcacctgtaatgcttacctgaccacgcagcgtaaggcgtgggatgttctcagcgatttctgctcggcgatgcgctgtatgccggtatggaacgggcagacgctgacgttcgtgcaggaccgaccgtcggataaggtgtggacctataaccgcagtaatgtggtgatgccggatgatggcgcgccgttccgctacagcttcagcgccctgaaggaccgccataatgccgttgaggtgaactggattgacccggataacggctgggaaacggcaacagagcttgtggaggacacgcaggccattgcccgttacggtcgtaacgtcacgaagatggatgcctttggctgtaccagtcgggggcaggcacaccgcgccgggctgtggctgattaaaacagaactgctggaaacgcagaccgtggatttcagcgtcggcgcagaagggcttcgccatgtaccgggcgatgttattgaaatctgtgatgatgactatgccggtatcagcaccggtggtcgtatgctggcggtgaacagccagacccggacgctgacgctcgaccgtgaaatcacgctgccatcctccggtaccacgctgataagcctggttgacggaagtggcaatccggtcagcgtggaggttcagtccgtcaccgacggcgtgaaggtaaaagtgagccgtgttcctgacggtgttgctgaatacagcgtgtgggggctgaagctgccgacgctgcgccagcgcctgttccgctgcgtgagtatccgtgagaacgacgacggcacgtatgccatcaccgccgtgcagcatgtaccggaaaaagaggccatcgtggataacggggcgcactttgacggcgaccagagcggcacggtgaatggtgtcacgccgccagcggtgcagcacctgaccgccgaagtcaccgcagacagcggggaataccaggtgctggcgcgctgggacacgccgaaggtggtgaagggcgtgagcttcctgctccgtctgaccgtggcagcggacgacggcagtgagcggctggtcagcacggccaggacgacggaaaccacataccgcttcaggcaactggcgctggggaactacaggctgacagtccgggcagtaaatgcgtgggggcagcagggcgatccggcgtcggtatcgttccggattgccgcaccggcagcgccgtcgcggattgagctgacgccgggctattttcagataactgccacgccgcatcttgcggtttatgatccgacggtacagtttgagttctggttctcggaaacgcggattaccgatatcaggcaggttgaaaccacagcccgctatcttggcacggcgctgtactggatagccgccagtatcaatatcaaaccgggccatgattattatttttacatccgcagtgtgaacactgttggcaaatcggcatttgtggaggctgttggccagccgagtgatgatgcatccggctatctggattttttcaaaggagagatagggaaaagccatctggctcaggagctgtggacgcagattgataacggtcagcttgcgcctgacctggctgaaatcaggacgtccattacggatgtcagcaatgaaatcacgcagaccgtcaataagaaactggaagaccagagtgcggcaattcagcagatacagaaggttcaggttgatacaaataataacctgaacagcatgtgggctgtgaagctgcagcagatgcaggacggacgcctttatatcgcgggtattggtgccggtattgagaatacccctgacggtatgcagagtcaggtgctgctggcggcggacaggattgcgatgattaatcctgcgaatggcaacacaaagccgatgtttgttggtcagggcgatcagatatttatgaatgaagtgttcctgaaacgcctgacggctcccaccattaccagcggcggtaatcctccggcattttccctgacaccggacgggcggctgacggcaaaaaatgccgatatcagcggtaacgtgaatgcgaactccgggacgctcaacaacgtcacgattaacgagaactgccgggttctgggaaaactgtccgcgaaccagattgaaggcgatctcgttaaaacagtgggcaaagctttcccccgtgactcccgtgcaccggaacggtggccatcaggggccattaccgtcagggtttatgacgatcagccgtttgaccggcaaattgttattccagcggtggctttctgcggtgccagacatgagcgggagaatagcgatacttattcgtcatgccgcctgatagtgaagaaaaacggggctgaaatttataaccgaacggctctggataatactctgatttacacgggtgttattgatatgcctgcaggcagtggtgtaatgacactggagttttctgtatcagcatggtgggtaaatggttggtatcccacagcaagtatcagcgatttgctggttgtggtgatgaagaaagccactgcaggcatcagtatcagctga

SEQ ID NO: 96329 - DNA, 600 bp, Enterobacter aerogenes
atgcgtaaattatgtgctgttattctgtccgcagtagtctggctggttgccgctggtacgccagcgagcgcagcagagcatcagtccacactaagcgccgggtatcttcaggcccatactgatatgccaggcagtgatgacctgaagggcattaacgtgaaataccgttatgaatttacggacacgctggggctggtgacgtcattcagttatgccaatgccaaagatgagcaaaaaacgcattacagcgatacccgctggcatgaagattccgtgcgtaaccgctggttcagcatgatggcggggccatctgtacgcgtgaatgaatggttcagtgcttatgcgatggcaggtgtggcttacagccgtgtttcgacgttctccggggattatctccgcgtaactgacaacaaggggaaaacgcacgatgtgctgaccggaagtgatgacgatcgccacagcaacacgtctctggcgtggggagctggcgtgcagtttaacccgaccgaatccgtggccattgatattgcttatgaaggctccggcagtggcgactggcgcactgacggtttcatcgtgggtgtcggttataagttctga

SEQ ID NO: 96330 - DNA, 2379 bp, Enterobacter aerogenes
atggcagcagtaaaaatctcaggtgtgctgaaagatggtgcgggaaaaccaatacagaactgcactattcaactgaaggcaaagcgtaacagcaccacggtactggtgaacacggtggcctctgaaaatccggatgaagccgggcgttacagcatggatgttgagtatggtcagtacagcgtcaccctgctggttgaaggttttccgccttcacatgccgggaccattaccgtctatgaaggttccagaccaggtacgctgaatgattttctcggtgccatgacggaagatgatgtcatgccggaggcactgcgtcgttttgaggcaatggtggaagaagcggcacgcaacgccgaagccgcctctcagagcgcagcagcggcaaagaaatccgaaactgcagcggcatcatcgaagaacgcggcgaaaacctcagaaacgaatgcagctaatagtgcacaggcggcagcgacctcacagacttcatcagcaaactccgcgacagcagccaaaaaatcagaaaccaacgcgaaaaatagcgagacagccgcaaagacgagcgaaaccaacgcaaagtccagccagacggcagcgaagaccagcgaaacgaatgccaaagccagtgaaactgcggcaaaaaacagccaggttgcagcagcccaaagcgagagcgcggcagccggttctgcgacttcagcaactggatcagcaactgctgcggctaacagccagaaagctgcgaagacgagtgaaactaacgcaaagtccagccagacggcagcgaagaccagcgaaacgaatgccaaagccagtgaaactgcggcgaaaagcagtcaggatgcagcggcccaaagcgagagtgccgcagccagttctgcaagtgcggcggcttcttctgccactgcatcagccaacagtcaaaaagctgcaaaaaccagtgaaaccaacgcaaaggcgagcgagactgcggcggataactcagcgaaagcatcggcagcaagccagacggcagctaaagcaagcgaagacgcagccagggagtacgcaagccaggcagcagagccgtataaatatgtcttacagccgcttcctgatgtgtggataccgtttaacgattcactggatatgattacgggcttttcgccatcatataaaaaaattgttattggcgacgatgaaataacaatgcctggcgacaagattgtaaagtttaaacgcgcatcgaaagcaacctatattaataaatctggtgtactgacagaggctgccattgacgagccgcgatttgaacgtgatggcctgcttattgaggggcaaagaactaatcttctgcttaattcaacaaatccatctaaatggaataagtcaggcaatctggaactcacagaaatatccacggattcttttaattttacttatgggagatttactgtaaaagatactcttattgatcagacaagtgcgattaatatcgtaacggtttctggcagtaaaggatttgatgtcacaggtgatgaaaaatatgtgaccatttcatgccgtgtcagaagtgatgttgaaaatataaggtgtcgtttaagatttgaacatcatgatggttctacttacacttttttgggagatgcttacctcaatttatcaacacttgtaattgataagactggtggtgcagcaaatcgtattattgcaaaagctgtaaaagatgaggctactggttggattttctatcaggctacaattaatgcactagatacagagagcatgattggtgcgatggttcaatatgctccagtaaaaggttcaggcacagcatctggagactatctggatatcgcaactccacaagtggaaggtggatcaagtgcttcgtcatttattgtaactgatataactgcaagcactcgcgcaagcgatatggtgacagtcccaatcaagaataacctttataatcttccttttacagttctttgtgaggtacataagaactggtataaaacgccaaatgtagcaccgcgtgtttttgataccggcggtcatcaaaccggagcggctattattcttggcttcggtcgttcaacagattacgacggatttccttattgcgatataggtttggctaacagacgggtaaacgaaaacgcatcgcttgaaaaaatggttatggggatgcgtgtaaagtcagatcagtctacgtgctcagtaagtaacgggcgtatatccagcgaaaagaaagccacatggtcctatattcagaacaccgcaattatccgtattggaggccagactacagccgggttgcgtcatttatttggtcatgtcaggaatttcagaatatggcacaaggcattgactgatgctcaggtgggggagtcaatctaa

SEQ ID NO: 96331 - DNA, 282 bp, Enterobacter aerogenes; identical to SEQ ID NO: 12320

SEQ ID NO: 96332 - DNA, 1041 bp, Enterobacter aerogenes
atggctacatcgacagtaattcctgaagacatcaaaacgctaaaatccgacgttagcaaattaaaaaacgatcaaggaagctacgcaacaaaatcatatgtagacaataaaacaacatggaatagttattgcaatgtaatctatgatcaaaagacattgccgaccactggaactatatttagcggtaagattcacttgtcaaataagacaggagaaaccgaaaacgcttatagtgagatgtacactagaaaaaatattgacggtacaaaagatacaatgacaaggattgtcacacacaatggaacaaaaggtatcttttgggattttagcgatctttacggtggaacattaatttttccaggcagtgatggttaccttaagatggggaactgtctcatgtcgtatggtgtgcggggaagtaacgcgcttattaagtttgactgcacagacacattacaaatcaaatatgccaatcatgggtcaaccatgacaatcaacacacagggaaccgctcattctggcgctactactagtttgtggggtaactctacccgtccggttgtatatgaagttggtgctgatggtggcgcttatatgttctatgcgcagaaaaataccgataacacctatatgttaagcgttaatggtgcatgtcatgccaccgcatttaaccagcattccgaccgggatctgaaagacaacattcaggtgatcgataatgcaaccgaccgcatccgtaaaatgaacggctatacatacacgcttaaagaaaacggtatgccctatgctggtgtcattgcacaggaagctctggaagcaatcccagaagttgtaggttccgcaatgaaatatcaggacggtgcaagcggatcggaaggtgaagaaggtgaacgttattacacagtagattattctggtgttactggcttgcttgttcaggtagccagagagtcagacgacagaataacagcactggaagaagaaaacgcagaattaagacaaagattatctgcaattgaggcggcgcttgcgtctaaataa

SEQ ID NO: 96333 - DNA, 288 bp, Enterobacter aerogenes; identical to SEQ ID NO: 12322

SEQ ID NO: 96334 - DNA, 249 bp, Enterobacter aerogenes
atgcgtattgagatctgcatagccaaagaaaaaatgactaaaatgccaaacggtgctgtggatgcgttaaaggaagaattaacccgacgcatcagtaaacgttatgacgatgtagaggtgatcgtaaaagccaccagcaacgatggcctttctgttacgcgcaccgccgataaagattcagctaaaacttttgttcaggaaactctgaaagatacctgggagtctgctgacgagtggtttgttcactaa

SEQ ID NO: 96335 - DNA, 1098 bp, Enterobacter aerogenes
atggcgtactataacatagagaaacgactaaaatccgatggcacaccacgctatcgctgtaatgtgattatcaaagaaaaaggtgttatcacttacagggaaagcaaaacattccctaaacatgctcatgccaaaacatggggaacacagaaagtgatggaattagatctatatggcattccatcatcaaatccagttgacggacttacagtccgtgacttactacacaaatatttaaatgacccaaatgccggaggtaaagcaggccgtactaaaagatatgtgctggaactgcttatggatagtgacatctccgcgatcaaactatctgaactgacagaaaatgacgtaattgaacattgcaggctaagaaacaacgctggtgcaggtccagcaacagccagccacgatgttagttatcttggcagtgttctggatgcggccaaacctgtatacggaattaattacacatcaaacccggcgaaaagcgctcgcccatatctacttaaacttggtttgattggtaaatcaaaccgtcggaatcgtagaccagcatctgatgaactggacatgctcattgaaggccttcaacaacgatctactcataaatgctcaaaaattccgttcgttgatatcctcaaattttctgtgtggtcctgtatgcggatcggagaagtatgccggttacgatgggaagatctcgaccaggaacaaaaatctatactcgtaagagacaggaaagatccacgcaaaaaggaaggcaaccacatgaaagtagccttgcttggggaagcctgggatatcgtccaacgacagcccaaaaaatcggaattcatttttccatataacagcacttctgttactgcaggatttcagagggtaagaagcaaattaggtattaaagatctgcgataccatgatttgcgtagagaaggggcaagtcgcttatttgaggctggttttagtattgaggaagtcgctcaggttacagggcatcgttcattaaacgtgctatggcaggtatataccgaactgtatccgaaatctttacataatcgttttgaagagctccaaaggagcagaaataagacctcttga

SEQ ID NO: 96336 - DNA, 1137 bp, Enterobacter aerogenes
atgaaaagaaaactttgctactttgttaactctgcctggtatttcgaactccattgggttgatagaggggttgcagcaattaaaagtggttatgaagtatatgtgattgctaacttttctgatgctgcaacagttcaaagattgagttctttgggctttcactgcatcaatacttatatcgatgagaaaaatattaatccattagtttttataaaagatttcttggtagctaaaaaaattcttgataaagtaaaaccagacatattacattgtataacaataaagcctggggtcatcagttgcctatgggctaaatataataatgttggtttggtttatagttttgttggcttagggcgtgtattcgaaagtaatagaattatttttagaactttaaaagtaatagttacaaaattatatcgctatctcttcaataatataaattataaattggtgtttgaacaccgaaacgatcagcataaaatgctatcgttgctgcacttacctaaaaataacagcattgtaattgatggtgcaggcatagatatatcttattttaattttaaaacccaaaaaaaagatagcccggcaactattttttttgctggacgaatgcttaaaagcaaaggtttgaatgatctgatccaagcaaaaaatttattaaagcaacggggaatcgattgtattctaaaagtggctggaatcttggtagataatgatgaagatgccattagtcgtaaacaaattcagcaatggcaagatcaagatgatatcgaatggttgggaactcgaacagatatcaaagaattgcttgaagcggcgcatgttgttgcattaccatcactttacccagaaggaatcccacgaatattattagaagccggggccgtaggtcggccttgtgtcgtctatgataatgatggttgcaatgctttgatagtagacaactataatggattcgttgtagagcgaagcaatgtcagcaaactggctgataaaattagtttattgatcacaaatcccgatgagcgagatcgcatggggaaaaatgccaggcaaaatatcgaagaacgttttacgtcaacattggttattgagcaaacgctcaaagtctatcaggaaatatataataaataa

SEQ ID NO: 96337 - DNA, 1383 bp, Enterobacter aerogenes
atggaacaggttgaactagtaccagcaaaacgattctttgttgagatgttgactcgcgacattgaactagtggatgcgatattggatttgattgataatagtcttgatggtgccatgagattattaaaagggaataacaggggggaatcaccatataagggtttcaaagttgatatatcctttagccctgaacatttcaatattaccgataactgcggtggcattcctagagatgtggcaataaaatctgcatttagaatgggacgacatgataatgatagagataaggatcttcccactgttggcgtatatggtattggaatgaaaagagctattttcaaaatgggggaggaatcgactgtagcttgtaagactgacgagggtagttataaggttgaaataaccagtgagtggatgaaagacgataccaactggcatcttccgcttaatgataccgatgatcaaaataggtcaaatggtacgattattaatgtgtctgaaatcagagaaggggtgagcttacaattcggaagccaagatttcattgatgatttgcataaggttatatcaactcacttttcatatataatagcgaaaggtctagaaataaatgttaatggcgctttgattccccctataatttcaatcacaaaatttgctaaagatttttctaataaaaaagatggcattgctccttatatatatgaaaatactattgatggagttaatgttgatgtggcaattggtttttatcgttcattaagtacagaaaaagaagaacaggacgaacaggatggaaaatctgtcagtgagagggctggtatcactattatatgtaatgatcgtgttgttcttcacaatgataaaagccatattactgggtggggagaagctggtgttcctcggtatcatacacaattcatagcaatatctggggtcgttgtattccagtctaataatccagcaaaattaccgttaaagacaacaaaaagaggtgtggatagcagcacacaaatatattctatcgtcaaagaaaaaattagagaaggcattaaaacatttaccgattttactaatcgatggaaaaaagcttctaaagaagatttatcattatattttcgaagtgaggagactcagtcagcacctagtgtaactttatcaggaaaagttaagtctgatgagtggaaaaatgttaggcgggatggagggcgtgtatttaaaccaagtcttcccgtgccaaaagaaaccgatcccgttgagagagttatttttacaaaaaagaaaagtgaaataatagctgtctctgaatacatattcgaagaaattaggcctacctctcaggttggtgaatattgctttgaccagatattgaaaaaggtgtga

SEQ ID NO: 96338 - DNA, 987 bp, Enterobacter aerogenes
atgtccacgggaacttcgataccataccatttaaggccaaacaaggccgttgaaagaggtctgtttattcaagcgttaagacgcattaataaatatgttaatatctctgattatcgatacataggtttcggtggaccgttcatggaagactttaaaatattacatcaagaactaagaatatcggatatgatatgtatagaaaaagatgaaaatactcgcataagacaaaaatttaataagccgttgtcatgtattgatttttatgaaagagcttgttcctctactgattttgttaatgcgcatgattttgataggcaatctattgtttggttagattttatttctttcaatgatcttaacaagcaactttctgatgttgttcgtttaatcggtaagttatcacatggggacatattcaaagtgactttgaatgctcactcgccaaacttgggtaagcctgagggagatgatgatgtgatggagtatcgtttaaatagattcaaagagttaattactgaggaatatgagtcacatgaacttaatgctgagttgatgcatgctaagcaatttccatatgctgtgttggcatctcttaaaagagcgatatcaaaaggtatggcatcagctgtagatttacaagttgtaccaattaatgcttttgtatatgaggatggtcagaagatgcttactgcaatgggcattgttttgaaaaaagatcagatcgcagggtttaatgagaaaacatctatttcatcatgggcttattattcggaagggtgggagcaaataaaaaatattagtcttcctgcgctttcttctagagaacgccttttagtagagcaaatgttacctggcagcaattatgatgaaattagggaaacgttgggtttttatcccgcggaaaaggaggcgttagcaaaggaacaaatggaaaattttatcagctattacagaacttttccgtggtttggaaaatttactctctaa

SEQ ID NO: 96339 - DNA, 1758 bp, Enterobacter aerogenes
atgccgggaaattcaattattgagcgtatatcaattgatacaggtgttagctctacttttcttgaggaagctctaacaaaagatgttactactctcgaagccatttttgatttagttgataactcaatagatgctgcaagagactggttaatagactctgatgagtctactagaggaaaagataatttaccaacggattactcagcattttttgtttgcattcgtatagatgacattagcattcgtgttttagataattgttcaggtattgacagagagactctggctaaccgagctctttacacaaacaagccatcaacgcatgaatatgggataggtttgtatggtataggcttaaaacgctcattattaaaaatgggtaccgatttttcattttctgttgataatggaaaagaagagtttaaatcgcgatttaataataaaggaatcggaggtggagttaaggataaagtattcgccgatgtattcccaactaagggaagaaagaaatctttatttaatgtatctaatttaaaacgcgaaatacagaatgacttacacaatcccagatggtttgaaaatgcagccagggagttttctctgagatatgcattatatatacacaaaggattcaaaattatacttcatcatgcaaagaatgggataagaaaacaaattgaaggcattgctcctaatctgagaacagaatgcaaattccctccaacaagagaagtaataaaatttgatggaattgaggtaataattgaaaccggtattcattttgattacaggttcccaggtgaaagtgaccatgatttatctaagaatagaaagctgacagacttttttggtatttattttgcttgtaatgatcgtgtaatagtttcggctagtactgaaagaatccatggatggcgtacaaagtggcactcggaatataatggttatgtttgttgggtaaaatttgtatctaaaaatgctgcattactcccatggaatacagctaaaacagctctcaggacagatagccccttatttttagccgtcagagacagaattcagcctattgcagataactataggtcggccataaaacaacgctattcatctaataataaaaaagatagtccaatatctcatataaaatcaactgacaagccagttagtgctcaacccatcagtgaaacaggcattaaagaaacaataaaaagaaataaaattatatctagagtacccactcctcccaaatcacggccaaatttagacctcccaagaaacagagatattttcgttgactgggaaagaaatacgattgtcgtacccacgtatagaaataaagaataccacatattttgtgaaattagccaactcaactcatatgaaaaccctataagttgcgttgtaatgctccgagtgtttcttgaaacaacagcgaaagagacaatgaagtgtctgggttctaattggaacaataattctcttgcaaaaaacactgcgtatctagctttaagattaaataaaaacaactacattactgacagtgtcagattattaattgaaagatatgggcgtactgtagatgaacctattctttcaattaacaatatacagtccttggttcattctgttgattttaatattgataaaactcttgttaatagatactgggatgatttagaaccatttctttcagcgtgttggaaaattatagtagatatagataattcacctgaattgaaaaacaccttattaaagtaa

SEQ ID NO: 96340 - DNA, 1152 bp, Enterobacter aerogenes
atgcacaaagcccctaatgtgattgacctttttagtggatgtggtggatttggccttggtgcaaaactggctggtttcaatgtgatcgcagcgattgatatagattcaacgttgcaatctgcatacggcctaaatttccctaaaacacagcttatcaacgcagacatctcgacaatgagacaagcagagtggtctcaaataattggtgaccgcgaagttgatggaatcatcggtggcccaccatgccaaggttattcccgcatgggacattcagacgccaatgatccaaggcgttctctactacgtcatttttttagaactattaatattattaggcctaaattttttgtaatggagaatgtagaaggtctaatggacagtaagaatgtttacgaattaaaatcagcacttaaaactttagacagaaattataaagttttagaaccaatgatacttgatgcttcggatttcggtgcacctactaaacgaaaaagagtagtagtaattggctttgttgatgagggtcttgatttatttttaacacaaagtgcttttgcgccaagaaacataaaaaaaacctgtgttagagatgctatttatgacctttgttctccaatatcaaaagctaaaagtgatgattctcttgactatggttggtctggttataaaactaattttgaattatcaacttatgctaaagaaatgcgaaaaatgccaccatctgggcttggctgcaaacttgcgttggataaatttgcagcaggacaagtaagtggttttttcaatacaatacattctttaaaagttaaagaacgctactcttcgacagtaccaggcacaagcgatcctattagtaaatcaaagagattaacttgggaaggtttatgtccaacattaagagcaggcaccggtgcagataaaggtagtcatcaagctgttcgtccactccaccctcaagaagggcgagttataactgtaagagaggcggctcgcctgcaaggatttcctgattggtttatatttcaccaagcaaagtggcacagtttcaggatgataggaaatagtgtctctccaattatgtccaagcatataatgggagtactatttgaagctttgaaagtaaaagacactaagaataaaaaggttggttaa

SEQ ID NO: 96341 - DNA, 945 bp, Enterobacter aerogenes
atgacgatttccctgcatagccagactagcgcccctaacaccgcagcgacgaccagcgtatccccgctggacccgtcaggctcctcaaaaacgaaattttctaaaaccagaacggacatttatcagaccgttaccgacaacatcattgcagcacttgaagcaggtgtaaatccgtggtcctgtccgtggaaacgcgtatcgggcatgtctggtctgccatctaattacgcaaccggagcagcctacagcggtatgaatatcatgctgttatggtgcagcgcatctaaacagggtttcagcgattcacgctggatgacctacaaacaggcacaggcagcaggtggacaggttcgcaagggtgagcatggcacaacagccattttctacactacgctggagaaggaaaacgacgccggagacgttgaacaaatcccgatgctgaaaaccttcaccgtgtttaacgttcagcaaatcgacggtttgcccctgacaactgaaacagccagcccagaagctacatttaacccgttgccgcaggctgagaacctgttacggaagagtggcgcaaacatcatcgagaaaggacaaaacgcctttttcagcccatcaactgatgaagtctgtttaccggagcgccatctgttttcagatgcggcgaatttctacgctaccggcctgcatgagttggttcactggagcgggggtaaaaaacgcctgaatcgtgaaatgaaagggaagtttggcagtgcggattatgcagaggaagaacttgtcgcggagctgggaagtgcctttctgatggcgaatctgggaattgagggagaggtgcaacatgaaagctatattgcttcctggctgaaagcgctgaaaaacgacaagcgttatattttcaaagcggccagcgcagcctcaaaagcacatcgttacctgatggataaactctga

SEQ ID NO: 96342 - DNA, 747 bp, Enterobacter aerogenes
atgctgatttcgtcctttcacgagcgccagacgcgtaacaacgaaaaaataaaacaactgctgaacttcctgaaagaagaaacctacagtgattttaaaactctgatgctattatttggtttccgggatcataagtcgctttatttgctactggcaaaaacagagcgaatggggttaatacagaagtatgtgcttgaatcacgaacaatgaagatttcattatgggggatcaccagcgacgggctggcggtggtgttaaccccgaatgataaaatctttcctgcgcgctttgaaccatcaaaaatcaccggctggacgctggagcaccatcttgataaccaggccgccaggcttattctggagaaaaaaggtgcttcgggatggattaacggcgaccggaccacttttatcagccagtatcaggtgaaccatcgcccggacgggttactgaccctgcctgacggtaacgttattgccattgaaaccgagcgccgcctgaaaacccgggcccgttatcagtcgatcatggcaagccacctgctggcccgtacccgcaagcagtggatttacgttttttatgttgtgcccgatccacagaagaagcgtgcgcttgagctgctgtttgacagtatcaggcatgtcaacatcaaccatcagcacatcccgctggaagaacgccaccgtcgggtgtttcgcatttatacgtttgatgaactgaaacacatatcattgggcagctatacgtaa

SEQ ID NO: 96343 - DNA, 1860 bp, Enterobacter aerogenes
atgattataaataagcttgccgcttcactgtcaccgatagtgaacggaatgctgacgctgctcgcttttgtgcaacagcaacaactgatgctggcgttattagcggggctgacgatgccgttttttgcgtcgatgaaaagcgatgaacggcagaaagctccgttctggaaaaagctgattatcgctttttccctgttgtgttttatatctggcacaatggctccggtcgttatcggctcctttcagtggctttataaaatcagactcaccagtgataatacggtactggcgtggtcagtacggattgctttcactgtaaccgggattatttttcatattatgcttcgtcgggtattcacgccggaactggacagaattaagaaacgccttgttaaaaagaccacccttgaacgggaattacgtactgatgtccgcaccgtgaaatccctgctaccggaaactctgcattataacccgctggattatatcgacctgaataaaggaatctttactggcatggacagggagaatgaaccgatgtatctcccgttaaaggactggcagaaacaacacgcggacattattggcaccaccggagccggtaaaggggtcgcagccgggatattgctctaccagagcattctggccggtgaaggtgtctttgttatggaccccaaggatgatgaatgggctccacacctttaccgcaaagcctgcgaggatgcaggcaagccttttgccttaattgacctgcgaaaacagcaataccagttaaacctgattgaagatatcacgcccgatgaactggaagaattgtttgttgccggtttcagcctggcggaaaaaggccaggaatcagacttctatcgtattgatgaccgaaaagccgcgcgtatggccgcgcgatttgtcagtgataatccatcggcaactctccgtgatgtttataacggtgactacattcagagcattgccgaaaaaatcaaagcctttttcggcaagattgaggaactggcattactcaatgccattaactcaccagaaggcttttcgcttaagcacatatttgatgaaggcggctgctgttatgttatcggctccatgcgaaacagcaaaattattactgcccagcgtatgcttttggttcgcctttaccagttagcagaaagacgcgaccgtgtaactgacgtaccccgccccattgctgtttatctttccgaactgaaataccatttatccaggccagcgctggaaggtttaggtgcggcgcgggataaaggcgtgcatatcattatggaccaccagtccattgctgatttaaaagactgcccggcagatttaaaaggcgaggcggttgtcggcgctgtggtagaaaatgcaaaattcaagctggtataccgggttatggacccggatacggcggactggatagcgagaatgtcaggcatgatcctggtggatgatgaactccgcaaggctaagacggataatatgctgacagaaaccatcgacagtgagcgcacaatccgccaggccgaacgtttctttattgacagcaatatggtcctgaacctgcccgattttgtcagctttatctttacgacaaaaatgctacctactgcttcactgatttcaccgataaaggtcagaaagtgtcaactaaaaaacttttcggtttcccctgatattgccgcagcggcgacaccggtgaaaatcgcgctggattttggcgaggatgataaaccagccatacaggatgtgatgacaacgcacccgtctcatttcttcgacgaaaacgaaataaaaccggcaaacccgaaacctgatgatgaagaacacttctctccgctggaattttaa

SEQ ID NO: 96344 - DNA, 1020 bp, Enterobacter aerogenes
atgaacgctgaaaacctgtcactggattttatgaaaaaccggctgtttggtgattttcttgctcaggatggcctgacagaaattgctgttaaccggccgggtgagctgcatacaaaaattcggggaaaatggcaaaaacaggcatctcccatcacgttgcgtcagtgtcatgcttttgccagagcgctggcgtcctggcatgacgataatatcgacgatacatcacccatcctttctgcaacattaggatccggcgaacgtattcaggcgattattcccccggcctgcgaacgtaatacggtgtccattacgctgcgcaaaccttcgtttgagcagataacacatcagtcatggattgatgcaggattttatcaacgtgtggccgaccaggaaaaaactgaaagccaggataatgcactggtccggttatatcacagaggggatattccccggtttatggaaaaggcggtggaatacggcaaaacgatttttattgtgggtgaaaccggctccggcaaaaccacctatatgaaaacgctgctgcattatattccgctgcatctccggttgataacgattgaggataatcccgaaatccgtttttatcaccatgccaattatgtgcatcttttttacccggcggatgccggggataacgccattgtcacgccaggcaggctgatccgtgctaattatcgtatgaaccctgaccggatattactggcggaaattcgtgggcgggaagcgtgggacgcgctgaaaattattggttccgggcatgaagggttaatcacctctctacatgcgggcagcccggaagaatgtattgaaggcatcattgaccgctgctatgaaaaccccgactgccggaatattccttttgacgtgctgttacgcaaggtacttaaaagcattgatgtcatcgtcagcattgatatacacggcgatgtgcgccggatgcgcgacatttacttcaagccagttcatttaaatggcatgaaagagtcattcagaaaataa

SEQ ID NO: 96345 - DNA, 1317 bp, Enterobacter aerogenes
atgactgacagagctttcccggacgaaccggaaaaaaccaccgcagagcgggaagcggaagcccgtgaacgcgcccgtacggcaatggcgacgcagacgccggagcaaaaaacaccacccggccagccagaagtgacccgtttccgtaaggcgtccggtcaccgcacgctgatcgtcagcctgctgagtctggcgctggtgatcgccctcgcatccggcggcgatcgtcttctcagcgccctgaaaaggggcgatgagaaggaagccgacaccgcgccgccgccctccaccggggcggcgcagcatgagcgtaaaaatctgggcatggacagtaacccgtttggcctgttcggacagcgcaaacagcaaggcgcagacccggctagtcagaccgtcaccagcgcacccgccttgccagcagagccgcccgccctgaacaaagcggcagcactggcagacgggctgaacagcggcagtacaacggctggcggcaatgcccgcacgtcccgtagcgaaccgcgcaaccgcgcgggaatgtcggagagcccgccagtctccactgcgtacacgtcctgtcggtcggtactggtcagaggggcggatggccgcctgcgctgcccggatcccgccgcaccggaaaccgcgccggatacggctgacagcgacaatccgggcgtcgcccgtgtcaccggcgtaagacggctgggcctcgatcctgatctctatatcccggtggatcgttatattccctgttcgatgatgcggcgctttgtgtccgatgtcggcggccatatctcctgcctgattggggaggatgtctggagcgccagcaaccatgtgaagctgatcccggcgggaacggtcgcccgtggcgtctaccgcaccggggcactgcaacacgggcgcagccggatgtttgtgctgtggacggagctgcgcacgccagagcccggcagtctgcaaatcccgctcaccgatacgcaggccaccggcccgctcggcgaggcggggattgcgggctggatcgacagccatttctgggagcgtttcggcaatgccctgatgctgagtaccgtgcaggatgtggcggcggcggcatcagatgccgcaccgggtaaagaccgtaataccgactataccgaaaacacccgcgccgccacggcggaaatggcgaaaacgacgctggaaaacagcatcagtatcccgcccacgatgtacctgaaccagggtgatgtgatcggcatcatgaccggtacggatattgatttttcctctgtttatcaacttcgactgaaaaagaaatggtatgaacgctga

SEQ ID NO: 96346 - DNA, 891 bp, Enterobacter aerogenes
atgatgctgaaacacattctgctcctcacggggttactggcgtcatgcgtggcatggagcgcggcgacaccacgcggcagcgtgtatgacagccggatgcagaacgtcacgtacaacagccagaatgccacggtcgtccgtacccgccccggctacgtcaccatgctggtgtttgacgatgatgaaaccgttatcgatgcgcaggcgggatttcccaaaggctggaccgtgacgaaaagcgacaaccgggtgggcgtcagcccgaacccgattacccagccggtcacggacgccagcggcaacaacatcagtcaggtgtttctgccgacagagaaagactggaaaaccaacctgttcgtggtgacctcgaagcgcgattacagcctggagctgaacgtgctggtccgcgactcgcccgctcaggcctttgttatccgctaccactatcctgatgagcagcggaaaaaatcagctgccgccagcgccacccgccagcaacgacagcaggaagcactggaccggcagcggatagcggcagcattccggcaaccggccttgccgcggaactggcgttacagcaaacgagtggccgccggttccgccgccatcgccccggactttacctgggatgacggtcgttttgcgtatatcggtttttcccccacgaaaaccctgccttccgttttccgggtggttaatggtcaggagcaggcggtcacgccgcagacagttcaacagggcaactacaccgtgatggtggttccggcatcgccgcaactggtactgcgttacggcacctcggtggtgggcgtggaaaacgccggatccgggcgtatcccggtaacccgcagtgacaccgtttcaccgtccgttacgctggaggcaaaatga

SEQ ID NO: 96347 - DNA, 684 bp, Enterobacter aerogenes
atgtctgagattcagaacattgttaatgtttcccgctcttttgaatccatcctgctggaaaaggaggagcgttcccgaaaaaccgcctggcgggtggctgctgccgggctgatgctggccgcaatggcgattgcggccattattattctgctgccgctgaaaaccaccgacattgagttatggtcggtggataaacagaccgggcgttatgaatatatgacccgcgtgaaggagcgggatatttcttctgaaaaggcactgacgcactcactggcagcacactatgtcagactccgcgagggatacaattatttctcccttcagcgtgattatgacgacgtacagttatttaacagcgacagcgtgaaccgggactatctggacgggtttaacggcgaccaggcaccggacgtgatttttaataaggcggaatatgtcgtttatatcgatattatttccaatgtgcatgcgcccgccaccgggccggataatctggcgaccctgagaattaaacgcacgatccgccgcattgccgataattccgtgaaaacggatgtctggaatatccgtctcacttaccgctacgtcccgcaccagcaactgaccgacagccagcgtgaagtgaatccgctgggattcatcgtcaccagctaccagcgcgataaagagctgaggggggaatga

SEQ ID NO: 96348 - DNA, 141 bp, Enterobacter aerogenes
atgaaattcagcatcttccttctgatgctgtgcgtgctcacgggctgcgcacggcatcagggcaaccttccgccggtatccggcgaacccgagccggtgaattcccccgccatcattcaggagctgactcaccatgtctga

SEQ ID NO: 96349 - DNA, 1032 bp, Enterobacter aerogenes
atgtccggtggtatttttgttggtatggacaaaaacatcatggatggactgaatgtcgtgctggaaggtcagtcttccacttacggcaccatgatcagtgtcatcattgtcagctctttcactttgtttattctctatcgcggttatcagacgctgggtggcaaactgaggacgccggttgaagatgtcgtctgggatgtggggcgaatgctgctgatcaccacctttgtgttaaaccttgatggctggctggatatggcaatagcggccatcgaagggcttaaagacggtatcagcggcgatgataatatctgggcgctgctggacaccgtctgggaaaaggcacagacactggggcaaacgctgttcagtatggacacctcaacttacgtcaaactgaatggcggctttgccgaggtgctggtatggggcggcgcgattgtcctgctgatggccgccacttttgccaacctgctcgccgaaatcaccatcctgttaatgacgactaccgcgccgctctttattttctgcctgctgtacggttttcttaaaccgatgtttgataactggctgaaaacgattttcgcggcaatactgacgatcatgttttccgccttatccatccgtatcgccattaattacctgaataaaatactggataccgcagcaaaaacatccgcagaaaccaatatggtgacgctggcggcgcagtgcctgctggccgggacagcggcgggtgtggtggtctggttctccgcaaaactcgccagcgcactcagcggagccgccgtacaggcggtactgcagggcgcagtcatgagtggcttgggcggactggcgaataaatccgccgatctcgccggacccggtataaaaggcggtgcccggatggccgccagaggtggaatggccgccgccacggtggctggcaggctcatcagcgcaggcgcgggtaaaaccgtgaacgcctggcagaaacgcgccgccgctatcgaaagcatgaaacgcctgaaccggcagcgtcaccgttaa

SEQ ID NO: 96350 - DNA, 276 bp, Enterobacter aerogenes
gtgctcagacacttattcatcttatgcatactctcaagcgttatcgtactctccggctgcaaggaaaccaaatccgaagcctggtataaacagcatcctgacgaaacttatgcggtttatacgcaatgcctgaaggatggcgaggcaagcgataactgtgaatttgctcatcgggctgccattatgttcgcacaaattggcaagccaggaataaaagaaaagttcgagacactctttcagcaggaagccgaaaaaagaaaatccgtcacgcagtaa

SEQ ID NO: 96351 - DNA, 729 bp, Enterobacter aerogenes
atgcgtaccagatatgtctttctggcattatcgttatttttcccgatacaggcgttcagcgccggaataccggttttcgacgccgtgcagaataccgaatccattaaccagtggatgcagaaactacagcaatgggaggagacggttacccattataaaagcgaacttgatgcgtataaaaaacagttagccactgcaaccggcatgcgggatattcagggttttctcagcgacgccagaaatctgaaaaccgatattgataatctccgcaggaatggtatttcactggatgatctgctgaccacgcagaacagcgcatattctgctgaactgcaaaacctttacagtaaatacaaatcgttcagtgtatgcagcacggaacaggaaggaataaaatcgcaggcgctggccgacagttgcaaacagataatccttaatcaggccatggcaattgagaacaccactgccgttgaaaacaggatcaacagcacgctcagcgatatatcagacttatctgaccgtatatcgactgcgcaggactcgaaagagtctcaggatctggctaacgccatcgcggcgaaaagcgtacagttaaatgcgctgacgaatcagtgggagatgtcagtcagacaggctgaacagcgaacaacattgctggaacagcaaagacagaaagcctttgaacagcagcagctaacggcacctgttgctgaccttaataatttataa

SEQ ID NO: 96352 - DNA, 2748 bp, Enterobacter aerogenes
atggctacgctgaataaagcactgacgcggcctgccaccattatgggcattcctctcgtgccgttcgttctcgtcagcggggccatcgtcctgctggcagtctatgtcagttattaccttgcggttctgctcattcctgcctgggcggaaatgaaaaataaagcccgaaaggacattcattatttcagtctgctctggctggcgtttaaaacccgcggacgacttttcaccaatacccattttggctcgaatgcccttctggcgaaccagtacgataacgttgatgtgtcggagtttattcagaagatgaaattaaacgagcgtattacactggataaatatattccgtattcctcccatattcacccttacgtcatcagaaaccggcacagcgatctggttgccacctgggagctgggcggtacggtctttgaatgtgaagacgaacatcacctgaccttaatggcgacgcacctgaataatattattcgttcgtatgaaggtctgccggtgacattctatattcaccggctgcgtgaaaaataccatgatgcctttgaggcgaattccggcattcccttttccgatgaggtgatccggcggtattaccggccggtaaaagataaaccgctctggcggcaccggctgtttttcaccgtctgctatgcgccgttctctcgggttgagaagaaaaccctgaaagcgcagtcgcccggtaaacgccgggcggcgctggatgaggcgctcaaagtcatgctggaataccgcgaagcgctggcgtcagcgttatcgcgctatacggcaacgccgctgggggtatatgaagaaaacggtcgcgtgtattcctcgcaactggccttcttccaccgcctgatcaccggccagtggcagaaagtggccgtaacgcgctcaccattttatgaaacattaagcacgccggacgtctttttcaccaccgaaaccggtgaatgccagacggtcagcggttcccgcttcttccgcagcctggagattaaggattattccccggaaacccataccgggatgctggatgcgctgctgtacgccgaaagcgagtatgttctgacgcagtcctttacctgcatggcacgggatgaggcgcaggatcatatccggctggcggaaaaacggcttaactccacggacgacgacgcgacttcccagcgcgaagagctgattgtcctgcgcgatctgctccagtccgggcatgtgtcctgcgggaaattccacttttccctgctggtttcctcagacaatgctgaccaggtggtgaaggacactaacacgctagcccagcccttcgccgatctgggcattatgacgacgctctccaccctgtcgctgcccgctgcgtatcttgcgcaactgccgggcgtctatacgctgcgcccccgactggtggccgtcagcagccagaatttcgctgatatggcctgcctgcataatttccatccccacaaacgcagcggtaatccgtggggagaagctctcgccatccttaaatcgccgggcgggggcgggtattacctgaacctgcacgacagccaggccgggcgggacgataccggagaaaaaacgccggggaataccgcgattatcggcaaaaccggctccggtaaaaccctgctgatgactgtcatgcagcagctgatgcagaagtaccgcaacccggcaacgtttgcgccttctgccaccctcaaacggctgaccacggtgtatttcgataaggaccgggcggcggagatggcgatccgccaggcgggcgggcgttatttccgtatccgtaccggcgagcccaccggtttcaacccgtttgcgctggagccgacccgccggaacatcagtttcatcaaacggctggtgcggatgctgtgccgccgcaacggtaagccgctcgatccgcgcgacgaggagcggataagcgctgccgtggataccatcatgcaggactacccgccggaataccaccagttcgggatcacccggctgctggaagtgctgccggagccgccgaccccagacgcccgtaccaacgggctgcgtatccgcctgaaacagtgggcgcaggggggcgagttcggctgggtgtttgataacgcggccgataccttcaccatcagcgatgtcgataactttggtatcgacggcaccgaatttctggatgatgacgatattcgcggccccgtgaccttttacctgctgtaccgtgtgaccggtctgctggatggtcgccgcctggtgatgtttatggatgagttctggcgctggctggccgatgtcgaattttcccgcttctcgctcaatatgctgaaagtcatccgcaagctgaacggtatcttcgttccggcaacacagtcaccggatgaaatcgtcagacaccccatcgccccggcgattattgagcagtgcggcacccagattttcctcgccaacccgaaggccagccatgcggattacgtggagaaaatgaaagtgtcggaaagcgtttatgacacggtcagaaacctggatccgggcgagcattatatggtcgttctgaaaacaccgttgcaggccggggaaacccgcccgtttgtggcgatggcgaaaatggatctgtcggggctgggtaaactcacccgtcttctcagcggcagtgaggacaacctgaaaatattcgatgccatttatcaggacggtatgcgaccagatgaatggaaagacaccttccttgagcgggcaatctga

SEQ ID NO: 96353 - DNA, 273 bp, Enterobacter aerogenes
atgcgtaaacgccgttactctggtgtcgctcccgtcctgctgtctaccccggtgctggccgcggacagcggatttaacaaggccaatgaaacactgagcaatacctcgaccggcctgctgggactggccgccgtcaccatcacactggcaaccatgtgggtgggctacaaggtgctgttcgatggcaagagcctgcacgacatgcgtaacgtcatcatcggcgcgatcctgattgttggcgcgtccggcttcggtgcctactgggcatcataa

SEQ ID NO: 96354 - DNA, 645 bp, Enterobacter aerogenes
atgctttccaccactgcctttctggcactggcggtgcagtgcgccgccagtattcacccgtccacgtcacttgatgtcgcacgggtcgaatccggtttccacccttacgccattgctgaaattctgccagacagccggggcgtgatttcacatttccccacgagtctgccggaggcgatccacctcaccagacagctggcgacacaggagcgacgctattcggtcggcctgatgcaaatcaccagcaccaatttccgccattacggcgtcacggccagcgacctgcttaacccttgcatcaatctgtcgatatttgaacgcattctcgccgactgttaccggcgcggcggaacactgaaacgggcgctcagttgttactactctggcaactttgaaaccggacagcgaccggaatccacctttaaccagaccagctacgtgcagcgcattggttatgtcgtcccgtccacgcgggaagaccgacaaagcgaccctgaccggaacgcacagccgtctgtccattatcccgctgttgtgctgcgcggcgagcctgccggtgccactgcgccggtcctgacttctctgcattatcccggtgccgtcattcgcggcgctatccctgtaatccctgatgaggagaaatga

SEQ ID NO: 96355 - DNA, 222 bp, Enterobacter aerogenes
atgagaaaacccacttatcacgtatttgtcacccaggaaagtcagcccgacgctcagggcgaaaaaaacacgtactggacaaaggttggcgtggccttcgcgcataacggcaagcccggtctgaatatcgtgttgatacccggtattgcggtttccggcaggctggtgttgctcgaagcgagagaagaaagcgacatttcgcaggatgcatctgccgcttaa

SEQ ID NO: 96356 - DNA, 210 bp, Enterobacter aerogenes
atgccggatgagatcgaccgcgatcaggaatttaatgaacagcgactggaggagatgattgaacagaatcgttttaagccaggacccgtgccatcattatttcactgccggatatgcggtaaacccattcccgaaaagcgacggcaaacactgccgggcatagctacctgtaccaaatgtcaggaacaacttgagtgtcgcagacgctga

SEQ ID NO: 96357 - DNA, 588 bp, Enterobacter aerogenes
atgattccattaattaattacaccatcttaactgatgcattgcacgcactgaaagttggggatattcgtcactgtgaatccctcggattcaccttcgacgaaatgaatgctcttaatcagttatcactcgatgaactgtttacggtcagccgggcgtcagctccatttgtttcggtcagtgtccgccatgacgttctgcaccatttactggcgcaggcccgacaggaataccagcgacaacagcagattaaccgtgctatccggctgggcggatcgattgcactactcaaccactattttggcctgacgtctaatgatgtctgcctacgccgccgattgctgggggtcagcgtgccttatggccggacgcctgaaccggacgaagagacggattcggctatctggctgcaatggcaacagtgccggatagacaaccttgagtcgcctgacgcgctgattgccatgatgcagctgacggaggccctacatccagagtccaaagggctgtcacttaccacggtctggaagcgtatcgcacaatgggaacaggacgctgcaactgacaggagggggccacatgccggatga

SEQ ID NO: 96358 - DNA, 186 bp, Enterobacter aerogenes
atgacaaagtatcaattattacgtctgaagcaggttgaaaataaaaccggtctgaaacgctctcagatttacctgtatatgaaaaatggaacctttccacgttcaataaaaattggtccagccagtgtggcctggctcgaatcggaaattgatgaatggatcaacctaaagttagccggacgttag

SEQ ID NO: 96359 - DNA, 888 bp, Enterobacter aerogenes
atgcaagagaataacaatctcgcacaacaaacttatatcccatctgattggcttaccatcaatgaagcagtgaagttagccagaaaaaaatctggtattaaagtcaaagatagcgatatctatcgccatgctttatctcatgatatttttctttcaatttactttcaatctccagtttttttgaaggaagtaatgttttgtcgaggaaaaataaaattatcaacctcatgtaatcctattaggaatgactattttgcagcctgtacaaaaggaaaacttctagctactccttgtccaatcctagataccagactcctgggttgtgagtcctcattagttcaaaatttattggctcattctttgcgtatctctccaccaacacgtgatacatacgcttttaacattggtatattggttaatattggaggagttgactttcaggtttttaaaaaatttccatcattagatacaaaaatttcgaaacttaaaacaacatcaacatgtttatataatagccttaatagtgtaatatatccacactttagtgaagaaaacttattagcatatttcactcccgtttacgcgttaccaagtgatgcatgttttgttattaagcaccatgaattgaacaagttgattaagatactatccccgcaacagggatgtgtatcaacctcatcaagaatatccactcctctgtcaagaatgttttggcttgcatgcaaaaacaatgcaattatcagccccctaattagtaagccctataagcttttgtccatttttgaacaatgggcatcagttgaaggtattacagaacacttcagcggagatacgctaaaaaatgcactagaaagaggcgccccttcttctgcatcctttacccgctga

SEQ ID NO: 96360 - DNA, 1017 bp, Enterobacter aerogenes
ttggaatattcattattaggaaatactggattgtttatttctcgcatgagtttaggtggaatgacttttggtggcagaggtacgccaatatacggtgaagttggagggttggatttaaagcaaacaaaggaaattgttaatattgctgttcgcgaaggaattaactttattgataccgcggatgtatattccaacggggaatctgaaattttacttgggaaagcaatttcaccttatcgcaacgatattattctggcaactaagtttcatgccccaatggatcgtgctccaaatagatgtgggcaatcaagatatcacatgattcgctcacttgaggatagtttaaaccgtttgaatactgatcgcattgatctttatcaaattcataattttgatccactaacaccttttgatgaagttttgagggctcttgatgatgttgtaaaacaagggaaggttcgttatattggatgttccaaccttgctgcctggcagattatgaaggctcttggaatatcagagcataagaatctaaataaatttacctccgttcaggcatattattctttactaggtagagatgtcgagcatgaattactgccattgattaatgaccaaaaacttggccttttagtttggggcccccttgccgcaggttttttatccggaaaatatactgactctgatactataaataagtccagaagggacaagtttgatttccctcctattgacaagaaaaaggcatttaatattattgatgtactaagttcaattgcaaaaaagtataaagtgagtgtggctcaagtatccttatcctggttgctcagcaaacctactgttagtagcataattactggtgtgagaaacgctgaccaattaatggataatctttccgcaattaatttatcgctatcaagaaacgatattgaggaactagataacgttagtactacatacattccctatcctaactggattcaatcaaatgcaatcgaaataagaacgccaacttaa

SEQ ID NO: 96361 - DNA, 759 bp, Enterobacter aerogenes
ttgaaaataggtaacgaaactccacagttaatatctatgggtgatgcctatctacttgttaactcacagagttatgtggtatcaagtgagccaaatctaaatcctgttgatggaaagactctttacaaagaatcagaaaataattgcgtatactatggtggggaggatgtgataattattggtgtgggttattcgattaacaaacaaagctcttctctattgcttgatatgctgccgaaagttattttaatgaaaggtaatacattcccttcattaatattcaaagaaaccttaaatatattggataaagaattacaaacgaaaaatgtcggttcctcaatgatcgcaaatcgtcttggtgaagtattgctaatgcaagtattacgtgaatatatacaaaatgatcagccagtagagtggttgaaaggtttgaatcattctggagtacgaatggcactagagttgatgcatggaaatatttcgaaatcatggacggtagatatgttggcaaaaaaagctggaatgtcgaggtctagttttgcaaaaaattttaaagagcaagttggagatactccgttagaatatcttctccgctggagaatgtttcttgcacgtgaagctctaaaagaaggaaaactaattactaatgttgctcaaaattatggatattcttctgtaagtgcatttggtcacgctttcaaaagaatatttggttattcacccggaaaagttataaaaaacaataaagtagtcagttaa

SEQ ID NO: 96362 - DNA, 348 bp, Enterobacter aerogenes
atgaggcctagcgagttagcgaggattacaggagtcagtacgcgtgtactgcggcactatgagaagaaggggctgatctcttcagaacgttcagacaatggttatcgtgactatagtgctaaggagattgagagagtgaaatggattgtatctttaataagatgcggtttcagtaccagacagatttcagagctggacaaattttcacaagttagcgactcaaacgatgaccgatttatacaatgtctcgcacaacataaggaaaaattacgagctttagatacatttattgctttgctcaatgagcgaaggaacgcactggcagagcgaattaaatcctttgaataa

SEQ ID NO: 96363 - DNA, 753 bp, Enterobacter aerogenes
atgaataaattagaaaacaaaattgctttgatcactggcggaagcagtgggatcggtctcgctacagcaaaaaaatttattagcgagggagcaagggttataataactggtagaaataaagaaactttagaacaggccatagagaaattagacagacaatatgtcacagcgatacaatctgatataagcaatatctatcaacaagatgaggtcttctctataataaaagcgaaatacggacgacttgatattttattcgcaaatgcgggtatcattatgctttcggatattcaaaactcaacagaaaaagagttcgacagccaatttgatattaatgttaaaggaactttttttacagttcaaagatcgctgccgttaatgcctagggggggggctattattctaacttcttccatagctcatcataaaggcttggaagggcataatatttatgcagcgacgaaagctgctttacgttcatttgcgagaagttggaccacagacctcaaagaacgaggtattagagtaaattgtttaagtcccggtcctgttgaaacaccaattattgggaaaatgggaattgccgaaagcgaacgaaattcttttgatatgaaagtgtcaagtaaaattcctattggacgtttaggaaaaccagaggaggttgctgcagctgctctcttcttggcatctgatgacagcagttttatttctggtatagacctgtctgttgatggtgggatgggacagatctaa

SEQ ID NO: 96364 - DNA, 1206 bp, Enterobacter aerogenes
atgaaaaaacgtattatagtagctggagccggctttgctggcatgtgggcggcaatttctgccgcaagactagtaaaacaagaaaatgctgaagataaaattgatgtgttccttgtttcacctgagccaaaattggtcattagaccaaggctttatgaaccagttcttgaagatgttgcaccatcaattgtcaatgtcttaagcgcggcaaatgttaagtatatagcggggactgttaatcatatcgatgaaaaaaacaaaaaaattactgtcgaaaagaaagacggtgaaactattgttaactttgacagttttgttttagctacgggaagtcaagtttttcatcccgaattaaaaggcttaaaagaatatagttttaacgttaattcattagaaagtgcgagaaaattggaaaagcatttatatgatttggcattgaaaccaaattcacatgagcgtaatactgttgttgttgcaggaggtggactcacagggctagaaactgtaacagaaatgccctcgcgtctaagagcaattttaggtgattcagccgaaactaatgttattatcgtagatagcgcacctaaaattggacatgcaatgggggaggaagcatgtgaggtaattaaccaagcattacaaagtaatggtattaaagttagaacaaatgttagagtgacttcaattgaagaacatggcgtcacgttatcaagtggagagtttataccatctgatacgatcgtctggacagcagggatgagggcaagcccattaactagtttcattagtggtgaacatgatcaactagggcgtgtaataagtaattcatatttacaatcaccgaatgttaatgagatatttgttacaggtgatacagtaaaagttcataccgataatgatggaaactataatgtaatgtcatgtcaacatgcaatgagcctaggacgtgtagctgggcataatgcagcagcaatagttcttgatattccgctgcattcatatagtcagccaaaatatgttacttgtttagatcttggagaaggtaacgccgtatataccgagggatgggaacatacacttatgtataaaggcatcgatgctaaaaagattaagcaggagataaatactcaatggatctatccgcctgagccggaacaagaaaaaatgtttgcaatcgctaaccctgaatttattattgtaccatga

SEQ ID NO: 96365 - DNA, 900 bp, Enterobacter aerogenes
atgaaaaacatcaaaaaaaatccttatgatacatataaagaaatgactagagtattagatgttgaacctgaattagcactcggtgatataaaatcgtcagtggcacaatgtattagatggccgcacggccccttacatgacgtaatatcccccatggataaacatgttattatagctcatcttggtaaaatgcaaagaattgaaaggattactgataataaattaataaaagctatggctcgggaaagaacaataactactattcctcaaggaagtagttctcgttgggatttatatggtgatgttgatgtaatccatttttatatctctcctgaaatgttcaaagatttattattacaagttgaaagcccttcgttggagcttgttattcgtacagctcattatgataccatattatcaaatattatattttcaatttcagaagtgattaaagacaaaagcaaagtaaacattattctttatgaacagctgattttgtcattttttattcaactaattaataatcattccacacacacacatatatcaaggtatgaaaattgtgttctatcacctcgttctcttaaacttgctttagaaaagctggacagttgtcccgtaggagatgttaccattaaaaaactagcttctgaacttggtttgacatctgcatatttttgtcgtgcatttaaaggtagcacaggaatgacaccttattgctggcttaaacaaagagttatggagagagcatttacacaattaaaaaagcctcgtaagaaagtcatcgaaattgcattagagagcggatacagttcacatactgcatttacaaacgcgtttagaaaaatgactgggttaacacccagtcaatggaggctacaggaatataacagaaagtaa

SEQ ID NO: 96366 - DNA, 3477 bp, Enterobacter aerogenes
atgccagaattaaaatccgcaggtgacgataatatcgtggcaattgaagccgcaaaaatagtagaacgagtggttggaattgcttgggctactgataaatatggaaactttatttacttgagtgaaccgctactctctaccaaaaacctctctataaatcagctaaataaaccagtaaaaaaatattatagtggatgggaatttattgttcatcctgacgattgtgaggcaatggtgtcgatctggagagatgctttattgaggggggaatattattgttccgaacatcggattattagctctagtggtgcatatcgttggtgtcgtaattcaggtcatcctctatacgatcacaacaataaaatatgttcatggtatggggcaataatatactccgatatatcttctgtttcaaataaacaatttgcagctatcgcaaattgttctctcgataaagaacaatcctccagaagccaagatcacattggtaccgttcaccctaatgatcttaccactgtacagcacgcggagtctcgtgccttttggactggcgttcctcaagtcattcgacaccgaaactatttgcaaaacggaagcatccattggatggaaacgcgtatagagccaactttcattactagcatagatattgatgaacttgtgactgaacattattgttcatcggatacgataattaatccatcatgtacaaacgaagtggagcctagacgttcagtaagaattgttgaaagtatatttggtaacgggtggaccttagacgcgaaaggacgctggacatacattcatccatttgcacttagttccctgggagttactttggaatatctaaatgtcgctatcgatgaggggcataccgcatggaaaaaattattacatccagatgattataaatcaattgatgaaaaatggcgaagatgtttgatatccggtgaagattttaatgttgaattccgttttcgtagggcaaatggagtttatgtctgggctagaacatctgctcgtgcggtgagaaatcatgtaggtaatatcgtaggatggtatggtattgctttagacaatgacgtctataagaaaacggtcttagcattacgagaacaggggaaaaacctacaacaattaatagatacaatccctgcacttgtttggacaacgtcatcaaagggaacgccaacgtatgttaataagaggttcaccgaagttacaggagctagcctcgaagatattatatcacctgataaaactcccaatttaagtgttattcatcctgaagatgttgaaaaagctcgggaagctatatttcactcacttttaactctaactccatatgttcagcgatatcgtcaactacgcgcaaatggtgagtatagatggacagaaacaagagccgaacctctaattgatgactctggtaacgttattcaatggtatggcgtatgtgtcgatattgatgagttagttaccacccagaaatcgttatcagatcgagagcgtgaactctctatgctagtcgatacagtaccaagtttcctttggagactaaatcctaacggtgaacctaattttttcaataagcgactaattgattttttaggcatcgatgagatgttacagagaagagaaagtcccaccggactatctgaaatattacaaaaagcagttcaccctaacgatgttaatagggtctcacgagagctgaataatagcatagtttctggaagaagattttctatgcgatatcgatggcgccgctctgatggcatttatcgctgggtttcctctcaagcggatccattaagagatgagaccggaaatataatccagtggttcggtgtctcaacagacattgatgatcaagttaaagccgaggatgctttaaaacatagcgagcgtcgttatagagatttatttcaatatatgcctatcggtctaactcaagtagatgccagtaaattagttaatttattcaacaagctgagagaccaaggtgttcaagatattcggggttatattgacgaacatccagattttttaaaccaagctctagaagcattagaggttgaagaagcaaaccagtacattcttgatatgtttggggctaaaaatttaggtgaaatgagaggttctataaaaaaatattggcaaccgggtatggaaaccattcgccgctctatcgaagcgcggtatcgaggagaagaagtatttcaagaagaaacaaaagtcttacgtttggatggacgagtcattgatgtactttttaccactgcaaggccagatgccgttgctgacaaaagtttagttggtttcattgatataactcaacggaaaaaggcggaagaggcgcttagagaaagagaacgtagactttggaaacttgttgaagccctgccagtgatgatagattgtgccgattcaaaaggagaaccaatttaccgtagtgaacgtctcagtcattttttgggctatgacttaagcaaactcggagaaaatggtagactcgatgccacattagatgctggggttcatcccgacgacttgcctggtgttaaggagcagtatgcctactcgctttccacgggaaaaccctatgcgcgaaggcatcgtttgcgccgagcggacggagaatttcgttgggtcgagactagggcggaagctatgagtgatgaacacggcaatatcattcaatggaacgtcatttgccttgatattgatcgcgaggttcgcgctcaagaagagcttcgttttactcatgagagacttgcaagagctagccaagcttctagtatggctgaactttcagcatcaattgcacatgaagtaaatcaacctttggctgcgattgttgctaattctcatgcctgtaggcgctggcttgttgctgaccccccgaataccagccgtgcacttaaaacggtagaacgtattactcgcgatgcgacgtcagctgctgatgtagtaagccgaataagagctctttttagacactcttctgaagagaaaatattaattgacctaaatagtgtaatatcagaggttctggggctaatgacagaagaactcgtcagatggaatgtattaacagaactaatgctagaacctaaactgccttatataatggcagaccgcattcaaattcaacaagttcttctaaatttaatacggaatgcggttgaagcaatggaaaacgtcacacatcagcgtattttaagtatcaatacaacacacaaaaacaatgttattgaaacaaatatcagtgatctcggtggtggaatggcatcactggaacaaatgtttgaaccatttattacaactaagaaacaaggaatggggatggggttagctatatctcgttcaattatcgagtcacacggaggacggctttgggctgaggatcatttgccatatgggacttcactaatttttactatcccagtggaggtggcggtcaacaatgaataa

SEQ ID NO: 96367 - DNA, 645 bp, Enterobacter aerogenes
atgaataaaacacaaatagtctatattgtcgatgatgataagagagttagggacgctatcgatgaattacttacatcatatggaatatatagtatatcatttgcctccgctgtagaatatattgaagcggagaaacttgatattccatcttgtctcgttctggatatagagttgccggacataaatggattggaactacaagaacaaatctacaatagccaacacccttctattgtttttatcactgggcatggtgacatttctcgttctgtaaaagccatgaaatatggagctattgattttctcaccaaaccgtttagcgaagataaatttatgtcagctattgacactgcacttaccaaagatcgccatcgtcgccagaaacaagcagaacttaatgaattacaacgacgctattgcaacctaacattacgagagcagcaagtgttaccattagtggtcagtggtttattaaacaaacaggctgcagcggagttgggtatacgtgaagttactttgcagctccatagacgaaacattatgaggaaaatgtcagcaacaacattcgcagatttggttcgtatctccgaaaaattaaatataccaatcaaacacattcgatcgatatctgggaagcgatcatga

SEQ ID NO: 96368 - DNA, 696 bp, Enterobacter aerogenes
atgaacacaaatgaatcgttaaggaatttgatgtctgattcccatgctaagggcgaagtgtatattgaacagcctatagtagcaattgttgatgatgacgtatctattcgtgaagcactttatgaactgattctatcgtcaggcatgaggccgatggtcttttcttctacacatgaattactaaactcagacatactagatacaccaggttgtcttattcttgatgttcgtatgcctggtgttaacgggttagagttacagcgccagcttgctcaacgtggaaatgttaagccgattatatttctaacaggatatggcgatattccgatgactgtcgaggcaatgaaagcgggggctgttgattttttaaccaaaccagtccgtgagcaaactctactcgatgcgatatcggaagcaatcaagttagacgaacaaagacgtcacagagaaaaaatcgttaatcataatattgaatgctattctgcgttaactcctcgagaaagagatgttttccgtgaagttgtccgagggagattaaacaagcagattgcatatgacttgggtatcagcgaggttacggttaaactacatagagggaatgttatgcggaaaatggaagcatctactattggcgaactaattagaagctgggagactttacgttctcgtcttaacatattaaaatcaatggattaa

SEQ ID NO: 96369 - DNA, 921 bp, Enterobacter aerogenes
atgaataagaaaacagatatcaggttttcctatgattccacagcagatgaactcgtcccatcacgttatgcactatcagtgggcgatatagatgttatagttattagtgatggagtattaccactaccaactgagatgttaggacataatgtaaaaccagaggaacgtgctgcatggtttgaacgaatgtttcttccgccagatgcgtttgactggtctttaaatgttatcgttataaaaagtggagagaaagttattcttgtagacgcgggacttggattagaccctaatttaaatttacctcgtgccggacagctttttaaacgcttagaagcagtaggcataacacctctatcgataaccgatattgtaattactcatatgcacatggatcatatcggcggactcctaattgatggtgtaaaagaaagattacgcccagatttacgtattcatgtttcaacgtatgaagttaaattttgggaatcacctgatttcacacatgctcatatgccacagggatttccagatgccttacgtcaaactgcgtgtaaatttacttcattgtatcgtaaccaacttcaactctttgacgatatccatgaaatcgccccaggaatcacagcatgtcgtacgggggggcatactccaggacatagcattgttcggttagtatcaaaaggcgagcgattgacattcgctggggatgctatttttgctgttggttttgaacacccaaactggtttaacggtttcgaacatgacccagtagaagccgcacgtgtaagggttaatttactaactgaactatccaaaacgaaagagtatcttgtagcaactcatttaccgtttccatcaataggtaaaattgcagtagaagaggatgcattccgttgggttcctatattctgggattattaa

SEQ ID NO: 96370 - DNA, 963 bp, Enterobacter aerogenes
atggaaaaattttcacccaatgacattaataatgcgattaactctgatatttttggactgacatctccaggggcatctttagatgtcaatcatgctaaagagcttgccaaagcccggggggggttaacttcgagtaactacttaacaaccaaagatggtgttcaaatcttctacaaggattggggccctaaagaagctcagccaatagtcttccatcatggatggccccttagtagtgatgagtgggactctcagatgctttttttcttaaaagagggatttcgagtgatcgcacacgaccgtagaggtcatggtcgttcatctcaagtctgttctggtcatgacatggatcattacgcagctgatattgctgaagtgattacacaccttgggttagaaaatgtaattcatattggtcactcaactggtggtggagaagctgtccgttatacggctctatatggacaagagatagtttctaagctcgtattgattggcgcagttcccccacttatgttaagaacatcatctaaccctgatggcctgccgatcgatatttttgatgggttcaggagtgcgttagcttctaatcgcgcacaattttatcgagacgtagctagtggcccgttttatggttttaatcgacaaggtgttgatttttctgaggtccttgttcagaactggtggcgacaaggtatgagtggagccgcaaatgcacactatttagggataaaggcattttcggaaaccgacttcaccgaagacttaaaaatcattactgtacccacacttgtgctacatggtgatgatgatcaagttgttccttataaaaactcggcgcttctttccgctaaactacttaaaaatgctgagttgaaaatatatcatgacctttctcatggcatggcaactactcatgcaaatataatcaataaagatattttggattttattaaaaaataa

SEQ ID NO: 96371 - DNA, 1101 bp, Enterobacter aerogenes
atgaacagaaagaaaattattataactttttttttattggtgttgtcggtttttctctacttcgttttgccagtttttatttctaataaaacagtgtctacggataatgcctacacggctgctgaattggcagaaataacccctcttatcgaaggaccaattaaaaaagttaaggtgataaatacccaatttgtgcatgttggtgatgttttggttgtgatcgatgatactgatgccagaattgcattcatgcaagcggaatctaatttggaaactgcacgtagaaaagtgatgcagattatggctaatgatatcgctttgaatggtaacctgaggtcacgcgaagcaaacattctcgaatcagtacatcaagtgaatcgtgcacaggcccattttgataaagttgctctagacgtgaagcgtcgtaaaaatcttataaaaacaggtgccatctctgaacaggattttacaaacgctaaaactgagctacgtgaagctagcgcaatgctggagtctgctaagtctgctctaaaagctgcccaggctgatgctatagaagctgaaggtactaggaaagcaaatgagacattatttatagacacaacgattgataataatcctattgttttagctgcaaaaactcgccttgagcaagctagaactaatcttgatcgaacaatcatccgagctccggtctctggaattatcactcaacgtactgcagaggttggaagatttgttaaagcaggagaacggttaatgagaattgttccccttgaaggtatttacgtcaatgcgaattttaaagaaaaccaacttaaaaatgttagggttggacaaaaagttgaactaatttcggacctttatggaagcagtattatctatcatgggaaaattgtaggttttgatggcggtactggctcagcgctgtccttgattccagctcaaaatgcgacagggaattggataaaagttatacagagattaccggttcgtattcacttaacgaagaaagagttacttaataatccactgcgtgtgggattatcgatggttgcgactgtagacctcacttcagatgatgtcaacaaaggagaataa

SEQ ID NO: 96372 - DNA, 1533 bp, Enterobacter aerogenes
atgtctagaattacttttcctcacttgacaggtgtaaaacttattgttgctgcaattgcgctttcccttgggaattttatggtcgtacttgatacaactattactaatgttgcaatgccgacaatttctggatatctcggcgtttcaacaacagaaggtatatggatcatcactgcctatgctgttgcagaagcaataacagtacctcttacaggttggatagcatctcagtttggccaagtgcgtacttttctcttggccattattgcatttgttttattttccgtttgttgtgggttatcgtggtcgttaaccagtcttactatttttagggtgttacaaggattagctggaggaccgttaattcctctttcttctacgttgcttattgcagtttttccgaaaagtcaatcaaatatagctgtcgctctatggggaatgatgactgtcatcgcaccaatattcggacctattcttggtggggttatttctgataattggagttggcaatgggtgttttatatcaacattgcttttggttttatcgttggatgtggggcatggtgggtcttgaaagacagagaaacactcattaaacgttcccgtttagatagagttggtttgagccttctaattctgtttgtttccacatttcaaattactttagataaaggccgagagttagactggttttcctcaagttttattattatatgttctttaatttctttaatttctttagttctattaattatttgggtgctcaactctgatgcccccatcattgatctccgtgtgtttaagtctcgaaattggctagtgtcgacgatagcactatgtatgatgtttggtatcttttttgggaacatagtattgacacctttatggttgcaacaatggatgggctataccgcaacttgggccggttatgcaactagccctatggggatccttgccgttcttagctcacctattattggtcgtatgctaccaaagttcgatcctcgtctattagtaagttatggcatgggaatgttggctgtttcctttgttatgcgttcgtttctgactacacaggctgattttatgtcagttgcattaccgatggtcatattaggtgctggagtccctgcttgccttattacgttaacatcgctaggagtatctcaactgccgaccgatcaagttgcagctggagctgggctccagaatttccttcgtgtaatgagtatggcgataggctcatctttgactcagacatactgggaacatatgtctaaatttaaccgttcaacattggtatcctctatgcaaccagatgtgatgacaaacttaaatgctcttgtagctcaaaatagaatccctctgaattcatctactttgttactatctaaaatagttgatgaacaagctgtaatgttggctacaaataatttctaccagttagcaacacttcttatgctatgttcgattagcattatttggttcataaaaaaaactgagcatccacttcataaaaacatagggcattaa

SEQ ID NO: 96373 - DNA, 357 bp, Enterobacter aerogenes
atggcagaaaactcaaaaaaaatttataaggcagttgtaagagatgtaattgaatggataaatgaaaacttagaggagcagttgcatattgaaaggatttcagcaaagtccggatattctaaatggcattttcaacgcatttttaaagaggaaactggcattagcttaggtaaatatattcgagaaagaaaactgtcacatgcttatcaacttttggtaaatacggatatgtcagttattgatatttcaacttcccttgggttcacgagccagcaggttttttctagaacggtaaagaaagaacttcgacgatcaccgagagatatacgaaaaaacggaactattcaacctagttga

SEQ ID NO: 96374 - DNA, 1254 bp, Enterobacter aerogenes
atgtcccttaccgacgcgaaaatccgcactctcaagccttctgataaaccctttaaagtctccgattctcacggtctgtatttgttggtaaaaccgcacggttcccgtcactggtatctcaagtaccgaattaacggtaaagaatcccgtattgcactgggagcctatcctgctgtctccctgtctgatgcccgacaacagcgtgaaggtatccgtaaactgctggcactgaacatcaatccggcacaacaacgtactgctgaacgtagctcacaaataccggagaaaatttttaaaaacgtggcactggcgtggcataaaagtaacagaaaatggtcgcagaataccgctgatcgtatgcttgccagcttgaacaaccatgtatttccggttatcggacatctgtcaatctcagagctaaatcctcgtcatttcattgacttgttaaaaaggattgagggaaaaggtttgctggaagtcgcatcccgtactcggcaacacctttgcagcatcatgcgccatgcggttcaccagggattaatcaacaccaacccggcggcaaatcttgaaggcgtgacggcacctcccattagacggcattatcccgccctgccgctggagcgcctaccagaattgcttgaacggattgacggttatcatcggggacgcgaactgacccagcttgccgtcctgctgacgctgcatctgttcattcgctccagtgagctgcgctttgcccgctggtcagagattgatttaagaaataaaatctggacgatacctgcctcacgtgaatccattgcaggcgtacgttattctgggagaggtgcaaaaatgcgcaacccgcatattgtccccctttcagtacaggctatcgccattctgaaaaggattcaggacatatctggtgagtatgtactggtgttccccggcgaccataacccgtacaaaccgatgtgtgaaaatacaatcaacaagtcactgcgtctgatgggatacgacacgaaacgggatatctgtggtcatggcttccgggcaatggcgtgctgcgctctaatggagtccggtttatggtcgcaggatgcggtggagcgccagatgagtcatcaggagcgcaattctgtgcgtctggcttaccttcataaggcggaacatctagaagcccgcaaggctatgatgcagtggtggtcaaattatttagatataaattatgagaagtatgtagcgccttatatttacgcaaatttaaaatag

SEQ ID NO: 96375 - DNA, 597 bp, Enterobacter aerogenes
atgacagacgaaaataaaacaggggaagaagctacaaaatcccccggccgcatgaaaaaagcggtttatcatattaccggaattagtgatattcagtttatgtggaaatcactaagggaatctatcagcctgctcaatgagcgggcttctttcgttaagaagcaaatcaaaaatttggaagctccggacgaaaaatcagcttcgaatcagtcgtttgaggatgttgttaaaaagagttctatccccttagaacagcatctagctaaagccggtaaatataagaaatattggttatgttgcttctttatagctgtttttgttgccctgtttttaatcgctggctgtgtgaaattgattgttaatactgaatacaatgtaagccttctgaaagtgacattaacacttggtttaatgtttgctgtttgtatctactcgttcgtaaaagcaatgacttatgaatttttaggttggcaattacggaatgaggcccattctgaagaagaattcggtacattgagacattttattaacgataacggtgtgcgcaatacatttaattttgaacaagctggtcagattcggggggcgcatgaataa

SEQ ID NO: 96376 - DNA, 2196 bp, Enterobacter aerogenes
atgaataagtcaagaaactcattggtcgcattgttgccgctatcgcttttcattaccccggcatattctgcagatctgggaattgatagtattacagaggctgctaaacggtctggtgatttgtcacgtcagatgctgcataccgtttttggtgaagtggtaaataatcctttcagtccgtcaggtgatgggttgttaaataacgtatttttcacagtgaatgaggttatcgccatattagcgctgatttatatggcgataatcagtattaaaaaactacatcaggcagggcaacttgggaagtttatagagggtgatgggaataatgccttcaattttgttaaaacaacatttggctggctccttttggttccaactgttgttggatggtccgttgcacaactgctcttcctgtggtgtgggtccatcataggtgtaggttctgccaatgttattgcagataaaacagcgtcggaactagcgagtggcaaagctgtttatataacgccagttatgccagaaatggcttcagtggctaaaggaatgttcgaaatgaacttgtgcgctcttggtgtcaatcaagggttagctcagatggaggcttcaggccaacattatgaaagtaatagccagatgaagtttaatactggtgattctagttactcaatttcagttgacaatggttctgctgtttgtgggactgttaaattaccacaaaaacctacaggttggacttcggtattctccagtggttacgctgattctgtttatgcagttcaacagcaggctacagactcgctttggagtaagatgaagaatacagcagagcaatttaactctgcttatatgtctaaaatgcgttccggagatgggcagctgcctgacgttgaaactgcaattcagacagcagcaagagattaccaacaacaagtacagcaagctgcagacaatgctgccggaagcaatgatatgctccagaaaatggagtcggatataaaggaaaaaggctggctatatcttggtatttattatcataccctggcaactgctaacactgagctgaaggacgttgctaatctgaaacctattgtatcagggataagtggtgatggtgatgtaggttctacggactattataaaggtctgttccaggcatatcattcacaactgaaaaacagtacctacactccccctttaggtactgctgataatgctttagctcagaacattgacaataaaggcatcgaagaagcggcaaaaagtggtgatgcagattcgttgattaccaaaattttcaactttaatgttacttcatggcttgccactagaaactatggcactggcgatggatacagcgatgtaacgaatcccttgttgaaaatgaaagccattggtgattacacgatgtttactgctgagagtggtctagctgcttggggagctgttaatgtcgcaatgagtgttgcagatggtaataacgctgctggaatgggggcgggattacttaatttcttcacttcaggtaaggatattattaagggtgtaattaaaactgcggcaccgatcgtatacatgattttagtcgctctgttctgtatagggttaacgctttcaatttggcttccatttgtgccatttatctattggtttgtcgcaatggcggattggttagttactttgctgactggtatcgttgcatcttcattgtgggccgctacccatattaacattggccaaactaatgaggaccggtcaacgtatggatatattttcctgatagatgtgatgattcgaccactgttgatggtaatggggttcatttttgcatcattggccattgtggctcttggcaccgcgcttaactatattttcaaaacagcaatggaaaatgtacaggcagattcaacaactggcctttggtcaatgataggtatcctttttgtctatgcaaggatgtgtacaggtatggttgctagggtatttgcattacctgcaaggatgcctaactacgtcatcagctggattggtaacaagcataacgattcaattcttggtgatatgcagaatcatgttcacgacctgtttgctgcatttggtcgtggagctaaaaatacaggtggacgtccttctgggccgaagaacttcaacccaaccaatacggttgataaagacaaagatggtatagcgggggcgtga

SEQ ID NO: 96377 - DNA, 654 bp, Enterobacter aerogenes
atgaaaggatattcgtatactgttgtcgataacaacatggctaaatcaaaaggtgttggctactatctgtcacgcctgtctgtagccataagtatagttattttaacaataagtcttccgttgactgtatattctggctttcttactttaggtggaagcctggcattggcgtggtttgtcgctctacttgttttcgatgccatgctgatcacatatgttgtacgccaggtaaaaagtaagggagtcaaaaaggtcgttgcaggcatgagagtttatggatgctttaatccatcggctaaagaggaacaatacatgccggctcagaaaacatattttggtatagacatggactctggtgttgttgggattgctgccctttatgctgtacaggcctctattaagcaaaagagaattttgtttgaggctgagacaattgagtcttgggagtatactgatagtaaacttgtcgtgaatcttcggaaccgacatgtacctactgttgaaataatcttgctcaatgccggcctagcatatcgccagctggaaatgttaaccaggatgcatgagcaacataaaaaatacaggggtgaaaaatatctccagtggcgaaagactatgcttgatgaaggttggatgctaccacgaacgtattga

SEQ ID NO: 96378 - DNA, 249 bp, Enterobacter aerogenes
atgctgtgggaggaagtagtgaacagagttactgagcgccaggaacagaagagtaacccggagttccagagagagtaccggaaccgtatccgggaaacacacgaccagttaaacctttatctccccaaagatgcaaaaagaatgttgatagagatcacaaaagttaaaaaactcactcaggctgaagttattgaatttcttgtcaaaagttattatgacggcttaaaatttgacgattctgaagagtga

SEQ ID NO: 96379 - DNA, 216 bp, Enterobacter aerogenes
atggctcgtttgtttatgtccatttcaacagcattaatcctgttgtttttaactctggcatccggaaccggtctgttggtattcggtaaacagttcccctataacctctacgataccgctgtattcatgttcacaggatgcggtctggcgcttgttctaaccgttgttcaggctcgccgtatcttcaggcagctaaagaaaaatgaggcgctttaa

SEQ ID NO: 96380 - DNA, 579 bp, Enterobacter aerogenes
atggccaccaaacatataaatgatgagctctggaatcgcattgaggcgctgaccgtcaaagctaacgccaggcatgggttgttgcggccgattaaagaggctgaagtactgcatcttgtccttcagcgtggcctggaactgcttacggacgacgatctgctgcagctgggcaagtaccggcggccgataggatttgtgctgcgtcgtccgggcgtggaaatggtgaagctggatatgctgaatatggcagatgcggcaaccgttcttctgcgcagtggacccgcaacgctgtgcatctggagccgtgacgatatcctgcgcgaggccagtgaagcggtgatccgcgaacggctgccggatgcagccctgctgtcggagggggatgaccgggcccggttccagacgctgctgcccggattctggaacgccgcgcaccggggggaaacggccgtgatttccctgcgggctgacagtgcggattacgcgattgcgcgtataaccgatctgatgtgtgaagccctactgggttataaagggcagcgggcctggaggccagctgaagacgaacagggggaataa

SEQ ID NO: 96381 - DNA, 408 bp, Enterobacter aerogenes
atggtgactcagcctatggtgcttctgggcgcggtacaccccgtagcgggttatctcttcctggaggtgatccctgacagtgaggttggcttcgttgatatatatcagctgaccgaccgtctttatgttggcgattatctggtcattaacaatccggaatggcggcggtgtgaacctgcatttgacggccggccgtgggatgaatgggtgatccgtgaacacctgtcccgcatagactggtattcgaatgacaccattctgaggttatgtcagaggcacaatctgtcatgtgctgacctgcaaaagtggggagaaaacgtggcacgctggaaggatgtaccggtgatggtagcgcgtgaagaagacgacgtgtccatcacacttctttcaggatttacagataactga

SEQ ID NO: 96382 - DNA, 546 bp, Enterobacter aerogenes
atggatatcaactactacgatgaacatcaggaagaatttgaggcggttaaactggcgctgaagggtgaaatggagaggatctggggctccatgctgaaagaaagcggggatagcctggatgatgaagccacgtacctgaacctgtttgaagaactgcagtacaccttctctccgtccagcttcagtaagctcaccccgtcgcaggatctggatgaagataaaatagcggcctttgtggccagaacccgcggctataagcacggcatcacgatcaaatgccggccgggtcgcccgcagaagtggctgaaaggccgaatcaaaccacttgaggacgcggaaggcacaaacctgtgctggatcgacacggccaccatcgtgcatatcggtgccggtcagcagtttgacgatcagtattacctcacagtgaccacacagaccgggcagagttaccgcgtgaatgaactccgtctgccaggtcgtctgctggaagcagcccaggacagcctgttcagggcactggattcaaccaccggcggtaacttctga

SEQ ID NO: 96383 - DNA, 249 bp, Enterobacter aerogenes; identical to SEQ ID NO: 21609

SEQ ID NO: 96384 - DNA, 363 bp, Enterobacter aerogenes
atgaccatgcaatcagaatttttatttactgatcctatgctcaacgtcgttatagcagaaattaagcgttttaattgcccgcttcttttcgtcaaagatcacggcgtgtatgtgatggctgcgaaaggtgagaaaaacagtaaagggatgcgtaatgtctgttatgccaatggcttcaatccggatacaacggattttgacgaactctgggaccgtatggaggcagcctgtggcggagatgatttttgcgaaacccttgccttcgatacaagatcgattgaacttctcagccgcgcgaaaccttatctgagaattatggtttcagattcgatgctggaagttattaccggggggcagaaataa

SEQ ID NO: 96385 - DNA, 1380 bp, Enterobacter aerogenes
atgaaaaaaataaatacaaaagatgcaaaatggatttctgtccgtgggtggctaagatatcttcgcgaagtcgacagaactgaaagaaaaaaacaaaaacaaaacaaaaattgtcgtcttcgtttcgccaatgatacagtccctgtccaagatcaggttgtcaattttattgaaaaaatatccagcattaatgaatacgactcatctgttttacgaaaagatgtcgataaaattttaatacccaagtactttgacctatatgaaaaccccgaaaaatcattacttttcattaacgccgcgactaaattaattgcacgtgggaaaagaaaggattatctttttaattatacaaaaaataaaactcactgccttggtgttgagtgtttacttggtgtggcactcaccgcagccagaaatagcaacattaactttaaagatacaactatccaaattaatggtgtttatccaaaagacgaacagtaccttgagattatccgtgacattggccttgttaaagaaataagtaactccccacaaggtaaagttttggattcaactgaagccacaaagaaaacaaatcctaaaaaaagaattttctctgctgatagtataggcaaggaaaatgcgtcagcttttgctcatgacagaaagaatatcacagctgaaaaatttacggcttatattaacgaatgtttaaacgatcatagtcttaagcttgtccatgacgctgaaaagcatttaacttcttgcatgggtgaattacttgataatgcagaaagacattgtggtttggagcaacgaccaaggtggtatttgagaggatttgtcaataataatatcagaaatccgatctgtgaattggccgtttttaattttggtaaaacaatcgatgaaaccttcgatgacctcccagaagatcacttttcattgagtcagcaagtaaaaccttatgttgagatgcattcgaacaaaaggggcatgtttaaggaaggattaactactgttgcagccttacaaggcagagtcagttgtaaaaatgaaaaagaaacagatagttctggtaccgggactattgaacttctgaaattatttcaggacatgcatgacagtctgaaaaaaatgggtaaagacattagaggcggaataaaaatgactctaatttcaggatgtacacacattaattttgacggttcctaccaacttaggcgtagattagtcaatgatgaagaaagcgacatctttacttacccatttaatgatgtaggacttgaatccgaaccagatcgcacctatcttaaacgcatgaaggatgctcggttccccggagttatgattaatattcgttttcctctgccagaaaacgccacccagcgaacttga

SEQ ID NO: 96386 - DNA, 345 bp, Enterobacter aerogenes
atgaaaatgtcagatataaccatagatttcaataggttagttaaagatagcaataaaaaactatttgcaggaagagaaaatggccgtcaagcctatgactatttccgcatgaataatttttgtgctgccagcaatgataggttgtacctatcaatacctaaaggcattgttgtctcaagttcctatttcctaggcatgctcgaaactattttacctaaattcacctctccaagtgaattttatagtaaaacaatacttgatgggcatgagtatagagaaggaatgctatcggaattagacagagccgtcagaaggggtttacataaaaatgttcccttcttctga

SEQ ID NO: 96387 - DNA, 804 bp, Enterobacter aerogenes
atgttcccttcttctgattccagaacaattttaaaaatgacagcgttgtctgtcattttttttgttttacctacagcttgctcggtttctgcatttagtgatgataaaacaactacaactgcaaagaatccccttatatctaaccaaggggaaccattcaatcttaaaaaactcacaactccaagtactataattggaactccaactgatggattaatgtattgtgaaaaagctatagatacttttcataaatcttcactactgagccccaaaagcatgggaacgttgactaatcattacgagtcaacgcctgtagcaaatgatgtctataatattgtcaatattcctgaaagtggccctgaatggttttcaatcattgtatccttgcttgccttaatagcctccttgctcatcccttacttccagcacaaaaacgagagaaaagaagcaattaatgaaggttattggataagagaagtaattatgccaaaagtaaatggtttagcgtttgaggttactgctgcatttaaacatgccatgccattaactgaagatgattttttaattgcattgcaagatcaacttttccctaaacttggtgaactccgtgaatcattttatttattcaacagtttttcatctgtgacagcagatatagagaaccttgacaacatctgtgacgaattagagcaaaaagtatcagacaatattgacctccctcttgaaacaagaattaatgatatttcacgattccatctttttttgatcaaaaacctcatagacattcataaaaagataggttaa

SEQ ID NO: 96388 - DNA, 549 bp, Enterobacter aerogenes
atgttgatgaaagccaggggtgtgaagggtaaggcgccctctcatgttcgcgcatggactaaagaggaagatgccttgcttgtgatgttgtatgcagtgcacaccggaaaagaagtagcgcagcgcatgggcaggcctttgggaggggttcaaaaacgcttacgaatcctgagagaaacacgtcctgatctgttgtgtaagcatcggccatttaccgatgaagaagagcagtttattcgccaaaactgcaagcagatgaccgttggtaaagtggctagcttgctaaagagaaagcgaggggatgtaacccagaaagcattgcgtatgaacgtcagcttttttaagtgtggcgatgcgcatcatagcactcgaatttcggatgatgacgtactgcttatcagggcactgcgtgacgacgaacaaggcggaaaactgacattttcagagatcgcggagaagttcgatataactgagcatgcggcatggtgggcgtataacctccgtcttaccgaagacgacagcgtttcgcgtgagctgttatctaaatga

SEQ ID NO: 96389 - DNA, 132 bp, Enterobacter aerogenes
atgaatgaagaaaccaattaccgccggttctggcgaaacctggtgatctgcggcgtgctctgtctgctgtttttttggattccgtcggtaatcgccacgcttcgcatcttgaaaatgatttttgggggatga

SEQ ID NO: 96390 - DNA, 894 bp, Enterobacter aerogenes
atgattaagtcacctctgaaatgggcgggtggtaaagcccgcgttatgccgcagctgctggagcacctgcctaaagctgattgcctgattgagccatttgtaggcagcggaaccgtatttatgaatacggaataccgccgttatgttctttgtgatagcaaccgggcgctgattaacttcttcgaaatgttaacccggcataccgaagaacttataaaaagcgctcggatgttctttcaggatggaaactttagtgaggactattacgcctgccgcgatggatttaatttcattagtaaaaatagcctcgttggcgccggaattgcgcgcaaagtgcagtgggcggcgatgtttctttatctcaataggcacgggtacaacgggctttaccgtgtgaatcagaagggtgaatttaacgtaccttacggtaagtttgcggcgccttatttccctgaaaaagaaatgcgtttatttgctgaaaaggctaatgacacgaaagccattttcatgcatagcgactttctacattcaatccgcgctgtcgtatacgccagcgatgatgctgtcatttattgcgaccctccgtacatcccgaccagcgcaaccgccaatttcaccgcctacggcaagccattcaccctggacgatcatcgctccctggttacaaacctgctctatgctcatcgccagttcggcatccgcgcggtgatatccaacagcgataccccggaaacccgcgaaatttattctgctttcaaccttcacgccttcagtgtgcgtcgctctgttagcgccaaaagccgcgacatggccggtgaggtaattggcgttttacgcgtgtgtgatggccgcgccatagctgatccgcaggagtctattgatgaacaagattga

SEQ ID NO: 96391 - DNA, 195 bp, Enterobacter aerogenes
atgagccattcacgggactacatcaagggcgccattgctgcgcttaacgaagttaaggccatcggattagccgcagccatgcacacagggatccttcacggaaaagagaccggggacgccgtaagagcaacggtcgatagtcttgctgatccgctcattaacaaatacaaagcgatggtggtgaaaaatgattaa

SEQ ID NO: 96392 - DNA, 549 bp, Enterobacter aerogenes
atgaataacgtcatgttagatgttcgcatgctgggaaaatcacctgattccccgatttttgccatcgagtgtgttttctttgaaccgtccaccgggaagatcggccccggatactatcgcgctattgatatcacaacggtcggggggatttatcccgaggcggttttgcagcttatgagaggggattctgcgcaacgggccgaggtcatcaacgcaacgtgcagcgcgatcgatgccgttgcgggagcctgtcgttttatcgcttccactgcttcaaagcacgagaagctcttttgctggtctgcgggggattctcttagtgttgcagcgctggcgcatgctgtttcccgatatgatttagagccattcctaccgccctttgaagtccgcaaccttgcaacgctaatccatatcgcaggcgttaccgggtacgccccgcacccgcgccgctcttctgctacctacctgctgaccgatgctgtttatcgtgccgagcagacgtgcgagatctggcagcgcctgacctccccacatcttgaatcgctgtga

SEQ ID NO: 96393 - DNA, 1680 bp, Enterobacter aerogenes
atgagtaatgccatcacggagattgataacaccgatctggtgtttatcttcggttacaacccggcggattcccaccctatcgtggcgaatcacgtcattaacgccaaacgcaacggggcgaaaatcatcgtctgcgacccgcgcaagattgaaaccgcgcgcatcgccgacatgcacatcgcgctgaagaacggctcgaatatcgcgctgctcaacgccattggccacgtcattattgaagaggatctgtacgataaatccttcgtcgccagccgttccgaaggcttcgaggagtatcgcaaaatcgtcgaaggttatacgccggagtcggtggaagagataaccggcgtcagcgctcaggagatccgcacctgcgcccggatgtacgccagcgccaaatccgccgccatcctgtggggcatgggcgtcacccagttctaccagggcgtggagaccgtgcgctcgctgaccagcctcgcgatccttaccggcaacctcggcaagccgagcgtcggcgtcaacccggttcgcgggcagaacaacgtccagggcgcctgcgatatgggcgcgctgccggatacctatccgggctaccagtacgttaagttcccggaaaatcgcgagaagttcgccagagcctggggcgtcgacagcctgccggaacataccggttatcgcatcagcgagctgccgcaccgcgccgaacacggcgaagtccgcgcggcgtacattatgggcgaggatccgctgcagaccgatgccgagctttccgcggtgcgcaaggcgtttgaacagctggaactggttatcgtccaggatattttcatgaccaaaaccgccgccgcggccgacgtcatcctgccgtccacctcgtggggcgagcacgaaggcgtgtataccgcagcggaccgcggcttccagcgcttctttaaagcggtggagccgaagtgggacctgaaaaccgactggcagattatcagcgaaatcgccacccggatgggctatccgatgcactacaacaacacccaggagatctgggatgagttgcggcatctgtgcccggacttctacggcgccacctatgaaaaaatgggcgagctcggctatgtcatgtggccatgccgcgatgagtccgacgccgaccaggggacgtcgtatctgtttaaagagatattctctacaccgaacggtaaagcccagttcttcacctgcgactgggtcgcgccgatcgataagctcaccgacgagtatccgatggtgctctcaacggtgcgcgaggtcggccactactcctgccgttcgatgaccggcaactgcgcggccttaaccaggcttgctgatgaaccaggctatgcgcaaatcaacaccgccgacgccgaacggttaggcatcgaagatgaagcgctggtgtgggtcaattcgcgtaagggccgcatcatcacccgcgcgcaggtcagcgatcggccgaataaaggcgcggtgtacatgacctaccagtggtggatcggcgcctgtaacgagctggtgtcagagaacctgagcccgataaccaaaacgccggagtacaagtactgcgcggttaacgttgaacggattgccgatcagcgcgcggcggagcagtacgtgatcgaggagtacaacaagctgaaagcccgcctgcgcgaaagcgcgatgggttaa

SEQ ID NO: 96394 - DNA, 372 bp, Enterobacter aerogenes
atggttatccccaccctggtcgtagtcaacgcgctggtagcccgcttccagccaggtcgagtgcacgtcgttccagaagtacattggccggacgatcgcgccgtagtttttacggttgtcggtattatccttgccgttgtcgtagtcgtggaaggccagcagatactcgatctgcgcctgctgagtgaacttatggctgccctcgaagctggcgtagaccgtggtcaggtcgtcggttttgttatagacgctgttatccgagttatcggaatagcgcaggatcactttgttcactccgctgtcgttgctatggctcagcaccagcccgccctgccaggcatcgaggcgcgcgtcgctgtccaccgcttttga

SEQ ID NO: 96395 - DNA, 480 bp, Enterobacter aerogenes
atgcagtggattgcattgtctcgtttaattatccctctcagtgccctgaatagcagtttgatcaactcgatagggcggtcagatgcatatttacgcgttgatttagctaagttacctattacaataggtgctttatttgttacagtaccgtttggattgcatgtcgttgttatcggcaatgctgtagtgtcttttctatgtttttttattaatgcatattatcctgggaaatggtttggcttgggggcctttgttcaattaaagataatctcgaaaatcatcctggcaactatcataatgtctgtcagtctctattttattcaaactgattcccctttgttggaaattgtattgaaagtgattcttggctcttgtatttattatatgtcttgcttgcttttaaaagtgggtttttgtgtacacattaataaatatatatatatgctagtgctaaaacaaggcaggaaaggtaacttatga

SEQ ID NO: 96396 - DNA, 264 bp, Enterobacter aerogenes
atggatataaaatccttcaaccgctgggatgactacaccacagcgcgcgatgcgatgtttgccgccaccgataccgcctgggcgccgtggtttgtcgcccgttcggaagataaaaaacgcgtacgtctgaatattattacccatttgctttcgcaaatcccctacgagtctctgccaacggaacacattaccttaccgaaacgtaaaattggcaaagtgaaaccgacccattttcctttccggtttattcctgagaagttttga

SEQ ID NO: 96397 - DNA, 477 bp, Enterobacter aerogenes
gtggtcaaacatgacgttgagatcccagatggccccctgcgcgcttttgaacgctttgctgatctggaattcgccgccgttgctttcgttaccgagacggccgatcgccgaggcgccgttataggagccgtcgacgccaacatatttctggtcgccggtctggaagtgggcgccatagcgggcgtaaccgctaaatttcaggccgaaagggatcgccagatccggcgaagcggcggtggtttgcgggttggtcatcacgtcgacctttttatcggccgctgcgtcgattttagcctggcggtcggccagcgctttatcgacggctttcgcgacgatggcgtcgatctgttcctgagtaaaatcctgcgccagtacggaaattgggcacagcgcggcgataaccgccatggccaatggcagctttttaactgtattcatggttatctcactttaataattaatatatgcagacaataa

SEQ ID NO: 96398 - DNA, 1989 bp, Enterobacter aerogenes
atgataaagcatatccgtattttgcccggcgggctggcggtgctggccgccgttttgttctgcctgctgacggcctgtcgcgaccacagtcgtgacggcatgagcggcgccgatttaaacctctacaatcacggtccggatgccatcgtttcggtgcaggtgaatggctacggcgggccaggcgctaactcctacggcggcggcggcggcttctgctgtgtgatggtgcctgatgtctggcgcccggggctgacccagaagttcaaccgtaaaagcgcgcttgacaaattctgcgacgaccatctgggggctgtggtcaaccagtggccgaggcagccgacgcggctgcatatccagcgctcgcagcggcgcatcgccaaaatcaagctctttgtctacggctactgccggggggcctccaccgcccgcgccttcgcccgcgggctggagtcgctgctcgatgatgcaaagatgccgctcgatgcgacaaatatgctgccggcgggcaccgtggtacccggcggcccgaccctgatgggcatccccatcagtatcgagtttatggggctgctggattcggtctccgcggttggcgtgccgcatatcctgccgtcggccaccggtcatctgggctgggcggccaacagcctgcggctgccggccaccaaaggcttcttaaaaagctgctaccactttgtcgccggccacgagcagcacggcgacctgccgctggattccatccgcggtccggacggtaaatatcctgccggggcggtggaggtggtctaccccgggatgcatgccgatatcggcggcgactgtaaacccacagaactcggtaaggtgcagaccgatgccgccagcctgctgtcaaagattgtgctgcacgatatgtatgccgccgccttcgatgccggagcgccgctgagcgtacctgaggaggtattgcccggcggcgccaaaggtaaaaaatatcgggtaatgcaaggggatgtcgcagatcaattcaaaatctccgcccaggcgatcgccctgtttaacgcctggcagcaggccggggcgcagcaggcgggggcgaagagcgaaacgccggccgtcaacgaagcagaggtggtggccatcgccgtagctcagggccgggatccggtcgccgcgctgaaggcggctcacgacaaggcggatggcgataaggcgaaagccgcggccgccgccgcgaagccgccggagaacggcccgctgggcaagctgccggatccggtgtatgtgccgctgaaggccaaagcgctggaggtgatgctggcggaccagctgagctggattaccgcctggcgcaccgagcgctttgccagcccgcaatacgccgataagtattatcagcgtaagcctttttatcagcaggcgctgaatgagcagaccggcgcgctgccgtcggcggcggcgcccgcggaaagcgaagggccgcgtgaagtgccgtttatcgataaggatcggctggaccgcgcggcgtggggctatgactttgcccataccggtatcgtggcgctgctggcccaggtgctgctggatgtgatccccaccacgcagaccaaccagctcggtggtccgctggtggcggcgcaggagtcggaatatatccagatcaagaaaagcggcgatgcccggcgggcggcgctgatgggctcgccgacgatgctggatttttacgataactacgtgcatgacacgctggctaaatataatcacgacccgctgcactcctcgttttcacacggttattttgcgtcgcggacgatttacgataacgatgacgatacgtgggattcggtgaaacaatttggccagcgggtaaaagcgattatagatattaatgttggcgatatattagtgcaggcgcgaacggatatgaaagatctgaatacggtatcgggcgtgttgggtaaaatatatcgcgatataaaaagcgaggcttttaaaatactgctgccttaa

SEQ ID NO: 96399 - DNA, 252 bp, Enterobacter aerogenes
atgtccgacaccgcagactccacgctgaatgccctgaaggcgcttattgcggccttccagaccggtgccactccggtcgctgttaaaacctccaccgcagaagcggccagcttaccaccgaagtttcccgggccggatgatgaaaaggagaaaacgcccgcggataactccacgcagcagaaaaccgaatacaacaagcgcggccgtctgccggcgagcagaacgcagaccgaaggaaactatgcctcttag

SEQ ID NO: 96400 - DNA, 954 bp, Enterobacter aerogenes
atgaaggtgttattaaaatccggctggctggtgctggcgttgtggctggtttcttttggtacacaggcctcctgtggtttcgcttccggagtgagtagtgaagttccggggtatatcagtttcggcaacgtggcggtccagcgtgatgcggcggtgggcagtgtcatcgccacggccacaacgggggcgtataacggcggcaatactatcgccgggtgttcagaagcctggacctaccgttgggaactgagtaaatggggaacgctgagcagtctcggaagcaatatctataacactaatgttcctggagtgggtatccggttgactaacacctcttccgggaaagtgcttccctatgaccagagtgtgggcgcgaatgtttatatttacatcggtggtgatggtattaaagcggagttaatcaaaacgggcgatattacgggaggaacgctggatagcggcatgctggcgcgggcctcggtggcaaaccagttttattttgccaatgtcaccctgaatggcacaaataccattacctctgaatcctgctctgttaccactaacccggttaatgtccctctgggcgaccatgacaaaagcgagttcagcggtccgggttccggaacggcctggcagacattcaatatcaatctgagttgtattcagggcgcacggattaatgtgcgtattgacgccacagcagatagcgacgccggcgtacccggcgtcattaaactcgacagcgatccggtaaatgccagcggtgtcggcgtgcagctctggtatcgctatgaagacagcccggtacagttcggtcaggagcggtattactacacctcgccatcgggtggtaacgaatatgttcagcttcaggcgcgctattaccagacaacacagagcatcacggccgggaaagcgaacgccacggcgacgtttacgttgacatataaatag

SEQ ID NO: 96401 - DNA, 2505 bp, Enterobacter aerogenes
atgaacaaccctgaacggcgcaccacgatgatcctgctggcgctgctgctggtgatgatcctcctactggcatatttccgcaacgcagaggctcgcgagaccttcaatacccatgcgctggaaatcgacaatcccggccagccggtggcggatttatccacctttgctgaagctgacggccagttgcccggcacctaccgcgtgacggtttacgtaaacggcgagcagcagggcgaggcgcaggatatcgcttttgccgctgggccagacaaaaaactccgcgcgcagataacccccgccatgctgaaaacgtggggcgtaaaaaccgaagcttttcccgcgctggcagcgttaccgtcagataaagcactggaggatatcggccgctatatcccgatggcgtccagcgagctgcgcttcagtaaactgcaactgaatgtcagcattcccctggcggcgatgagcgccgcggcccgcggccaggtggacccctcgcagtgggatgagggcgtgcctgccgcgttgctgaactacagcctcagcggttcgaacacctggcgcgatcacctgagcggctcagaggataactactatgccaacctgcaaagtgggctgaaccttggcgcgtggcggctgcgcaactactcgacctggaactatgatgaggatagcggcagccactgggattctattaacacttacctccagcgggatattaaatccctgaaaggacagctgacgctcggcgacagctacaccccttccgatatctttgacagtgtgcagtttcgcggcgcgcagctggcctcggacgacaatatgctgccggacagcctgcgcgggttcgccccggttatccgtggcattgcgcagtcgaatgcgcaggtgacggtgaagcagaacggctacatcatctaccagagctacgtcgcgccgggggcgtttgccatcagcgacctctacccgacgtcgggcagcggcgacctggaagtgaccattaaggaggccgacggcagcgagcgcacttttatccagccattttcagccgttcccattatgcagcgcgagggccgcctgaaatacgccctcaccgccgggaagtaccgcagcggcaacaacgacagcgacgagccgcagttcggccagataacggcgatttacggcctgccgcacgccatcaccatttatggcggcgcgctgtactcggaggactatcagtccggggcggcggggctgggctttggcctcggtacgctcggttcgctatccgccgatatcaccgccgcgcacaccaccctcaacaacgatgaaacccacgacggccagtcgtaccgggtgcagtactcaaagaatttccaggccaccgataccagcttcaccctggcggcgtaccgctactctaccgaaggcttttacaccttccaggaggccaatgatctgcggacggacagcgatgacggctggcggatgcagtacaacaagcgccagaaactccagctcgacctcagccagagcctcggcagctacggttcgttctttgtctccggctaccaacaggactactggcgcgaggacggctacgagcgcaccctgagcaccggctggaacggtaattacagcggcgtcagctacagcatcacttacagctacagcgactatcctgacagcacccagcccgccgaccagcagctggccttcagcatgcaggtgccgctcagccgcttcctgcccaacgcctgggccagctacagcatcaacaccgcgaagcacggcgacacccgccagcaggtagggctcaacggtacggcgcttgccgacaacaacctcagctacagcctccagcagagctacaccaaccatggtgtgggcggctccggcaacatcaacgccgattacaagggcggctggggcgaagtgaccggcggatacaactacgacgatgacagccagcaggtcaactatggcctgaaagggggcattgtcgcgcatccacatggcatcaccttcgggcagccgctcggcgactcgctggccgtggtgagagcgcccggtgcggaggatgcaaaagtgcagaacaacaccggggtgtacaccgactggcgcggttatgcggtggtgccctacgtcaacccgtacaagaaaaaccgcatcgctctggataccagcacgctcggcgatgaggtggatatcgataccgccgtccagaccgtgacgcccacccagggcgcggtggtgatggcggacttcaacacccgcgtcgggcggcgtgtgctgatgacgctgctttaccgtgggctgccagtgccgtttggcgcgcaggcgaagctgaaggaaggcggcagcggcatcgttggcgatgatggccaggtgtatctcaccggcgtgccggatgagggcgatatcgcggtgagctggaacgggacgcggcagtgcatggtgcattaccggctgccggagaatgccggaaacgttccggtgacggaaactgaacaggagtgtcgttaa

SEQ ID NO: 96402 - DNA, 681 bp, Enterobacter aerogenes
atgaacaggtatgtacacgttgcgctggcgttcttgctggctttatttaccgtgcaggcgcaggccggaattgtgattggcgggacgcgggtggtttatgacggggataaaaaagaggcctcagcgtccatccgtaacccggaaaaatccggcgtttatctggtgcagagctgggtggataacggcgaacggggcggcaaagcgccgtttatcgtcacgccgccgctgtttcgcattaaccccggtgaagagaatatgctgcgcattattcgcaccggcggcaacctgccgccggaccgggagtcggtgttctggctgaacgtaaaatccattccggccaccgatgacagcatgccccataacaacgttctgcaagtggtggtgaagtcgcgtatcaagctcttttaccgcccggcagggctggatggtcatccggaagccgcataccgccagttgtcggtggcccacagcggcaatcgcctgaccgtcagcaacccgacgccgtattacgtcacgctgttcatcctgaaggtagatgagaaggagataaagagtgcggatatggtgccgccgaagggcagtgtgagtttcacgctcccttccgccacggcgtccagcgttagctggcaggccatcagcgactacggcggcgtcagccagatcgaaagccgccagctgtga

SEQ ID NO: 96403 - DNA, 513 bp, Enterobacter aerogenes
atgaaaaaaacgataacaatcgcgtgttttatgctggcggccagcagcgcgatggccgctgacgggacgatcaattttactggcagcattaccgaccagacctgcacggtcgacagcggttcacaaaacctgaatgtcaatttaggcaacgtggcgcagaccgcgcttaacggcgctgccggaatgaaagcggcgccgacgcgtttcacgcttagcgtaagcggttgtccggataccgtaacgggagcaaacgtgaaatttgacggcaattccgacggcgtaaaccagaacctgctggcgctggacggcggcacaggtatcgcgaccggcgttggtattgaaatcgctgacaaaaacggtacggccattccgcttcacaccgcctctcctgactacaccctggccgcaggggccaactcgctggactttatagcccgttatgtctctaccggcgcagctgtcaccaccggtacagcaaacggcacctcgcagttcaccattaactacaaataa

SEQ ID NO: 96404 - DNA, 711 bp, Enterobacter aerogenes
atgaacgagaaaaaaataattgaaattgctaatttggaaaacgattgcaaaataggaaaggatagacattttatagccgccgatcgaaaaaacaaatggagaatttatcttggattatttgcagtagtaggttctgcgataatatcctcaggaataggaaagagtatactttctctgctagatgcttatattaaatcagaaaactgggccttttgggatgccactttaagtcatattttaccgttacttgttggtatatctacagctataataggttttcttggtttagagaagcagactgctcaacatcgttatgtggggaatgcctacatcgaaatatcaagaaaggcaagatctatcttaaatgaaataaacaaagtaaatttcgatcaaaaaataaaagaatatgaaccattactagaaaagtatttagaaataaataaagaaggcgagtcatgcccgactaataacaaagactcattcaaagctatgaatatgaatgccaatagacgaaacgctataaaaggtaaaattactgaattagaaaaagacattattaactttacccctaagaaaaaatgtaaaaaaatgaagttgagcaaagtactttctaatagcataaaaataaaaatagcatatctactattttcatttaatattattagaaaaagtgattatttacgatatgtaaaaggtctaatagcattataa

SEQ ID NO: 96405 - DNA, 708 bp, Enterobacter aerogenes
atggcgcagaataaatccgccaggaacgagtttggtacgccgcaggttcttgtggcgcgcatcgcgtcgcctccggacaatatagtggtgaacagggttattctgccgccggatagccgattgcaccgctgtcattcccttcagtggtctggcgacagttttaatcctggaagagatctgcaatcctgggaatatggcgcacgcttcagttcctttaaggatgatgcagggcaatatgttccctggctgtatgcagcaggttcactgcagggcgcgctggcggagaccgtgtttcacgatcttatcggcgaagcacggacaggatttctcagcctcaggcctttcagaaactggggctacacggaacttgccagtaccagaaaactgcaactagctagtctgaagtcgcaggatctatatcgcatgggcaccagtaaggctgacttgatcgagagtggaaggctgctgtatacgcagactcgcctgtgggcacgggcaatatatcttcagcattctgatatcgatggactggtctggaaatcgcggcagcatgatgacagtgatgcgtttgtgctgttcggtgacagggtcaaaccgggagatctgcgtatcgccagttcaacggttcgctttacggatgatgtttctacaggatacgaaatacagcagatggcacagcggcttggcctcattctctctgatgaataa

SEQ ID NO: 96406 - DNA, 726 bp, Enterobacter aerogenes
atggcatccggaacagcagtaagaatggagaaagacgccggacgtgtagtggtcgatggtggagacgtacgcctctcttttgcgcgggataaacatcatggcgtacgcaaacaggaccagacttacacggtggaactgatcgtcaaagaggtggacagcagcattgatgcgctgcaacatcagcttgaaacattgctgcgtgcgacagaagcgctgaagaataaacgcaagacggtgaaatctggcaatgttgaaactctgctgtcactgtttaaaacagcgctggaaacagaaccacaggaaaagggtctgcatggccttgtcgacgaggaaaggctggcgcaggcgagagcgaagttggtagaagaaggctggctgaccgcgcgcgaaatcgcgcaactggcggggttttctgcgctgaatccttcttcgcaacccagcaagtggaagcgtgcaggccgtatttactcggtatataaaaaaggcgtgggcgaggtatttccccgctatgcgctggatgaaaatctgcggcctttgcctgtagttaaagtgattctggatattctggccgaagtgaaaacctcatggggcatagccgagtggttcgccacctcaaatgatttgttagccgggaagatgccgcaggagatgttgctgcgttatccgtctaatgttattcaggctgcggaagcggaagccgggcggatgcgggatggcgcagaataa

SEQ ID NO: 96407 - DNA, 492 bp, Enterobacter aerogenes
atgatattgatagaaaaatccagcccagacacgccagaatctttgtatcttatcgaaatgctatccgcgacgctggctgagattactggcgatagcggaaagactaactttaacgtcgataccatgaaatctgatcgagcgctgtgggtagtggcaaaagatgaaaatggcgaggctatcggttgtggggcgatccggccaatatctgaagatattgctgagttgaaaagaatgttttccgtaagcaaagcatccggaacaggcacggcattgctccggtatcttgaaggtgaagcgaagtcgcttggatataacgaaatcaggctagaaacccgtaaagttaatacccgcgcagttgctttttatgtaaagcataactatcagcgcatcgctaactatggcccgtatgtgggtaaagatgacgcggtttgcttctcaaagcgcttatctctgaaggagataaagcatcagtgcagcggcaacgtgacgtag

SEQ ID NO: 96408 - DNA, 228 bp, Enterobacter aerogenes
atgctgaccgcgcaaatggtgcagatccagccacgaaagaagcactgcgctatcgtacggcgctttatgaacggttatatccaccttgaggcatatcagctctgtaaaaacaccacgataactatctgcaccaaatcacccgtagtgcaaaccgatatcaggaaaacgctaggaacagtattgcgcgatcagaatagcaacgtgttatacaacgccaccggtgagtga

SEQ ID NO: 96409 - DNA, 279 bp, Enterobacter aerogenes
atgactgataagatttcggttgttcgggcattgatggcagaaaccatagagtatgtatgcaagcagcagccgaaaatctacacccatgaacttattcaggcactttttgcactgccgtattgtcggatcgataaccttgttgcacgaagtatagccaaacgccagacagcatcatcatacctcaaacaattggtagaaataggcgtgctggaggaaatgagtgttggccgtgaaaagctgcatatcaacaccagactgttacgggaatcgaatcagtaa

SEQ ID NO: 96410 - DNA, 1227 bp, Enterobacter aerogenes
atgtcagaacaaagttatataagcaaaattcaagatactagggttgactgttggtccgctttagtcgaattcgaggttaacgattaccttgagcttgcagagaaagcttatgtgaatagaggagggatacgacatcaacgtgaagctctgaaaaccacaacagctaaacgcattcgctctaggcttgtcgaagacttgaggcgaggagccgtgatcccgcctctggttattggtatagttgctggagatgatgattggcgaaccatcgagggtatttcagaggccgatcaagtaaaacaactactaagaaaatattatgaagatctatctattattgatggaatgcaacgcacaactgctcttaaagaagcattagctttagatggcgaggttggcggacatctgattagggtagaagcttggattgcgaaaggtactgaaagtttaatatatcgaatgctcgttctgaatacggggcaggtaccatggaatctgaaacaacagcttgaggttgtttatgcaccgctggtgaaaacaattagtcataaagttaattttcgcagactcctgtcaggatcagatagacgatggcaaggaggagagtttaaaacggactcattgattgaatcttacatagcttttggattacgtcgaactgaggtcgatactcaagaaagtttagcagatgagttttcaaggctagatatagcagaggctcttaccaataaaaagtatgaccattacttttatcggatcgttcaaatgctagttaatttcgatattgcgctttcgcgatataatgaggttataaatatcgataccgcagacccttcagatggctccgacagtttagaggtaggggtgaaaacaaggaaattagtgaggggccgtaatatttttgatacacaagctgcgcgagttggtttcatagtagcttgtgcggtcaacatcctcggcagagtgggcatggataaggatgaagagacgagtgaggagagatgttcctcgctcgagcaatcctgtaatgctttagttagcagaattgaagggttaaatggaaaaggtttagaggactttttactactagatgttttagctgagaagttgtctcataggccgagttcagcagttggtaggtgggaacgatcgttttttgaggctgcgttccgtgtattagttgaagaaaactttaacgtacccaatatggagccgtgctggcgggcatga

SEQ ID NO: 96411 - DNA, 1011 bp, Enterobacter aerogenes
atgtacttagccgatgataacggtagatggcttgcacgtaaggatgaagtagatcttaaccttatgactaatgctgaagtagaagttcttacattgggtgcgaagatgttcgcaatatcaattaaaaacggcgacgataagtatttttgtttttgtggcttagatattcccgaacagcttcccgctaatctcgaagaaactgaccctactccgggattattttcatgcgttgtattctgtgcccaactacaggcaatagcgacagcatcccaggcaagagacatattagaacagcagtactttggccaagaagggtacagcgggcacgagctaaacgagatcgtacctctcttcccagcattatactttttgaaagagacaacaaaagacagtactccttatttgaataatttagaacgtgtagctggtgcctttattactgcaggttattcaagccacccgctggaagttaatgctagtttacggttgcggctactttcgctatttgaagctggttcagaaactataccttttggtcttccgttgcagggattattatcctacaattggccttctttgtttttagatctttaccgatgcttagagcagttatataccgtgttaaagttgaagagtttagtgacaaaactcccgtacaacggcgctttggctgaacttgcatacttacttgaagatgaattgtcatggaggcctaaagagcaggatgcattagcaagcatattggcacatacagttgaggatactcgttcaaaaatcctatcggcctttaaattaaacataactgattcaaccgaatattcggcaagcaagtgtgcaagctatatatataagctcagaaattctcatgtacattttcgtcctgctatgaaagcagagaataaaccaaccgaacaatggaatgaaattgtattagctatgtgtgatgctgttgatgatgtttacgaagcacttggtattgatttcttgaaggatagatcatgcatatcatag

SEQ ID NO: 96412 - DNA, 645 bp, Enterobacter aerogenes
atgaatattttaactgaagaactaaagaaaagggggatttcatttttcggaaagtattcggttaatatagacattgataaaatcaggatcaaagatgaaactatatatgggagatcattcaagattttagatttaccactaaaaaacaaagagcgatcttacaagttagtattaaataaagaaaccaatattattcttgggcaaaaatccatttttaagaaaaaattactcaatgcgatgctatggcgtgtgttttttatcccatatctattactctgtatattatattgtgtctctttctcttacccaattacgggcattgccattatgctcttattacctgtagctttcggattcattatttattcaatgtgctacactgaattaaataactatttagataaaatggctgacactgtatctttttttagcggcacaattactgcttgcatcgcaataataaaattttcattatcggaagataatcagttattttcattaaaaagtaattttttaaatattcccatattagttttcctgatcgtctttgcttttttttgcaagcataaaattttttatttccatgaaccaaatgttaaaggcaagaaaggtatatttatctcaagcatcaaaccatcaagatag

SEQ ID NO: 96413 - DNA, 900 bp, Enterobacter aerogenes
atgaaacgcgatgagatagcagatctgatggcattcgtggccgtcgccgaagagcgtagcttcacccgggctgcagcccgtctgggcatggcccagtctgcattaagtcagatagtgcgtcgcacggaagagcgattagggttacggcttttaacgcgaaccacacgcagcgttgttcccacagaggcgggtgaacacctcttgtctgttcttggcccaatgctgaacgacctgaattccgcgttgacttccctgggagacctgcgcgatcgcccgtccggcaccatacgtattaccacagtggaacatgccgcaaagaccatattgttgcctgccatgcgcacgctgttgaaatctcaccctgacattaatgtgcagatccttatcgattacgggctgactgatgtcgtctctgagcgctttgatgccggagttcgcctggggggagagatggataaggatatgattgcagttcgaatcgggcccgatattccgatggcaattgttggcgcgccggagtatctctcgcgtaaaggtattccagtgtctgtggcgcacctggtcgatcatcaggctattaatctgtacctcccctcatcgggcaccgcaaatcgctggagattaatgcgcggggggcgcgaagtcagggttcgcatggaaggccagcttttattgaatacgatagacctgatcttcgatgcagctattgacgggcacggcctcgcgtatctgccttatgaccaggttcagcaggctattcaagaaaaaaaactgacccgcgttctggagaaatttacgccagacttaccagggtatcatctgtactacccacaccgccgccacgcgggttcggcattttctctgttaattgatgtgctgaggtataaaggggatgtttaa

SEQ ID NO: 96414 - DNA, 921 bp, Enterobacter aerogenes
atgaaccagaaaatcagcttcaccaacagcaatatcccgacaatttctttgtccgctgtactttatttcccacccgcatttgatgaaagccgcaagtacccggctattgtggtttctcatccggggggcggcgttaaggaacaaaccgccggtacctatgccgaaaagctggcagaaaaagggtttgtgacggtagcttacgatgcgtcttatcagggcgaaagtggcggcgaaccgcgccagctggaaaacccgtacatccgtactgaagatgtcagcgcagtgattgattacctgaccacactgccttatgtcgacaccgcgcgaattggcgcaatgggaatttgcgccggtgcaggctataccgccaatgccgcaattcaggatcgtcgcatcaaatccatcggaacggtcagcgccgtcaatatcggttcgatgttccgaaatggctgggaaaacaatgtgaaatccattgatgcgctgccgtatgttgaggcgggttcaaatgcccgtaccggtgatatcagtagcggtgcacatgccaccatgccgctggctcccatgaaggagtctgatgctccaaatgaagagttgcgccaggcctgggagtattaccatactccacgggcacagtatccgaccgccccaggatacgccacgctgcgaagcctcaatcagatcattacctatgacgcttaccatatggcggaggtttacctgacccagccgctgcaaattgttgcgggtagcgcggcgggaagtaaatggatgagcgacgacctgtacgatcgcgcctcaagccaggacaagcggtaccacatggtcgaaggtgctaaccacatggatttgtatgacggtaaagcctacgtcgctgaagccgtttccgtattagctccattcttcgaggagacgctgtcatga

SEQ ID NO: 96415 - DNA, 933 bp, Enterobacter aerogenes
atgaaacatgttcaaatccagaatgccgatatggcctggcatgttgccgccaacgttcagtttccacctacgttcgatgagtcaaaacagtatccgacaattatcagcgtccacccttttggcagctgtaaggaacagacgtccggcaatgtctacggaaaagcgctggctgaagcgggctatgtcgtgatcgcctttgacgccagcttccagggggagtccggcggctctccacgctgggtggaggatccgactcagcgcgtggaagatatcagtcgggttattgattacgccgtcaccctgccgtatgtcgatgctgaacggattggcgtgctgggtatttgcggcggcggtggctatgccattaatgccgcactgacggagaaacgtattaaagccgtggtgagcatcaccggcgtaaatatcggtcgtctttttcgcgaaggcttcagcaattacgaccctattggcgcgctgaatgcgatggcggcacagcgtacaaatgaagcccgtgggggggaggttcaggttaatgaactgctccccgccagcccggaaatggcaaaggctagtgggctgactgagcgtgatgtatttgaggcaacagactactacaaaacgccacgcggccagcagccaggcggggcaacgcggatggtgttctctcatgcgcagaaaactctggcctgggatgccttcgctttcgccgaagtgttgctgactcagccagtaatggtggtagttggtgaaaaagtgggtgctttcggtgcttaccgtgacgggctggaaatctatggccgggctgtagcctcccgtgaccgtcagctggtctcattagccgatttttcgcattacgaactgtatgacaaaccggaagcggttcgtgaagcgatgtcaaaagtgcttccgttctttgctgcacatctggagtaa

SEQ ID NO: 96416 - DNA, 651 bp, Enterobacter aerogenes
gtgaaagacatcattcaaaaagtcctggtacttggcgccagcgggcagattgcccgccatgttatcgaccaattggccgataaaccaggcgtcacacagacgttatttgcccgtcagccagaaaaagtcacccagcctcacccggccaatagccggattatcatgggcgatgtgttaaaccctgcggcactggaacaggccatgatgggtcaggatgtggtttacgccaatctgaccggggaggatttggatctccaggcgaaggcggtgattgcggcgatgaaagccgctggcgtaagacgcctgattttcgtcctttctctcggtatctatgatgaagtcccgggaaaattcggtgagtggaataacgccattattggcgaacctctcagaccattccgccgtgcggctgatgcgattgaagcctccgggctggattacaccatcctgcgtccggcctggctgacggatgaagatacgattgattatgaactcactacccgcaatgagccgttcaaaggcacggttgtatcccgcaaaagcgttgccgcattaatcgccgatatgattgataaacctcaaaaacatatcggtgaaaatatcggtattaaccagcccgggaccgacggcgacaagccgtactttatgtaa

SEQ ID NO: 96417 - DNA, 834 bp, Enterobacter aerogenes
atgaatcgtgtttggtttgtaaccggggctgcccgcggtatgggggtcagtatagtgaatgccgctttgcaacagggagatcgtgtggtggcaacggggcgtaatatggacaaattacgccaaatattcagcacggtagcggcagagaatattgagctgctggagcttgatgttcgcgatgagcaccaggctaaggttgctgtagatgccgctgttcgccgtttcgggcgtattgatgttctggttaacaacgcaggattctgcctgctgggtcgctttgaagaggcaaccgctgaacaaatagagctgcagtttgccactaacgtgttcggcacggccaatgttctacgcgctgtcttaccggtcatgcgccagcagcgtagcggacgcattattaatacgtcctcgatcgcgggtgtcaaagcggtcgcaaacgctacattctattctgcatcgaagtttgccgttgaaggtatgacgctggcccttgccgatgaagttacgccgcttggtattcatgtcaccgcgattgagcccggtttcttccgcacagagtttctcagtaatagttcggcccactatggcgaaaaaaagattgaggactatgccgatttcggcgatgcgcgtgagttactggcatccgcagatggtcaacagcaaggggacccggccaaacttgcacaggtcgtttgtcaggtggttgaaatggagaacccaccccgacagctgcttatagggaatgacgctatcagttatgtaatgccttcgctggaagcccgtattaaagagatacgcgaatttgcggcgctgagtaatacaaccgattttgattaa

SEQ ID NO: 96418 - DNA, 1128 bp, Enterobacter aerogenes
atgactgacttattaacccaggccttcacgtttaaaaatggcctcaggatgcgtaaccgcgtcgttatggcaccgatgaccacctggtccgctaatgacgatgaaactatttcagatgaagaagtaaactattatcgggcacgcgctaccggtgtgggattagtgataacgggatgcgctcatgttcagagaaacggagtgggtttcaccaatgaattcgcagcctacgatgatcgttttatcccgagtctgaggaaactggctgatgcggcaaaaagcgggggggcgctggcaatcctgcaactgtttcatgccggtaataaagcggttcccgaactcatccctggtggagagctggtcagcgccagcgccctggccgctccggctggcccttttaatcgcggggaacaagccagccgggcgatggaacatgacgaaattcttgatgtcattcatgacttcggcgaagccactcgccgcgcaattgaggccggatttgatggtgtcgaattgcacggcgcacatggttttcttatccagaacttcttctccccctggtttaaccagcgtactgacgaatggggtggttcattagcaaaccggatgcgtttcccgctggaggtcgttcgggaagtccggcgggttattgaaactcatgccaggaaaccctttttactgggttaccggttatcgccggaagagtccggagaaggaggattacggattaatgactcccaggctctggtgtgtcagttagagaaagagactctcattgactatctccatatctcactccacgacgtactgaccgatcggccgcagggtagtgaggataaggaaacaattctggcacggtttgtagaacaatttaatgggcgcttacctttgctggcagccggaaaaattacttcgtcacaagcggctcaacaggctctggaggccggactgtcactggttgccttaggccggacgattgtcatgaatcccgactggatggagctggtgcaggcaggccatgagaataaggtaaaaaacacgcttatcctgtcgcaacactcagacgaactgacgatccctgaaaaactatggcaagtgattcagaagacgcccggatggttcccgacataa

SEQ ID NO: 96419 - DNA, 300 bp, Enterobacter aerogenes
atggaacccgcatttatcccggaactggtttcccgttacagctttaatcaggtggaagtcacagcgattggatgtacgcggcagagtgaagcccatcgcaaagggttatgggccattctgaccaacaacaaagaccgcctggtcgaaattgatgttggccttgatggcagaatcccgcagccgggttacatcattgggctgggcgacgaacggctgacgcagataactattatgccgttgactggctggccgttgggcgcccgactcctggcgcatcgcaggcgcagattcaggacctga

SEQ ID NO: 96420 - DNA, 429 bp, Enterobacter aerogenes
atgtataaccgtaatgagctaaccatagccatgttctatgcctccagcacgaacgatgaaggcaataaggtcgctatgatcaccgttaaggtgaacaactcggatcaggtatccatgcagaccagcaagctggtatgtgtcaccgggaaagacaacaagaaaacctaccaggttggcgagcagtcagttagcaatggttctgatccgttactgacggccatcgagaactactggcggcaggatacagaaagcatcgttaacgctttattgatggatgttagcgacttcatcaccggcaatatcaataccaacgcaaccttccttggtttcgatggactcaaaatctttgagatgcagccgttggaaagctgtatccctgatagtgtgctgcaggctgatggcagaatcgctcctgagttagaggaataa

SEQ ID NO: 96421 - DNA, 255 bp, Enterobacter aerogenes
atgctcaagcccaaaccgctgcagcgcgcgctgctgccgctaatctctctggcactgttaaccagttgcgccagcaggcaaaaaaccttgccatccgcctggacgccgcaaagcacaccgcaagtcttgctgctaccgtcagaagcaaaacaaccggcgccaccaccggaatgctcgccgacatgcttggagaccttgcagaagaagctagacggtatgctgcaatcgctgacgaacgctacactgcaggaatga

SEQ ID NO: 96422 - DNA, 189 bp, Enterobacter aerogenes
atggtctcttcagtaccatggccctatcctgataataatgccgggaattacgttaataacgttgccctgcctgatatggcaaatggaatagcttggttctggactatcagacatcgtgaaacgcctgacaaactgatgggcttaatctgtctgtatgacattgaagataaaaccgtgtgttttggttag

SEQ ID NO: 96423 - DNA, 900 bp, Enterobacter aerogenes
atgcaaggtttttacttaactaatttacttccacctgatatgccaaataaattctcaattaccactaatggcatcctttggaatttagaaaaaatacaacaccctgatttcaataatgttattaatgagattaaaaatggtgcgtgcgccaatacatattctatatcaacaaatataccaagtaaccaattgagggtgtctggattaattgaagatagctatttcgataaaatcatggataatcttttgaaggcatgccttgcattttcttttattactggaacatctgttcgaccaacctgttcaacgcctttctccaaagttggtttaattcaaccaggagataaattcccaagagatcattcaatacactctcctgagtcttgcttgaacactttaagttattatatagattttgttgagtccttctgtaacaacaataacgtttttagcacggaaaagatgttacttataatgcattattatcttgattcaattgctgcatggtctttagaaaaccaatatacccttctcacaactatactacaaatcattggggatactgaaaaaacatctggaagacaatttgcccaattacacgcaatgcaaagaggatcccaggttggtttttatgattatttagctggagctgcagatcgagtaggaatccaaaaactaacctttgacgctgtgaaactaagaaataaattaatacatgagggcaagtttgataattccacatacccatctaaaagtaatattaccgacttgatttcagaaagcttttcttggatagattcctatatatttaaaacaattggattacaatatcaacctaatccaagacatacatctaaaatgcttgaaaattttatgaatagtttctcccatgatctttaa

SEQ ID NO: 96424 - DNA, 1038 bp, Enterobacter aerogenes
atgaaccagagtaacttatcacaccccaaagtaattagtttaattagaaaggatagcgataaagaatcaaatgatggagattctactggtgatattgctaatctcatgttggaacgtggtatgtcattgtcagaacctgtactagatttgcttttaagaccaattttgcattgccaatgtatagtagatagcaatactactgttaacttagagtattcatttcccaccagtctatcttttagagaggttattgatatgggaatggaaaaaaaaggagagcccggtgatgttaatttatataatattattaaattgatatcaaaaggaataagtaaaaaaaataaactacctgtaatcttcgaaagaatgaaagaaaccataactggaagctctcaggaaaaccataaaaaagtttcgcgatgtgtcatcatcaatgatgatttcgtgaaaattaacaaaaaaaacctaatttctcattataactacactgaatcggatgctagtgcattcatgaagaaccttcattttcttactgttcaaggggtgaaggtgagcgaactttttttattgaaagccgaaaagatttctgcgacaaagtggtttatgttaggggtgcttttttcaaagaaaggtgttcgtgttgatcattggataaatttaaatgttatggagaacaacctccaatatgattcagagaacaatttaacacctgaagaacacgcgaagaaaaacatggctgaaatacattttgtttcatctgacctaaccttctggaagtcggttactcaatggtggattaataataataatgaaaaactcggcaatctaaccaaacttgataaaaaaactaaggataggctaacagttaataccataagacataacgctgtaaattatgttatcagttggttatatgttgaggggtcagatattcatgatgctatgttttgtcttataaacagaaagatagcaaatcagtttccaactcttagaaatgaagccataagacaaatagaagcaagagattatgatttttag

SEQ ID NO: 96425 - DNA, 2157 bp, Enterobacter aerogenes
atgctcgaagttgaatttcaggaatggttgaagagcaaaggcgccaaaacgcaagcaggcctcaattcccgtatttatgctgtcaaaactatagaaaaaaatctcgcagcacttggttctcctcatgcagatctggatgcagcctacaaggcggatggatttgcacaattgcggcagcggatcaaagagattcgccgtgatgccaaagacaacggcaatgactatcggttactaatgcctgaatcagagcaaccgcttaaccgattgtctaactggaatagctggctcggacaatatggacgttttctgagcggtgatgactctcaggccgacgaaattcgggattatgtccttgaaaactacatcaccccagccagagagcgaggtgacacaagtgtcaccctggtagttggtcctctgaatactgaaatgggtctcgacaagggatggccgaacatctgtcaggctcttgatggtcaaaaatttcaggaactagcggatgttccccctccggtgacggaagggcctaaaaagagcacaacccggaaatatacgttcatccttacggaaggaagcgaactggtggcccagactaaaccaactccgactaaccttattttttacggtcctccaggtactggaaagacctatcacacggcgagggaagccgtagcgctctgcgatggcaaagatgcctatccgaactcaaaagatgggcgtgcggccctgatggcgcgctataacgaactgatggcagaaaagagaatctctttcgtcacattccaccagagctatgactacgaaaccttcgttgagggtcttcgtccagaaatcggtgaagatgagtcttcgtctgctggattcagactcatgcctacgccggggctcttcagagaaatttgtgcccttgccgatcaggccagaacacaaccccgtgcacagacagatgcctcggcactgcaactatcccagaaacgcttctggaaaatggggcaagggacaattggcaccgaagacgatgtgtatgaagatgcccgcgacaatgggtatatcgctctggggtggggtgggaccatagactggagcgcggatagattctcatcgttcaacgcgattcatgatgaatggatcaagcaaaatccagggaatctgacgcctagtaactggacgcaaacctatcccttccgttgcgaaatgaagcctggtgatatcgtgattgtcccttacgggaacactgcgtttcgcgctatcgctgaaataactggtgattactatttcgttcctgaagccgaaggttactatgcccaccgccgcccagttcgctggctactgacccttgatgaaccactgccactcgatacaattatcgatggtaacttcaccatgcggacgctctattccattgccaccagtcgtgtgaatatcccggcgctaggcagactgctctcgagtacagagaacctggataatagttccgatgttaaaggacaaccagaacaattcgtcctcattattgatgagatcaaccgggcaaatatctcgaaagtgttcggtgaactgattacgttaattgagccggataaacgtcttggaatgcctgatgcactcaccgtaactctgccttattcgaaaaagaaagattttggcatccccgccaaccttcatatcataggcaccatgaataccgccgatcgatccatcgcattgctcgacacagcattaaggcggcgattcaacttccgggaaatggctcccgacgcaaccctgctaagtgaagtagaggggatcgatctcaaagccgttcttaccaccatcaaccagcgtattgaatatcttataggtcgggaatatcgcattggacacgccttctttatcaattgtgaatccagggcacaagttgaagatgcagtgcgcaataaggtcataccgctgttacaagagtatttcttcgaggactggagccgaatcgcggcagtgctgggcgatggttttatgcaggaagcgctgattttaccgccacccggaatagagggggaaccattatcaagctggtcggtacgtgcaccgttcagaaatgacgcctttgatcgactgataggcaaaaccagaacgttaaatgtcaccgatcttgaggtggctggtgaatcgaaagaatga

SEQ ID NO: 96426 - DNA, 1308 bp, Enterobacter aerogenes
atgacgcacctcacggttcgcgaatggggtggtgtttgtgtgaacactgaaagcagcataaacgctcctcatgcttttacccgccctcaggctaacgcgctgcttacggcggcgcgcgagcatccgctggcaaatcagcacggtactaatatcttaatcgatcgccataacaaaattattgccgggcaaatggttggggtcattgccgctccgggatgtagccttgagatcctgcccaaattcgacgacgagacgatagaaccggacgccacaatacgcagtcgcctgatacgtatgcttgatgtcgccctcggccttaaactcggcaatggacaggctgcaacaatggcgagacaagctgaaagcttacttgagatactcatccgcttgttcgccgagcgactcttatctgaagtacatcggggattaccgcgcacctatttggcacaggaagacgatttgccctcattgcgcggaaggctcaatatcaaacgacaattcactacgcttgccgtccgccccgaccgtctcgcctgtcgttacgacgaactgtcggctgataccgccctgcttcgaattatgaaggcgtgtgtagttctgcttcaccattatgcccgcgctgctgatactctccgtcgtctgaatgaattgcgcatcctgttagcgggtgttagcgacgtccctttcagtcatctgccgtggtcacaggtacggatcgaccgaaccaatcatcgctgggaagccctctacaatctggcacgtcttctcctgcgacgcgactggcaagctacacaccacgataaacgagcgcagaacgggattacactgcttttcccaatgaacgacctgttcgaggcatatatagcggcgctggcgaagcgtgctgtacgcggtacggaatggacggttcgtgcacaggcaggcagattatactgtctgatcgaggacgtaaaagaaggcaaaccacgcttccagacccgaccggatctgcttatcgagcgggaccatcagattgttatgatcatagacactaaatggaagcgtattgggcgtcatcccgaagatgccaggcatggcatatcgcaggctgatgtctaccaaatgatggcctatgcacggatttatcaatgcccacaagttatgcttctctatccacatcatgcaggtctgggaacgcaacctctgaatgcaggctataggattctagcaggcaaggaacaattacaggtggctagtgtgaatctggttctcgatgaggacaagattgtcgagcagttaattaacctactcggcatcaacacgcagtga

SEQ ID NO: 96427 - DNA, 1374 bp, Enterobacter aerogenes
atgtcagaaaacgaaaagaaaagaaaacgccagactagtgctcaaaaaaaagaacgtgctgattttgctgagaaagaagcgaggacaaaagaatggatatcaaaccaagcctcgcgtgcaaataaattacgctcacaggataaggagtttcatggtctggaacgtgagttcatgtatttacaaaataaaatgcttaaagattttgaaatatctaaagatattaaacatcctagagatgttggtacggttagagaagaattgctaagagctttctttatagataataagcttttgccgcttagttatgcaatctcaaaatcgagcgtccgtgttgcatcaacaaccggacacattagtaatgaaattgatattcttttttatgatgcattaaatgcatttacgcttatgcagcgacaagatatctacgaggttttacctgttgagtactgctatggtgctattcaggtaaaatcaaaacttacaaaaaaagagttaggaagtgcattcaaaaatattgcctcattcaaaaaattaaagagaatggttagtaatcagggtattattgttcattcagacactaaaattcagaaggatggattcggtgttattttttcttatgatactgacatggagtggagcgatatcgtttcagagttagaaaagcatgcgcaaagttatgataaaagtttactccctaatgcggtcttcatactttcgaaaggctttttcatatatggcgatgaacgctttggaagtgtctataattctgacatgaagaactttggagacattattgtatatggtaatcctgattatcaagggtgttgcctttatcaactttatgatattatttttaatttacttaataacacaaaaactaaaaatgcatttccaaaccagtattttagactcccattaactgcgggggattactcttacgaatataaattaggctactttgcagaatatggtcattgtgaaacacatggagactttgcaagaacatatactccagagaaacttgaacgcctaattagttggtgccagacagcagaactaattaattgggtgaaagccacggatatagcttatggtaatgcaggtgacaactatgaggcttatgaaaggcagccaggcgatgtaataatttacaatccagaacatttacctcttagtgatattttagtcagcgatagaaaaataattgttaaaggcaaggaaatgctaaccaaagtacttgcttatgatgcgataaaatgtggcggaatgaatattttaattccttattattatcaaatcaccgaggacttagttcaaagttgtcccaagtgtaaaaaaaacgctcttaataaaaattcagctgataagagctaa

SEQ ID NO: 96428 - DNA, 744 bp, Enterobacter aerogenes
gtgaaagatttttcaaaatactcgaaagcgttagggatggctaagttctatgtttatgcattttatgacactgaagatgtatcaaaaaaaccgttttatataggcaaaggcaagtcagaacgctgtcttgatcatataaagtgtaatgatggctctccgaaatcagaacgaattaatcatctgttaaaaacaggaaatctgggaatcgacatactacgccatggcatggatgaggcaaccgcgaagcttgttgaagcaacatgtattgatctcttaggtgttggagaactgaccaacaaagtacgaggaagcagctcacttatggggcgaatcacgctggatgagctcaaccatctccttcttaagcaagagacggaaattgcacctgaacatgcagggctcgcttttttgctaaacagcacctacaagtctggcatgagtgcacttgcattatatgaagctacgcgtggcgtctgggcaaaagtaccaaaagatgaaaacctgcaatttgcatacgcaacctacggcggtttggtgatggaagtctacgagatacagtgctggctaaaggcaggctctcaacagtactttactcgggaactgattatcccccccgaaaccaaccgttcagagtttgttgggcgaattgcatcaccagaagtcagagaattatacgtaggcaagctaatcaaaaaatcgcgcagtcacggtagccctttcgtaaaagttgggctggcacaataa

SEQ ID NO: 96429 - DNA, 1536 bp, Enterobacter aerogenes
atgggtgatgaaagtcagaaaaatcataaaattagagtcgctcagtatctgaggatgtccacagaccatcaacaattctcaatcgacaatcaggctctttatctaaaaaaatatgcagaagatcacaatatggtgattgtagaaacttatgatgatgaaggtaaaagcggagtctccgcttcaggtagaaaaaacttcaacagactaatagaagatgtcgttacaggaagagtaaaaatagaagctgttcttgtttatgatgtcagtcggtttggtcgatggcaagataatgatgaggcagggcattatagttatctactaaaatatcatggggttaggattatttattgtgctgagaacttaccagatgaatcgcctgaaatccaaatgcttacacttcctgctcttagatatgctgctggagctttcagtaggaatctttcagtaaaagtttttgcgggacacgtaaaccttgttaaaaggggatactatcagggaggaataccaggatatggattaagaagaaagttaattgataataacaatagaccaaaaatgatactttgtcctggtgaaagaaagagcttgcaaactgaccgagtagttcttacccctggtacaaaaaaagaaataaagctggtaaaaaagatatttaatatgtttatttttgatggattaaatgaatatcttatcgcaacaaaactaaacagagaggggtatacatatagtgataaaacagaatggaacaggagcagaatacattcaattctaattaatattcgctacacagggaaatacacttataatcgtacttcacagaaattgaacgcgcaaagaattcagaatccacaagaagaatggatcgaatatgattcatttttcaagcctataatttcaccagataaatttagattagctaaagaaatcattgacaatcgttcaaaaaaaatgaccaatgaagaaatacttaattttttgaaaaaagttctcattaaacatggtaaaatttcaggttttattatcgatgaagatgataatggtccgtcgagtagtgtcgtagcaagtcgttttggtgggcttttgaatgcctataaactcatcaattacacaccagaaagagattatcgatttatagaaataaactcagccttaagggttagacatgccgacactattaagacaatatgcaaggaaattacaaatagtgaagtaacaatatctgaaaataaactcattacgatcaataaaagcttaacctttaccataatacttgcacgctgtagaaaaacctctacagataaatgcagatggattgtgagattagacagaagcattaattctgacatcaacataattgtaaggatgaatagcctgaatagcgtcccccttgattactatatcctcccttctattgattcatttgaaaatgaattaaacctaaaagaaaataacagccttctctttgagatgtatcgattcgacgatatcaacatattttttaaaatgctttcgaccaataaaaaggaagtagcttaa

SEQ ID NO: 96430 - DNA, 873 bp, Enterobacter aerogenes
atgaaagatgatcaaatccacatgattaagatatccgacataaaagtagtcatcccacgttcacgaaataaacttcgacattctgaaattactgaaagtatcgacacaagtggactgagaaagccaataaccgtacgtcgaatcgtggacaaaaagtatcaattcgctttaatttgtggtcaaggaaggctcgaatcattgacagctttaggagaagaattaacaccagcaatcgtacttgatatagatgaaaacaaagcctacataatgagtctggttgaaaatatggcaagagtagttcctcgtgctggtgaacagttccaacgtataaaggaaatgacagagcaaggattaaccaataaggaaatatctaactcgactggattatcattacactggataacaagtctgacaatgcttatcagtaaaggtgaaaataaattattatccgctgtagaatcaggaagcatacctatctcgcttgctgttgagattgcaagagtcgattttgaaggtggtcaggaattgttaattaaagcatttgataaaggtctaataaaacacaaagatgtaggaaaaatacgtgagatacttgactcacgagatgaaggcttgaaaggatacctaaataataactttgggataacaaagaaaaagaaaaaaatgactacagatgaattaaaaaaaatctatcaagataacatttctcagcacagaaagattaaaaacaaagcagaatacgttgagatgaatttgttgatagcaaatcaaatctttaaagaacttgtcaatgatgaagagtttttacgtatattagatgaagaaagcctaaatgaagtagtaaatattatagttaaaaacacgaccaattga

SEQ ID NO: 96431 - DNA, 1215 bp, Enterobacter aerogenes
atgaagctcaatgccagacaggtcgagactgccaagcctaaagataaaccctataagttagcagatggtgggggcatgtatctggaggtgttccctaacggcaccaaaagttggcgcatgaaataccgtatcgcaggtaaagaaaaacgtgtggtgtttggtgtttacccgaccattaccttagctgatgccagaagcaaaagagatgatgctaaaaagctgctggttaatggcgttgatccgagtgcgtttaagaaagaaagcaaactagcccaaatcgaagaagtaaaaaacacctttcagcaaattgcgctcgaatggcacaacatgaaagtgaagaaatggtctgcgggatatgcctctgacattcttgaagccttcaacaaagatgtcttcccgttcatcggtcaacgtcctgtttctgacatcaagccgttggaattgcttaacgtgcttaaaaagatggaagagcgaggtgcgactgagaaagctaagaaagtacgtcagcggtgtggtgaagtgtttcgctacgccatagttacaggcagagccgagtataaccccgcaccagatctcaccagtgctatgcaggggcatgagtctaaacattatccattcctgaccattgaggagcttccagccttttttaaagcccttgctggctactctggtagtgagttggtagtgttagccgcccgactaatgatcatcactggtgttcgaacgggtgaattacgtggtgcgttatggtctgaaatttatactgataaagggttatgggaaatttctgccgaacgcatgaaaatgcggcgtcctcatattgttccgttatccgtgcaggcattggaaattattgaaaaaatcagggcaatgactggtaattttcatctaatgttccccggtcgtaatgatccaagtaaaacaatgagcgaagccagtatcaatcaggtgtttaagcgaattggctataccggccgcgttacggggcatggattccgtcataccatgagcaccgttcttcatgaacaaggctacaacaccgcatggattgaaacccagcttgcgcatcttgataagaatgctatccgtggtacctataaccatgcgcaatatcttgatggcagacgtgagatgctgcaatggtatgctgactatatggatagccttgagaatggtggcaatgtgatgcatgggacgtttaatcgacgtgcatag

SEQ ID NO: 96432 - DNA, 867 bp, Enterobacter aerogenes
atggcaatcatgagaaactggtcaacggaacacaccaaagaagttaaaaaatggttggatatcaatacctatcgaggatttgaagatctgactctcatacagctttaccatgagctgcttgcaaggacactgttctttaagccttatcatgaggaattcgaagcgaaagccgtgaacctctatattgaccgaattttcagcggaaaaccgtttcttattacagagcaacatctcggatacctcacgagagaggacaccctttaccaacccccacatttctttttgaccacgacagaacggctggctcagctcagcatcgttggattacggaattcattatttttctgggatggaagtgatgagtattcggttaaccgtgaatttctcgatagccctgtatccgaagctctccctaagctgttcagagatactgtcatggtcgaaatagaccttgcgaatggaactgatgaggaaatagctgaatctttgaaagccgcgctacctcaatggcgtaaagtactgggcattgaagccgatacatctgattcgatcaggtttggctatggaaccatcaagaaaatcatcaactacagactcatacccatgattgacatccttgtatggtctactctgcacaaggttcgcatatcagaagatcgactttcacgcctcctttacaccgacgatgatgatgaagaacagacccgcctcaatcaccaaattcgggacacagacagaccacttgcgataaaagcagccagtatacctttcatccgtcagttccatctgttcatcaacaaaaacagtcatctcaaaaacatcagagtttcagacgtgatgaaaatcgcggattctgataaagactga

SEQ ID NO: 96433 - DNA, 207 bp, Enterobacter aerogenes
atgaatcagccatgcacacgtctgatccgcctgtcagaagtgatgaataaaaccggatttggtaaggcttggatttatcgtcttatcagccaaaatcggtttccacagcctgtaaagatcggtattcgtgctattgcttttatcgaaagcgaaatcgatgaatggattcaattaactatagagaattcaagaaagcatgttgcttaa

SEQ ID NO: 96434 - DNA, 1206 bp, Enterobacter aerogenes
atgggatataaagtaaagaaattcatcatgagtaatggggagcgaggatgcctgatccttgataaaaatagtaatctaccagcttactatcaaaatctatttcttactacagacataagaaatagaggcgcaaccgcctcaactatggaaatagttgcaactaacttactaatttttagtaatttcttagatagtagggaaattaatatagttgagagaattgagcttaaaaagtatctcagcgttgcagaaatagatgatctggtaagatatgcgaaaaaaagattcgatagacaaaaaattataaatataaaatcagcaagtaataagtttattgcgaagagaacctttagttatagagtacacgttttttcacgctaccttaagtggttatgtggattagttcattcgtcaaagggcattcatgcaaagtatgaagtagaagtatttattgaaagtatcagagcacatattccaagaaacagttcgttgaatatgaatgaaatatctgaaaaatcgttaaatgaagaagagatcaatgtgcttttccgtctattggaaattggcgggattgaaaacccttttcataaggaagtacaggtcaggaacagactaatatttaccttgctcttaaatttaggtttaagggctggagagttgctcaatcttaaaatagatgattttgatctcagagacaacactttaagtgtagtcagaagacatgattcaaaagaagatggaagagcttatcagccattagtaaagactggagaaagggttattccgttatctgatgagttagccagtgaaatttttgattacataagcaatagcagggaaaaaatgacaaaaaggaaaaagcataatttcttattggtggctcattgcaccggaaaaaacgcaggagaacccttaagcatttcagcttatgagaaggtgatatcaacactgaaacgagcaagtccaaagctatataatctttcaggtcataggttaaggcactcttggaattatatgtattctaaaggaatagaaggcgctgaattagaatatagtagaaggaaagatttaaggaattatctaatgggttggtcaaaggagtcaatcatgtgtgatagatacaattttaaatatatatcccaacaagagaaggatgtcgtcctaaaggtctataaatcagtaagtaaaataattagtggggtttaa

SEQ ID NO: 96435 - DNA, 375 bp, Enterobacter aerogenes
atgatgatttactgcgcacgtattactgccatcgggctgtttgtcgccgacggcctcaccgacaaaatgctcatcaccttcgacagcaacgggccgaaagactgtctggactactccctgtcactggaaccgtcgttccgggaagagagtctgatgatactgcccggcgaccgcctgctgctggcggggcacgattatctggtgacaagtgttggcaagggcgcacaacaggcgctatttgaactcggccatctgacgctggtgtttaatggcgacctgaacccctgccacgtcggcgcggttcatctctccggcccggtgccgaaactccatgacctgcacggcaatctggtgattgaggagggacgcccatga

SEQ ID NO: 96436 - DNA, 522 bp, Enterobacter aerogenes
atgtggacagtcagcctcgctgaggcgtttattcatgtattccagaccgcaggcaaaatcttcctcgacatgatgacgggacttatcccgatgctcatctgcctgctgctggccatcaacttcctgatgaagctggtcggcactgtcagaatggagaaagtcgccgccctgctcggccgctcgcgcattctcacctacggcgtgctgccggtactcggctggttctttatgagcagccccggcgcgctgacactcggcaagctcttacctgagaagagtaaacccggctatgaagatgcactcggcaccactgcccaccccctcaccagcctgtttccccacgtggtgccgtcggagttgtttgtctggcttggcgtcgccgccggggttaaggcactcggcctgcccgtcacctcgctggcgctgcgctatatcgctgccgccatgctgattggtttaatccgcggaattatcaccgagtacctgttcctgcggctcagcaagcgggggaatgcatcatga

SEQ ID NO: 96437 - DNA, 225 bp, Enterobacter aerogenes; identical to SEQ ID NO: 84132

SEQ ID NO: 96438 - DNA, 417 bp, Enterobacter aerogenes
atgtctaaaaaagataatcaattttttgatcaagataacaattttcagtttggcactcgccttgccgaagcgatgtcgttatctgaagacacagtcagttctctggtagataaaaccggtattcccaattcaaccattcgaagctatctgaagggagaatccgtccccggaatcatgcaacttcggaagatagctgctggtatgggcatcaaagcgggatggtttttaggtgatgatgaagagtttgcctgtccaaaggacgggatatcagaaattgaaaaggatcttgagctactcaataacctgttcaaatacatggcccctgtacagcgagggcgggtactgaaacgcgttctggcaagtgtggcgcgtcagatcgaccataatgttgacggtgacaataatactgagcaatag

SEQ ID NO: 96439 - DNA, 2070 bp, Enterobacter aerogenes
atgaaacgcgccccttttctctgtaagcagtctccggaccgcacgctcgaagtggtgatccttgccggaagcctggcatgggagacctcacgcgactggcgaaaagatcctgaccgggaagatgatattcctccggtggtactcggcccggatgaactggccgatctggacaacctgaccataatcaggcccgacacgctttacgtccgggtacttcgcaccggcgatatccgcgaagaggagttgctgaaaatcgccgtaaaactggcgcacgcgggtgtgcagatggcccggctgatgagccctgacggtgagttactggagaactggaccgggcagcttgaacgcctgcgacaggaaaggccttccgatatcctgccggatcacttccgcctcgatgaagaagcgctgtggtttgacaagctcaccgaacgccgcgacggggaaagcgacgtccagccccagcgcatctgttccccgctgcacgtcaccgccatcacctgcgacagccatgacggcagctatggccgactgctggaatggcataccaccaccgggcagttgcggcgctgggccatgccgatggcaatgctcagcggcaacggcgaggagctgcggcgcattctactggaaaacggcctgacctacatctccacccgccccgccctgcgcagcctgttatgcgaatacatctcgcggtcactccccggacgcagggtcacctgcgtggagaaaaccggctggcacaacggcgtgtatgtgctgccggatgaagttatcggtcccggtggcagcaatgtcattcttcagggcagccactacctgactggcggctttgcacaatccggtacgctggcggaatggcaggagcaggtcgccgcactctgtgcgggtaattcacggctgatctttgccgtctgctgtgcactggccgccccgttgctgcgcctgaccggaacgggcggcggaggctttcatctgcgcggtgagtccaccgacggcaaaaccacggtaatgaaggtggccgcttccgtctgtggcggcacggattactggcactcctggcggaccaccgggaatgcgctggaaggaattgccagccgccacaacgatgccctgctgccgctcgatgaactgcgcgaagtggacccgcgtgaagccgggatgattgcctatatgctggcgaacggccagggcaaggggcgcgcccgtaccgacggcgaggtacgtaaccgcaggcactggacgctgctgctgttctccaccggggaactgtcgctggcggaacacaccgaacgcgccggggagcgcctctacgccggaatggacgtgcgcatggtacaaatccccagcgataccgggcagcatggcgcgtttgagcagctacacggctttgccagcggccagcagttcgccgataccctctgcgaccgggtggcccgtttccacggcaccgcctttcgtgcctggctggccttcctcaccagcgacctggacgccagcaccacgctggcaagagaattacttcgccgctaccagaccgccctgatgccggagcatgccggaaaccaggtgcagcgcatcgtggcccgttttgccctgctggcggtggccggagagatggcgacgctgcacggcatcacgggctggcaggaaggcacggcgtatgaggcggtgcagatctgcctgcacgcctggctgaacgagcgcggccatattgccaaccaggaggatgaaggcgtgctggcgcagatcaaacggttcatcaccgcgcaccagtactgccgctttgcctcgtgggatggcccggaccgcccgctgaatatggcaggctttcgccgggtggaaaaagatccgctgacgggtgaggaacacacactgttcttcatcctgcctgagggctggcgggaaatgtgccggggcttcagtcccgccagagcggccaaattatgtctggaagcagaatgcctgctgtccggcagcgacgggaaataccagtcgcaggttcgcctgccggagatcggcaaagccagggtctaccggctcacctcccgcattctcagtatctga

SEQ ID NO: 96440 - DNA, 3069 bp, Enterobacter aerogenes
atgggcgtagaagttccagattcaatagtctctatgttacgagattgtcaaaatgatagtattaagactatatcaaattatttagacgaatcatcaaaaggcgcttgccttattagtttacctactggttcaggtaagagtggtgttatatgctgtgtggctcattatagtaaaattgataaaatcctagtcgtaagtcatagacgtgctgtatgtaatcaattatacagacaactaaagggaggtttttttgagaaaatcttgcaagatgaatatgaaccatcattagtaaaaaagaatgttattaatggtatctcgttagatgttcttgatggtgtttattgtactacattccaaaagcttacaagtttatcggaagaggatgtaaatcaacttaaaaattcttttcaattaatacttatagatgaaggtcatgctgaaccatcaccgcaatggggttctgttattagaaagtttgaatcaaagaaaataatcataacagcaactccttatagaaacgatcttttcagttttgacatagatgtgaaacatacctttatatatacatataagaaggctataaatgataaggttatagttaaaccaacatttgaggagattacttctgagcaattgatacataaaatattagactttagggcaaaatatccagatattgtttgtattgtaaagtgccgaaacttcgatgatatttgtaaatattattcccttcttaaggacacatttaaaacacttgcaatccacgaccgttttaaagatgaacctctagatgataacttgaactatgtcccagctaaaattgacgaacttgagtatgaagtttacatccatcaacgtaaacttgacgagggaatagatctcccgcaggcgaagatactaattcttacttattctgtcggtagtggtaaggagctagttcaaacaattggtcgggtcgtgagagtatttcgtgattataatccaattgtatttgagttaggaaatagtaaaaatataagactctgggataactatattgagtttgatgactatatatcagataaatcttcagctgaaaaattcttaaatacactaaatacagcttctttgctagaaagttatttggatgctttccctgaacatagttattttgaatcttcgtataaaaagaaattcaatttctcggagttcgaacctgcaagatccctagttatacctttagcatcggtgtgctttataaataaacttccaaattttgatttggcagactttatagataaaatttattgggaatttactagagagggggctttgtcgaaatatgataaagagactggagtgataacttctgtttgttttaataattctaaatttttaattgatagattgttctttgaaccttccttagaaattgttatagtaaaagatcttgggaatttagttgctatatttgatagtagtggtcgtcgatttaatcataggactgacctcaatttaggtagagcggtcaattccgatattctttataaggtatttgctcaaacggaaaaatccagaacaacacaggcaacatctcgtgcattattgggaagttcattaaaagctgaagggatcgcctacattggtgagaacctagagagtacaaatcatccacaatcaaattcaagttatgctgtgactacagcaaagggttctaatttaaatatagatgataaaattgcatcctcatattatttaggaatcggttctggtaggattagtgatcaaaagtttcgaaattttgactacgatagtttttgtgcatggattgatgagattaaatttacattcgatagcaataataaactgagaagtaattttttgagttctttctctcaacctattgacggagctccggaggaggaacctatatcctgtgtaattgactttagtggtatacatggtgtcattgagttggaacattctaattgtagggttttggttcagaatacgtttttatttaaaatgtataatagaggcgtttctttttttagatttgaagatatcaacatgaggattcttaaacaaatatcctcgccatttatatttagattgtctgattataaacagtatgtttcatcatgtttaaacaataaaatagtttttaattttaaagatgatgaatttaaagttaatgtcaatggggttaatatatacttaaatggaaccattatatcacctgaaaatgtttttaacgccaatacagttaaattgttatttaacaaaggtgtgacttttttgaatgggatgttttataagtttcaactaccttctgaaagcggagagataagtcaagccatgcttgataagatttacccattaaaatgtctttctaaagatacattaaatgaaaaggatattccgaatttaacaaaaactgcatttggggtaaattcaatatttagtctgattgataatctatcaaatgtgaaaaatcataatccgacgatctctcaacttggggagttttatgaacatatccctgacgtcgatatgatcttatgtacagacatggatactgaacctgcagattttgtaatttcttcgaaaagtaaattagtatatgttcatgtaaaatgcggtaaaaccataaatccagaatcctctgctggggctataacagaagttggaagtcaagcattaaagaatatacatttcttgatctctcaaaattcatcccttgagtttgcaaatctttcaagattgaaaaaaagttggccaagtgatagcggaaatgacaatggtataaaacttaatagccgcattcggttatacaataaaacatttgatattaatcattcattagaagatgttcttgacttaattaaacatcgccgctccatgatatctgttagaaaagaaatatggattgttatcggtaatgctttttcgaaaaaacatttcgaaagccaattttctgggctagggaaaatatcccctgaatcattgcaagcatatcaacttatagatacatggcttttgcaggcatcaagttatgatgtcgatgttaaattttttgtttcggattaa

SEQ ID NO: 96441 - DNA, 645 bp, Enterobacter aerogenes
gtgaccagccccattcgtcagaatctgtttgaacgagaatgtgatatgccgctgctggaagcgcggcatctcgcccttctgcttctcggcctcgatgcttcccaatctgcaaacgccctgccggaagaacatcaggaaaattaccgtatcctgcacgacgccatcagccgcaccataaaagcaaccggaatggtcagcgccccggcaaacaaacgcatgttctatgccgatgaaatgtttgccctggcctggcgacttattgatgacgaacttacgccaccagaaattaaggcccgcagcctaaaggcggtgatgaaactgtcgcgtaacagtcgtggccgtaagtggctgaagacgcttggtgacgatgcgttgccggatctcacggcttcagcacaaccttctctgcggggaatgcataaacgcgacaaggctcgggagaatactgcccgactctgctggctgcttgttcagcttctggttgaggagactgacgggcgttatggtacatctgataaaccggcttcggatcggatacttcgtaagctgaaaacgctggcacaggagcgggaagtgccgtcggatgggcttggacgaggaaccttttatgaggtgttgaagatgggaagggagaaggaaacgtag

SEQ ID NO: 96442 - DNA, 249 bp, Enterobacter aerogenes
atggttccgaagcgtcttaggattgcgagagagttagccgatatgtcgcaagaggaattggctattgcagcaggcatttctgaagaaacgggctattcgagaatgtcacattacgaaagtggcaggcataaacctaaattcgaactggtttgtcgatttgctgaagtgctcaatgtccctgaaggctacttctacactcggaatgacagcttcgctgatgcaatgctgaaactttacggtggaaaatga

SEQ ID NO: 96443 - DNA, 261 bp, Enterobacter aerogenes
atgatccccaaaagactaaaagaagctcgtttgcgagcaaagctaacccaggaaaagcttggtgtactcgctggtatagaagaggctacggcttattcgcgtttgtctcattatgaaaatggtacgcataagccgacgtttgagctggtgtgtgagtttgcccgagtgctgaatgtgccggagtgttatttttatactgtagatgatagctttgcagaagcaatattaaaactttattttgaatacaataaagaaaattaa

SEQ ID NO: 96444 - DNA, 2421 bp, Enterobacter aerogenes
atgggtttggaagagagtcttgaaaagaaaatcaatgttattttgaactcagcgagatcattaaggggatattgtgatttcgatgtattatctgattttattattgtcttgcttctttttaaatatctttcggaatcctttgggagttatgatggcttaatcaggcatataaactccacctccggttatggcttagaaacagatgtggaaaatataaatgatattgcttctggaaataatcgctgggatgctatattgtcaccacaatatttttctttctccttgctttctgatgaagtattttttttagaaaggaacattccggtttttgaaggtttatccaaacttatacatataaatcgtcatggaattcctgaaaaagtaattcatcaattgatatggaatatcaaacatctcgaatggaatttaaatgataatcaccaaaatattggcggtctttttttggaagttttattagataaaatcgctgattattcaagcgttagaagtgtagtcccatatacacctgcgagtatttcgaaactactcatcagcttgttaaaacctaccgaaaacatgtctgtatatgatcctgtatcaggaagtggcggtatgttggttcagactttgaattacttcaatgaacactataataaaaacgcattatttcaattgtttggacaagagataaattttaggacagcagtaatcagtcgaattaatttgttcatgcatggaattagccagtttacaatacaatatggcaatagtctattagaaccaaaatacattgtcggaagtgcagggccattttggagtcaaggtgacaaacagcttagaaagtttgatgttgtattaggtaacccaccattccatttgaaaaactggggtagagaagatatatgtcatgatcaatttcggcgattcatttatggtattccaccacaacataatggagattatgcatttttatcacacatgattgctagtgcgaatgaaaatggtcgagttgggattttattatcgcaatcagcccttgttcgaggcaatgcagaaaaggaaataagagaaaaactaattaaacaagacttaattgatgccgtaatagctttacctccaggtttgctctatgatactggaattcctgtttgtatcctcattgtgaataagaaaaaaccaaagtctcataaaggtaatgttttgtttatcgacgcttcaaataacttcgaatcatcgcgtaaaatgaatagtctaagagattctgatgctgagaaaattgtacatgcctatgagaatttttcaactaaagataccttctgtaaattaattgacaatgccactctcgtaaaaaataattctaacttaaatgttcgtagctatgtagatgactcagaggcatcaaaaaaaattaaagatttgttacgtcatcattcagattttaaaaaatattcattttctgaccctggtttaatattgtcaatcacaataccaaagagaatagataatgatgatatgaatgtgatttacatccataggagctccatagttcagcgtttgcaatacaaacttacatctgatgtaaaaaaaccaagaaattattttagagtagagataaattctgagatattgatgaacaaatatgcaggtctttattttcagtcagaactggggcgattgatgttgtcccatttacctctgggtactagcttgcctattttatctatggattatgtgaaaaatttggaaatacctgttccgccaattaaaatacaggaagaagtagttagggttgccaagaaattagaaatagctaaagaaagcattagttcttttttctcccagctaactactgaacccaagcaatatgaatttattgagaacattacagatgaaatggtttattcattatctagtttgagcgatgaaatacatttgaagcatatcattggtatgggtgaaacaagacatgtggaatttaaacagtctttctttgctaatgttgataaaattatgggcgatgagataaatattgaaaaagactcgactgttcagcatgaagtcataaaagatattgcatcctttatgaataccgatggtggtacactacttataggggtaaatgataaaggtaaagtaattggtattgaacgtgaaatggcaagatttaaatttaagaagattgataattatttccaagagttaggtgcgcaacttggaagtcggttgttccgagattatcaacagtattgtaaattaacagaggttaaagttgatggggctattgtcgcaaaaatagattgtcgaccttcatcatttcctgtttttttggataatgaaaaatttcatgtgaggacggatacttcatctccatgtttaactggtaatgaaatgctaagatatataaataatagatttaaatga

SEQ ID NO: 96445 - DNA, 303 bp, Enterobacter aerogenes
atgaaaagccaaatttttttattactgttggtgcacccctattatacctacgcctccccggaatccacccagctctcccttgcgctgaagcaactcgacggcgtaaaaacctcgttggaacgcgcccggagcagcgccagcaccgatccacagtcgcgctacttcttcgactacttacaggcgcagcaggatattaccgccgttgaacagggcatccgccgttaccttaccccggcaagagcgcagccacgtgccgtccagcctctaagcgccagctaccagcgggagcatctcgatgactga

SEQ ID NO: 96446 - DNA, 585 bp, Enterobacter aerogenes
atgcggattggtatattagcttacggttcacttatagatgaaccaggtgatgaaattgaggatgtcttagtaaataggataaaaggcgtagaaactccttttcatattgaattcgccagaaaaagtaagtctcgaaattacgctccaacattaattcctgttggaactggtgggcggcctgttcagggcgtgatttttgaactttctgagggaacaactcttgaacacgcaaggaatatcctttatcggcgtgaaaccagaaatgataagagctataaacaccctgttaatcccacggaaaacagcgtaataattgaagagatttcagactttaatggtctccatgtcttatacacaaagatcggttcaaatattgaagatttaaacgctgagatccttgctgatctagcgatcaacagcgcgaaagccgaagcaggaaaagaaaaaaaagatggtatatcttacctaatatcagcgaaacaaaataacatcactacatgtttgtcatccgaatatgaacgaacaatactcaaaaaaacaggaactaaaacactaatagaggcatgggagtattgccaaaaatag

SEQ ID NO: 96447 - DNA, 642 bp, Enterobacter aerogenes
atgagtgagcagcgaccacctccatcacgcccgtcacagggaccgattggctggctactgtcgctggccggacgacttatagggctggttattggagcgctggttctacggatcgtattggaactggcagggctgtatttctggtggcctcaggagggaaacaggcacgtttttcaggtgatggaaaaagattataaaatgattatgcatataatcgcttctcatttattttttgacaaagtccagattatgctcaaccatgcagtaatgtatgttacaaaaaataacccattaaatacatgtgcaaatgaaataattaataatatatttataacgacattaaattgttacgaacgaatagtaatattaattcttactctacccttaacttttttatttctaattatcgggattatagatggattagctcaacgtgatatacggagattttgtgctgataatgactcaactgtacgctacaatataatgtgcacaattaataaaataacgcacagacacattctgctcttattaattgcttacccatttaatatttcattaaacctcatttatccgaccatagctatcatttccggatttattatttcacaaacaatacaacaatataaaaagtatgtataa

SEQ ID NO: 96448 - DNA, 2001 bp, Enterobacter aerogenes
gtgctcattaaacagctggtattacataattttcgggtatttaacggtacacataccattgatctggcacccagaaagcgtccgcacgatttgaatccacgacctattgtgctgtttggtggtttaaacggcgcagggaaaacgtctatcctgtcggcgatccgcatagcgttgtatggacgactggcgtttgggctagcgactcaacagcaagagtatattgaacaactcagcgcattgattcataacggcgcgtactatattgagcagccggaagaagcatctgtagaactgacgtttacctataataaaggcggtcatgaggccgaatttaccgttacgcgaacctggaaaaaggggaagagggaccgcctttctctgcaacaggatgggcagccactcagtgagctggattacgatcagtgccagggatttctaaatgagttaattccgcatggcattgctgatttgttctttttcgatggcgagaaaattgcagaacttgctgaggacgaatccggtaatattttacgtactgccgtacgacgcttattggggctggatctcatctctaaactgcgtaacgatttaatgatttttgttaagcgtcagcaatccagccagctagcaagttctcagcaacaacagattgcagagcttgaaaaacagagtaaagaattagcctgccagacagaagcactgctggaaagcgccgattttgccaaatcgcggattgagtttctgtctaaagatataacccgttatgaaggcttgctaaatgctcaggggggcgcttttgcccagactaaagcgcaggaaaaacagaaagtcgaaacgctgctaaaagataaagaacatctggaaaaagcactgagacaagaatgcgatggctcgctaccttatgcgcttgcgcccactattttgtctcgtttgctgcaacaacttgctgatgaaacgcagattaaacaggcaaaaagctttgaaaaagagctgagccagtttttaacgcaactcagaaatgatattgcatttcgttctgcggggactggcaaaatagcagctgaagcgattaccgataatctaaaagattatatggcaacgaaaccaaaaggtgatttgctctttgacatctctgagcgtgaagctggtatgcttcaacagtctattgagatagatagtaaaagagcatggcagcgttttgagctttatcgcacacagttatctgagattgaacaacagttagaacaagcggctgctaatattgcccgtgctcctgaagatgatcagctgatggatctctttgagaaattacgtgacctggataggcagcgcgaagcccaattgcagaaatatcggtcattgctggaagatgctaaacgcacgaaacagcagcaactagattgtgttcgccagattcaaaaagcgcatgatgccgctcgttatcagcacagttatagtagtgcgtttaagaatgctcaggaaacgataaacttactcgatcgctacagtgatgtattaacccaggctcgagttaaaacgctgtctacaaactttgagcttgcttaccgtaagttggctcgcaaagaggatttacaacttagtgcgcatatcaaccctcagacgtttgatgttgaattaattgatgagaatggatcagtaattaaccgtaagttactttctgctggtgaaaaacagatttatgcaattgctattcttgaggcgctggcgaaaacctctggtcgtgatttaccagtgataattgatacgcccttgggacgtctggattctcagcatcgtgataaattgattaaccactacttcccggaagccagtcatcaggttgtattgctgtctaccgatactgaagtagatgagcgttattttgtcgatcagttgcgtgatgatatctctcatgcttatgagattgtgtttaatgcgcatactaaatcgtcaacgctgaaaccaggttatttctgggaattaactaaggaggctatctga

SEQ ID NO: 96449 - DNA, 354 bp, Enterobacter aerogenes
atgctcccaaatcgaatggcgcttagccgtcagactgaagatcagcttaaaaagctcaaagggtatacagggatcacccccaatattgcagcccggctggcatttttccgttcggtagagagtgagtttcgctattcgccggagagagacagtaagaagctggatggtacgctggtgctggataaaattacgtggctgggggagacattgcagactacggaattggtgttgaagatgctttatccacagatagcaccgaaagatatgataaaagcttgggctgcacatgttgaggatggaattgctggagtgaggaattatcgtagcctgagagattttgttttaggattataa

SEQ ID NO: 96450 - DNA, 876 bp, Enterobacter aerogenes
atgaaaatttgtcctgtatgtgaaaacataagaacaattaatgaccatttgaatgagttggctttgttttgtatttttattgaaaataaaaaatggtatacccataaagatgagaccattgaaatctgtacctcaaaaattggtgaatggttaaaacttagtgcagatttagaaaaaaccataattgcaaatggcggattttattctgatagtgtattttattgtgaacctgctattggattttatgatgatcatgccaagctatattcatttttatccacaattttaacaaaatttatttattcacttcaagccttcgacaatatgcagaaatttgttaacggctcttcttctactcgctataaaaaaatgaagtcttatgcggttaggtgcgaaaagatgatcgattccgtgccaaatgataatatacctttgcattttgaacattatgcaaataatctgaatgttaaatatcatagatacataaaaagaaccaattccaaactaaataataccttatccttagatggtaatagtatcggttactctcactgcatacttagaaatataaggaatgttgtctctcatggttctttccctttatattatgggacaagctatatggataaagcgttagctggagaattagtcgacttgcttatagcttctataagaatgatttgtttatatatacaaacagccatgcttaatttttgtgataagatggagtcatctctatatgatgaatacttagaatctgctgaggaaaacccacaagatgataaatcgagctattttataactaagtttaatattaaccttgctaaagacttacattataaaaataaatataacattaacgattttatatgttga

SEQ ID NO: 96451 - DNA, 423 bp, Enterobacter aerogenes
atgcttcaatctctgaaccacttaacgcttgctgtcagtaatttgcaaactagcctgacattctggcgcgatttgctggggttgcagcttcatgctgagtgggatactggtgcttatcttacctgtggtgacctttggatctgtctttcttacgacgtatcccgtaactacgtagcccctcaggaaagcgactacacccactatgcattcagcatcgcgccagaggattttgagcggttctcgtataagctgaaacaggcgggagtgacggtctggaaagacaataaaagcgaagggcaatctttctattttcttgatccggatggacacaagctggagctgcatgtgggagatttagcatctcgactggcgcagtgccgggaaaagccttactctggaatgcgtttcggacctggaaaataa

SEQ ID NO: 96452 - DNA, 276 bp, Enterobacter aerogenes
atgtcacaaaagagagctaccgtcgtagcaagctatatctatcaacttgcgaaagagcataacgtgacagctaaccgagacactataagtagtattgtagctaccattaacaccctttctgataaggacatcgaattggatgatgtcgagcaattacttgttaatctaaaaagaaaaggtgtgttgacaaaagctgagatactacatcttctaaggcgttactttcgtgagcaaaggaaattgcaaccctgtgatcaggtgacgaaaggcctatag

SEQ ID NO: 96453 - DNA, 1650 bp, Enterobacter aerogenes
atgagcgcgatcacattacgtaaagcgttaggtgtacttgcgaagtcatcttcgttttccgtaaccacagaaactcatcggcaaaaggatgtgttcgatgagctaaaagaacaactctttgttaaacaagagattgaagaagagttacagcgttatctggataccgctgctcccggtgagatcatttttctatgcggaagtagtggcgatgggaaatccgaaattttaacccgctgtaagtcagaaccacgatatcaacagaggtttagtttccatctggatgcgacacacagctttgcgcctcaacaatcagccattgatgcattgaatgatttatttgaaaatcatcattcgcaatcatacccgctcctcatcggtattaacaccgggatgctcgccaactttgccagagaaggttctgagtcccatatggctatccgcgccgctattgactcattcttgtcatcgcaacaggaaggccaccgtccttaccgcaatgaacattgtacattctttgatttcgaacattatccaaagttcgagtttgacgaagagcaggaatactccccttttatcaaaaaattaatgaatcacttaacggggaatgacgacaaaaacctgttttacacaatttatcaacgtgatgaatcaataggacatgatttaaaaaccgttgctaactttaaactactgtgcatgcccggtgttcagaatgttttaataacacagctatttaaagcccgattaataaaagatcaatttgttaccacaagaaccttattggattttttacatcacctgctgacagggcctgggtacctgtttgataatctgtttaatggtgcagaaaatgatctaattaaaaaggtttctgattttgatcctgccagattgcatacatacgagattgatcaatttattttgcgctatgagcttggattagttgatcccgaactggatgatttcctgaatacacttgcgaaattacatcttacgtttgatcgtcaatgtgttaagcctggtgacgcagcttccttaattagactgttctggctactacaacatgaatctttaggaaataactatcacaaaagattctctgtattctttaaagaagctctctttgagcgttattcagagatttggcatcttcataaaaactataccgcagatccggaacaaaaaagaacactaaatcgcttttactctttcgagcttatcgctggtattcagcgttacgcaaaccgtaaagcacctgaactgagtacccaaaaagaagagttctttttaggcgaatttggtgggattaaaatcacagcacctgttgcgctgaaaccggactgggattccattctcaagaaaaatacagcccatacaacttgtttcgatatctatttaaaagtaggacaagttccgctggatccgattcggatcggtcttaatttatttgatctattgagcaaactgaataatggctatcgccctaataaatatgataaaagtgcgattgtcttactggacgaaatcgttgaactaatcgcagaaaaggcaaaatccagcagcgaaatcaagttttatgatggcctaaagcgggtttatagtgcaagagcggacgatgacatgattactatcagcggcatggagggataa

SEQ ID NO: 96454 - DNA, 1326 bp, Enterobacter aerogenes
atgtatcccattgcaacaaatttaaaagttagtaataaccagctggatagctaccttccaatacgtaataagaataacaatattgactggcaaatcgtaacaggtttagtactaagctatgccgtgaaatataaaatcgatacttacagtctcgagcagtttcgcgaggattgtaaaactcatctgcaaatattgatcgatgaacccgcgttcttgtccgtgctggaacggatgtatttttccagtcaggatatttttcgtgtatctccccttttcttgctgttccacgctcagtttgatggtgaaaagataagtgcaggctcgactgccgacaaacgccttggaacactgtttgccaatttgatgagagattttagccttaataacccgatacaagataagttgaattttattgaaaaagagatgctgaataagctcaataaaaaattaattcgactgggtgaggggccatttgcaaaagaacaaccttatttaccctatctggtaacgtgttttcagtctgatttggcgtttctggcagagcatccacaatatcttttgcaggaactgaccaatactctacgtttgtacgcctttagttggtgcgcacaactggcgctcaatctggacaactggcaagacggcgagccgcagagtaaatcattgttctttatcctcgatactgaaaaagctagctcagaacgagataaaataaagctcttcggctataagtggtttgcccgccaaagtgaaaaattgttccccatactctctgcattagaggtattacaagtaaaaggtgaggaaaaacgccctctttggcaggtatatcaagattgtttaggttattcagatacatcgaatcgagtactgaatgaactcaataattatatacagaagtttatcagtaaggaggagcgagatcttcctgaacgcgatcgtgctacaaaccttgaagatgcctttaaacagctgttatctgttgccgttgaacagtttcagggtaaaaaaaccgagcgagcagcggtaaatcgcaaatacatcaacgagctggaaagccagatttgcactgacttcattcaggttcgtggccgagcggggaaagtactggtactgaaccaggatagactactgctactaactaaccttaccgtgggtaaaaacaaaaaactccgtctgcatgagctgctacgtggttttgagcaacgcggattttatctggataaccagtctacacaaatgctggttgcgttttatgaacgcatggggaatgtggagagaatgagtgacagtggagacgccgtatatgtccgtaaaacagtatga

SEQ ID NO: 96455 - DNA, 5058 bp, Enterobacter aerogenes
atgtccgtaaaacagtatgaaacctatctggcagaaaccttcattgaatgggttagcagcatcatccagcctggtgagcgctaccagtttaaatctcccgatccggataacgccttaaagctctggaaggctttcgactctttagcgaatggaaataaactagaaattgcaccggggcaatatcttacctacgtccaatgtaataatatccagcttattccggtactgcacggcaccactacccctgcattcacagaaaactatatttctcatttacgcgatcaggtttctggccgcaatggcatttttgcccagacagcgttgttgattatccacaacagcatgctggataccttactcaatagtaccaaagatgtcgctgcaccggatgctatctggcatccagaaaccttccgtcaccagctcgaaaagttaatcacaacggacagcgcccgttctcaagtatcccgctgtttgctgggcgatcagttgacaacaatattggatgaaggcgcaacggtttttggattttcatcgttataccgtctgctggacgacggcaatctggatttctcagagctaaagttattcaacgataataacctgctgaattttagtgataagcagttgcgcgcccggctcaatgaaaaccaaaagttatatcgccaaatagaggacagtgttgaacgctacagcgggcaactggagaatgtactaactgaatttagtgcaaaattcattcaggagcatttcgttgacaatgacgattggcgtgaacttgatttctccgtctacctgaatgaaaaagcacaaaacagtgaacagaaactggtgttggaaaacatcactgctgaaaacggtgaggtctggcaaagagccaaaagcaccagtaaagcaggtaaacgagatatcagtgtcctggttcaggttctaccggggcagtcacacgttgagctggagtttatcttccagggtaacgaccttcaggacaatcaggtaaaaattgctcatcatcgtcagttacagaaagaacgattctggcgcactagccggctcggggggagaaactctaagatactggcatcagtgccttttgatggtcggccctgcttctttagcctcgaaatcattaaccgcaataactcagcagaagagtacaagtttcgcctgctgttagttgaacaagggcaattctggcttaatgaaatccagcattgttatcgtattgaacccggtaaaggtcaattaactctgcaactggaagataatgagttacgtattgcagagctcggcgacaagacctgtttacttgatgaagaaagtgatgatgttgattgccgccattatgcactcgttaattttgaaacgctggcgaatcaaagtgagctgatcaaatttaccttgatttcaggtgactcccgtttactgtttaacatcgaaggtccaggagcagaggaaggattaacactgcctctactttttgatcagggtcgttttaataaactctttaaagaagaagggaatgcaacctggaacaagttgaaaggtcgcgtcatcctggacaatatcgaacataatgtggttggtgttcgccagcagttgcttatgcaagagaacgccctgattgagcgtaatctgctcagcactggcagtaatggtagtgagtttgcactggatgagcttctggcgagctatcccgacctccataatgcgtaccaccaattgttcgtttactatcaatgtcgaaataccctgccgagtctggtgtcatggtccgcggaatatcgtgtattagtcagtcacatgatcgctacttttgaacaggcattacagcaaatcagtctaagcagagcattaaccatccaggaaaaacgtctgttacatctggggatttgccgcggcgacgattatgaacgtctctcgcctctgcacccattggtaatggcttatcatttacagctagctgaaactattatcgccgagcccggataccccgcatcagcttccttcgcttcattaccagagattactctcgatcgtctggtcgtctctggcctaatgccatttgtgtatcatagcgaacatgaatacgcacagttacaaccgatggtagaaaaccgcttctggatagatattgttccccagcgccagatgagccacgaatatgttaagcgtctggtgaaagacaagctaaacgaatttacagatgcctattctcggctgttccagagtgcaggaaataatgccctggttattaatgctattaatatgggagaagccagagagctattcctgggactggtagattattttaagcaggaaaaagataacgcaatttcgatacacgtaaattgctatgacgaacgtctgctacccaatgcctttgaccgctttgccgaaagcggcagctatgaacaacttaaaaatgatcttggtctgaacagcggtgcgtggcgttctgaagccgatatgttgatcgatctgcttcgcagtcacttaacattcagcaaatttatcctgccaccggaaagcgatcaactggcttacgcccatctcgcatttttcaccaacaccgcaccggttgattgccgccaaattcgcattgaggatgctgccagcggggttttatgtcatggcttgattgcaggcgaaggggctgaaacacaaggcgatgcttactttaccgcgtttggtctgcgtaatgtcgatactgaatcgtcttgcgccctgcgtctcgcccgcttgttaggctgtctgtggcaaccggcacggcagagcaacagccagtatcacggtcagggaattagtctggctgtcagcggtaactttaagcaactgctgaatcgctcttatgatagctctctctggaccacaattatcgaccctaaggtcacactcgatttctttactagtcaaaaagatgtcgtactaattcattactctgaccagtacgccagttgtgctggttatgacgccgtaaccgtcacaaaacaggttgagttgttcctgcgtctccttcaaacaggacaatccaccgttgatagccagcaattacttgctgaatttaatgcctttaacggtgagtggctgttgaaaatgttgcgttcaaatgaaaaggagcgcaaagaaaaacacggcattatcggtgcatacaaattcgtacagtctatgctgctccagtcagatatttgctggatcccactttcagtagctgagatgatccgcgtgtccggcaatgtcgggctgagaatgaaagaaagcgatttatcgcgccatttacagggttatcagaaaggagcgatctctgacgatgtgctctttgtcggcttcaaagataacaacctgtatctgttaccacttgaagtaaaaacaggagctcgccccgattacaaccatgcggggcagcaggcccgcgagctaaaacgctatttacagcaagatattcttgggccacaaactctagcatcacaactataccgggcactttttatccgccaggtattaatgcaggtagagaagttgcgtctgtatggtgtactggataacgataagctatcccctctgctggaacgacgtgaatggtggctcactggcgactatcagttaggtgagcttgcagattatgcagaaggctttgtggtagctcatgtagacagcggaacctgttttgatctcttttataaagaaacggcagagaatattctacagatcgaaatcccctattcattgcttccatcgttaattgcagcacaaggtgatcaacctccactagctgaacgctatcgggtgccggaaaaatatctgctcaaaccagagtgtgatgtcaattcttcacacccagtacaggtagcaacaacaactgagccgcagcccatttctgtgccggagcttccacaacctgaagcatcggcgcttccccccagtaatgtcagcagtacaccattacaggtcttgtttggtcatgatgctgtgcgtcagaatccattgtactgggaaccaaccaacaccgctaagttcatgaatactaataccggcattattggaacaatgggcaccgggaaaacccagtttactaaatcgctggttacgcaactgatgcgcaatcagtcctgcaacgttgatggtaaaccgattggcttgttgatcttcgactataaatccgactatgtggatgatgcgtttctggaagctacgggagctaagaggtatcagctatcgttgttaccttacaatccgttatcgttatttggtgatatgcccatgttaccgaggcatacggccatggcattcgctgaaacgatgggcaaagcgtataaccttggcgtaaaacaacgcatgaagctggttacgctaataatggagtgctatgacttagcaggaatagtgcctcatgatcgatcaacatggaatcgtgtagcaccgactattgaagatgtgtggcagcagtacctggcacaagagaaggtcgacgaagattcattatatgctgcactttataatctggctggtttccagatttttgaaacggatccagagaagatgaccagtttgtacgatctggttgatggcgtcacagttatcgaactcgctggttatccatcagagattcaaaacctggtagttgcactgacactggatctcttttacgcacagatgcaaaaacgtggaaaaccgatggtgcgaggagattatcgacagctaaccaaaatgattctggttgatgaagctgataattttatgcgccaggattttgccagcttgcgtaaaattcttaaggaaggccgggaatatggtgttggagcaatcctatcaacacaagaaattacccattttaaaacaggcgagaataattatgcttcttatattctgacctgggtaattcatcgagtttctgagatcaagaatgctgatatcaaggcagtatttaacattgatgacaaaggtgagcaagagtctttgatggggcaaattcgacagcttgagaagcattttagcttgtatgttgatggaaataaaagagttaagaagatgcgagatcgagctttttgggaattataa

SEQ ID NO: 96456 - DNA, 177 bp, Enterobacter aerogenes
atgtgcctggaaacagcacagaacaaccgtttttccaggtcgaaacgatcgcaaaccgataataataactaccacgtcttgccggggatattacgcctcttctgccggacggcggcgaataacaaatcccgccagccagaagctcacgacccacgtcgccagaccgacggcatatga

SEQ ID NO: 96457 - DNA, 204 bp, Enterobacter aerogenes
atgaagctgaccgacaaaatccgccgtgactggcactactacgcgttcgcgctggggttaatttttattttgaatggcgtggtggggctgttggggtttgacgcgcaggggtggcaatcatatgccgtcggtctggcgacgtgggtcgtgagcttctggctggcgggatttgttattcgccgccgtccggcagaagaggcgtaa

SEQ ID NO: 96458 - DNA, 306 bp, Enterobacter aerogenes
atggctgaatttacgttttcaaagacgctgatggggagcaacaaaaagaaggtatcggtcaccagcggtaacattgcctacgcgctttttgttctgctgtgcatctgggccggcgcgcaaatgttgagcatgctggtacacgcgcctggcgtattcgaacatctcattcagattcaggataccaaccgcccgcgtattgaaattgggctcggcgtcggtaccctgttcggtttaattccgttcctgtttggtagcctgctggtcggcgcgctggggcttatcctgcgctggtaccataaccgttaa

SEQ ID NO: 96459 - DNA, 1104 bp, Enterobacter aerogenes
atggcgcaggtttctcgcggtgtttcactctcttttacgctgctggccgggttggtgctgagcgcctgtaccagccagcaggcgcctaagttgaaagaaggcgagaagccggtggatgttgccgccgtggtgcggcaaaaaatgcccgccagcgtcaaagaccgcgaggcctgggcccaggcgattgccaaaacctttgacagccagaagctggcgccgacggaagaaaacgtctgttcggtgctggcggtcgcgcagcaggaatcaaactatcaggccgatccggcggtgccgggcctgaataaaatcgcctggcaggaaattgaccgccgggcggaaaaaatgcatatcccgttatttctggtgcataccgcgctgaaaatcacctcaccaaacggtaaaagctacagcgatcgcctggataacgtcaaaacggaaaaacagctgagcgcgatttttgatgacttcattggcatggtgccgatgggccagaagctgttcggctctctcaacccggtgcataccggtgggccaatgcaggtaagcatcgcctttgcccagcagcacaccgatggttatccgtggaaaatggacggcaccgtgcgccaggaggttttcagtctacgtggcgggttgtggttcggcacctatcatctgctcaactacccggctaactacagcgtgccgctgtaccgctttgctgatttcaatgccggttggtatgccagccgtaatgccgccttccagaatgcggtggttaaagccaccggcgttaagctggcgctcgatggcgatcttattcgttatgacagcgatgaacccggaacgactgagctggcggtgcgccgtttagccgggcagttggggatgagcgatagcgatatccatcgtcaactgaagaagggtgacagcctggcgtttgaagagagcgatttgtataagaaaatattcaaaatcgccgagaaaaaggccgggaaaacacttccgcgcgagatgttgccagggatccaactggaaagcccgaaaatcacccgcaatctcaccaccgcgtggtttgctaagcgggtcgacgatcgccgcgccagctgtatggcgcgtcgttaa

SEQ ID NO: 96460 - DNA, 1221 bp, Enterobacter aerogenes; identical to SEQ ID NO: 95566

SEQ ID NO: 96461 - DNA, 534 bp, Enterobacter aerogenes
atggcatctcaacgggttctgatggtagtggatatgcaaaacggcgtattcgagacgccgcgtgtcgatcgcgaacgctgcgtggcgcaaatcaatcgcctgattcacgccgccgatagcgttattttcattcagcacgctgaagcgggtgggctggaagagggaagcgaggggtttgcgctgctgcctgaactggcgcaacccaccggggcgcgctacgtcaccaaaacggcctgcgatgcgttttataaaaccgaacttgaacaggtgctgcgcgagagcggaactcacgcttttgttatctgcggctgcgcgaccgattattgcgtcgataccaccatcaaaaacggcgccagccgcggctacgctatcaccatcgccgaagatgcccataccaccgccaaccgcgccgccgccgaggccaaaacgctgatcgctcactataacgaggtgtggcggactttcacccttcccgataatccattacgcgtgaaacccgtagaaacaattcttgccgaatggcagacgaactaa

SEQ ID NO: 96462 - DNA, 1170 bp, Enterobacter aerogenes
atgcctccgttgaaacgtagtttgctcatttttgctgcgctgtgcgcggcgtcgtggacctcagcccaggcggttcagccgagcgttgatccggtatttacttctgatgtggtcgaccgcttcgccgaacatatctattacggcagcggcgccaccggcatggcaatggtggttatcgacggcaatcagcgcgtattccgcagcttcggcgaaacgcgccccggtaacaatcagcatccacaattggattccgttatccgtatcgcctctctgagtaagctgatgaccagtgaaatgctggtgaaactcctcgatcagggcgtggttaagcttgacgatccgttgagcaaatacgcgccgcctggcgcacgggtaccaacctaccagggcgtaccgattacgctggtcaacctcgcgacccacaccagcgccctgccgcgcgagcagcccggcggcgcggcgcatcgcccggttttcgtctggccgacccgccagcagcgctggaactggctgtcgacggctacgcttaaaaccacgccgggttcgcaggcggcctattccaacctggccttcgacctgctggccgatgcgctatcgaccgccgccggtaagccttacccgcagctgtttgaggaacaaatcacccgtccgctcggcatgaaggacaccaccttcaccccatcgccggaccagtgtcagcgcctgatggtggcggagaaaggcgccagcccgtgtaataacaccctcgcggccatcggcagcggcggcgtgtattcgacgccgggcgatatgatgcgctggatgcagcagttcctctcttcagatttctatacccgcggccagcaggccgatcgcatgcagacgctgatttatcaacgtacccagctcaccagagtgatcggcatggatgtaccgggtaaagccgatgcgctgggtctgggctgggtgtacatgaagccgaaaaacggccatccgggcattattcagaaaaccggcggcggcggcggatttattacctatatggcgatgaacccgcaggcaaacgtcggggtcttcgtggtggtgacccgttccgcgttaacccgtttcagcgccatgagcgacggcgtcaacgatctcgtcagcgccttaagcggcgtgcagccgaatatggaaaccgccagccagtaa

SEQ ID NO: 96463 - DNA, 975 bp, Enterobacter aerogenes
atgacagatttaatcactcgcccacgccgcctgcgtcaatccgcctcgctgcgcgccatgtttgaagagacaacactgagtttgaacgacctggtgttgccgatctttgttgaagaagaaattgacgattacaaagccatcgaagcgatgcctggcgtcatgcgtattccggaaaaacatctggcgcgcgaaattgagcgcatcgccaacgccggtattcgttcagtgatgacttttggcatctcccatcataccgacgcgaccggtagcgatacctggaacgaaaacggtctggtggcgcggatgacccgtatcgccaaacaggcggtgccggaaatgatcgtcatgtccgatacctgcttctgcgaatacacctcgcacggccactgcggcgtgctgtgcgagcacggcgtcgataacgatgcgactctggaaaatctcggtaagcaggcggtggtcgccgcggccgccggcgctgatttcatcgcgccatccgccgcgatggacggtcaggtgcaagcgatccgccgttcgctcgatgccgcgggctttaccaataccgcgattatgtcttactcgaccaaattcgcgtcatcgttctacggcccgttccgtgaagccgccggtaccgcgctgaaaggcgatcgtaagacctaccagatgagcccaatgaaccgtcgcgaagcaattcgcgagtcgctgctcgatgaagcccagggcgcggactgcctgatggtgaaaccggccggcgcctatctggatatcctgcgtgatatccgcgagcgcaccgacctgccgctcggcgcttatcaggtcagcggcgagtacgcgatgatcaaatttgccgcgcaggctggcgcaatcgacgaagagaaagtggtgctggaaagccttggcgcaattaaacgcgcgggcgcggacctgatcttcagctatttcgccctcgatctggccgagaaaaaaatcctgcgttaa

SEQ ID NO: 96464 - DNA, 1686 bp, Enterobacter aerogenes
gtgttatcatataagcaacaagtaaaggaagaaagtcgaaataaaatatggtcaagagccataaaaaaactgacaaaagaaaggaagaaccaatatataataaaaaaagaatatatcaaaaacctttggaattactcttttaatgaaattctcaaaaacactatctacgacaaaaaaaccataacctcttgggttgatttttcagatacgctaaatatcaaaaagaacccaaaccaattaaaaattgcttatttttgcggccctgaaccagaaaatgacttagatatactgatcaagttaggtgtaaaagttgagaatgtttgggccattgaagctgataaaaaaacttaccaaaaagcaattgaaagcgtaaggataaaatatccaaccttaaaaattttcaatggtgatatatcagacttagttaaggcaatatctttcaaatttgacataatatatcttgattttacagctccacttattagtagtaaatccaagccattattaaaaataaactcaatatttgagcatcatgctttagaagacctagggattttaattataaatggtgctcttcctgaaaataattctgataatgttgattttttagcatcttacttccgcagccaaacatttcttgagtctccaattattaccggcgatgatactgatgtatattataccgaaggtagcgatgctcaagggttgtttacggatgaagagattgcagagataactaagtcgggagaatgcgattggattgatgaaaatgactcattcaataaaaaaataaaggaaaactttgcgtcaacatatagtgcattttgcacacattaccctgcaatggtagcaagctacgcacaaccaatacataacgtatcaactataccctctttaaaaagaatgtttttcaaaacggatataaaaaccataaaaaactgtcttgaaagaatagccactccatctgataaattattcaaaaatattgactatgataaattactatccgatgatgagtatgctaaaaaagttgatttaactggttctgagttatatgaacaacatcaggaattccctatatggagttttatttctagactttctcgttctaaaaattcattaagtagttactggaatcaacagtttaataaaaaaaatgatggctgcctatctttagaaagcatccaactatatgatttactaaagacagcacactattcatacaagagtattctttcagatacgctgtctaattcaatagaagaaatcatggaaaaaatccctgacagacatggcggcattttttgtgatgtaccaatgcctcacttgtggatggaattagctttaaaccacttaggcggtacatatcatataaacacaaaacaacattggcgtgcaaagtataaggcaaaagagcatgaaatgtatttagatatgtttgtttttgataaatgtagagcattatatgattggttacccatgctcgacttgtatggcacttatatatcagccatagaaagacaaataatagttagatcttgtatggatgccattaaaaaacagtgtcactattcctttttcgacttatatttcggttcacatttaatagggatacatacaaaagagtggtcaggttgcccaaacctaaagattcgccacaacctgaacaatccaaatgaaaagtaa

SEQ ID NO: 96465 - DNA, 264 bp, Enterobacter aerogenes
atgttaatcagcgcgttctgcaccgtgtcgctcagacgatccaccacgccgctttcgcgcatcaggttgccgaagcagaacatccccagcagcggcgcggcgtccggcagcagcagcgccaccagcagcaacagcaccgccgggaagaggatcttctcgcgtttgctcaccgtacgcagctgcaccatacggatcttccgctctttgtcgctggtcagcgccttcatgatcggcggctggatcagcggcaccagcgccatatag

SEQ ID NO: 96466 - DNA, 1389 bp, Enterobacter aerogenes
atggaattgatgccattcaattttgacagattgcctaatggacaggtgtttataagcaacctcgctggttttcatcacttcattgatgagcaagagctgcttgatctttctgatgagcaaatcagtgcggaacaatcaaacgcacttgaaagcaagctgttcataaccaacgaaagctcatcagctattgctccctatgctttaagttctgcttttgcaaaacgattgatgaatgaactggcgatcaggccaattttcatgattgtgcccacattgcgttgcgaccatacatgcaagtattgtcaggtcagtagagcttcagtgaacgcctctggttatgatctagatcccgatctcatccctgatatcatttcgactatcaaaaaactatcgacaccaccttacaagatagagatacagggtggagagccactcttgcggttcgatttaattcaatctatctatgagcaatgtgctgaaacgctgggaagcaccgattttgagatggtggtagcatcaagcctgtctgtcttgaatgaggatatgcttgaatggtcgagagacaggaacataacgttctctgtttcgcttgatggtgaggaagttgttcacaacagtaatcgaattcttggtcatgggcttgcttacagtagaacagtgtcaggggtagaggctatcaaacggtctttaggcgctggtcgcgttgcaacggttactacagttactaaagatctcattaggcatcctgaatcaattgtccaggctcacttgtctcttggcctcaaggatatgtttatccgacctgttagtccctatgggtttgcacaaaaagcatcgttcacattttctatggaggaatacttcagtttctatgcctcgttgatagatgaaatccttaagatgaataatgaagggataagggttgtggaacattcggcctccattcatctgaaaaggatcttcaatcccggctttagtggttatgcggatttaaagtcgccaagcggggtcgtgcttaacagtattcttttcaattatgacggtcgagtatatggtagcgatgagagccgtatgttgcagaaggtgaaccctgaaacggagttcagtgcgggtgaggttaaaacgctatcattttctaagagtccttactataacgcagtgttgagttcatcgttcaattttgctctgccaggttgtgatacatgtgcatatcaaccattttgcggtgcagatccatgccagaacataagtgtacagggtgagcctgttggtgataggagtcgttcaacgttttgtcagtatcacaaggggatgttcaggtatctgatgaactgcatctcagaaggtggtccgaaggctgagatgctaaaaggatgggcatatgtctga

SEQ ID NO: 96467 - DNA, 273 bp, Enterobacter aerogenes
atgtgcgaaaggatgttaaaaaaagatgtttattctgaatgggttatacgcaatagcctgtactggatgacttcgcttactcagtggaagctttgtgaagatatatcctcttggacaatctcttttgaaaacgatagtcccgaatgcctctatgaattcgagaggctgctgaatgattacactttgcgagaaaaactacagcataaaacaggggcgttgagagattctattgtccataaagtgcttcgcagtgtcgatgaaaggctttcgtga

SEQ ID NO: 96468 - DNA, 396 bp, Enterobacter aerogenes
gtggtcaacgtggctgtgggtgtagataacggcgacgaccggtttcttaccgcggtttttgtaatacagatccatgcccactttggcggtttctgccgacaccagcggatccacgacggtaatgccttctttaccttcgatgatggtcatgttggaaagatccagattgcggatctggtagacgccgtcggtcacctcaaacaggccgctgatgttaatcagctgcgactgccgccacaggctcgggttgacggtatccggggctttttcaccttctttgatgaaggagtactgttgcggatcccatactacgttaccttgttcgcctttaatgatctcggtgggcagggcggcaataaaacctttatgggcgttggtgaaatcagtgttatctga

SEQ ID NO: 96469 - DNA, 666 bp, Enterobacter aerogenes
atgagcatctccaccacgaaacgccgcaatgaagaagtcaatgttggtctttctgatcgccggaaaacagagattacagccccaaagtttgatctgtttggtgaaacttacacgtttgttaagactttctctggcactgtcattaattccaacccaagcaataatcagatctgggtaaaaaccgacgctggggatgagaagcagatttccgactatggtatccccttcagaagttcacacactatttataaatacgagcttcgccagtatagtgaggatggttcgtataatgtgtataaagatgcacttatcgttaataagaacacgggagaacatgaagtaaacttaaacaggaaaaaagttgtcatccccgcttttctgacaatgctgttccataatgcttctacagcatcgtattacagagcaatgcctgtttcgaaactattctctattgttttcattttactttgtgctgctgcacttatttcatttctcacattgccttggggctttaaagatggatatgtgtgggatgagcacaagtatatgtggctcacatatttcctatcaaggatcggaagcttcgtttgtatcaaatggattaaaagaagaagcgctagatttgatcatgaaatcagaaatcttatcgatttagtaaaaaaataa

SEQ ID NO: 96470 - DNA, 741 bp, Enterobacter aerogenes
atgatagaaaagagaactggtgagctatgcccaaaaggattcatccaaaacgcccttaacgaactgcttgataccaggcaatcgattaccgactttgtgcaacagcttgtggcacaaaatatcaggccaatccctaacattgcctctactggacgcatgaacggcttctcattcgaatacaacgggattgctttcaaagcatctcaattgggaaaagggtattcctggtctgccttgcaaagcagaatcgactaccaacaggaacgtgataatgctttcctgtttaaactgaaatcatctgtcagagaaacatctgttagtgcaactcatgatatggtcataactatagatgctcctgaaaccacgacagaatacgttaaccgccccatagaagcacttatcctcgataaacgagctgctggtcaggacgaatactctatcgcttctgtcgaagcgcttctcccagaagctgttgcaactaacaaagaagcgatagcaaccgaaacgttaaaagtagcgcccaagcgaagctatagggcttcaacgttcagatggttagagaccatcccctatctcaataccattattaccatcttcaaaaacctcaaaatcccaacccttaaacgccctcaaaaacacaaaaccatcactagcgtgagaatggtagagattacgcctctcccccaaaaaaatctcattgaatcagcaccacaatccagaagagcttcgctttcgatgtaa

SEQ ID NO: 96471 - DNA, 639 bp, Enterobacter aerogenes
  misc_feature (471)..(480): n is a, c, g, or t
atgaaaaaatttaattttgctgctctacttccgggatttttagcactcaataattctgtatgggcaagtgattcatctaccggagcaagtgatttgcctggtatgactcttaatgaacatgatttagtgatcgcaccacttaacaccgaagttccattctacattgcagggcatcgcagtcatagctcccatcggagccatagttctcaccgttcatcatcaggtggcgggtactatggtggcagcactccttattatccaaaaacatacagctcaccaagttcatctgggtcttcaagttcaggaacaagttcctcatcgtcctcttcctctgtgcgttcgcttcgttctaacgacaatattaactctactactacgaattcagttggaactacagaagctaaccgtgcaagtaatgggcttacttctggtacagagaagcgtaagcgcttaatcatgcgggttcaattnnnnnnnnnnctggacaacggttattacaacgggaatattgacggcataatggggccctccacaaggcagtctataaaaaattaccgaattgcgaagggactaccaacgcctgcaactgaaacactggatactcaattattgaactcgttaaatattctggcccgctaa

SEQ ID NO: 96472 - DNA, 387 bp, Enterobacter aerogenes
atgctaaagaacatatactgtgaaaaattaattagaaaagaactgattttcaaaaatggtttgaatgccatattgggacctaaaaatggtgccaactctatcggtaaatcatcagttctaatgttaattgattatgtttttggtggtgatgattttatcaccctatgcaaagacgttatttctcaagttggtcatctaaacatcgaatttacttttgaatttgatggaaaatcctatcactttataagaaataccgaaaccaataatagtgtgtttgttagaaataacgaagaaaaattagagtggtcaattgaagattttagaatcttcttggctcagaaatatggtttttcatcaaacgatccttcatttagctgttcaaagtaa

SEQ ID NO: 96473 - DNA, 519 bp, Enterobacter aerogenes
atggtcgagcagaccggtaccaccgtcggccacgttatcgccctgctgttcgccgccagccgcgaggcggtggatgtgtccctgcgcaacgttattccgtttatggcctttgtctcgctgctgattgccctggtgcaggagaccgcactcggcagcctgattgcccacgccctgacgccgctggcgaactctctgggggggctggtgctgctgtcgctcatctgtggcattccgttcctctccccggtgctcggaccgggtgccgccatctcgcaggtgattggcgtgatgataggcacacagattggcgcaggggcgatatctccggccttcgccctgcccgcgctgtttgccatcaacgtgcaggtcggctgcgacttcgtgccggtgggcctatccatgcaggaggcaaagccggagaccattgcaaagggcgtccccgcttttctgctgtcgagacaactgaccggaccgctggccgtcatcatcggctggctgttttccctgggcttattctga

SEQ ID NO: 96474 - DNA, 156 bp, Enterobacter aerogenes
atggtcgggatgcccttctgcggatacaggccgcagcgcagggacccggcacagttaatcaccacgcagaggatgtcgttatccggcggaatgtctgagaagccgttgacgatttccgattcggtgagtgcgccgatttctatcgccaccggatga

SEQ ID NO: 96475 - DNA, 399 bp, Enterobacter aerogenes
atgcaacgtcgtgagtttatcaaattaagcgccgcgcttggcgcggtcagcgccttaccgctctggagccgttcggtattcgctgctggccgtccggctttgccggtcccggatttattgaccgccgacgcgcgcaatcgcattacgctgacgattcaagccggaaagacgcagtttggcccgcatcttgcgacgacctggggttataacggcagcctccttgggcccgcgttgaagctgaagcaaggtgaagcggtgacggtagatattcataaccgcctggcggaggagaccacggtccactggcacggactagaagtgcctggcgaagtcgatggcggcccgcagggcgtcatcgccgcaggagcctcaaggacggtgagttttacgccgacgtag

SEQ ID NO: 96476 - DNA, 2391 bp, Enterobacter aerogenes
atggcagaaacaaaatctcaacaatcacggttacttgtcacgctgacggcgctttttgccgccttctgtggcctgtatctgttaatcggtggggtatggctggccgctatcggcggttcctggtactaccctatcgcaggcctggtgatgctggccgtcaccgttatgctgttccgcggcaagcgcgctgcgctgtggctgtacgccgccctgctgctggcaaccatgatttggggggtatgggaagtcggtttcgacttctgggcgctgacgccgcgtagcgacatcctggtcttcttcggcatctggctgattctgccatttgtctggcgtcgtctgccggtcccttccgccggcgccgttggcggtctggttatcgccctgctgattagcggcgggatcctgacctgggccggtttcaacgatccgcaggaagtgaacggtacgctgagtgctgacgcgacgccggccgcgccgatttctaccgtcgccgatagcgactggccggcttatggccgcaaccaggaaggccagcgttattcaccgctgaagcaaattaataccgataacgtgaagaacctgaaggaagcctgggtattccgcaccggcgacctgaagcagccgaacgatccgggtgaaatcactaacgaagtgacgccgattaaagttggcgacatgctgtatctgtgtaccgcgcaccagcgtctgttcgcgcttgacgcggccaccggtaaagagaagtggcattttgacccgcagctgaacgccgatccgtcgttccagcacgtgacctgccgtggcgtttcctatcatgaagccaaagcagataacgcgcctgccgacgtcgtcgccgactgcccgcgccgtattattctgccggtcaacgatggccgtctgttcgcggtgaacgccgacaacggtaagctgtgcgaaacctttgccaacaaaggcattctcaacctgcaaaccaatatgccggtaaccacgccgggtatgtatgaaccgacgtcgccgccgattatcaccgataagactatcgtcattgccggcgcggtaaccgataacttctcaacccgcgagccatcaggcgtaatccgcggctttgatgtgaataccggtaaactgctgtgggccttcgacccgggtgcgaaagaccctaatgcgatcccgagcgatgagcatcacttcacactcaattcacctaactcctgggcgcctgccgcctatgacgcgaagctggatttagtctatctgccgatgggcgttaccacgccggatatctggggcggcaatcgcacgccggaacaggaacgttacgccagctctatcgtagcgctgaacgcaaccaccgggaaactggcatggagctaccaaaccgtacaccacgatctgtgggatatggatatgccgtcgcagccgacgctggccgatattgatgtgaacggtaaaaccgtaccggtgatttacgctccggccaaaaccggcaacatcttcgtgctggatcgccgtaatggcgagcaggtggtcccggcgccggaaaaaccggttccgcaaggtgcggcgaaaggcgattatgttgctaaaacccagccgttctccgagctgagcttccgtccgaagaaagacctgaccggcgcagatatgtggggcgccaccatgtttgaccaactggtgtgccgcgttatcttccatcagatgcgctatgaaggtatcttcactccgccgtctgaacagggcacgctggtcttcccggggaacctggggatgtttgaatggggcggtatctccgtcgatccaaaccgtcaggtggctatcgccaacccgatggcgctgccgttcgtctctaaactgatcccacgcggcccgggcaacccgatggaaccgccaaaagacgcgaaaggctctggtaccgagtccggcgttcagccgcagtatggcgtcccgttcggcgtcacgctgaacccgttcctgtcgccgtttggcctgccgtgtaaacaaccggcatggggttatatctcggcgctggatctgaagaccaacgaagtagtgtggaaaaaacgcatcggtacgccgcaggatagtctgccgttcccgctgcctgtcccgctgccattcaatatgggtatgccgatgctgggcggaccgatctcaaccgccggtaacgtgctgtttatcgccgccaccgccgataactacctgcgcgcttacaacatgagtaatggtgaaaaactgtggcaggcgcgtctgcctgcaggtggccaggcgacgccgatgacctatgaagtgaatggcaagcagtacgttgtcatctctgccggcggtcatggctcgttcggtactaaaatgggcgactacatcgttgcctatgcgttaccggatgacgcgaaataa

SEQ ID NO: 96477 - DNA, 2022 bp, Enterobacter aerogenes
atgagccgctatccgtcgcttttcgccccgcttgagctgggcttcacaacgctcaaaaaccgcgtgttgatgggctcaatgcacaccgggctggaagagctgccggacggcgcgcagcggctggcggccttttacgccgaacgcgcccgtcacggcgtggcgctgatcgtcaccggcggcatcgctccggctccctctggcgtcaccatggccggcggcgcggtactcaacgatgccagccatctggcgcaccatcgccatattaccgacgcggtacatcaggaaggcggcaaaatcgccctgcagatcctgcacaccgggcgctacagctaccagcccgcgctagtggccccttcggcgctacaggcgccgattaaccgttttacaccccatgaactgagccacgatgagatcctgacgctgatcgatgattttgcccactgcgcccaactggcgcgtgaagcgggatatgacggcgtcgaagtgatgggctctgagggctatctgattaacgaatttctcgccgcgcgcaccaaccagcgcgacgaccaatggggcggcgattatgtcaggcgcatgcgtttcgccgtagaggtggttaaggcggtacgccagcgcgccggtcacgatttcattatcatctaccgcctgtcgatgctcgatctggtcaacgacggcagcacgctggcggaagtcaccgaactggccaaagcgattgaagcggcgggggcgacaattatcaacaccgggattggctggcacgaagcgcgcattccgaccatcgccacgccggtaccgcgcggagctttcagctgggtcacccgcaagctgaaaggcgtggtgtcgatcccgctgattaccaccaaccgcatcaacgacccgcaggtcgcggaggatattctcgcccgcggcgatgccgatatggtatcgatggcccgcccgttcctcgccgacgccgaatttatgtcgaaagcgcagcgcgatcgcgccagggagatcaatacctgcatcggttgcaaccaggcgtgtctcgatcggatcttcgccggcaaagtcacctcttgtctggtcaacccgcgcgcctgtcatgaaaccctgatgccggtcctgcctgccaacgcgcctaaacggctggcggtcgtcggcgccgggccggccggtctggccttctccgttaacgccgccgcccgcggtcatcatgtcacgttgttcgatgcgctcccggagatcggcggccagtttaatatcgccaaacagatccccggcaaagaggagtttcacgagacgttgcgttactaccgcaccatgctcgatcttcatggtgtcgatctacgcctgaacacccgcgtcacgacagacgatctgctggcgttcgatgagacgatcctcgccaccggcatcgccccgcgcctgccggagatcgacgggatcgatcatcccaaagtgctgagctaccttgatgtcttgcgcgataaagcgccggttggcgcgaaggtggcgattatcggctgcggcggcatcggcttcgacaccgcgatgtatttaagccagtcgggcgcggccaccagccaggatatcggcgagttctgccgcgaatggggtatcgataccagcctgcaaacggcgggagggctgagtgctgaaggcccacagctgagtaaaagcccgcgacagattgtgatgctacagcgcaaagccagcaaaccgggcgaagggctcggcaaaaccaccggttggatccaccgcgcgacgctgctggcgcgcggcgtgaaaatgatcccggcggtcagctatgaaaagatcgatgatgaagggttacatgtcactatcggcggcgagcgccaactgttggcggtcgatcaggtggtgatctgcgccggccaggaaccacgccgcgagctggcggatccgctgcgcgcggcggggaaaacggtgcatctcatcggcggttgcgacgtggcggcggagctggatgcgcgtcgggcgattgcccagggcacaaaactggcgctggcgatttag

SEQ ID NO: 96478 - DNA, 237 bp, Enterobacter aerogenes
atgaagccactgcttgaagctcgccagatttgcaaacagttctccggcgttgcggtgctcaagggcattgatttcacgctaggcgcgggccaggtgcatgcgctgatgggcggcaacggcgcgggtaaatcgacgctgatgaagatcatcgccggcgtcgaaacgccggatagcggtgaactgacgatcggcgaacgcgcgtttgcggcctcaatccagcgctggctcatcagttag

SEQ ID NO: 96479 - DNA, 999 bp, Enterobacter aerogenes
atgaagctgaagcttaactgggaaagcgcgctgctggcgttgctgatcgcggaaatcctgctattcggcgctttgaatccgcgcatgctggatatcaatatgctgctctttagcaccagcgactttatctgcatcggcatcgtcgcgctgccgctgacgctggtcatcatcagcggcgggatcgatatttcgctgggctcgaccatcggcctgtgcgccatcgccctcggggtgatgacccaggcgggctggccgctgtggctcgcggtatcgctgacgttgctcttggggctgctgtgtgggttattcaacgccgcgctgattcactacaccggcatcagcccgctggtgatcacgcttggtacgctatatctgtatggcggcggcgcgctgttgctttccgggatggccggcgcgaccggttacgaggggattggcggttttcccgatagcttcaccgccttcgccaatttaaccctcgccggactgccgctgccgctggtgctattcgcgattatcacctttttcttctggctactggcccatcgcgggcgctttggccgccacctctttttactcgggcaaaacccgcgcgccgcgcgctatgccgcgctgtcggtgaacggcatcccgtacgtgctgtatggcctggttggcgtcgcctcggcggtcgcggcgctggtgatggtctcctatttcggctcggcgcgttcggatttaggccgcgacctgctgatgccggcgctgaccgcggcggtgctcggcggggccaatatttacggcggctcgggatcgatactgggtaccgcgctggcggcattgctggtggggtatctgcaacagggtttacagatggtcggcatccccaaccaggtgtcgagcgcgctgtcaggggcgctgttggttgtggtggtgatggggcgttcgctgagcctgcaccgtgaatgggtgcgcgcgacctggcggcgtcttttctcgcataaaacaatcggagcataa

SEQ ID NO: 96480 - DNA, 507 bp, Enterobacter aerogenes
atgaaattaacacaggaaaggcttaaggatttacttcgatacgagccagacactggaaatttctactggttaaatcctacagcgaaaaggatgcatcacggagagctggctggttttgtggattacaacggatacgtttacataaaagtcgacagtaagcggcattctgcccaccgccttgcatggctttatgtttatggccattttccgtctaattttattgaccacatcaataccgttagatctgacaaccgaatttcaaatctaagagaagcaacccgctcgcagaacatgatgaatcgctctgtgggaaaaaacagcaagtctggcgttaaagggattggctgggataagaaaagccaaaagtggcgagccagatgtcaggcggatggaaaaagaaaagatgtcggtttttttgactccattgaagaggctaaaaattatttagccctctatagaagccatgctcatggcgagttcgctaatgatgggggtgatgcagcatga

SEQ ID NO: 96481 - DNA, 306 bp, Enterobacter aerogenes
atgaataagcagagcatcacaccagagcaattccgcgccgtcgccggaaccatgcctgcctgtcgcgcagcggatgcgctggggatcagccaggcgaacttctaccgcctggcacagagctattccatcagcacagcgtttgtctacaagccatggaagccagaagagaagcagatcgtcgctgaaatgcacgctgcaggcgagtcgcataaaagcatcgccatgaagatgggccgcagcgttgcgtcggtatccaaaactttaagccgcatgagaaaggcagatacgaaacgaggtgcgcaatga

SEQ ID NO: 96482 - DNA, 291 bp, Enterobacter aerogenes
atgaaagtaacagctgagtcaatcctgtccatcctgcgcaaggacgcgcggaacaacattactgtatttcatcgctggcagaccgcagcaggcgccctcgggcacaacgcagggataaccctgaattttcatgaaccttattacgccgggtgggcgccagcgcttgagatgaaggaagtgttcatctcggcaccggaactggagatggttaagccattcctggccgtcgagcgctggggaaacgggacacttggcggagaaatttaccggttacctcgggaggcccaatga

SEQ ID NO: 96483 - DNA, 654 bp, Enterobacter aerogenes
atgacggataaaaatgtatacgccgctatcagcgctgtggccggagagctggcagagaaaggcatcagcaaggccagaaaacagggtagccaggtcaactacgcattccgtgggatcgatgacgtttacaacgctctggcccccgccctggtgaagcacaagttgctgatactcccgcggtgtactgagcggtcatgctgtgaacgaaccagcaaaaatggtggcgcgttgttttatgtaaccgtccgggctgagttcgattttgtcagcacggaggacggcagcactcataccgtcgtcacctacggcgaggcgatggacagcggcgataaagcaacgaacaaagccatgtcgattgcgtacaaatatgcagcctttcaggcgttctgcatccctacagaagaaacgactgtggaccctgactatgaggctcaccaggtaaggccagcagacgcagatcagattctcgctgatttcactgcttacgcaggctcagagaacgatccgaaggccctccaggataactacggaaaagcatggaacagccttcatggcttccctgggcatcaggcgaagtgcagggacgttaccggcatccgcctgagagagctgaaacaagccgcaagtggtggcagccatgaaagtaacagctga

SEQ ID NO: 96484 - DNA, 159 bp, Enterobacter aerogenes
atgagcgcggcggaaaaatggaatgacgacgaattcattcagctgatgagcgatgcgatcggcgaaagtgatttcgacgatgacgaaccagtaaacctttctgcggaacggcagaacccggtgatcggctgggatgaattcgcggggaattttcaatga

SEQ ID NO: 96485 - DNA, 198 bp, Enterobacter aerogenes
atgaatatcaaatgtgaatgcacagacatgcgcacatctgtaggcccgcataacacgttaaccgtcgagctggaagacgtggtgctgtcggggacggttaacagtcgtgaagtcctcatgcagctggattgggacgtggtgatcgaatgtctggcggagcatggctacgtcattactcatcgggagaaagcagcatga

SEQ ID NO: 96486 - DNA, 513 bp, Enterobacter aerogenes
atgctgaataaagaaagacttgatgagttattagattattcgcctgattcagggttatttacttggaaggttaaccgccggggaaaggctaagtctggatgtatcgcaggaagcaaaaatggacaaggttacattctcataaaaattgacgggaagttttattttgctcatcgcctcgcgtggctagttacgcatggagcattcccagtcaacatgatagaccacattgatggcaacagagaaaacaacaaaatcaataacctaagagaagccaccgctgaacaaaatatgtggaatagcgcagccgggaaaaataacaaaacaggagtaaagggtgttagctgggatggcagaaggaaaagattccgggccagcatatccataaaagggaaaaacaaagaaatagggagttatttgtcacttaaagatgctgagtcggcaataaaggattatcggctgaaactccatggcgaatttgcaaataacaaagttattaataacaaccttttttga

SEQ ID NO: 96487 - DNA, 630 bp, Enterobacter aerogenes
atgacatcagtaagattgacgaatgctttacgcgaacaaatcgctaaaaacgcgctggcaaaatcaggggttatcaccgctattgaatcccttgaccttaagcgccaggaagttgcaagagatgctcgcatcgctgcttttggtggcaaagaacaggccgacaaggtcgataagcaatatgaaaagcttgagaaattagaggcagagcttcgcagtgctggcgcttcgcttcacatttccggcaatccgcaaagctcaatcaacattgcaatttccggtcgtcgtcttggctggtgctcatacggaagaaccagcgaaggaaaagaaatttttctggttactccaaaccgtgatctgtgtctctttggtgccgagcatgaaattaccaagcggtttgattcaattatcgacgaagagcaaaagctcaattccagaaaaaaagaaattgaggcgactgtttgggctgctctgaaatccgttactaccctgagtcgccttgtagaagtatggcctgaaagcaaagagcttatacctgaaaacgttgacagcgccaaagctgcccttcctgcgctgaaggttgaggacctcaaccggttaattggtcttccaactgaatcggtagaaggctag

SEQ ID NO: 96488 - DNA, 444 bp, Enterobacter aerogenes
atgtcacgatcagcatttgttatgcgagacgctaaagttgccaatgaagaatacgacgtgcataatttgaacaatgattatggtggcggtgacggcgggggtggtgatatggcagagcgtttagagagactggagaaaaaagtagactccattgagtccaccctgtcacgcctgaatgaaagcatggcgcgcctagattataaaattgacctgcagagtgcgaaactaacatccgcgttagacttgcaatcaacaaaaatgacagcgtcactcgaacttcaatcacaaaagttaacgtcttccctcgaaaatcagtcccttaattttgatggaaaattaaaggatcagcgtatcgcaatcactgcatgggtgcttggactgccaagcatcatatatgggctttatcgaattgtagatttattcgcgacgcataaaccaggctaa

SEQ ID NO: 96489 - DNA, 426 bp, Enterobacter aerogenes
atggaaaaaatttcatttttgtacgtatcccaaatctttcccggaaagattgctcgatcgctgaactatccgcagccatggataaagccagatgagcaatcagggaaaattagcattgatgtttcttttggcttaattatcaaaaccaaagtaaattatcgcgttgatgtggatttattctttgaagatcagaaggttgagtttggaaacaatcagcctcttcaaactgacccgatcgttgctggaacaacttctggcaatgagtcagtaagcattgaaaacatgtcaattatgaatattcacgctgaaaatgagggggtttatagagtaactttatcccttcatgtgattgatgacaatgaaagtagcagaatgattcacaatagtgagtgttttttctatttatcaaaagaatggaagctttaa

SEQ ID NO: 96490 - DNA, 654 bp, Enterobacter aerogenes
atgaagtctcaaggtgtctctgtatctgagccagggatttggaagtggcttaattcatcagcaataccagaccaaaccaatatccttgcccttagtcgttggcttggggttagacctgactggctggaatacggaaggaatgagcctaaacctgagatcctcagggaatcatccatcccgcctgaatctgagtggggaaccatcaatacatgggacaaagacacgccgctgccagatgatgaggttgaagtgccattcttgaaggatattgaatttgcttgtggtgatgggcgcgtcatcgacgaagattacaacgggtttaaactgaggttttctaaagcaacactgcgcagagtaggagctaatactgatggcactggcgtgctgtgctttccggcagtaggaaacagtatggagccgttaataccagatggcgccactgtggcgattaattgcaacgataaacgcatcgtagacgggaaagtttatgcagttaaccagaacggctggaagcggttgaaaatgctttatagagttggtcctgatagggtaagtctacgcagctacaatagtcaggagcatcctgatgaagagcatcccttatcagatattgagatcgttggtcgtatgttctggtcttcaatgctgtggtaa

SEQ ID NO: 96491 - DNA, 246 bp, Enterobacter aerogenes
atgaacccaatgcaatttgcaatcgaagctgtaggtggtcaaaccgctgcggcacgcttatgcggtctgtcgaatgttgctattcacaagtgggtaaagaacgcggcattgcctcgcactgagtacacagagaaaaccaactattcacagctcttggctgacgcatcaaaagggcagtttacggcggagtggctgcgccgagccgcgaaccctgaccgaattaaaagtggatcacatgccgcctaa

SEQ ID NO: 96492 - DNA, 222 bp, Enterobacter aerogenes
atggagagttcaacgacacgcaacaaagtggaggctcgcaggatagaaagctggttacacagccagatagctgaactgggaaccacgaatatcgccaaagtggccggagtgaataagtcgacggtgagtcgctggcgggaaagcctgctgccgaacatgtcgctactgctggccatcctgatttctaacaggccgggagagaaaggtgactttgaagcatga

SEQ ID NO: 96493 - DNA, 348 bp, Enterobacter aerogenes
atgacacgtcaattttccatgcaaaagaggctttctgtttttaccaaagcctctgggaagtgtgcttattgcggacatgccctctcaatcgaaagaatgcacattgatcacatcaagccaaagaaatgcggcggcactaatgatcttagcaatcttaattgctcctgcggaccatgcaatacagctaaaggtgacagggatttagaagactatcgattgcaggtaatgattaaaaaatccgcattcattgacgtaatcacctttaagcaatggcgagacctcaacgaaagaggggtgcttattaacctgcctacccacttatttcattttgaggttgagtctttatga

SEQ ID NO: 96494 - DNA, 726 bp, Enterobacter aerogenes
atgagcagagcagcaacagactgggcgtggggccttgaaattaaggcgtcgcaaaagctgctgatgctctctctggcagatcgtgctgacgaattgcactgctgctacccgagcatacagcgccttgtaaaagataccggaatggacaggaagaccattgggaagtggatcaatcagatgattgaagatggatttatcagtgataccggagagcgcaaaggcaagacaaaacaggttcgtgttctgcgtctcaacattgatgttaaagaagcccaaaaacggaacagtaccaaatttggtaacaataccaaaaacggacatgaaacaagcccaattttggacaataaacgatcccaaaattgggatgcagaatcagtcattgaacccaacatagaaccaactctctctgcgcgaaggcagtttatcagcgaagcggcaaaacgacggatcggcatttcacccaacggggaaatacctttccctcctgccttcaagccatcggcagatcacattgcgattgcctcggagaaagggatcaacattgaaaccgagttgctgaactttcgtgattatcaccaggcccgcggcacaaagctgatcgactggaactcggcattccgggtgtggctcaggaacgcgagagttaatccgctttccgggcgccagagaagcgaacctgattccccacactggaacagccctgaaggctggaaggacttcatatga

SEQ ID NO: 96495 - DNA, 777 bp, Enterobacter aerogenes
atgaccgctcagcttatgaccgcgatcagcaatcgcgatggtgatgcgctggccagaatggccgcaggtagcacggagccgcagaggcttctcgatttcgaagctgaaaggctggttgactccctgttccgtcagctgaagcagatcttcccggcgtcaacgcagaccaatctgcgcaccgatgccgaagagaagacagcgaagcgccagtggattgcagcttttgccgaaaacgggatccgcacccgcgagcagttatccgccggtgtgcgccatgcgagagccagtgaatcgccgttctggccatcgcctggccagttcatcaagtggtgcaaggacagcggcactgtgctcggcgtgactcttgttgacgtgatgaacgagttccaccgctacagccgtgaaaaagggctgcataccggcggtgctgagcgcttcccatggtctcaccctgttatgtactgggttgttaccgatacccggcgagcaatgtaccagcgccagctcagcgaggcagaaaccgagaaatatgccgctaaaaagctggaagactgggcgctgaaagtcgccgccggagaacaaataccgtcgccggtactggctctggagaacaaccaggaagccattccgacaaaccatgtcagccggcagcaggggtttcaccctgaaggcaaaagcttcggatgcatgccaaatgcggcatcgctcggtgcgttaactccggctcagtggctgcgggatgaatacctgctcgggaaagagagaggacttatctga

SEQ ID NO: 96496 - DNA, 546 bp, Enterobacter aerogenes
atgaacatcgaaatagtaaacgagctcatcgcctccctggagagcgcaggcgagctgtcgatcaaagagacaaaggttatggcgctggcgaaagcgtaccagcagctggcggcggagaatgtggcgctgaaggctggcgtaacttacttcgcttactcgcctgaatacggttttgattatttcaaagacaagcagagcgctatcgatacagcacaggctgagattgacgcataccgtgaggacgcagacgacggctggagcgaagatgttcagcgcgtgtcatggggtatcgtgattcaacaggctcaaggcttcgatgctcaagggctgcatacctccgatagccagcacacctatcaaacatgcaattaccggttggttgactcggtagaaacccccgccaccgatcgcatcgtagccgaagccgaggcgcgcggagttgagaaggcaatcgcccacctggagaagaagttcagcaatatcggcgtgcagatcatgaatttgcagtggctggcagactcgctgcgcaagggagcatcagaatga

SEQ ID NO: 96497 - DNA, 207 bp, Enterobacter aerogenes
atgacaaaccgtatccctaacttcggctggaaccgcctgaaactggcaaagctcacttatgagcaactcgctcaactggaagagcaagtgaaggccgagcatacctgtaaaaacggcattcacctcttcgacaaagccggtcagcgcaaactcgatgcccttagctgggccgtatacaacaagcagaaggcggagcgtgcagcatga

SEQ ID NO: 96498 - DNA, 396 bp, Enterobacter aerogenes
atgagcaagacgctggatattcgagccggtgatcggttcgaaacagtttacccattcattttcgtatgcactgaccatcagcaatgggacggaaatgtattcaccgatgaagggtggattggtggttgccgaaagacatttgagccagctgattgcggttatggagaccaggccgtttacacagctgatgcagaagggaaaagaatccttgaggttctgtctgtcgctgagatgcctggaaagtggcagcgccggattatctacgcctgccacctcattgaccctgaggggaaagagagaaaaggcaggaaggcctatacggtaaccgaggacagattcatcaaaatgtcgtcagggtattttgcggattatggagtggagaacagcgatgactga

SEQ ID NO: 96499 - DNA, 384 bp, Enterobacter aerogenes
atgactgatatcaccgaactggcgcagcggaacgaactgctgattgcaaacgggcagcagacagcagacctgctacgccacctggcagataacgaaattgattctgactattttgccgttgtgtcggagtgtgaaagctacgggaaagaaactgacgctgagttatcgatcacggagtttgccctccgtgccgctggctacgttgacgcgctggtagaggcgctggagaaggcgcagcagcggattactcagctggagtcccgcaccgtgaagttgccggagccgttcaagttggctaaatcatcgagcggattaacttactactacgccgacgaggtcgatgctgcacttaccgccgctggcatcaaggtggaggctgagtga

SEQ ID NO: 96500 - DNA, 276 bp, Enterobacter aerogenes
atggaaactgtgaaatttgctgtgcaattactcaaaagcgatgactgcgtaactttgatgggacgtggcgaggtcagtaaggaggagcttatcgaagaggctatccgccagggtgagatagacgtcgatgaccgcgaacgctttgaaaaggctgaattctgcgccaataagtggatgaaggccgttccgcgtgaggggtattcaacctactactacgagtcacgtgaaggcgttcgcggggcattcaaagcaacctgtttgcaatatgtgtggtga

SEQ ID NO: 96501 - DNA, 189 bp, Enterobacter aerogenes
atggcgtacatcttcctgattttcgtcatcagcagcaatacatcgaatatgcaggtggttcccatgcagagtatggagcagtgcaaagcagccattaaggcgatgaaagttgcagatgataagaggtcctggaacgacgtttcgccaagcgtagataatattcaatgcgtagaggtgaaaggtgcctaa

SEQ ID NO: 96502 - DNA, 456 bp, Enterobacter aerogenes
gtgaacattcctcaatgcggcatcaaactgcacagcggcaacttcagcgctataggcaagattcttcaggagcagctctctgacgggaaatgcctgcgcctgcaggtcaaagagtggcgcgaaaaacgcagcctgagccagaacgcactcagtcacatgtggtacgcggaaatcagcgaatacctgattaactcaggacgtaccgacgcaactcctgagtgggttaagcgcaacctcaaaaagacctatctcggctgcgaagaggtgacctacaccgacttcatcaccggtgagaaaaccaaaacctgggagccccggcatacctccgatcttgataccggcgaaatgcacatctttctgaccaaagtagaggcctggtgcgctcagtttggtctggctctcaccattccacacggttgcgaatatcagcaactgcagcaaaagcaggaggcctga

SEQ ID NO: 96503 - DNA, 171 bp, Enterobacter aerogenes
atgagcagccttctcgccaaagtaatggagcgcggcatcttccgcgtgccggcgcgccgcaagcgcaaggtcgaagttaagccttccgacatcccgaccctgaaagactacaccgctcgcctggtcgataagaagtggctccgcctgagagcaaggaggccgcatgcttaa

SEQ ID NO: 96504 - DNA, 141 bp, Enterobacter aerogenes
atgaatcgtgacgttatcgaacgtatccgcgaccgttggcaaaagctccgcctctgccggcaccgcggcaccgtactggttgactaccgcatactgagaaatttcgttcgcatctatcagaccctgggagagacagcatga

SEQ ID NO: 96505 - DNA, 270 bp, Enterobacter aerogenes
atgacaaaaatgagcaccatttacagcagactttcatacggcaccgggaccgcactgacgggctgcggtgtctcagcaaaggcgtatgccggggcagttaaggcagaggtatggattttggccgacaaaatagcggggatgaccctgagtgactgggcaattattgtcggtatcgcctgcaccattaccacctgtggggtgaactggtactacaggcggaaagaacgcgaggatcggctcaatggctatgacaccaaaactgaggaatag

SEQ ID NO: 96506 - DNA, 504 bp, Enterobacter aerogenes
atggctatgacaccaaaactgaggaatagcgttatcgctgccatcggcggtggcgccatagccattgcttctgcgctcatcaccggcccaactggtaacgatggtcttgaaggtgtgcgttatgacccctatcaggatgtggtaggcgtatggactgtctgttatggccacactggcaaagatatcatgctcggcaagaagtacaccgaggctgaatgccgtgcgctgctcagcaaagacctgaacaccgtcgcccgccagattaacccttacatccagaagcagatccccgagacaatgcgcggggcgctttactcattcgcgtataacgtcggcgctggcaacttccaaacctccacgctactgcgcaaaatcaaccagggcgaccagaaaggtgcatgtgatcagctgcgccgctggacttacgccaagggcaagcagtggaaaggcctggtaactcgtcgcgagattgagcgtgaagtttgtttgtgggggcagaaatga

SEQ ID NO: 96507 - DNA, 468 bp, Enterobacter aerogenes
atgagccggttaaccgccattatgagcgccattgtgatctgcctgatagtcagtctcggatggttggctagccactaccacgataacgcgaccgaattcaaaaggcagcgggacaaagcaaccgagcaactcagcctggcgaaagacaccatcgctgacatgcagacccgccagcgagacgtcgcggcgctcgatgccaaatacacgaaggaattagccgatgaaaaagctaaaaatgatgctctgcagcgcaagcttgataatggtggtcgggtgctcgtcaaaggcaagtgtccagtgtcagccgcaacccaaaccgccggcgccgccagcatgggcgatgatgccaccgtcgaactctctgcagttgctggacgaaacgttctcggtatccggtccggaatcatcagcgaccaaacagccctgagagcactgcaggaatacatcaccacgcagtgcctgaagtaa

SEQ ID NO: 96508 - DNA, 636 bp, Enterobacter aerogenes
atgactgaaaatgacaatcgcagaccataccctcccgtaaacttcactggcgaaaactggctgccatatacccggctgatccctgcagccgaaatcggcgaatggataagtcagaacatcctctccgaagacggcctaatccataaccctgaccatacgcatttgatcgatgctgatgttgcgtttatgtgggcctctggctccttcgccaaaagtggccgcattgtgcttggtcagtgtgagcaggtaatgatgcgtgccggcggctggcagaagtcccgcatggagcagcagatgcatgaatggttcggtcgcataccgaagttcatcatcaccctggctgccgactattgcgagcaatgtaacgatctggagttctgcgcactggtggagcatgagctttaccacatcgcccaggctaccgatgactatggcgcgcctaagttcaacaaagagaccggaatgccggtgctcaaacttcgcggccatgacgtcgaggagttcgttggagtggtccggcgttacggcgcaagcaaagacgtgcaggaaatggtggatgcggcgaacaggccggcggaggttgctcatatcgatgttgccagagcatgcgggacgtgcatgctgaaactggcttaa

SEQ ID NO: 96509 - DNA, 255 bp, Enterobacter aerogenes
atgaataaccgaatcgttgagtgcgcctccagagcggggcgcgacttctcagagttcatgactggcgagaagaacatgatggaggcgctgcgttctgctgaagagttcaccgagcagttacgcattcacggctgtgttaatcaccacttcgtcaatttcatgatgatgaaggcgatcatgaaggtatttgacgacttgcgccaagaggagttgcgggaagaacgacgacgcaaacgtgaagagaagaagaaatga

SEQ ID NO: 96510 - DNA, 1917 bp, Enterobacter aerogenes
atggcagcaacggtaattgacgccctcctggtgacgctgggccttgatacttctcagttccgcaaaggccagcaggaagtcagtgacgacctgaaaaagcagcgcgaagacgccaaaaacaccgccaaggaaatggcggagcagggcaagaaagccgcttcgttcttcagcagcataaagacggaattgctggcactgactggcgttactgtcactgccggcggcctgatgagtcttgttaaaaataccacgtccagcctgatggacctttccattcagtcaaaggctcttggcatgacagccagagaacttgatggtttcggaaaagctgccgagtcagccggaagctcttttgagaggattacggccgccttgcagggttttcaggctgcaaagcaaggctctctatttggggataccagtagcccaatttttagcggcatgcggatgcttacggcgttaactggtgatacttttgacgtctattcaaaggatgctaagtcacttgcaaggtcttacctagagtcactcaggaaagtcaaagacccaaacattaggcgccagattggtgctatgggcgggttcgatgatgcgaccattcagcgaaaccaggagggaagatttcttccggacgttgatcgcttaaccaaaagctcaggcattacagatgcctcaaccaaaggcgcaaaggaatttacagccgcatgggcggagcttggccaaaaccttgatacgataaaaaaccaaatttatgaaggtctgataccaaccattcgagatctaaatggtctgctaaaagaatggtcatcggggaatgttaaatcttcgtctttcttcaaggagctgaagcgggacattaatgacattactggaattgaccttggtagttggacgctctcaagcgacctgcgcaacctcaaagataacttttccatgcttggaagggtattgaatcatctgggtaacgctttaaacgagctcaataacggcaacttctccaaagctgccgatgagtttaaaaaggcgtggtacggcaccgaagacggtaagcctactgggaatgatgcgctacctggggtcacgagtaattcccaaagtatttacgaaaacggcacgtataaaaaatataatgacctcttgaataagtatcttcctgagtggctggggggaaccccttcagacagaaagaaggatcaggatgagaagtcttactgggataccacaaaggctctgctttctaaaatagcagatgccattgtcacccctgccggagcttcctctgtaaatccaagtatcggcggctaccagccaaacgttccgcttaacgcgcaagccgctcgtcttggcgctaaaggaaaggcttttcttcaggccatggctggcgagttcggtgtactggagggcaaatatgggcttccggccgggctgctgtcttcggtggcagccactgaatcaggtggcgatccgtttgcggagtcgaaggccggagccaaaggcttgttccagttcatgcctggcaccgcaaaggatatggggctgaaaggtcgtgatgttttcgacccccacaaatctgcagatgccgctggaagatacctgcgctatctgctggatgctactggtggcgatctggaaaaaactcttgcctcctataactgggggctcggaaacgtccagaagaaaggcatggataacctgccgtcggaaactcgcaattacgtacctaaagtcatggcgggaatgcgtcccggcgctggcatggccgtagaccgcgcgatgcccgggcaggctggcggtgtttataacttttatggcaccaaaatcactactcaggctcagaacgtgcaacagcttaccagcgacatcaaaaagcacggtgacaaccgcgtcatgctaatggctggctactcaggacaataa

SEQ ID NO: 96511 - DNA, 855 bp, Enterobacter aerogenes
atgagctataaggaaagagagttaacggttgagtttactctggccaatggcacctttgacggtaaaaaaggtaacacgctcatagcagaagggttcaagtgcgagctttctgtttcggcgtatggtggagccaccgggacgatgatggagcttagcctatgggggttatcccttgataatatggctaaattgaccaccaactccgaaaagttcttcggtgagcaacaaaatgctatacgggtgtttactggagatgtttgcgtgtttatgggcacgataatatctgctagggtgaacctgaatcagatgcctgatgccccgattgaaatcacggcctcagctattgggaaggagaagcttgtagtatgtgagccaacatcaattgaaggtgaagcgtctgtcgccgatatgataaacgcactggcctctaaggtggatttgaagttcgtaaatgttgatgttaaatcagtgcacagcaacccttattatgagggaaatgccattgagcaaattcagaaaattgcagccgaccataatatcatcgcagatatagactttgggacggttacaatctacaccggggaaagccctgttgactctgtagttccatttatatctccagagcatggactaattggctaccctattttttatgatattggtataaatttccgctgcatttattcaccatcaataaagctggcacgaaaaataaaactggaaacctctctccctcacgcaagtggagattggatagtccagtatggaaccactcattatttgtcatgcaaggtccccggcggcctatgggaaacattcgttgtagcttatccaggatttgtatttggagtatga

SEQ ID NO: 96512 - DNA, 705 bp, Enterobacter aerogenes
atgaaatcattgtattttttactgtccacacttcttgcaagtaccactctccatacttacgcaagtgagcgtaacaatgatgaagagcgaatacatccatacaaaatatcttgcgactcatatagtccagaagataaaggcgcttgtgaaatgtttaatgccatggaaatttctggaaagaaatcaatcattaactcagcaaagatagctggttttaacaggccgttcatgcagctgtatgatttcttctacaaagaaatggataaatgcagaggagaccttgactgtttacagaaggtttctgctaatagatatgtggcaatattaaatatgcaaaactccaagaaagtggaaggcatgacggaaagaaattataaagaatattgtgagtatgctgggaagtatagggctaatgcagcaaaggctaagttttcaccagacagtgctgtatatttctctcgggctaactatttcggaaaacagctaggtgaagactctgagcacgtgtttgatatgatagaggctgcgtcagaatataatgaagtaagacgcgcttactctagttatggagaaagcggtattgatagcttttttagcaatcaaagtgacgaatgcaagaaaaatcctagcaactcgcttgggatttttttgccaacccttatctataacaatgctatagattttgatgggcttattctccagtaa

SEQ ID NO: 96513 - DNA, 252 bp, Enterobacter aerogenes
atgtcgcgagaagatccacaattcaatttcaggatgacccctgagataaaggagaaggttaagcaaagagcgaagcttaacggccggtctataaatgccgaactcctgcaaatcgtacaggatgcactggataaaccatcgccagtgactggctatcgcgacgacgccgagcgccttgcagaccagcaggcagagcagtttaaaaagattgtgtttgatacgcttaaagacatctacagcaaggagtcatag

SEQ ID NO: 96514 - DNA, 975 bp, Enterobacter aerogenes
atgacaagtatagcaattcttgaagcagttaacacctcttacgtgccgttcaatgggcagcaaatcatcactgctatggcggcaggtatggcttatgtggcaatgaagcctgtcgttgaaaacctcggcatgagttggtcaactcagcaaacaaaactgatgaaacaactggaaaaattcaactgtgttcatatgaacatggttgctgccgacggcaagttgcgcaagcttttgtgtctcccactgaaaaaactcaatggatggctgttcagtatcaacccagaaaaagtgcgtgctgatatccgtgacaaactgatcaagtaccaagaggaatgctttaccgttctgcatgactactggacgaagggggtggctgtaaaaaccgcacctgaaaccacggttgatgatcgcacgccattgcgcggaatcgtgaatcgcattatgggtaagtacggtatgacgtaccaggcagtgtacaaactggtgcataaagagtttggtgtgaagcatatcgacgagctttcaccaaggcagacagcggaggctgtggaatatcttgccaccaaggtaatcgagggtgagttcctgggtaagcagcaatcagtagcaggcccacgatatcacttcccggtggaaacggcagacccgcacaatcgcaccttcgccaatgactggatttcagctcaggtaattttggatgagaggaatcgcgcccctgagcttgaactgctggatgctctccagaaggacggttgcgacgtacagggtgcaagaatacgaattcatgcgatgtacgacatagcgaagcaattcattcatatgcagtctgaactctcagaaatgaaaaaatacctcagggtcattaacgatattgttaaaggacagacagttgagcgcggaatgaatgtctgcttcacgggcaattcaaagggccacgctattggcgggtatgcaaagcgctgcttgccaagataa

SEQ ID NO: 96515 - DNA, 2448 bp, Enterobacter aerogenes
atggcgactaccgacacacagcaaacggcacagttcgcggcagaggcatccgtgagtgccgcagaggcaaaacagtacctgatcgaggtccagcagggctatcaggatattagcgccaccactcaggaagcgattaatgcggcgacagcggcagaagcagcgaagactgcggcggaaacatctgagcaaaattcctcagcttctgcagttgcctcatccgaatcggcaacggcagctgcaggttctgctgcacaggctgaagagtatgcaaataacgcttctgactacgcacagaataagttcacgttctataaaacctcaagtgacccggatggaactatagcgggactggcggctacaaccaatgggcagtcgtttcgcgtagctcagggtgtggatggtatggatgctttcattacctaccagaacgacaatggcgtagcggtagcgcaggctgcgcagcctggaaccgcagcagtaacggggactattcgcgaatttcctacactggaagcagcacaggcagacgcagatgctggcaatatcccggttgggtcaactgcttattaccgcagccctgatgatactgcgcttgctattgaggttatcaacaatagtggaactctgtcagcgacgggtagggttatgccatctcagggttatgttgatgtcaccatcagtgagtccattgataaaaatgatgacagtaacttatcaaaatccattacctcagacggaatcacaactgagctggagactgagtccggagaaaaattcttctccggaatgaatgaaagtcttcaggaaatggcatcgcgaagctggaaagacaacacctctaatcttcattcagctacagatagagacggggtacagctcgttattaccgatgcagaaggtaaaatccgtatccctcttactaattttccgttgcaggatctgctggctcaggttcagcctgtcccggggccgtttctcaacacgctgagctccgctgacaaggcggcatatggctatattgatgagctgggcggtcttaatctcccgggtcttccgacatctgttaacaatatgctgaatggcctgtcccgccgcgtacagcagcaggcagatggccggtttctcacaagtatcaaggactatggctgggacccaaacagccaggaagatgcacgacaggtgattcagcgcgcaatccgggatatggcccgcaatccgtatggtggtgtgatttacttgccgccaggagtataccggctgagttccttcctcacgcccgcgcccaacgtgtcaattattggggcaggtaccggcaaaacaatcctgatgccgtatggctcatattcggcgctccagttcaccacgtcaccgacaaatcccgtcccggaactgacggattttgtgtattccgattttgaggtggattgtcaggaccaggtgttgccggatgagggttatctccccaggactaaggggctgtattttaacttctaccgccgcggccacctgcaccgcctgcgcgtgcgaaactctggcgctacggggatcggcatcgactttgctcgcgattccgcgattactgaatgcgtggtggagaatttcggtcggctggcaccgtcgggtaacgataaccctgccggtgcatccggtctcgggttaggcgccgggggaacacagagtgagccgctgtatgttgctggtaacttctgccgtaacggtaagaacttcggcatctttcttgagaaacagcatggtaccaacgcaccgtacagctctgaacacacaatcattatggggaatacctgcacaggtaataacggcgggatgggggattgcggtgtggatggcatgattatgatcggaaataacttctccgaaaataattatggtgtcgttatcagtccaggaaccgtactggcataccccggttcgcgcggtcgcctgcagggaaatattatcgctaaaaatgctaaacatggcgtctattacaacagcaccaccgagcagcgtgacggcgaataccagattgatggcaatacaattcgtgataacggagaagacgggatcaactttaaagctccagggcaagaagtccgcagcatgtttatccaggggaatgacgtttaccgtaacggtcgccatggtttccatctggaagacggcacagctatcaatatggacgtagttaataaccgcttctggaataacggccttactgctgcaggaaacggaattaacctggcatcagaggtaaaactcagctcgttcagtggcaataaaattcgagacatccaggctacacccactcagcaatatccggttaatgccactggcgcactgaccgacgttgatatttcgtttaaccactgcgttggcaatgcacagaacacgcttaatctgaccggcgcacaaacccgcgtcaccactctgaacaatccaggaatctga

SEQ ID NO: 96516 - DNA, 1401 bp, Enterobacter aerogenes
atggcgactcaaattaaaagcaataaaacttatcagggcgatgctgccgcacttccttccccgcaggccccgatgccaaagcttgcatcgttatacctggattttgagaaggagctgtatattgccctcggcagaacaacgggtaatgcaattcgctcccgccgtctggctgacgtggtaacctttactcgcgcatcagaaaccacccgagtgaacaaaagcggcctgatagagtatctggcgtccggtgaagctgcgatcgaatatgacccgattactggtgagtgtctggggctgcgcgttgctgcgggaacaaccaatcaggtggcaaacagcgaaaacttttccgggtctacctggacaaaaacgaacgtttctaccgtggcggcgaaaaccacggcaccagacggaaacccgacagcatcgccattcaatgagacgacggatagcagtgacctcattcactcaatgctcgaaaatgccacgccagcggcaacgacaggctccccggtaacgtttagtatttatgcgaaggccaatactgccagcattattcagctcgtggcccagggcgctgttgcaacccctcagtatgcaaactttgacctggtaaatggtgttcgtacacgcagctctacaggtatcctgcagaccagcgtcaggaaatttaaaaatggctggtatcgcatcagcataacgataactcctactgtagctgcttctccacagtttactctggcgttgatcaatgatgtgacatcagcagctgccttgccggcatataccggcacggggaaaggtatttacatttggggggcgcagattgaaaactgggatggagtgacaccatacattccaacgtcaggagtcgcagtgacgcgcccggacgaagtttgcactgttcgccaggacctggattttatggctacagatcgcggcgctatttttgctgattacaacatgcccgccagcctgcaggcgatgagcggggtttataatgccgggcaagccattgtctgccttgacaatgattctgtggctgagtatgtgaactttatgaaccgtcgcatcagtaacagcatcaccaatcagaacctgactgcagcagctaaaattgtcggtagttcagagataaccgtggaagttaaacgtttagggcaagtgagaaacggccatcaggccttcatcagttcgtttatcaacgacgatatgcgtgtatttgatggcatcaacaaatacagcggtgcgccgcttgtatcaactcagctgaaccggcttatgattggccgagcaagaacgacacctgccgcggtttccaatgcttatctcaagcgccttgtttattaccctgtgacgttagtcgatacagaattagtgtctcagtttaatgcgttgtcgtag

SEQ ID NO: 96517 - DNA, 318 bp, Enterobacter aerogenes
atggggttcccgtcaccggctgcggattacattgaaagtacgttaacagtgaattcactgtgcaacattacagcaaactcgcgagttatctcaaccaaccgtgggtatgttgtgctggacttgtctctaaaggttaagcaggggagtattctgcttatacgttctgctggcgaacttcagtttgcaaagctaatgggccgttcatttatcacagttgagggagaatcgattgaaggtgatgccatggatgaggttgaagtgctcggagttgcaacgcacgtgatcaacgatatgcggcaggatgatagtcctgtttga

SEQ ID NO: 96518 - DNA, 669 bp, Enterobacter aerogenes
atggctaatttggcctccctgctgcgtttgccggggaatgttaaagatacgcaatggcaggttctggccggcccgatcctgatcctgctgattttgtcgatgatggtgctgccgctgccggcgtttatcctcgacctgctttttactttcaatatcgcgttgtcgatcatggtgctgctggtggcgatgtttacccagcgcacgctggacttcgccgcgtttccgaccattctgctgttctcgacgctgctgcgcctgtcgctcaacgtcgcctcgacgcgcatcattttgatggaagggcacaccggggccgccgccgcggggcgggtcgtggaggccttcggtcacttcctggtcggcggtaatttcgccatcggtatcgtggtgtttattatcctcgtgctgatcaacttcatggttatcaccaaaggcgccgggcgtatcgccgaagtgggggcgcgtttcgtgctcgacggcatgccgggtaagcaaatggcgatcgatgccgacatgaacgccgggcttatcggcgaagaggaggcgaaaaaacgccgcgcggaagtcacgcaggaagccgacttctacggttcgatggacggcgccagcaagtttgttcgcggtgatgccatcgccgggctaatgattatggtgattaacgtggtcggctga

SEQ ID NO: 96519 - DNA, 1050 bp, Enterobacter aerogenes
atgagtaaaatcagagtgttatgtgttgatgattcggccctgatgcgccagttgatgaccgagatcgtcaatggccacgccgatatggagatggtggcggtggccccggacccgctggtcgcacgggatctgatcaaaaaatttaacccacaggtgctgacgctggacgtcgaaatgccgcgcatggacggcctcgatttcctcgaaaagctgatgcgcctgcggccgatgccggtggtgatggtttcatcgctgaccggtaaaggttcggaaattaccctgcgcgcgctggagctgggggcggtggatttcgtcaccaaaccgcagctagggatccgcgaaggcatgctggcctacagcgaactgataggcgaaaagatccgtaccgccgcacgggcgcggctgccgcagcgggccaatgaccagccgccggccattttaagccacggaccgctgctgagcagcgagaagctgatcgccattggcgcttccaccggcggcaccgaagcgattcgtcaggtgctacaaccgttgccggccaccagtccggctctgcttatcacccagcatatgccgccgggatttacccgctcgtttgccgaacggttgaataagctgtgccagatcacggtgaaagaggcggaagagggcgaacgcgtgctccctggacacgcctatattgcgcctggggatcgccatctggagctggcgcgtagtggcgctaactatcaggtcaagttgcacgacggcccggcggtaaatcgccatcgtccctcggtggatgtgctgtttcgttcggtggcccgccacgccgggcgcaatgcggtgggggtgatcctcaccggcatgggcaacgacggcgcgcaggggatgctggagatgcatcgcgccggggcctataccctggcgcagagtgaggcgagctgcgtggtgttcggcatgccgcgcgaggccatcgccagcggtggggtcaacgaagtggttgaactggagcgcatgagccaacgcatgctggcgcagatcgccggcggccaggcgctgcgaatttaa

SEQ ID NO: 96520 - DNA, 165 bp, Enterobacter aerogenes
atgaagcgtccggtgatgcttacggcaaagagggatcgtaaaaatatcgtgtgccttggtaccaacgccgccctgcccccatccgataaggtgatgcgcatcgtcggcagactgaccgcagcacatacatggctgagtttttacccaagaaataaaaccatctga

SEQ ID NO: 96521 - DNA, 1359 bp, Enterobacter aerogenes; identical to SEQ ID NO: 92486

SEQ ID NO: 96522 - DNA, 1179 bp, Enterobacter aerogenes
atggctatcagcgacacaaaactgcgtaccattcatggtaaaccatattcgggcccacaagaagtgtctgatgctgatggcctcagcgtgcgcatttctccaaagggggtcatccagttccagtaccgttatcgctggcatggtaaacctcatcgtcttggcattggtcgctacccgtcggtatcgctaaaggatgccaggcagatcacgtctgatttacgaaacctttatttctccggcacagatccgcgatcctactttgaggaaaagacgcaaaactccctgacgatagctcagtgcctcgactactggttcgacaattacgtctcaacaacactcagagaaaagacccaggcactttaccgatcaacggttatgaagcggatgcatgacgcgttcccgaatcttccggcatcctccatcaccgtaaagcagtgggttgatctacttaccgaagaggaaagagataacccacgccgcgcgcgccaggtactcagccagcttagatcggcgataagctggtgtatgcggcgtcaggtgatagataactgcgcaattatgagcatccagccaagagactttgggtcccgtgcagctgttggcgatcgcgttctgtcgtataacgagctggctcagatttggatggctattgaaagaagccgtgcgtctacttcaaacaagcttcttcaccagatgctgatgctttggggggcgaggctatcagaactgaggctggcaactaagaccgaatttgacctgctggacaacgtctggaccgttccgaaagagcacagcaaaatgggaaacgttatccggaggcccatctttgaacaaattaagcctttcctcgaaaaggccatgataacttacaatgatgtgcttttccccggggaggatataaacgaaccgatcagcattgcggccgccaaccggttcgtaaatcgaataaggggagggatggaccttggatactggcgaacccacgacttcaggaggacgctggttacaaggctgtctgaaatggatgtcgagccccatgttactgagaggatgctcgggcatgaacttggcggggtaatggctgtgtacaacaaacacgactggattgaggctcagcgcaaagcgtatgaacttcacgctgataagctgttctggcacatcaggaacatttctggttaa

SEQ ID NO: 96523 - DNA, 192 bp, Enterobacter aerogenes
atgagcgacaccagcctgattcccgaaaaagaagtgatgaacaagcttggggtttcatcacgccagacaatctggaactacaccaaccggcacgggtttcccaagccagtcaggacccacccaaaagcgtacctgcgggaagctgttgatggatggatcctcaatggcggcgttaaccagaaatgttcctga

SEQ ID NO: 96524 - DNA, 342 bp, Enterobacter aerogenes
atgattggaattctcaaaccggtaccagaatcacaatggcctgtacggtgtcacgatccgaagcggagcagcgtctgggctaactcttattttctggtccaggagttccaggaagagaacggcgttatccgtctgtcagtgaacaccaccagtattgccagttccggccggtggaaggatggcatcagctgggatgtgctgcaggaaataaagtcagctgtcggttacggggatcgtgatgccgttgagatatatccgcgggattcagacatcgttaacgtggcgaacatgcgccatttgtggattacacctgagccaatctcttttgcctggcgtaaatga

SEQ ID NO: 96525 - DNA, 192 bp, Enterobacter aerogenes
atgaagagagcctcacccgttgatttgaggaaaagtctcgaaatagccaaccatctggcgcacatcgggattcgctttgtgccgatcccggtagcgacagatgaagagttccaagcgctggccgccgagctatcacgaaagcttgagcagatggcggtcgaaacggaagaaagtgaagtaggtgcagcatga

SEQ ID NO: 96526 - DNA, 867 bp, Enterobacter aerogenes
atgacaacaaaaaaatggggccataacgagcttgctcatgaccttgcagagcatttgcgccagaacacagcgcgcatctgctgggaggacatgcagctagggcccgccggaacgtgccgacctgatgtctactcgattgctcacagctacagcaagttctgccctgtcgtctatgaggtcaaagtcagcgtaagtgatttccgggctgacgttacagcaggcaaatacaccaaatacttcaactacgcaggcggcgttgtttttgcagttcctgaaggcatgctcaagaaaagcgacatcccagatggttgtggcttgatgatccggaagggaactggatggcataccctcaaggggccgacaatgcgccagattgacacccttcctcgcgatgcctggatgaagctgcttatggatggcatgacccggcaggcagaaagaactcaaataaaaagccgcgtaatcaatacctacctcagcgaccaaaaactaatgaagcgacatggcaacgaaatcgccgatcttgtttgtcgagcacatcggtctaaggagcgccttgagcagcatattagggataacgatgaaaggctgaagaacctgcgccaggaaagtgaagaggagttgcaacgcctacgtaagcgccgggaggaatcggaggaaaggttaacagacgctcagcaagatctggcgaaagcgcttggcctcgacccgaatgtccctatgtatgttcttacaaggacgctatgggaagcaacgcgccgactcaccgaggatgaagagataaagaggttgcgaggaatattgtccaaccttgagcgcacgttgaatgacggtctgaaaccattacccggggagaaagccgcatga

SEQ ID NO: 96527 - DNA, 681 bp, Enterobacter aerogenes
atgacaccagaaaccatcctggcgcgtaccggcattgacgtgaccaccatagaacagggcgatgaggcgtggcataagctgcgcctcggcgtcatcactgcctccgaagtgcataacgtcatcgccaagccaagatctgggaagaagtggacagacatgaaaatgtcctacttccacaccctactcgccgaggtatgcaccggcgtcgcgccagagataaacgccaaggcgctggcctggggtaagcagtacgaggaagacgcccgcactctttttgagttcaccactgacgtgaaagtcacggagtctccgatcctgttccgcgacgaaggcatgcgtaccgcctgctcacctgacggcctgtgtagtgatggccgcggccttgagctgaagtgccctttcacctctcgcgacttcatgaaattccggcttggcggctttgaggctatcaaatccgcctatatggcccaggtgcaattcagcatgtgggtaaccggcaaggaggcctggtatttcgcgaattatgaccctcgcatgaagcgagaaggcattcatcacgtggttgttgagcgcgacgacaaatacatgtccgacttcaacgaaatggtaccggagttcatcagcaagatggacgaatcgctggcagagatcggctttacctacggggagcagtggaaatga

SEQ ID NO: 96528 - DNA, 918 bp, Enterobacter aerogenes
atgggtttcacacttgtggacttcgtcaaacagcaagagccgctcttcgttaaggcggctactgacgaacggatggtatgggcgaaagaaagccagtttgccatccagcttttccagaacaacgattatctcgccaaagtcgccttccagaaccagacaagcacgcagaacgccattatcaacgttgctgcgatcggtatctctctcaacccggcacaaaaacttgcttacctggtaccgagaaaaggcgccgtatgcctcgacatcagttacatgggtctgatgcatatcgcgcagcagtcaggcgcaattaagtggtgccagtcggccatagttcgtagaaacgaccagttccgccgcgagggaattgataagccaccagctcacatctacaacgactttgataccgaagagcagcgtggggacatcgtaggcgcgtatgtaacggtaaaaactgacgacgatgattacctcactcatacgatgcgtatcgacgctatctacgcaatccgtgaccggtctgaagcgtggaaaaagtataaatctgacaacagcaagaagtgtccatgggtcactgacgaagagcagatgatccttaagacggtcgtgaaacaggctgcaaagtactggccgcggcgtgaacgcttagacgctgccatcgaccacgttaacaccgagggcgaagaaggtatcaactttgcagccgagcgccagcctgagcgcgatataacgccgcttagcgaagccacgcagaaagagattaacgacctgcttgtctctttggataagacatgggacgcagatcttctccctctctgctcacgcattttcaaacgccctatcactcagccagccgacctgacagaaccggaaggcgttaaggctctagggttcctcagacagaaggcagcagcatga

SEQ ID NO: 96529 - DNA, 279 bp, Enterobacter aerogenes
atgaacgcatacctcacatgcgaccgcattgaagatcgccgctgggttgaacaacagctcaccgaggataaagaaaagtggattgacgaccgggcgaaagaactgatcgccatgttcccggccaagcctctgcaaatgagcagcctttttcttccaaaggaggctcagctagcccttatcggtgataaggctgaagaagcctataacgagtacatctctgcctgcgcctatgcccgcgctgaagaggaatgggggcgactaacctcctgccccttctga

SEQ ID NO: 96530 - DNA, 510 bp, Enterobacter aerogenes
atgctttcaattcataggttaaaggagttgtttcactacgacgcagagactgggattttcaccaggctaaaaactgccggtggcatggttaccggatctattgctgggtcgttaaatcctatgggttatcttcgagtctctatcgaccgcgaaagatacttgtgtcatcggctggcatggttttattcatatggatcgtggcccagtcacgaaatagaccacataaacggcataagaaccgacaacaggttatgcaacctcagggatgtacctcacttcattaatcagcttaataagctctctccaaaaaataacacaagtggcgtcaaaggcgtttattggaataagaaagataaacgctggcatgcgcgctgctctatagacggcaaaaaacaccaccttggaaatttcaccgaccttaatgaggccagggccgttgtggttgcagcaagagagcgcatgcacggcaaacatgccgttcatgaagaaagaaaacaggagaatttatga

SEQ ID NO: 96531 - DNA, 285 bp, Enterobacter aerogenes
atggcagacgacgattatacgatgggcgagttttggcgagacatgaagccagaacttaaagagcggcgcaggatagcgcgcaactcggcacatgaagggatgaaggcattctttcagcgtaatggagttgagttcgaagagggagaaaacaccctcatatttcgcacaccgaaaggcactgttgcttattacccgccaagtaagcggatgcagcataaaaccacatggcgaacatgcagcccaacagcctgtatgaattacgtcaacaaactcagggccgcctaa

SEQ ID NO: 96532 - DNA, 588 bp, Enterobacter aerogenes
atggaagcaaataaggttacagagctgagtgatggcagtgtcttgtacgagcttggtgatcaccttatcacctgcaaactaagccacgataaagggtggcagctaggggcttttaaacgtgatgcaagcaacctcagagatgacacgctggcggttttgaagaatgaaaaattcatgtttatggttaagctcggcggacagctttctcccaagcctcaatgcatagctgttaacgggcgatttttattctctgtccataccggcaaagacaacaacatggctgcagccatagtcatggataacaccgggaaagagttattcaagatagaaacttccactcacctcatcagttcggccatatctgaatttggtcgctacatcgccctatcgtttgctggtagcaaaaacaaagacgatttttacgcgcaccggcttgaggttatagacattgataccggagaggtgttgatgtccgttatcaaaacagacttccttcgatacgctgaactttcagttgttgagccaggcggcggacttttcgcaactttcaatggtcgcacaaggcttgttggtgtgacgaacctctaa

SEQ ID NO: 96533 - DNA, 381 bp, Enterobacter aerogenes
gtgcgagatgagttcattgaaacaatcagatccatagagtattcaaccgaagaggctcgcgccgtatttggtgggcgcccagctgaccacataaaaatgattgccgtgaatggcgactcgatgtctggcacgttcgagccgcgagaccagatcttcgtcgacgtcagcatcgactgctttgacggtgacggcatatacattttcgttctggataatgatctctacattaagcgccttcaaaagcagcacaaaaaattggctgtgatttcagacaataaaaaatatgaaacctggtacatcgaagatagtgatttttcttctctccgtatctgcgcgaaagtgctggtaagccagtcaagggcatacagatttcatagctga

SEQ ID NO: 96534 - DNA, 228 bp, Enterobacter aerogenes
atgcaacctaaaaaccttggcgacatcatcaagcaaatccgtgtaccggtggtggcgaaggcttgcgggcgcactccccgcgctatctacaaatggattaacagcggttgcctgccgcgtaccgattacaccggcgaaacaggctatgcgtccaaaatcgcagctgcatctggtggccagtttaccgagaaccagatccttgaaatcagtaaaccaaaagccgcctaa

SEQ ID NO: 96535 - DNA, 543 bp, Enterobacter aerogenes
atgcattcacttgcgtatcaacacaataccggaatacacccgggagcggtgataaaccgcgctcaacctaaagcggcgccaggccacgaaaagatccgcgatgcggtccgggcatggtcatcggcgctggacaaccaggacgtggtttcggcgctgatcatcaacgaataccgggagcagggcggggccgctatcagcttcccggaagacatcagccgagcgcgccagaagctgtttcgcttcctggataaccgtttcgactccgaacagtaccgcgagaacgtgcgccagctgacgcccgcaatcatggcggtcctgccggttgagtatcgcactcgcctgataggtgccgattgcaaaatgtctcgcctggctgatgccgagaaagaactcgcagaggctaagcaggctgtcctgctggacgctccagagcatcagaagctgaaagaagtaagcgagggtattgcgtcgctgttccgcctcatgccggagcaagtaggcccactgatgacgatggtgacctcgatgctcggagttatgtaa

SEQ ID NO: 96536 - DNA, 258 bp, Enterobacter aerogenes
atgaaccacatcgaatttatcgagaagcatgttcgcgatgaactgattaagcagggattcacagtgacagtggctcaggggggggcatttcaggccgtcgatatgtacaagcgcatgtcgcaagccagtcgcaaagggaggatttttgatgacgtattacggcacgcgaaactctgggcagagaagcagcagcttccttcagacaaatttgagaagaaacgcgttaaacgtgggcagcaacaaccaagcctgctctga

SEQ ID NO: 96537 - DNA, 897 bp, Enterobacter aerogenes
gtgggtaacgtatccaatttagccgaagccagagaggccagaaggctccatcaaccgcgtacacaaggcggtaaggggtttgccttgctgcaccgtaaaattatggatgtgccgttctataaggatgcagaggcggcgcatttgtgggttcaccttctcctgcgagctaaccacgaacagacactggtatcgactgatgtcggagatgtgatctgtgaacgtggcgagttcataacagggcgaaacacactagcgatggaaacggggttgactgctgatcgtgttaaatcactgctccgtaaattccagaacttggggatgatcaccaccaaatcgaacaaccgttttactgttctaaaagtggtcaaatatgacgaatatcagtcaaatttttgtccagcagatgtccagccagtgtccagcccaaatgcagttatatcaatgcatgcggacgggttgtgtccagcagatgtccagccggtgtccacagataacaatatattaaataactctcttactaacgtaagagagagtgcatcagcagcagaaaaacaatcacagaaaaaaccggttctcagttgtgagcagattgtcgatgtttatcaccaaatacttcctgaagcacagagcatccggatacttactgacaagcgccgtaatctgatccgcaccttctggcagaaggccggtaaagtcacccagcaactggatggtcataagttcaccctgagcgactgggaatcctatctcagctacatcgccagtaactgccgctggatgctggagaatcgacctgatcagcgcactgggaagacgtggcgccgcaagtcactcgaatacttcctgaacgttgatgtttacgctaaaacacgcgagggggcctgcgatgacctctga

SEQ ID NO: 96538 - DNA, 666 bp, Enterobacter aerogenes
atgaataacgaaatcgaacagattgcacagcagaacgatatgagtatcgagtttgttcgctggttcttcaacgaaaagaaagcagcttgtggtgagcattggtttctggcgttaggtgctatgtgggaaggctggaaagcgcgtgaaggagaagcgaccgcactggcgctgactcttgagaagagtagagaagcatctggctgcccggctggagtagacctgcaggactgggtgaagcagatggcggcggagaatgttcggctggctgcagaaaacaagatggccgttgacgccgtaacggttttctcaaacgttacgcacgacgttaccgaaatcatctgtgatgagcttgggcatgaccgtgttgccgaaattgtcgcggcctataacgacctcggcaacatgcccgccaccgatcgcatcgtagacgggattaaggctgatggtcgtgcggaaggtgcgcactttgtggctaaccgtatgctggctgcctgggatgcaggttttatcgaagactcagccaaaaacgccgccgatatcgcccgtatgattctcacctcaaccgagtttatggcagatgcgccagagggtgatttcgaccgttcttttgctgatgggatcttggaagatatcgccaagcagctgcgcgagggggcagacaaatga

SEQ ID NO: 96539 - DNA, 207 bp, Enterobacter aerogenes
atgagcaaccgcatccctaacttcggctggaaccgcctgaaactggcaacgctcacctatgagcaacttgctcaacttgaagagcaggttaaggccgaacatgcctgcaaaaacggaattcacctcttcgacaaagccggccagcgcaaactagatgcccttagctgggccgtatacaacaagcagaaggcggagcgtgcagcatga

SEQ ID NO: 96540 - DNA, 399 bp, Enterobacter aerogenes
atggaaattagcactttggtaggatatttagataaaaccgctaagaaagctacgcgcggtaaatgggtggcatttactgatacagcgtctgggactttttcagtacatacgccggatgatccccgctgtgaaaatatcattaaatgggctggttttgattgtcagaaaaacgcagaagcgaacgctgaatatatcgctgctgctaaccctgaaaatattcgtcgtctggtcaaatacacaacagagctggcggctagtcacgctgagttacgtagcaccatggcggcaatccataatgctatcaaagaagaaggtggcctacgcgctgttgcggttatgaacgctgcaaaaaaagcttttgaagattcagcagcaatttctcaggagtctatccaatga

SEQ ID NO: 96541 - DNA, 783 bp, Enterobacter aerogenes
atgaccaataaccagttaaccaaagaatggctacagcagactatcgccgaactggagtctgtacgcgatgaaattccgttcgggattgacacaaatagcgaattagaactggctgctttcaagatagcgctggccgcaatggacagcgagccggtggcgtggcgatatcgcaccactgatattaacggcaatcccaatcagggctggtcattttccgaagaggcgagcttgttgggattgtatcaaccactgtacgccgccccgcatgcagcgccggtagtgccggaggaggccactccggacagcatcgagattcttgccagtgccaggcgtcatgaccacgctgtattccagtgggatgaagaccaacgaaatgcggccgctgattcttggaacgcctgccgcgccgccatgctccaggctgaacctgtaacgacggctaacaagttgccgccaaattcattcacggatgatgaacttgaggggatggctcacggcaataatccgcaatcgaacgcctatcgtgagctactggcatataggcgcaactctccggtaattccggatacatggattccggtaagcgagcggatgcctgaaaataagccggggggttacgaatatctggtattcgaaaagctcaacaatcgtgtaaatcacgactactggaacgtgccggatgcaggtgatgacacatttacaccattctggaaccattacggagagtatgtaacccactggatgcagctaccagccgccccgcaggaggtgaatcatggctga

SEQ ID NO: 96542 - DNA, 303 bp, Enterobacter aerogenes
atggctgagttacgtgtaggcgggttggcgatagtaattttttcagaaaataaacctgaaattggtagatgcgttgagttagtcgaaaaagtaacgaatggatatgtatttaattttcctggtgtgggtaagcattggtggcgtgatgaaacccctggatggttagtaaagggagatgtatcgatttatacaaacacaccttcaggtggtttctcttatttctacgatgaagagctcatgccaatcgatggagacgacttcagcaatgaagacgaacaccagaaggaacgggagcatgcctaa

SEQ ID NO: 96543 - DNA, 690 bp, Enterobacter aerogenes
atgacagctcaatacttggaatttattcgccagcagctgatagtggccaccgccgatctgagcggcgcgacgaaagggcagctggtagcctttgcagaaaacgcgcaattcaccgctacggcgcgcagccggggaaggaagaaggtatatagcgaggtgaagaagcgaatggttaaccctgacgggccgccgatgagcggcagtcagtcccgcgctaagggttcatcaatctccctcgttctgcccgttgagtattcgacggcaagctggcgccgggctctgctgtcgctggacgaccaccagaaagcgtggctgctgtggaactacagcgagaatatctgctttgagcaccaggtggtgatcacccagtgggcgtgggcggagttcagtgagcaacttggcgcaaagaaggtggccggcaagacgatggagcgcctgaagaagcttatctggctggcggcacaggacgtgaaagcagagctggcgggtaagtatgtatatcagcaccaggaccttgcagccctgtgtggcgttaagcctgataactggtgccataactacgctgattactggcgggctatgtgcgccatttttaagcggcttgataacgactctcttctctgcgccgtgagaacacgatcacaacaaaaagcgactttttcgcagcagggtcttgcaaaagtcaattaa

SEQ ID NO: 96544 - DNA, 645 bp, Enterobacter aerogenes
atgctgaccctcagtaaattccagcaagcaacgggcagcagtgcggcactggccggtaagtggtttccagtcgtactggctgcaatgcagaagtacgacataagcacgccgttaaggcaggctcactttctcacacaagtggggcatgaatcatctggctttgttcatgtggaagagagcctgaattaccgctacggcgcattgctggcaatgttcggcaatcgaatcagtcaggaagatgctttcagatatggtcgtgttgattccggccagaatgctcatccggccgaccagaaaatgattggcagcatcatctacgccaaccggaacgggaacggcgatcgcaacagcggtgatggatatcgttaccgcgggcgcggcctgattcaggtgacggggaaggcgaattacgccgcgctggtgaatcagcttggcgttgatatcgtaaagagcccggaactacttacacagcctcaatatgctgctgaatccgcagctgcctggtggagcaatcacggacttaacgctatcgctgactcagatgatgttagccgcatcaccagaatcatcaacggtggtaccaacggactggaggacaggaaagcccgcttgactaaagctaagggggttttatgttcgggttaa

SEQ ID NO: 96545 - DNA, 432 bp, Enterobacter aerogenes
atgacgatctggcggggagcgttaaagaacttgctggcgccgttaacaggcaaaacgtggtcatgtctgaagtcgcagaacaacgggctgagtcggccaaacagaaccgaatgctccagagcgagattaagcgctacctggcggcagataagtgcgctgctgctcctgttcctgatgccgctgttgagcggttgcgcgcagcagcagaagctgcccgtggaataccgggtgataaagcagccggccctgaacctaccggcggatctgacgtcgcgcattgatgtgccggatctgccagacaatccctcatacggtgacagtgtttcgatgaacgcgacactttacgggatcgttggacagtgcaacatcgaccgggcagcaattcgcaaaattgagaaagggcgaaatgatgaaaaccaaccagtgcagtga

SEQ ID NO: 96546 - DNA, 480 bp, Enterobacter aerogenes
atggcggcactgaaaggtgaggtcaaagccttcatcgttcagtcccttgcctgcttcgacaccccatcccaggtggtggagtcggtcaaaaaagaatttggcctgagcatcacacgccagcaggtcgaatcacacgacccgacgaaggcaaacggcagggggctggcccaaaaatgggcggacatgttcaacgccacccgcgaacgattccagaatgaaatctctgacatcccaatcgctaacaaggcttatcggcttcgggtacttgaccgcatggccacgcgcgccgagggaatgaaaaacctcgcgctcaccgctgagatcatcgagcaggccgccaaggaatgcggggatgcttataccaataaacataagtttgaacattccggccccaatggtggcgctatccagacgatcaccatgagcagagaggaatacaaatccgcacggcaggagatgatggaggatgacgactgctga

SEQ ID NO: 96547 - DNA, 1485 bp, Enterobacter aerogenes
atgacgactgctgagcaaaagacatttgcccgtaaggttgaatgcgaggaagacgggctctactacgcgcggtacttcttcaaacaacgtaccggcggcaagatgattgtggcgcctcaccacaaggtgattcagaagacactggatcgcgttatcgacggtgagattcagcgtctgattatcaacgtcccccccggctatacgaagaccgaattggcaaccatcaacatgatggggcgaggactggcgctcaactgtcgggcgcgcttcatgcacctgtcctattcgcataatctggcgctgctgaactcttctacggcgcgcggcatgattaagtcgcaagcttaccagtccatgtggcctatggcgttgcgtgacgatgccgacagtaaggctatgtggtggactgaacacggcggcggcgtatatgcgtcatcagctgcggggcaggttaccggctttcgtgccgggcatatggagccaggctggcaaggtgcgctgattattgatgacccggttaagcctgatgatgcttactcggaaatcgtccgtgacggcgtcaataaccgatttaacgagacaatcaaatcacgactggcgatcgagacgacgccgatgattgtcatcatgcagcggatccactaccacgacctgagcggctatctattgcgcggaggtagtggtgagaaatggcatcacctgaacctgccggtgattatcgataatagccagtcatacgctgcgcaatacccagagaacacccatgcaatacccattgaccatgggctgcctgatggatggctctggccgtttaagcataacgaatcgcaccgtgtatcgctgttttcgcaccggcgcaccgccgaagctcagtatatgcagaagcctcgacggtttaatgctgagggcgcgctgtggactgaggtgatgataagcgcggctcgcgagctgcaaattcattacgataaggttcgaacagttgtcgccattgacccgcaggcaactaatagcgatgaaagcgatgaaacggggattgttgttgccagttcatatggtgctggcgataaaaagcagttctctgttgatggtgattacagcgggaaatattcaccggctggatgggcaaagaaagctatatgggcttatgagcagcatgatgccgacgcgatagttattgaaactaaccagggcggcgacatggcggaggagacgctccgcaacgccgggttcaaaggacgaatcatccgcgttcacgccagcaaaggtaagtatgcccgcgccgaaccaatatcagcgctctacgagcaaggtcgtgtcgccaaccatggcaatctctacgtgctggaaaaccagttgatggaatatatcccaaccacagccaagaaatcgccagaccgccttgatgcgatggtgtacgcgctgacagaactgaacggaactcaacctgttggcatgatgattccgaaacgccttcagggcagataa

SEQ ID NO: 96548 - DNA, 1350 bp, Enterobacter aerogenes
atgactgacaaattaactctcgccgtcaaccatgcgttgaacgatgcgcggatggcgcgcgcccgtatggggatgctggcgccaacaatggggctggacaataagcgccattcagcatggtgcgagtatggcttccctgaacaggtcacctacgaaaacctctacgccctgtaccgtcgcggtggtatcgctcacggtgcagttgagaagctggtgggcaagtgctggcagactaacccggaaatcatcgagggtgacgatgccgacgagagcaaggatgaaactgcttgggagaagaacaccaaaaaggttttcacaaagcgtctatggcgggcttttgctgaagcagaccgccgccgccaggttggacgttatgcgggtatcctgctgcacatcaatgattccagaacatgggatcagccggtatttcgtgggaagtcactaaaaaaggttacgatcgcatgggctggatcactaacagtcagcgagtgggttacagaccagaaatcggcagattacggccagccaaagcagtggaaatacgttgagagcctgccaaatggcgggacaaatcagcgcttcgtacatcccgatcgcgtcttcatccttggtgactattctaatgatgctattggcttccttgagcctggctataacgcctgcgtcagccttgagaaggtcgagggtggttctggtgagtcattcctaaagaacgccgcgcggcagcttaatgtcaactttgagaaggaaatcgacttcaacaatctcgcgtcactttatggcgtgagcattgacgagttgcaggataagtttaacgaagttgccggggaaatgaatcgtggtaacgatgttctgatgacaacccaaggggctacagtcgcaccactggtcacagctgtagcggatccgtcagcgacctataacgtcaacctgcaaaccttcgctgcatctgttgatatccctgtgaaagttctggttgggatgcagacgggtgaaagggcaagcacagaggatcagaaatatttcaacgcgcgctgtcagtcacgccgcggcgacctgtcattcgaaattgaagacttcagtgacaagctcatcgagctgaaaattattgatgctgtcagcgagaagactgttatctgggatgacctgaacgagcagactggaactgagaagctcgccaatgctaagaccatggcagagattaaccagacgttccagggaagcggagagaatccggccttcagccgcgaagaaatacgcactgcagcaggttatgaaaacgttgatgaatttccattaggagaagaggatggcaacgaagaagacgaagccaccgattctaccgcgtaa

SEQ ID NO: 96549 - DNA, 927 bp, Enterobacter aerogenes
atggcaacgaagaagacgaagccaccgattctaccgcgtaactatcaggatccgacgggggctgatgcgctggaacgccgggcaatgaaagatttcgccaggcggatgaataagattggcaaagcgtacaaatcagcactcgacaaaataccttcctccctcgcagtaaacgccagatacgaataccagctaaacccaacattactctccatcatcctgaacgatgccagttatctggtagatcaggtgcttctggatggtaacgagtacgacctgtggttttacgagtatgtcgatttggcgtcagagaaaggaacaggccagtcattctacaaccttagccagcagtcgccggtgtatgccgccgggcgtgaatcactggcctccatcctcgcaagtgacccataccagcagcgtatggcgctggtgcatgcgcgtgtgtttgaggaaatgaaaggcctgagtgcagaagtaaagcgcgatatggcgcgcgtgctgactgatggtgtagggcgagggcttaacccgctggatatcgccaggaaccttaccgcacagactggcattgagaagcgccgggcgaaccggatagcgcgcactgaggttaccactgcgctgcgccgggctaaatgggatgaagaccaagaggcgaacgaactctacggacttaaaacgcttctggttcacatctcagcgctgtcaccgacaaccagacattcccatgcagtgcgtcacgcacacctttacaccaatgaagaggtccgtgactggtacagcaaggacggtaactccatcaactgcaagtgcagccagcaatcggtgctggtggatgtggacggtaaaccggagtacccggacaccatcacgaaactcaaacaggaatacaaatcgatgcaggcacgcggttacgcctgggcggagaaataa

SEQ ID NO: 96550 - DNA, 1266 bp, Enterobacter aerogenes
atgccgatgcaggtcaatatcaccactaaggtgaatagccagtctatccgacgcgaaacgtataacgggcgtgagcacctggtgctgccgagctacacgctgccggcgaacgtcgttatgaatggcgggttgtacacggaagatgaaatcaatgcccactatcaggggctggagggcacgctggcgccgctgggtcacccacaggttaacggccagttcgtatctgcgttttctcctgaagggattaatgccggtcatatcggcgcgtggaaccgcaacgttaagaagtccggcaatcgcatttacctcgaaaagtgggttgatgtggcccgcgccggcgagtctgaaggcggacaggaattgcttgaacgcgtcgccgctattgagcgaggtgaagatgtcccgcccattcataccagcgtggctgcattcctcgaccagctcgaaccaaatgaacagcagcgcgcaacaggtgccgattgggtggcaaaaatccacagcatggaccatgacgcgatcctgcttcatgaagttggagccgcgacccctgagcaaggcgttggcctgatggttaacgctgacctggcgcagccgctaaaagctaactctggcgcgctggtgggcgaatcctatcgggagcgagagcaacgactcgaccgggcagccaaagcaaagtttgcaccaggtgaaaacgaatatgcctgggtggctgatttcactgactcgcaagcggtaatcatccgtaacggcggcaatgctgaggtgtttggttacaagtcagaaggcggggttatcaccttcgacgataccggcaccgcagttgcacgacaggagtcgtgggtggctgtcgtcgccaataaactcaaatctctattcacaccgcaggaacagcctgcaccaaaccacaaaacggagggcgacatgcctttaaccaaagaagaactggaacaaatcggcagcatgatcggccaggctgttgcgaccaataccgaagcggctattaagccccttgctgaaaaggttgatgcgctgcaggccaatcaacagcttctcgctgaaaccctgaccgctaactcccgcgctgaagaaaaaactaagcgtgaagcggttgcgaaagtccacggcgatatcgtcgccaatgcgctttcaggcgatgccctggacgcgatgttcaagtcgctgggcgaagctgctccgctgggcaccaacaatgctcagcgccagaaggaaaccggtgcgccaaaccctgacgaatacttcaaataa

SEQ ID NO: 96551 - DNA, 459 bp, Enterobacter aerogenes
atggcacgttatcgtcgcgttaatattgacggtcagtctctgtacaagaccgaaacccgtaaagtggctgccgcgtcattgccgggaactttcgttaccatcaacggtgacgatgagtttgcagtagccgcagcaactgttggtcgcctgtatgtgcttgacccagcgttcagcgaaggactgggtattactgactctatccctgccggtcactccacatctggtaactacgtggaagaaggccgagaactggcaatcctgtgtcctgcgggaacctacgctaaagacaccccgatcaagttgggctcaaatggtcagggagcgattgccgactctgacaccgacaccgttctcggctacagccaggacgatgcaactatcgctaccggtgctaccgattttatccgcgtgcgcttccgcgtaggcgctgtggccccggcaactggcggcggcgagtaa

SEQ ID NO: 96552 - DNA, 1104 bp, Enterobacter aerogenes
atgtacttcactaaagaaacgcttgccacgaatagccgcctgcgccttcactggaactctctgtgggctcagcgcaacatttgggataccgcgcataacatcatggttaaccagtaccgtggcgcaatggatgcagaaactctggcagcaaatgcgctggcaggtgatgggctgggtcgtgatttctgggctgaaattgaccgcgaaatcgtccagtctcgcgatcaggtgatcggcatggaaattgtcaacgacctgatgactgtgcaaaccgttctgccgatcggcaagactgccaaactttacaatacgattggcgatattgctgatgatgtctctgtgagtcttgacggtcaggcgccgtattcctttgaccacactgattacggtagcgatggtgacccagttccgatttataccgctggcttcggtgttaactggcgtcttgccgcaggactgaacactgtcggcattgatctggtgctggattcgcagacagcaaaaacccgtaagttccataaacgccgagtgactggttatctggatggtaatccgaccattcaggttcagaactacccggcacagggccttcgcaaccaccgcaacaccgccaaaatcaaccttggatctggcgcaggtggcgctagcatcgacctgaccactgcaaccccggcgcaggcgctggcattcttcggtccaaccggtgcatttggtgtgactgcccgcgccaaccaggtcacggcctatgacgttttgtggctgtctcctgaaatcatggcgaacctctccaagccatacactattgaggtgggtgacggtacaaacgcgatcatcagcggttctgtgctggatgctattcgcaagtttattccggtgaaagatatccgccaaacttatgcgctgagcggtaacgagttcctggtatatgagcgccgcaaagatgtgatctccccgcttgttggcatggccgttggtgttgttccgctgccgcgtcctatgcctcagagcaactacaacttccagatcatgtctgctgaaggtttgcagattaaacgtgatgaggaaggtcgttctggtgtgctgtacggcgcaaatctggcataa

SEQ ID NO: 96553 - DNA, 285 bp, Enterobacter aerogenes
atggctaaataccaggtaaccagggcgtggcatggagtgaaggtcggtgatgtggttgaaattgagaaactgcatcctgcgctgaagcctcatgttatgaaactctctgacactgtgctaaccccggcaacgcctgaaggcggtaccgataacaaatctcgtaaagagattatccagcatcgcctgacggagttgaatatcgagtttaaaggcaaccttggcgctgagaagctcagtgagttgttgcctgatggcgaactcgaaaagcttttccctgctgaataa

SEQ ID NO: 96554 - DNA, 405 bp, Enterobacter aerogenes
atggtaactctcgaacaggcaaaggagtatctggaaggtcagggaattaccattcccgattttgtgctgcaggcgttcgttgatgaggcgaacagcattcaggagtgccttgatgcgcattacccggcatctactgccttgctgattcagctctacctgttagcgctgatgggactcgggagtggagataaatacatttccagccagacggcgccaagcggagcatcccggtcctttcgttaccagtcattctctgaccgatggaaggcatcagtaaacctgctgcgcagtcttgataaatatgggtgcgccagcgcgctgattcctgccgatccaactgctgccccagcattcgccggcatctggattggcaaaggtggctgtatgtgtggtggcaacaaatga

SEQ ID NO: 96555 - DNA, 171 bp, Enterobacter aerogenes
atgaaatggatatccgtcaaagagcgccatccgcggtcattcgtccgtgtctgggtgatgaccgataccgggaagcaaaccacggcgtacgtgaaaagcaatggcgagtggtacatcaactgcgaccgcatacgcgccacaggcgctgctgtgctgcgatggagggagtga

SEQ ID NO: 96556 - DNA, 669 bp, Enterobacter aerogenes
atggctcatcaaatcttaagtcatcagcgtcataatgcgccatcttataatggcgttgcaggcgtctatcagattaccaacaccatcactggtgaggcgtatatcggctctacggttaacatttcaggacggtgggcgagtcatcgctataagctgcggaaaggcacgcatggaaacagaaaccttcaggagtcatgggataaacatggcaaaggtgtctttgatttctccgttctggaagtagtgagtaataagtcagagcttattgccgccgagcagcgattctttcgcgaattaaacccgtctttcaacattgcgccaaacgccgggagcagcctcggagttatacacaccgaagaatccaaggcgaatatggcggaaagtcgccggggagaaaagaactgctggttcggcaaagtaccggcctgtgcaggcatgagtagcctgcctgaagtcaaagctaaaatatcagccaagaattcaggcgatggtaaccctatgttcggtattactccgccacatgccaagtttaccgatgagcaggtgcgcgaaattcgtcgcgccatttcagatggtgattctcttactaccatcgccaaaagatatggtgtctcaaaggctaacattgcccacatccggcaagggcggtcatatgcgagggtaatctaa

SEQ ID NO: 96557 - DNA, 348 bp, Enterobacter aerogenes
atgtcggcagcagcttcgtggagttacacagccaaagcaactatttggcgaaacctcggcgttgatgagtatggcgattcgctgggtttttcccctccagaggtcatgctttgcgactatgaaggtggcgtaagcaaaagggttggcggaattggtgctgagattgttgcgaaaaatacaatatggacagagtacgcgatcgctaaaaacggcgactacatccttataggtgagtcaacgtcacctgacccatactcagttgatgccgacgaggtgcgacaggttatccgctacgccgatacgttcgatcgactggcggatgattttgcgattctgacgggagtctga

SEQ ID NO: 96558 - DNA, 408 bp, Enterobacter aerogenes
atgggggttaagatccgcggcgttgagcaggccaagagaaatctcggccgtatcattggtgatgttcagggcaggaaagtagttagggccatcaaatccgcattgttaatcgtcgcgccagaggcagcaagaatgacgcctgtggccaagtcttctgtcctgattaactcgcagtttcaggaagtgatggtaaatggcacacgtattaccggacgagtggggtattcggctaattacgcggtatacgtccatgaggccaagggaactctcaagggtaagccgcgcccactatcacaaggtggtggcaactactgggatccggcaggagaacctcaatttctgaagaaagcaggcgatgaaacgcgtaatgcagttgatgcggttatcaagaaggagttatccctgtga

SEQ ID NO: 96559 - DNA, 390 bp, Enterobacter aerogenes
gtgaaccctccgatgcataagcgtgttcgtaacatcttcgttgatgccggtttaactgcaggatataccgttcagtcgctgacatggaccgataccgggaaattgacggagagattcatcgtattccggcccaacggcggtacggcagtagatcgtgatatggctgctgattattacgtcctggtggatgttattaccgggaagtctgctggcgactacgctaagtcagaaaccgatgtgcaggccatcatcgattatgtgaagcagaacccgatgactaatccctgcctcgggcagatatcaaatatgggcggtatcccgtcaccagtaatgaccgcagaagggcgcatggtgtggcgcttacagttcgcctgtctctttggcggataa

SEQ ID NO: 96560 - DNA, 354 bp, Enterobacter aerogenes
atgagtagagaagacccgcagctgagaatcaggctaccaattgaacttaaagataaaattgaagcctctgcgaaagctaataaccgttcaatgaatgctgaaataatcttcaggataaacctgagttatctgcttgatgaagacaaaagcatgttcgctaccgttgccgaacctaacagctatgttgagcatgctgaaagagttcttaaatctcgaatcgaagaatccttgccatccttccttgaacttatggcggaaaaaatcatgaccgatgaattcagggacgagctcaaaagaaaagccagggagcaggccgaaaaagaatgggaagagatgcaaaaaaagcccacctga

SEQ ID NO: 96561 - DNA, 168 bp, Enterobacter aerogenes
atggaaaaagcaaaagacatgtatcagcgtaaagttcgatttccggaggatgtgcgtaaagcaattgagcgcagtggtgaagagcagtgcaggcagttcaataccgaattgatttatcagctgagaaaggcttacggcctaattggggtgaaaaatgcccaaccataa

SEQ ID NO: 96562 - DNA, 582 bp, Enterobacter aerogenes
atgaatattgtagcaaaatcagaatataacttccacggcgtaaatctggtgccagttgccaaccaacagggagtttggttcacatctgctgatttagccgtcgcactgaaatataaaagcgcgaaatcgattaccaaccttttcaaccaaaactctgatgagttttctgacggaatgactcaggtcattgaatcagtgacctcaggaaattaccgcaaaaaagttcgcgtcttctcactgcgcggcgcccacctgatcgccatgttcgctcgtacagaggtagccaaagaattccgccgatgggtgctggatattttagaccgcgaagttgaagtcaatatgccagtaattgatagggcttcaatacgcgagcagcatgcatacaacgctaatgcattagctaaacactatgcagttatgtacgaagcctggaagaatcagatttatccggcgttacgcgcaatcgaatcaccactcgcatctcgcctttgtgaccgatttaaagatggcgccattttcatgatgtacgtacagaagggggcagaaaagcaattagaggaaggggaagttgcaagaatctag

SEQ ID NO: 96563 - DNA, 705 bp, Enterobacter aerogenes
atgactaaaatgaatgtagcaaatcgcagccctgttgtcactaagatgtcaagtcgagagatcgctaaactgacaggtaagcagcataaagatgtgcttcatgactgccgaaaaatgttcgaatcactcaatcttcaatcggcggacttttccgccgattacctcgatggtcgaggacgcacttatcaggagtactggcttgatcaggacctgaccatgacgttgatgatgggttacagcatcccgctacgccacaaggtagccacccgatggcgtcaacttgaatctggcgatgctttgccaaccaaatcagcatcgcatcttcctgagtatcgccgcgcccgagcgatcaagatggaggttgaggcaatgagcttggcgctgtcgttcatgccaaagcttagcgacgttgcaaagcaaacagctatggctcgtgctgttaatgacgcggccggcattgagcttcttcctttgccgaaggttgaagagcatctccatacagctggtgatatcgctgagttgttgggagtgtctccgcaaaaaattggtcgccttgctaataagcatgaccttaaaaccgagcagtacggaatgtatgtctgggataaagccaaacactctgacaagcaggttgaagcgtttcgttataacgctgaaggcgtaaaagcgttgcgccacctgattcatggtgctgatgtggcataa

SEQ ID NO: 96564 - DNA, 2334 bp, Enterobacter aerogenes
atgtcgcaaggtgaaaaagtaggcggtctttatattgaaatcgaagctgataccgccaagcttttggctggagaacgacaggcgaacaaatcattaaacgctatcggtaacagcgccgataatgcctcgaaaaaatttgaacaactgcaaacaagccttaataaagtcgctggagctgttgctgcatctattgtcgttgattggggaagagcattccttgttgctgcggataatatgagtcagttaaatgcgagagttgaaagattaacaggaagtgcatcatctgcctctcaaaccatgcaaagtcttatgcgagttagctcatcgacaggcgggtctatacaggacacgacaaagctatgggaatcgcttagtactgcattacgtgatacaggggcatcaaacggccaaattattcaacttacagaaactttgcaaaaaattggtcgtatagggagcacctcttcagaggaaatggctaatgcccttcgacaattcggtcaatctatttcttcaggtacagtgagggctgaggaatttaactcaatacttgagcaaatgcctgagttggcgcgacagattgctgcaggaatgggagttggcgtgggagagcttcgccaattgatgctcgaaggaaaattatcggcgcaggatgctctaaacgctattcagaaacagaccgctttagttaataccgagttcgagaaactacccaggaccttgtctcaagccaatacatcattaactaattcattcctaacaatggtggataatctaaataaagctacaggggcaagcaacggaatggtcttagtgatcgattctttagctgtagcaataggcagattaactggtcaggccgcgactgcaagtcaacaaatcgcagaccttagatctgaagctgaaatgtatgcaagaagggcaaggacttggggatggttggggtttggcgattggcaaaaagaaaatgagcagaaatcagcaaagttaactgcagatgcttgggaaaaggcatcccgtgccggttgggatgctgcacaaaaggtggcgaaaaacaccaagcctattgagataaaagcagcgtcgactactgcgcaaagtaaggctaagggtgggaagtcagcagcccagaaagaggccgagcagtacgctagagcacaagaattaattacggaaaggttgtcggatttaaaaagcaaagcagagctgtccgccagtagcatcactgaactctcaagagctcaagcaatcctaaatgcccagcaatctttgggcaaagcggcatcgcaagaacaaattgctttggctggagagtatgcagcaaaagcttgggacaacgcaaaagcgttgcgcgaacaggccaaagctgaaaaagaacgtgctgatgcggcaagcaagtttagttcaatccagaataaatccagtagggttataggactagatactcagtaccagcaggatattgctgatatcaaaatgtacgctcaaatgtaccctcagaaaatagctgaggctgaggcggctagatcctctattgaaaagcaatatcgagaccagcgcatagcagcaatgtggcaggagtgggcgcagcaaaccactgcgacacaagcggcagcggcggcgtttgatggttttgctaatagtgctagtaatgcattaacaggcatagtgacaggaagcatggctgcatctgatgcattgcgttcaattgggaatacaattttgaacgaggtaattaatacctttgtgcaaatgggagttcagtgggctaagtctgctattttggggtcgaccactcagcaagcggcaattgctgcaaccaccacggctcaggtcgcaggtattggtatacagacagcagcaagcaccacagctgccgcagcatcaactgcggcctggactcccgccgccattatgtcatccatagcctcatttggtggtgcggttctcgttggtcttggtgccatggcgggcatcatggctctatccggcaaacgcaagaacggcggccctgtatctgcaggtggaatgtatcaggtcggtgaaggtgggatgccggagatttaccaggccagcactggtaagcagtatatgatccctggcgataatggcagggtgatcagtaacaaggaaatgaatgcgggaggtggtggcggagtggtgataaatatccagaactactcgtcttcatctgtcgatgcgcaggctggtactgacgctaatggtggagtgacagtggatgtaatcgtcgctgacctgaataacggtgggccaatcagtaacgccataacaagcaacatgaacgtgaaacgtacgccaagagggcagggctga

SEQ ID NO: 96565 - DNA, 2133 bp, Enterobacter aerogenes
atggccacgacacctacacaacttcctgtaccgagtgagactccgcgcgatctgaaatttaacgcaggtaaaattgatgagtttgtgacgggggatgtgcattattacaccgatagattcgggaaaaagcacattacaatggctggaatgcatgctgagtttgatgctcagctcgccagtcaggaagcgcgcttcgatgctttcattgagcgatctggctaccaggtcatcggtgattatgccgatggcccactgactatcaccgagtacaatcaacttattcgctatggtaacgaactgtggaaacttacggccgctactgatttaccatacaccactgcggggactacggatgaaacatggaatgcgactgactctttgcatttcgtttctgtcggggatgccgctcttcgccaaaacctgggttcaggcgaagatgggatggggatggccttaattgctttgcttaaaaaagggaatctctttgatttactaggcgaatggacaagtccggaagcgtggggagcaatagcaaatgatgaatcgaaagctcatcataattcctattgcttcttccttatgttcgaaaatttgcgcgaaagtggcggcggtgttgtgcagtttaagcctcgctctgtttatcacctcgacttcgtcaacttcattcctggcaatgtaactatccatggtaatggggcaaaacttatttttatcaatccaacctccgcgtatggccgtggtggtcttattattggcagttctcgtgaatttaattacgaatcagcaaaagatgcttataactctggcacttatccaacttctatactaaacaccagtgtcgttgacccagtacaaaagcagtacttaagggataaccaacaatttgttaaggctgacacggtcagtatcgataatttaatcatagaagcaaagttcacctcagaaacaagttggggtggatttgcgattaactgcgtcaatgcgcaaaatgttaatatcagtaatatttatactatagggtggactgagagtgttaatgctggctctgatgttcctcccaatactccatcatgccacaacataaaaatacagaacctgactgtaattagaggcgatattgtccgaacttattatgcaggtttcttttttgctaactccacaagttgtgagatttcaggggctgtgcttgaaacgccattaactgacggatctggaaatggtagctttggcgcaacaaactttaccgaagactgtgttattcgtgatatttcagtaccatcgctagggcgtaccgcttcatcagagggtatcctcattaataattcaaagggatgtcttgttgagaatataagagttggaaatgctaagtcagcagtatcaacattttataccgatacttccatgaatgatgcagcaagaccaaatatttttgatagtataacaggagtgaattgtgatcaggttcttggtgttacagggaagtatggtattttttccaacgtaaaaacttacaactgcaatcaggaattgcttttcaggaataataatgcctctaacaacatcttcaaaagcaagcctgaatctataacaattggctcatcagctagtaatcttaagtactggtttttgattaacaatagtattgatggatggcgtagggtttatacatggctacgtcctcttgacatactctgcacgccattctcatcactatcatcatggaattctaataactctgttaaattcaatagtggagtgtcggcaagctttttatataaaattccagatggattctcggctgtatcaggatttacagtctacggagattttagctcaggcgcggcggcagcagcagtagattccgtatgtacagttgatgtcatctccatgtctgcagttgatgggaatcaaacgccgccagaggtactgttaacggcatctatttctgcaaaatcaaacggtgatggaatatggtcattaacaagcaatgcgcaatcatcggagccaggatatttgccactggaaggtgcatcggttggtgttgataatacaatgtacttacgtattacatattccaacggagtggctaataacacccttaaagaaattgggctaagaatatacaggagataa

SEQ ID NO: 96566 - DNA, 258 bp, Enterobacter aerogenes
atgaacggtaccgaatcaagaaaagcggattatttatatcgtggaattattgactattacagcagcatcagcggcctcgatattacacttgagcaaatgactcaacgcaataaattcataatggatagcgccattgtctgtgatgactctctggatgggcaggttctggcgcttcaggatgagtatattgctgcgggtgatgatgtttcagctcagaagaatattatcgaaaaagcattcttgttacttaattcataa

SEQ ID NO: 96567 - DNA, 162 bp, Enterobacter aerogenes
atgacctcgcaggtcgtggagcgatgtcaaagacttttggagaatggagccacccgtaagcaggtggctgatatgatcggggtaggggtgaagaccatttataaatatttcccagcaaattattacgaagcattgcgttacatcagtggcatttatcaatag

SEQ ID NO: 96568 - DNA, 1266 bp, Enterobacter aerogenes
atgtttgctttggttgatgtgaacagcttctatgcgagctgcgaaaccattttcaggccggatctgcgaggtaagccggttgtcgtattgtccaataacgatgggtgcgtgatagcgcgttctgccgaagccaagaaacttggcatcaagatgggggatccgtacttcaaatgcaaagaccagttccgccggcatggcgtggtttgcttcagttcgaactatgaactctacgcggatatgagcaaccgggtcatgacgacactggaggaaatgtgtcccagagttgaaatctacagcatcgacgaggccttttgcgatctcactggtgtacgtaattgccgtgtgctggaagagttcgggcatgagctgaaagataccgtttaccgcaataccaggctcccggtcggggtggggatcgcacaaacaaagacgctggcaaaactcgccaatcatgcggcgaaaacatggaaagctactggtggagttgtcgacctttcgaatgtggaacgccagcgcaaactgatggctttacttccggtggatgaggtgtggggtgttggccgtcgtatcagcaaaaagcttgaggctatggggataaaaaccgtcctgcagttagctgatacggatatccgctttatccgcaaacacttcaacgttgtgcttgagagaactgtccgggagcttcgcggcgagccgtgtcttgagctggaagagtttgcgccagtgaaacaggaaatcgtctgcagccggtcgttcggggagcgcattaccacctatgaacaaatgcggcaggctatttgttcatatgcggccagaggcgcagagaaacttcgtggggagcatcaatactgccggcacatatcggcgttcgtgaagacgtctccctttgcgctgaacgaaaaatactacggtaacagcggatccattaagttactaacgcccacgcaggatagccgggatatcatcaatgccgcggtaaagtgtctggatgcggtatgggtcgatgggcaccggtatcagaaggcggggatcatgctcggtgatttttatagccagggtgtcgctcagctgaacctgtttgatgacaatgcgccacggcagaacagcgagaaactgatggaagttctcgaccacctcaacgcaaaggacgggaggggaacactctattttgctgggcaggggatccaggccacctggcagatgaagagagaaatgctttctcctcgctatacaacccgcttctctgatttaccggttgtcaggtga

SEQ ID NO: 96569 - DNA, 672 bp, Enterobacter aerogenes
atgtgtggacgttttgcacaagcccaaacccgtgaagaatatctggcttacctggccgacgaagcagatcgcgacatcgcatacgacccggaacccattggccggtacaacgtcgcccccggtaccaaagtcctgctgctgagcgaacgagacgagcagttgcatctcgatccggtgatctggggttacgcgcccggatggtgggataaagcatcattgataaacgcacgcgttgagaccgcggcaacgagccgcatgttcaaacctctctggcaacatggccgggcgatctgctttgctgatggttggttcgaatggaagaaagaaggcgacaagaagcagccctactttatccatcgtgccgatgaccagccgatattcatggcagcaatcggaagcacaccatttgaacgtggagacgaagcagaaggttttctgattgtcaccgcagcagcagataaaggtctggtagatattcacgaccgccggccgctggtactttcaccagaagcagccagggaatggatgagacaggatataggagggaaagaagccgaagaaatagctgcggacggtacggtgcccgcagacaagtttatctggcacgcagtaacgcgcgccgtaggaaacgttaagaatcagggcgcagaattaatcgagccaatcacctga

SEQ ID NO: 96570 - DNA, 1005 bp, Enterobacter aerogenes
atgaacgccgtgatcgaacaaagaaaagtgttgctcgaaattgctgacctgaaagtacattttgatattaaagatggtaagcaatggttctggcagccgtcaaaaacgctcaaagcggtggatggcgttacgctgcgcctgtatgaaggcgaaacgctcggggtggttggtgaatccggctgcggtaaatcgaccttcgcccgcgccatcatcggcctggtgaaagctaccgacggtaaagtggcctggcttggaaaagatctgttaggcatgaagccggaagagtggcgcgacgtgcgcagcgatatccagatgatcttccaggatcctttagcatcgctgaatccgcgtatgaccattggcgaaatcatcgctgaaccgctgcgaacctatcacccgaagatgccacgtcaggaagtgcgcgatcgcgtgaaggcgatgatgatgaaggtcggactgctgccgaacctgattaaccgctatccgcacgaattctccggcggccagtgtcagcgcattggtatcgctcgcgcgctgatccttgagcctaagttgattatttgcgatgagccggtatcggcgctggatgtttccatccaggcgcaggtggtgaacttactacaacaactgcagcgggagatggggctgtcgttgatttttattgcccatgacctggcggtagtaaaacatatttccgaccgcgtgctggtcatgtatttgggtcatgcggtggagttaggtacctatgatgaggtgtaccataatccgctgcatccttataccaaagcgctgatgtcggccgtaccggtgccggatcctgatcttgagaagaataaaaccatccaactgctggaaggggagttgccttcgccgattaatccgccttcgggttgtgtgttccgcacccgatgtccattggccgggcccgaatgcgccaaaacgcgtccggtgctggaaggcagtttccgccatgcggtttcctgcctgaaggtagacccgttataa

SEQ ID NO: 96571 - DNA, 921 bp, Enterobacter aerogenes
atgttaaaattcatattacgtcgctgtctggaagcgattccgacgctattcatccttattactatctctttcttcatgatgcgtctcgcgccgggcagtccttttaccggtgaacgtacgctgccgccggaagtcatggcgaacattgaagcgaaatatcatttaaacgaccccatcatgacccagtacttcaattatctgaagcagctggcgcacggtgattttggtccttcctttaaatataaagattattcggtgaacgatctggtggcatcaagcttcccggtttccgccaaattgggccttgccgcctttttattagcggtaatcctgggcgtcagcgccggggttattgccgcgttaaaacaaaataccaaatgggactacgcggtgatgggggtggcaatgaccggcgtcgtcataccgagttttgtggtggcgccgctattggtgatgattttcgccatcacgttgcattggctgcctggcggcggttggaacggcggggcgctgaaatttatgatcctgccgatggtggcgttatcgctggcatatattgcaagtatcgcccgtatcacccgtggatcgatgattgaagttttgcactccaacttcatccgtaccgcacgggcgaaaggcctgccgatgcgccgaattatcttccgccacgcgctgaagcctgcgttgctgccggtgctttcctatatggggccggcattcgtcggcattatcaccggctcaatggttatcgaaacgatttacggcctgccgggtattggccagttattcgtcaacggggcacttaaccgcgactactcgctggtgctcagcctgacgattctggtcggcgcgctgaccattctgtttaacgcgatcgtcgacgtactgtacgccgttatcgatccgaaaattcgctactga

SEQ ID NO: 96572 - DNA, 1080 bp, Enterobacter aerogenes
ttggcagcatcacccgtttccccagtaccaaaagccgccatcgaaaaatatggtgaaaaatggactcagccggcgaatatcgtcaccaatggcgcctataaactaaaagattgggtggtgaacgaacgtattgtgctcgagcgtaatacgaattactgggacaacgctaaaacggttattaaccaggtaacttacctgccaatttcttctgaagttaccgatgtgaaccgctaccgcagcggcgaaatcgacatgacctataacaacatgccgattgaactgttccagaagctgaaaaaagagatcccgaaagaagttcacgtcgatccttatctgtgtacttattattacgaaatcaataaccagaaagcgccatttaccgacgtacgcgtccgtaccgcgcttaagctggcgctggatcgcgatattatcgtcaataaagtgaaaaaccagggcgatctgccggcttacagttacaccccgccatacaccgacggcatgaaactcgttgaacctgagtggttcaaatggtctcaggaaaagcgtaatgaagaagcgaaaaaattactggcggaagccggttataccgctgataagccgctgacctttaacctgctgtataacacttccgacttacataaaaaactggctattgccgtggcgtccatctggaagaaaaaccttggcgctaacgttaagctggaaaatcaggagtggaaaaccttcctcgacagccgccatcaaggcacctttgacgtcgcccgcgccggctggtgtgctgattacaatgagccgacatcgttcctgaacaccatgctcagcgacagttctaacaacacggcgcattataagagcccggcatttgataagatcatcggcgataccctgcaggtcaccgatgaagcgaaacgcgcagagctgtacgcgcagtcggagcaacagttggataaagattccgcgattgttccggtttactactatgtgaacgcgcgcctggttaaaccgtgggttggcggttataccggtaaagacccgttggataatatttacgtgaagaacctttatattatcaaacattaa

SEQ ID NO: 96573 - DNA, 888 bp, Enterobacter aerogenes; identical to SEQ ID NO: 92637

SEQ ID NO: 96574 - DNA, 282 bp, Enterobacter aerogenes; identical to SEQ ID NO: 25056

SEQ ID NO: 96575 - DNA, 288 bp, Enterobacter aerogenes; identical to SEQ ID NO: 25055

SEQ ID NO: 96576 - DNA, 537 bp, Enterobacter aerogenes; identical to SEQ ID NO: 25054

SEQ ID NO: 96577 - DNA, 1011 bp, Enterobacter aerogenes; identical to SEQ ID NO: 25053

SEQ ID NO: 96578 - DNA, 831 bp, Enterobacter aerogenes
atgaaagccgataggtgcttttcaaaaggacggctcagggacgaatttcggatgaagcctaagccaggagtagagccagtttcgttctacaaaaacgggtatggtggccaatttggagtgtaccggatagcagattgccaaccaatgcggagaaggggttgttcaccggcatcacaaaagcaaataagggcgcaatccatcctttcggtcaaggcaagaatgcgtagcaacctggcaaaggcctctgtcatggcacaaaggtgggtcgctctggaacctctggttctcgataccgagacgaccggacttggtgaaagagaccaggtgatcgagctggctgttactgacatcagaggcgcggttctcctctgcaccagattacggccaaccgtggaaatagaccctcaggcaatgggtgttcatggcatcaccgagactgagctgtcgaatgagcctacgtggactcaagttgcgccagctctcgcccggcttttgtcgggccgtcatctggtgatatttaactccagtttcgacagtaggatgttgaggcaaacagccagtgcatttggagaccaactctcttggtggcaagagcagaactgtctgtgcgcgatgaagctggcggctgatgcctttggctcaaccaaccggcacggcacaatctcacttgcggatgccacctgcgaggcaggtgtgagctggaaaggtcgagcccattcagcagcgaccgacgctattgccaccgccgacttggtgacagagatagccaaagtccaacgtgacctcgtggtccagctccaggagcttcaaagcaaaggtaatttggaatga

SEQ ID NO: 96579 - DNA, 492 bp, Enterobacter aerogenes; identical to SEQ ID NO: 25051

SEQ ID NO: 96580 - DNA, 876 bp, Enterobacter aerogenes
atggctaaaaacttcatatcagaacaattctcggccatgtgccgcgacttaacgaacctgtcctctcttatcaaacgactaccgccacggtacgcaaaagttgcggccatccctcctaccggaaaaggaatggagaacgagcccgtcaacaagattgtcgtaactgaacaaactgggcgcgaagctcttgagctggcagcgcacagctacagagatcttcacatcaacccagactattcgcagaagtctgccaggcgcaccgtgggggtactctggttctccccttccaggattggtgtagctgacgaaattgcggcgacggttgaacgcatcaacgcggccaaagctggtatcgaggagttcattatctcgacgtaccccaccaggcaagagaggtttgaagcacttcgagcggactgccctggtgtcatgactctccacctttacagacaaattcggtgctataccaatggcgacatcgactctatccgcttcacctggcaacggaaggactccttgaagaagcccgtaaaagaggagcttttgcaacgcatcagagaggagctggagcgatctgggccagactatcaacttcccctggagcagcttatccagaagatcgccagcaccccggagccttatctccgggagcgaagggaagtaaaggttcaaccggtggcaaacgtcatggccgcaggggtactcaaaaccgttaccgcgccaatgcccctgatcgtgctccaggataaggatgttcagctcaaattgcttcgtaactttgacgcctcagaacaatgcaaaactcgatctgataaagcggcatcggaaatccttggcaccttcggtggagtcactatcgaatccttccctggatga

SEQ ID NO: 96581 - DNA, 1041 bp, Enterobacter aerogenes; identical to SEQ ID NO: 25049

SEQ ID NO: 96582 - DNA, 279 bp, Enterobacter aerogenes; identical to SEQ ID NO: 25048

SEQ ID NO: 96583 - DNA, 1512 bp, Enterobacter aerogenes; identical to SEQ ID NO: 25047

SEQ ID NO: 96584 - DNA, 774 bp, Enterobacter aerogenes
atgttctcagcggaatggttccgggaaaacttacccaagtacaaagaccttgcttggaacaatcctaccgttgaaaacgtcaggacgtttctctacttgcaacgatttgcgatagatcgctctgaacaattttccgatgctacagagctggcggtcgtaggtgatcctttcttggatgaaattactcgacgtcctgctgccacgtttgcctcacaacaagttgatcgtgacgctggtaacgccaaaaacatgctactcaaaagcgtagccgaacgcgtagggatattcttcttctacaagtccgacgatgactacagtgacttgcaagcaccgctcatcaagatgttggaacaaggagaaggattctcgatcattcctgtatctatggacggcaaaccactccccagtgggcttttcccccattacaaaaccgatgaaggccatgccaaacaacttggtatcgtaactttccctgctgtttacctcgcatctccagacggtcagttcgctcctataggacaagggccaatgtctcttcctgagctgaatcacaggattttggtcgcagcaaaacgcaatggttgggtcacagacgaagagtttaaccgtacacgtccggtactcaacctggaaaacaacatagccgaacgcttggcctcaccagagctgggctctgacctcaaacagctatctcaagcgagcggtgataaagacaactttgtgccaccggaacaactcatgaagtacatccgggacaaattacaggagaactaa

SEQ ID NO: 96585 - DNA, 1434 bp, Enterobacter aerogenes; identical to SEQ ID NO: 25045

SEQ ID NO: 96586 - DNA, 3615 bp, Enterobacter aerogenes; identical to SEQ ID NO: 25044

SEQ ID NO: 96587 - DNA, 273 bp, Enterobacter aerogenes; identical to SEQ ID NO: 25042

SEQ ID NO: 96588 - DNA, 534 bp, Enterobacter aerogenes; identical to SEQ ID NO: 25041

SEQ ID NO: 96589 - DNA, 609 bp, Enterobacter aerogenes; identical to SEQ ID NO: 25040

SEQ ID NO: 96590 - DNA, 552 bp, Enterobacter aerogenes
atgaacattggcaactctggtacattgggtcgctgggttacagctcgacacatggcccttgctgggtacatcacaaaaatcatcatgatcgagactggtctgacctacaaacaggtcagacggctttaccaggatctggagagggacggatatactctggaacgaaaatccagaactttccggggtggtgcgacactgattcatagtcacacatccaagatacaggcctctcttctaatgcagctctacttcaacattggtggagaagccgtgttgcggtctgtgaacatcaaagccttgaacaaggcatttagaatgtatcacgcaatccgcaaagaagtgctcggaatgaaaggtgctcggtgggctccgtttgatattactgatgcctggtgtcttgcttcggagctgagaagtggggacgcaatgctggaggtgtgcgacaactgcaagtgtacgtacttcacctctgttaatcaaagaacctgcgttgaatgtccgttctgcaaagaacaaggaaggcatggtggtggggagaaagagtgtgcttga

SEQ ID NO: 96591 - DNA, 420 bp, Enterobacter aerogenes; identical to SEQ ID NO: 25038

SEQ ID NO: 96592 - DNA, 984 bp, Enterobacter aerogenes; identical to SEQ ID NO: 83936

SEQ ID NO: 96593 - DNA, 540 bp, Enterobacter aerogenes; identical to SEQ ID NO: 25035

SEQ ID NO: 96594 - DNA, 288 bp, Enterobacter aerogenes; identical to SEQ ID NO: 25034

SEQ ID NO: 96595 - DNA, 1065 bp, Enterobacter aerogenes; identical to SEQ ID NO: 25033

SEQ ID NO: 96596 - DNA, 435 bp, Enterobacter aerogenes; identical to SEQ ID NO: 25031

SEQ ID NO: 96597 - DNA, 1116 bp, Enterobacter aerogenes; identical to SEQ ID NO: 25030

SEQ ID NO: 96598 - DNA, 609 bp, Enterobacter aerogenes; identical to SEQ ID NO: 25029

SEQ ID NO: 96599 - DNA, 522 bp, Enterobacter aerogenes; identical to SEQ ID NO: 25028

SEQ ID NO: 96600 - DNA, 522 bp, Enterobacter aerogenes; identical to SEQ ID NO: 25027

SEQ ID NO: 96601 - DNA, 474 bp, Enterobacter aerogenes; identical to SEQ ID NO: 25026

SEQ ID NO: 96602 - DNA, 315 bp, Enterobacter aerogenes
atgttgcatgaggacaatgtgatggaaaaagtcaaaagcgtagatgccgtggagttcacggcagcagataagaaggcgatgacccatgcggcatacgcccagtgtttcttcattctggcccaagtgatggcattcccttccctgggggtggctggcgctatggttgctgctctgtgcggcatgatgccgtggttgaccaagttcgccaaagaggctccatcgaaagcctttggcatggtgatggcttcactctgccttgctcctgtgtacgggaaactctgtgagctggtggtccacgcgattcagggagcttga

SEQ ID NO: 96603 - DNA, 855 bp, Enterobacter aerogenes; identical to SEQ ID NO: 25024

SEQ ID NO: 96604 - DNA, 960 bp, Enterobacter aerogenes; identical to SEQ ID NO: 25023

SEQ ID NO: 96605 - DNA, 861 bp, Enterobacter aerogenes; identical to SEQ ID NO: 25022

SEQ ID NO: 96606 - DNA, 429 bp, Enterobacter aerogenes; identical to SEQ ID NO: 25021

SEQ ID NO: 96607 - DNA, 360 bp, Enterobacter aerogenes; identical to SEQ ID NO: 25020

SEQ ID NO: 96608 - DNA, 447 bp, Enterobacter aerogenes
atgctaaaacgcggaattatcaatctcgctgctagttacatcattgttgatgccctactccggaatgcagcaatttggatctttggcttgtccttctccgttggtggcacttacgtcactggcgaggccagtacatgggtcgtttacctagccacttctggtgccatgacactctgttctgtcgtaacagcctacctgctcgtgacctatcaccgctgggggctgatggcggccagggtctggttgctattgagtgcctgcctaaacggctatgccgtctatttgagtagccacaacatccagttggtggtggcactgctttccagcctgtttattgctttgtggatgctcaagacccttgagcaaccagcagtgaaggggacgtacaaggtaatcgctgatcttcaccgtcagctatggggaatgttgaaggggcaaacacaatga

SEQ ID NO: 96609 - DNA, 519 bp, Enterobacter aerogenes; identical to SEQ ID NO: 25018

SEQ ID NO: 96610 - DNA, 228 bp, Enterobacter aerogenes; identical to SEQ ID NO: 25017

SEQ ID NO: 96611 - DNA, 858 bp, Enterobacter aerogenes; identical to SEQ ID NO: 25016

SEQ ID NO: 96612 - DNA, 189 bp, Enterobacter aerogenes; identical to SEQ ID NO: 25015

SEQ ID NO: 96613 - DNA, 528 bp, Enterobacter aerogenes; identical to SEQ ID NO: 25014

SEQ ID NO: 96614 - DNA, 273 bp, Enterobacter aerogenes; identical to SEQ ID NO: 25013

SEQ ID NO: 96615 - DNA, 294 bp, Enterobacter aerogenes; identical to SEQ ID NO: 25012

SEQ ID NO: 96616 - DNA, 303 bp, Enterobacter aerogenes; identical to SEQ ID NO: 25011

SEQ ID NO: 96617 - DNA, 351 bp, Enterobacter aerogenes; identical to SEQ ID NO: 25010

SEQ ID NO: 96618 - DNA, 549 bp, Enterobacter aerogenes; identical to SEQ ID NO: 25009

SEQ ID NO: 96619 - DNA, 195 bp, Enterobacter aerogenes; identical to SEQ ID NO: 25008

SEQ ID NO: 96620 - DNA, 372 bp, Enterobacter aerogenes; identical to SEQ ID NO: 25007

SEQ ID NO: 96621 - DNA, 471 bp, Enterobacter aerogenes; identical to SEQ ID NO: 25006

SEQ ID NO: 96622 - DNA, 336 bp, Enterobacter aerogenes; identical to SEQ ID NO: 25005

SEQ ID NO: 96623 - DNA, 489 bp, Enterobacter aerogenes; identical to SEQ ID NO: 25004

SEQ ID NO: 96624 - DNA, 498 bp, Enterobacter aerogenes; identical to SEQ ID NO: 25003

SEQ ID NO: 96625 - DNA, 264 bp, Enterobacter aerogenes; identical to SEQ ID NO: 34918

SEQ ID NO: 96626 - DNA, 933 bp, Enterobacter aerogenes; identical to SEQ ID NO: 34919

SEQ ID NO: 96627 - DNA, 1464 bp, Enterobacter aerogenes; identical to SEQ ID NO: 34920

SEQ ID NO: 96628 - DNA, 330 bp, Enterobacter aerogenes; identical to SEQ ID NO: 34921

SEQ ID NO: 96629 - DNA, 393 bp, Enterobacter aerogenes; identical to SEQ ID NO: 34922

SEQ ID NO: 96630 - DNA, 195 bp, Enterobacter aerogenes; identical to SEQ ID NO: 34923

SEQ ID NO: 96631 - DNA, 1185 bp, Enterobacter aerogenes; identical to SEQ ID NO: 56088

SEQ ID NO: 96632 - DNA, 348 bp, Enterobacter aerogenes
atgagcaaaaagcgcatcgtaatcaaaaatggtgaggtctgcgggtttgccgatgaggtttccttcaaaggccttgaagtgcaggaatacagtaaaacaagggtttcgcgcatcgtgccgacgagcggcattctaatgattgcgttctatgttattcgcggactttgttcagacgagtcaaagattgcggcatggactcgtgtttggcgttgccagtggaaggtgctgatcgacggtaaaagctatggcccattcagaagtcgtgcggatgctatctcgttcgagaaggacgagatctacaaacaaggcaaattctttgccgatgccactcacgaggcggcagtatga

SEQ ID NO: 96633 - DNA, 429 bp, Enterobacter aerogenes; identical to SEQ ID NO: 34939

SEQ ID NO: 96634 - DNA, 564 bp, Enterobacter aerogenes; identical to SEQ ID NO: 56091

SEQ ID NO: 96635 - DNA, 570 bp, Enterobacter aerogenes; identical to SEQ ID NO: 34936

SEQ ID NO: 96636 - DNA, 546 bp, Enterobacter aerogenes; identical to SEQ ID NO: 34935

SEQ ID NO: 96637 - DNA, 939 bp, Enterobacter aerogenes; identical to SEQ ID NO: 34934

SEQ ID NO: 96638 - DNA, 198 bp, Enterobacter aerogenes; identical to SEQ ID NO: 34933

SEQ ID NO: 96639 - DNA, 249 bp, Enterobacter aerogenes; identical to SEQ ID NO: 34932

SEQ ID NO: 96640 - DNA, 243 bp, Enterobacter aerogenes; identical to SEQ ID NO: 34931

SEQ ID NO: 96641 - DNA, 363 bp, Enterobacter aerogenes; identical to SEQ ID NO: 34930

SEQ ID NO: 96642 - DNA, 1245 bp, Enterobacter aerogenes; identical to SEQ ID NO: 56095

SEQ ID NO: 96643 - DNA, 450 bp, Enterobacter aerogenes; identical to SEQ ID NO: 34925

SEQ ID NO: 96644 - DNA, 312 bp, Enterobacter aerogenes; identical to SEQ ID NO: 25139

SEQ ID NO: 96645 - DNA, 786 bp, Enterobacter aerogenes; identical to SEQ ID NO: 25138

SEQ ID NO: 96646 - DNA, 1182 bp, Enterobacter aerogenes; identical to SEQ ID NO: 25137

SEQ ID NO: 96647 - DNA, 273 bp, Enterobacter aerogenes; identical to SEQ ID NO: 25136

SEQ ID NO: 96648 - DNA, 636 bp, Enterobacter aerogenes; identical to SEQ ID NO: 25135

SEQ ID NO: 96649 - DNA, 144 bp, Enterobacter aerogenes; identical to SEQ ID NO: 25134

SEQ ID NO: 96650 - DNA, 282 bp, Enterobacter aerogenes; identical to SEQ ID NO: 83876

SEQ ID NO: 96651 - DNA, 675 bp, Enterobacter aerogenes; identical to SEQ ID NO: 83875

SEQ ID NO: 96652 - DNA, 507 bp, Enterobacter aerogenes; identical to SEQ ID NO: 83874

SEQ ID NO: 96653 - DNA, 312 bp, Enterobacter aerogenes; identical to SEQ ID NO: 49818

SEQ ID NO: 96654 - DNA, 501 bp, Enterobacter aerogenes; identical to SEQ ID NO: 83872

SEQ ID NO: 96655 - DNA, 1428 bp, Enterobacter aerogenes; identical to SEQ ID NO: 83871

SEQ ID NO: 96656 - DNA, 657 bp, Enterobacter aerogenes; identical to SEQ ID NO: 83870

SEQ ID NO: 96657 - DNA, 264 bp, Enterobacter aerogenes; identical to SEQ ID NO: 34912

SEQ ID NO: 96658 - DNA, 219 bp, Enterobacter aerogenes; identical to SEQ ID NO: 34913

SEQ ID NO: 96659 - DNA, 618 bp, Enterobacter aerogenes; identical to SEQ ID NO: 83867

SEQ ID NO: 96660 - DNA, 489 bp, Enterobacter aerogenes; identical to SEQ ID NO: 34914

SEQ ID NO: 96661 - DNA, 2193 bp, Enterobacter aerogenes
atggacctttatatctgcgagaagccttctcaggccaaagatttggctggcgtaatgaaggcctcccaacgaggtgatggatttctccatgatggaggaaaccgcgttattacgtgggcgttcggccacctgctggaattgtatatgccagacgattatgacgaacgctacaagtcatggtcactggagaccctccctattgcaccagagtcatggcggtacaacgttcgcaagagtgcgttcaaacagtacaaaattgttgagggactggtcaaaaaggcgagcaccatctacatctcaacggactacgaccgagaaggtgaggctatcgcccgttcgcttctggatcgattccgctactctggccctattcgccgggtttgtttgacggctctcgatgagtcaagcatcaagaaagcgctgaacaacgtaaaggatggcaaggatacggtctcactctactacgccgcattggcacggcaacgcgctgactggttggtaggcatgaacgtgagccgcctctacacagtgctggcccgagatgtcggcttcaaccacactcttcacgttggcagggttatcaccccaaccgtcgctcttgtttgtcaacgggaccgagagatcgccggtttcaccccctcaccatactggactctgggtgtgaacgtgtccgtacagaatggacagtttgccgcccaatggataccaccagaagagtgcagtgacgagcaaggccggtgcgtcaataaggcctatgccgagcaggtagcctcccaggtcaatggtgccaatgctgttatcagcaaagcagaaaccaaaccaggtaaagagtcagcccccctccccttcgatctaacgtcgctgcaacaatacgcaagcaaacgatggggatacaccgctcagcaggtactggatgcagctcaagctctgtacgagacgcacaaagcgaccacctaccctcgtactgatagtcgttatctacccgagagccaaaaggaagacattccggacattctccaggcgctcattttgtccgatcagaacgtctctgggctggtggctggcgcagatcctcatcgcaaggccagggtattcaatgacgccaaagtgaccgcgcaccacgcgatcattccaacaccggccagaacagacatcagtgccatgtctgagatcgagttcaatctttacgacgccatccgtcgtttctacatcgcgcagttctacagcgagttcgagttcaccaaaacctccatcgaggtgcagtgtgggcgtcacctctttgcggcctctggtaagacacctgccaaacaaggctggaaggttttgtttgcttctgatagtgaaagcagtcccaaggacgagggggaagacaccgacgcgccggttgaacaagagaagctccccagggttagccagggcgaacccgctttgcttaatggtgccgagctggcaaacaaaatgacgcggccagcaccgcacttcaccgaagccacattgcttgccgcgatggagaacattgcccggttcgtgactgaggagaagttcaagcaaattctcaaagacacagccggtttaggcactccagcaacacgcgcaagcatcatccagggcgctgttgataaaggctacttcaaacgtcagaaaaaggtactgcttgcaactgataaggctcatgcgcttatcgcagtgcttccaccagccatcaaatcacccggcatgactgcggcttgggagcaggagcttgagaaagtcgcctccggctccgggaatatgtctgtcttcatgaagcagatttccacctggatctgccaaatggttgagcagctcaaagtggccgcaccggttctgaccaaagaaggtggcgcgatggctaaagccttcgagggcgctaagccgccttcacacgaatgcttcaactgcggtggagagatgcaccggatcaaagggaagaacggatttttctggggctgccagaacgaggcttgcaagaagacgttcccagacaaccgagggaaacccgagaagcgtatcgcggctgaggattgtccagactgcccagattgcggtagcccgatgcgtctcaggaaaggaaaagcgcccggcaagaagcgagcttctaagttctggggctgcaccgcctatcccgattgcaaaggcactatgcccttcaaaaagtcggactttatggattga

SEQ ID NO: 96662 - DNA, 618 bp, Enterobacter aerogenes; identical to SEQ ID NO: 83863

SEQ ID NO: 96663 - DNA, 2979 bp, Enterobacter aerogenes; identical to SEQ ID NO: 83862

SEQ ID NO: 96664 - DNA, 1866 bp, Enterobacter aerogenes; identical to SEQ ID NO: 83861

SEQ ID NO: 96665 - DNA, 546 bp, Enterobacter aerogenes; identical to SEQ ID NO: 25118

SEQ ID NO: 96666 - DNA, 630 bp, Enterobacter aerogenes; identical to SEQ ID NO: 83859

SEQ ID NO: 96667 - DNA, 447 bp, Enterobacter aerogenes; identical to SEQ ID NO: 83858

SEQ ID NO: 96668 - DNA, 378 bp, Enterobacter aerogenes; identical to SEQ ID NO: 83857

SEQ ID NO: 96669 - DNA, 663 bp, Enterobacter aerogenes
atgcgtaagagagatttcttttttggagaggtgtatgaggggggtgcaggagccactctacgactgagtgatatggaaccattggcaagaaaagtgtcggcagagttcttcactgcacaactgaaccgtatgctgaaagagcatgacggtcagttgacgctcagcgatggaacgtcgtaccccagcttttggagcttcatcgacaaggttgttccagagcaggttggtttcgtggagatctacgctcggcaggatgttaacgataatgttgaagcgacactggcgtgtgacatcgttttggtaaatggtgtgatcaccgttaaacctcactggtgtgcttacaaagacatcagggctgacgaagtgatttccaccttactggtgcctttgcatttgaaggctctccagggtaaggcttacattcgctgggatgatggtgaaaccgaacctctgttacaaaacgacgactatcaggctgaacttgaaaatgtgtttagtgtttccaagtacccatcagccatgagctggggcgatacagcagaccagaaggttaagcagtacaagatggaccttgagtgcgccacagatgttggttgtcgaggtgtctcatcagagcaagcatgggatgcttatcgagaactccgttacaatagaacagtgtga

SEQ ID NO: 96670 - DNA, 144 bp, Enterobacter aerogenes; identical to SEQ ID NO: 25113

SEQ ID NO: 96671 - DNA, 366 bp, Enterobacter aerogenes; identical to SEQ ID NO: 83854

SEQ ID NO: 96672 - DNA, 282 bp, Enterobacter aerogenes; identical to SEQ ID NO: 83853

SEQ ID NO: 96673 - DNA, 627 bp, Enterobacter aerogenes; identical to SEQ ID NO: 83852

SEQ ID NO: 96674 - DNA, 918 bp, Enterobacter aerogenes; identical to SEQ ID NO: 83851

SEQ ID NO: 96675 - DNA, 1317 bp, Enterobacter aerogenes; identical to SEQ ID NO: 83850

SEQ ID NO: 96676 - DNA, 579 bp, Enterobacter aerogenes; identical to SEQ ID NO: 83849

SEQ ID NO: 96677 - DNA, 384 bp, Enterobacter aerogenes; identical to SEQ ID NO: 25106

SEQ ID NO: 96678 - DNA, 5532 bp, Enterobacter aerogenes; identical to SEQ ID NO: 56102

SEQ ID NO: 96679 - DNA, 708 bp, Enterobacter aerogenes; identical to SEQ ID NO: 83846

SEQ ID NO: 96680 - DNA, 2448 bp, Enterobacter aerogenes; identical to SEQ ID NO: 83845

SEQ ID NO: 96681 - DNA, 318 bp, Enterobacter aerogenes; identical to SEQ ID NO: 83844

SEQ ID NO: 96682 - DNA, 531 bp, Enterobacter aerogenes; identical to SEQ ID NO: 83843

SEQ ID NO: 96683 - DNA, 1266 bp, Enterobacter aerogenes; identical to SEQ ID NO: 83842

SEQ ID NO: 96684 - DNA, 672 bp, Enterobacter aerogenes; identical to SEQ ID NO: 83841

SEQ ID NO: 96685 - DNA, 1008 bp, Enterobacter aerogenes; identical to SEQ ID NO: 83840

SEQ ID NO: 96686 - DNA, 2799 bp, Enterobacter aerogenes; identical to SEQ ID NO: 83839

SEQ ID NO: 96687 - DNA, 861 bp, Enterobacter aerogenes; identical to SEQ ID NO: 83838

SEQ ID NO: 96688 - DNA, 642 bp, Enterobacter aerogenes; identical to SEQ ID NO: 25069

SEQ ID NO: 96689 - DNA, 321 bp, Enterobacter aerogenes; identical to SEQ ID NO: 25070

SEQ ID NO: 96690 - DNA, 186 bp, Enterobacter aerogenes; identical to SEQ ID NO: 25071

SEQ ID NO: 96691 - DNA, 969 bp, Enterobacter aerogenes; identical to SEQ ID NO: 83986

SEQ ID NO: 96692 - DNA, 909 bp, Enterobacter aerogenes; identical to SEQ ID NO: 25073

SEQ ID NO: 96693 - DNA, 528 bp, Enterobacter aerogenes; identical to SEQ ID NO: 83984

SEQ ID NO: 96694 - DNA, 1032 bp, Enterobacter aerogenes; identical to SEQ ID NO: 83983

SEQ ID NO: 96695 - DNA, 1011 bp, Enterobacter aerogenes; identical to SEQ ID NO: 83982

SEQ ID NO: 96696 - DNA, 1278 bp, Enterobacter aerogenes; identical to SEQ ID NO: 83981

SEQ ID NO: 96697 - DNA, 1797 bp, Enterobacter aerogenes; identical to SEQ ID NO: 83980

SEQ ID NO: 96698 - DNA, 336 bp, Enterobacter aerogenes; identical to SEQ ID NO: 83979

SEQ ID NO: 96699 - DNA, 540 bp, Enterobacter aerogenes; identical to SEQ ID NO: 83978

SEQ ID NO: 96700 - DNA, 501 bp, Enterobacter aerogenes; identical to SEQ ID NO: 25081

SEQ ID NO: 96701 - DNA, 885 bp, Enterobacter aerogenes; identical to SEQ ID NO: 25082

SEQ ID NO: 96702 - DNA, 225 bp, Enterobacter aerogenes; identical to SEQ ID NO: 83975

SEQ ID NO: 96703 - DNA, 390 bp, Enterobacter aerogenes; identical to SEQ ID NO: 83974

SEQ ID NO: 96704 - DNA, 453 bp, Enterobacter aerogenes; identical to SEQ ID NO: 83973

SEQ ID NO: 96705 - DNA, 192 bp, Enterobacter aerogenes; identical to SEQ ID NO: 25087

SEQ ID NO: 96706 - DNA, 354 bp, Enterobacter aerogenes; identical to SEQ ID NO: 25088

SEQ ID NO: 96707 - DNA, 345 bp, Enterobacter aerogenes; identical to SEQ ID NO: 25089

SEQ ID NO: 96708 - DNA, 303 bp, Enterobacter aerogenes; identical to SEQ ID NO: 25090

SEQ ID NO: 96709 - DNA, 1626 bp, Enterobacter aerogenes; identical to SEQ ID NO: 83968

SEQ ID NO: 96710 - DNA, 432 bp, Enterobacter aerogenes; identical to SEQ ID NO: 25092

SEQ ID NO: 96711 - DNA, 555 bp, Enterobacter aerogenes; identical to SEQ ID NO: 56214

SEQ ID NO: 96712 - DNA, 261 bp, Enterobacter aerogenes
gtggtttgtgagatcgaagcagagtacccattgctcaacactcattcgagtgttgcatggcccctgctcgatgaactcaacagttacaccatccaaaaaaaccaatcgctcattgatcacattgataatgcggtcgctgaactgttgaaacacaaggctcgtctacagcttgatattcaaaagctgcaagacggtgacattgatctggtgaaacaggccaagcagcaatacgaagacaaccagatgtcgagtagcagctag

SEQ ID NO: 96713 - DNA, 2454 bp, Enterobacter aerogenes
atgcaacaaacattaaactttgatctatcagaacaacccatcccagtgcttttgcgtggggataagtgggattctgtttggtcagaactgactgataacgaggatttgaacttcgttgatgccagtagaggaaccagtctgtcatcgttgatcacgtcatcggttgagtccattcacacggccttaattgatgggtggaccatgatgatcggctattccagtggtaaagattctgaaacggtcttgcacctgttcctgatggccctgatccgggctgtaaggagtggggcgaccatcagccagcaccacttcatcttgcacactgacacactgatcgaaagcccagaggtaaggtggctggcggatcagaaactggccgagctggagcgtttcattgcgaaggaaaaccttcctctgaccatcgttctagcaaagcctgggatctcgcagagttggacgggccgaatccttactgggagggggttgcctacgttttccaactccacggcccgccagtgtagccaggatttaaaaatcacctctgccaaaagagcgaaggcagcttatatgcgagagcttcccaaagaggttcgacagaaagtctgccttttgctgggcagtcgtgatgctgaaagcactattcgtgcggccaacattgcaaaacagcgaggaagctcagatcgcgtcattaagacgaaagatgggggtgagctgtatgtggtgaaaaactggttggcgagtgatgtctgggagttcttactatccgctggcatgggctcagcatatcctctgccaagttacttggagagcaatgtcactacggcagagctttacaaggcggcaacaggggagtgcgtgtggtcggcaacagagaagaaggccagtgacgcctgtggcgctcgcttcggttgctgggcttgccaggctgttgggttggataagtcaatggagacgttgcttgccacggaccctgaaaggcatggctatatgtcggggctgaaccgcatccagcgctacttggcaaaacgccggtacgcatgggaagaccgccatcccgtaggtcgaacgatttacgagggcggatacatcaaaatacagccggacgtttacagtcctgttttcctagaacgattgcttcatgtctgttgcagcatggactacatggagcaaaagagagctgatgagctggcatacaagctggctactggtcaagcagaggataacgactggaaccgtcgaatggcagagccacaattccggatcatatcggaagaggctttagtccatatcgacttcatgtgggccttccatcatttcaatgataagcctttccatgccctggagatttaccacagggtttggtcgatgggtgatctggacttgctggaagacgagccgcagtgtgaaaccgttcctcagtcaccaattccgaagccattgtggttgaaggttggtcgctggggcgatggttcgctttctgatggcttggccgatccgttagcggaaatggcttactttgacggcggggatgacccgttggcagcgcaagtgatcaataccgcagacggaaagagaagggtggtttgcttcgcagaagatgatgaagtgaaagtcgatcccgactccgctgcgttcatcatctggaacgaatacccgcgactaagggagtctgtactgaagggacattatacgcccggtagtgcagcgcagttctaccttcggttcggagcaatccagcttgcgaaaggaaaaggcgctttgtatcaccgtatgatgcaaagaggtcaaacctaccaccagatgggccttacagggctacagacgatggaaggaatccaacagcgcaaggatgtcaaagtgcttagcgatgctaagtacaaagatctggtgaagcgaaaaatcaagggaagactggcaacggtacgctggtgggtcaacttgcacttaacgttcaagtaccatctgcaccaccgtactccgacggggttgttcatcgagaagcaacttgaccaggaagcaatggaagaacagaaacggcatcaggagcgatggtttaactacgtgactgacgcgatgctttgttactccagcgcattctgtatgagcgtcatggaagggcgagaggggagcggaaacgccaacattcgtcgttacatggccgcgaccagaaggaaggcttatacggccctctgcgagctcttggacaatactgacgcccagtgggtgaatgatgtggtccagagtgccgtagggcagtatgaggcgatacaggcagccctaaccgaaggttccgcgcttgctatctatctcgactggatcaacctactgtcaaaacgccatccagcctctttggagcgacatgtcagaacgatgatcaaggcggttcaacgcttacatcgccgcgacgacacagagttgcaaagaggacagcaaggcttgtccttggccgcataa

SEQ ID NO: 96714 - DNA, 204 bp, Enterobacter aerogenes; identical to SEQ ID NO: 56217

SEQ ID NO: 96715 - DNA, 606 bp, Enterobacter aerogenes; identical to SEQ ID NO: 25097

SEQ ID NO: 96716 - DNA, 270 bp, Enterobacter aerogenes; identical to SEQ ID NO: 25098

SEQ ID NO: 96717 - DNA, 219 bp, Enterobacter aerogenes; identical to SEQ ID NO: 25099

SEQ ID NO: 96718 - DNA, 558 bp, Enterobacter aerogenes; identical to SEQ ID NO: 49879

SEQ ID NO: 96719 - DNA, 852 bp, Enterobacter aerogenes; identical to SEQ ID NO: 49880

SEQ ID NO: 96720 - DNA, 147 bp, Enterobacter aerogenes; identical to SEQ ID NO: 49881

SEQ ID NO: 96721 - DNA, 387 bp, Enterobacter aerogenes; identical to SEQ ID NO: 49882

SEQ ID NO: 96722 - DNA, 1728 bp, Enterobacter aerogenes; identical to SEQ ID NO: 49883

SEQ ID NO: 96723 - DNA, 279 bp, Enterobacter aerogenes; identical to SEQ ID NO: 49884

SEQ ID NO: 96724 - DNA, 240 bp, Enterobacter aerogenes; identical to SEQ ID NO: 49885

SEQ ID NO: 96725 - DNA, 726 bp, Enterobacter aerogenes; identical to SEQ ID NO: 49886

SEQ ID NO: 96726 - DNA, 2988 bp, Enterobacter aerogenes; identical to SEQ ID NO: 34915

SEQ ID NO: 96727 - DNA, 1053 bp, Enterobacter aerogenes
atggcagtacgaaaactcaccacaggaaaatggctttgcgaatgttaccccgccggacgtagtggacgtcgtgtgcgtaaacaattcgccaccaaaggcgaagctctggcttttgagcgtcacacgatggaagaaaccgaagcaaagccctggctgggtgaatcagtggatcgtcgaacactgaaagacgtggttgaactatggttcaaactacatggtaaatctctgactgctgggcagcatgtctatgacaaattgctgctgatggctgacgctctgggcaatccccttgcaaccgatctcacatctaaaatgtttgcccattatcgagataaacgactgacaggtgagatctacttcagcgagaaatggaagaaaggagccagcccggtcaccattaacctggagcaaagctatctaagtagtgtttttagcgaactatcccgtctgggcgaatggtcgtatccgaacccactggagaacatgcgaaaattcaccatcgcagaaaaagagatggcatggcttacccatgagcagattgttgaattactggctgattgcaaacgtcaggacccaattctggcactggtagttaagatatgcttaagcacaggcgcacgctggcgagaagccgtaaatcttactcgttcacaggtgaccaaataccgaattacctttgtcagaacgaaggggaagaaaaacagaagcatccctatcagtaaagagctttacgaagagatcatggcgcttgatgggttcaatttcttcacagactgctattttcaatttttatccgtgatggaaaaaacgtctatcgtgctccctcgcggtcaactgacacacgttctgcgccatacgtttgcggcgcacttcatgatgtcgggtggaaacatcctggccttacaaaaaattctcggacaccacgatataaaaatgactatgcgttacgcacatctggcaccggatcatctggaaacggcgctccgtttcaatcctctggcaacattgccaagtggcgacaaagtggcggcagcggttggcattaccccgtaa

SEQ ID NO: 96728 - DNA, 297 bp, Enterobacter aerogenes
gtgatttctcatataccaataaacaaaattaaatccgtaattattggtgatggtttagttttcagaccacttaaaaataccctaaaagacgtggcatctggtgaaatagccacattgaataacgtggctacacaattactgctctatttgttgcaaaatggtaaagagatatcctcgcgcgatgaaattctgctgaatgttttccagcataatggcgccagagcgacggatgcgaatcttaaccagcacatttcatttttgcgcaaagccattacggtaatgactccaacttattga

SEQ ID NO: 96729 - DNA, 528 bp, Enterobacter aerogenes
atgtctggaattattcattttttccgggcgtcgccgccgcaagcgggcgccgcgtttgatgaaaaacgttttcgccgggtgcgttggcaaacgtttattgctatgaccctggcctacgtgacgttctacgtctgccgcttatcgttcaccgtggcgaaaagcgcgttggtggaattaggcattaccccaacggagttgggaatgattggctcgacgctattctttagctacgccatcggcaaactggttaacggttttatcgccgatcatgccaacgtggtgcgttacatgagccttgggctattgctcagcgccgggatgaacctgctgatgggcatgaccaccaatgccatgctgctggctatcttttgggggattaacggctgggcgcagtcgatgggcgtcggtccttgtgcggtttcgctggcgcgctggtacggctttaaagagcggggaacgttttacgccatctggtcgacggcgcataacatcggcgaggccatgacctacatggtgatcgcgcggtga

SEQ ID NO: 96730 - DNA, 702 bp, Enterobacter aerogenes
atgaacttattcgaacgtttgatgtatcgccgcctttgcaacgagcagcctgctgacggcggcgctgctccggcggcgtctgagccatcagcacatgctacagatgctcctgttcctgctgctgaaccggctaaaccagaaggcgataagccacagactggcactgaagttgacaatcctaaggaagacaagcccgctgatggtgataagccaactgataagccggatgacgaaaagcagaagcaagaaggtgcaccggagaaatacgaatttaccgctggcgaaggcgttgagttggataccgaagcgctgaaagatttcgaaccggtagcgcgcgatctgaacctgaccaatgagcaggcgcagaagttggtcgatgcatacccgaagattctggcaggcgtccagcagcgccaggcggaagcatggcaggcgcaaactgaagagtgggcggcaacagtgaaggccgataaagaaatcggtggcgacaagttgacggcaaacctcggcgttgcgcagcgcgctctggataccttcggtacgccggagttgaaggaatacctgaacggtaccggtctcggcaaccaccctgaactggtgaaggcgtttatcaaagtaggtaaggccatgtcggaagacggcatggttacaggtaaagaaagcggtcagcgtagtgcggccgaagtgctatatggcaaataa

SEQ ID NO: 96731 - DNA, 372 bp, Enterobacter aerogenes
atgaaagagattgaagagcttagccagccacgcggcgagatgatcgaatacctgaaacaagctatcggagaaggatatcagcctgagcatgaagatgcggtatctgacctatcagtgattgatggactgaatgatggcgatctaaatcgtgagtttggtaagtgttggcagtggtacaacatgggcggcggaataaatgaaacattcgagaatggactttcaaaatcagatgcagattaccgcagtgagcacttatacaacatgaagttacaatgcctgcatgcggcgcttattcagagtggactatttgataaacccaatgcggtaaatatcgcggaagctattaacgctggctttaatgccatcaagtaa

SEQ ID NO: 96732 - DNA, 735 bp, Enterobacter aerogenes
atgaaagaccatgaaatccgtgagctggtcaatcagttgcgcgatatcgcgatcgaatatcatggggcccagcaactgagagaacgcattgcgcgggctgtccgcgccgccatcctccaggctgaacctgtaacgacaactagcaagttgccaggcgtcattgatgataatttggtagaaggtctcaggctcctgcagtgcatgcttgatgactatagagaaagaaattatgggcacgctcaagattgggttcgccacatagaccaaaggttttctgagcatagtgaggcgcacggagatgatgtctattgcattttgcacaggcttttagccggtgaaggtgatagtaactccccggcaattccggatggttcggcgtccatgcttcgtcgctggctggcatttggccgcggtatgcaaaatgcaggtagccaactgcctcacaacctgattgcggaaactgagtccatgctcgcagccgccccgcagttacccggcagcgaacccgcagcagtaccggatacatggattccggtaagcgagcggatgccggaagatgagcaggaggtgctcaccataaacaggatgggccatcgctttgtatcattcttcgataagcactcagggttgtttttcgacaggcttgatgcgccatcagcatgctgcatagagcacgtgctggtaacccactggatggaattgccagccgccccgcaggaggtgaaaggtgagtaa

SEQ ID NO: 96733 - DNA, 435 bp, Enterobacter aerogenes
atgaccaaatccaccataaccagagagcaggccgagcttagggcgttcatcacagggttcctgactgaccaggcgcacgataaacagtcagcagacagcctgacagctaaggttttccgtattgcgctggccgcaatggacagcgagccggttggtgaattctacgaggatggaccactgaactggtatcaaatttccgatggcgaccgagtcccggcccacaggcgaattccgctctatcgccacgcgcagccagcgccggtagtgcctgatgatgtgctggacgcattgcagaaggttgctcgtatacgcctcgacctggatgaattcgacggcgaccgtcgcggcattgctgattgcctgtgtgatgccgaagaggcattaatcgaggtggtaaaccgccgcgccgacatgctcaatggaggaaagccatga

SEQ ID NO: 96734 - DNA, 189 bp, Enterobacter aerogenes
atgaaaatgggtgaacacatggagccggttatcgagctgctggaagaactgaacggcaacaacagtgacgcaaaactaaagctactcgccctggttatatcggaatacatgataaatgcggatgtcactggctttgaggtcaccgcggggaagatgaaagtttccgtagatataagcgtggaggaatag

SEQ ID NO: 96735 - DNA, 171 bp, Enterobacter aerogenes
atgaatacagttgcagatttacatgtcccacatgaatgctgccaaaagtgccgttgttactaccatccaagcgaacgtagccagcatatctgcattccgcaagatgatgaaattgataatcatccatctgatgaaatgagccagtaccaggactatccatatgacaactga

SEQ ID NO: 96736 - DNA, 900 bp, Enterobacter aerogenes
atgatgcagaacgccggaatcatggacagaaccaaatacctcggcggcagcgatgtcgccggtatcctcgggattagcccgtggcgcactccgcttgaggtttatctggataaggttcagccacgcgttaagccagtagatccttcaaagcaaaaagttttcacgcgtggccaacgcatggagccatacgttatcgacctactttctgaagaaactggtctggaaattattcatcgcggcaacaggtacattcaccgcgattacggatttatcgctgctgagatcgatgcagaggcagctaccggcgaaaacatagagatcaaaacggtaagcccatttaaggctaaggaatggggtgaagttcagacagatgcgatacctgttcattacacggctcaggccatgcatgggttgatggttacaggaaaacaggtatgcgtattcggcgtccttattggcggtgacgacttccgtatatatcgggttgagcgtgatgaggaaaccattcaggccattctggagaaagaggtcgccttctgggaccgggtgataaacctgaacccgccagaggccacaaccgtcagcgatatttctctgatgtttgagaaggatgcaggttcaagcattgaggcagacggaaaggctttggcgttgttcaacgaccttcgagacatgaagtctcgttgcaagtcactggaagcagaaatcgccgtatcggaagagaagctgaagttgtacatgcaggaacactcaatcctgacgctggacggtaaaccgatttgcacatggaaatctcaggttagcaaccggttcgaccagaaattattccaggttgagcacccagacctgtacgaaaagttcaaaacagcaactacatcacgcgttttcagaatgaagtaa

SEQ ID NO: 96737 - DNA, 1023 bp, Enterobacter aerogenes
atgtctaccaatgcacttaaggcagcagcgaccgggaaccaggttgcacagcataacgagaaacctaccacgctggctggacttctcgcggatccaaaaattaaagcccagatggcgctggctcttccaaagcacatgacagctgaccgcctggcgcgcatcgccactacagagattcgcaaggttccaaaactggcagcatgcgaccaggcaagtttcctcggggcaataatgcaatgcgctcagctcgggctagaaccgggcggcgcacttggccacgcatacctgattccgttcgacaagcgtcagaaagttaatggccgctgggaaacagtatcgacagaagcgcagctgattatcggctatcgcgggatgattgaccttgcccgtcgctcagggcaaatcctgagcatctcagcgcgcacggtccatgcaaacgacaaattcagctactcatacggcctggaagaaacgctcgagcactcaccttgcgaaactggtgaccgtggcgaactgacccatgtatatgcagtcgcccgcctgaaagatggtggtgttcagttcgaagttatgagccgtgcagacgttgagaaagttcgcgctctgagcaaagccggtagcagcggtccgtgggtggaccacttcgatgaaatggcgaaaaagacggtgatccgtcgactgtttaaatacctgcctgtttctatcgaactgcaaaaagcggttgtgatggatgagcgagcggaagcaggactgagtcaggataacgcagcagttatcaccggggaatattccgttgttgatgatgagcagcaaagcctgacagtggtctctgactctgagcgcgaagaagcgcgggaatacgttagcgcaatcctgaacagcctggactcatcctcaacagacgccaagaagatgtttaagcgtgccgaagacgaaatcaactcgatggctgaaaaactaggtgatgaataccaccatggcttcatgacgacgcttaacgacatgcgacctgaattcgaataa

SEQ ID NO: 96738 - DNA, 612 bp, Enterobacter aerogenes
gtgcacgaaaagctgacccaacttggcgtgaatgtgatgaccaataccatgatcaccggcgttgaagaaggcggcctgcataccaaagatggccagtttatcgaggcgagtttaatcgtctgggcggcggggataaaagcgccggacttcatgaaggatattgccgggctggagaccaaccgtattaatcaactggtggtgaccccgacgctgcaaaccacgcgcgacgctgatatttttgctttcggcgactgcgcggcgtgcccgcgtccggaaggtggatttattccaccgcgtggccaggcggcgcatcaaatggcgctcttcactgccgacaatattatcgcccggatgaaggggcataagttgaaatcgttctcctatcgcgatcgtggttcgctggtttcgctctccggctacacgacctttggcagcatcatggggcatctaccgatcggcccgatgatggtcgaaggccgtattgcgcggatggtttacgattcgctgtatcggatgcaccaggtgacgctgcacggttattttaaaaccggcctgatgatgttgtccggcgggattaaccggattattcgcccgcgcctgaaattgcattaa

SEQ ID NO: 96739 - DNA, 2211 bp, Enterobacter aerogenes
atggggcaaattatgcacaccacgcactattcatccttcccgctgcgtaaaacgctgttggccttagccatcggcgccgccagtcaaacggcgatggccgctgacgctgccgccgcgaagcaacctggcgaagagaccctcatcgtcgaggctaacgaaaccagcgattttaaatccggcggcgacctggtggttccggcattcctcgacgggcagatcgcccacggcggtcgtctggggatgcttggcgaacaaaaggcgatggacgtcccgtttaacgtcatcggctatacctcgaagctgattcaggaccagcaggcgaaaactatcgccgatgtcgtcagcaacgacgcaggcgtgcaggccgtacagggctacggcaacttcgccgagacctatcgaatccgcgggtttaagctcgatggcgatgacatgaccatgggcggtctggcgggcgtggtgccgcgtcaggtgatggacactcagatgctggagcgcgttgaaattttcaaaggggctaacagcctgcttaacggcgcggccagcagcggcgtcggcgggatgattaacctcgagccgaaacgggcggaagatctgccgaccgcacgtgttggcgtcgactatacctctgattcgcaggttggcggtaccctcgacctgggacgccgtttcggcgataacaaccagttcggcgcccgggtcaacctggtgcatcgcgagggcgaaggcgctatcgataacgataaaagccgtaccacgctggcttcgctggggcttgattaccgtggcgatcgtttccgctcctcgctcgatttcggctatcagaagaaaacgttccacggcggtacgatgggcgtcaatatcagcggtgtagatttcatcccggcgctgccggacaacagcaaaaactacagccagaagtggggctatagcgatattgaaagcgagttcggcatggcgaaggcggaatatgacctgagcgatagctggacggtatacagcgccctcggcggtcagcattcgcatgaaatcggcacctacagcgcgccgaagctgctcaataaaaacggcgatgcaacggttggccgccttgatactaaccgcatcatcgacgcgatcagcggcatgggcggggtacgcggcgatttcaataccggtgcgatttcgcataaggtgaatctcggctatgcggcgcaggtgcataccgatgcgaccgcctggcggatgtcggcgaagaatccgaccaccaatatctatgacaaccgcgatgtggcaatgccggataacgcctattttggcggcaactaccacgatccgctggtcacctcgcgcagccgtacgcagggctggctgctgagcgacactctcggcttctttaacgataaggtgctgtttaccgcggctgctcgtcatcagaaagtggtcgtgcgcaactacagcaacgccaccggactggaagatacctcttcgcgttatacccaaagccgctggatgccgacgtttggcctggtgtacaagccgtgggagcagctgtcgctgtatgctaaccatactgaagcgctgcagccgggctctgtggcgccgactacggcggccaatgccgggcagagtaccgggatcgcgcactcgaagcaggacgaagtgggcgtcaagatcgactacggaacgatcggcggatcgctggcgctgtttgaaatcaaaaaaccgaacgccatttccgataccgctggcaattatggcctcgacggcgagcagcgtaaccgcggcgtagagatgaatgtcttcggcgagccgatgctggggctgcgtcttaacgccagtacggtgtggctggatgccaaacagactaaaaccgctaaaggcgcaaccgatggtaaagatgccatcggggtggctaatttctacgcggtgctcggcgccgagtatgatattaagccggtggaaggcctgaccgcgacagcgcgtgtcaatcatagcggctcgcagtatgccgatgcggccaacaccaagaagctggatagctacaccaccctggatttaggcctgcgctatcgtatgcgcctgaacgccgaccagaacgaaatgacctggcgcatcggggtgaccaacgtgaccaacgagaagtactggtccggcattgacgataccggaacctatctgttcgaaggcgatccgcgtaccgttcgcgtctcaatgagctacgacttctaa

SEQ ID NO: 96740 - DNA, 561 bp, Enterobacter aerogenes
atgcgtgatctgatccttcaactcagcaaaagttcgatttattcaacaaagcctctgggtaatatcactggcgaaaacatcaatctacaaaccaacggcacactggcgcaaagcaccagtggcaaaatgaccgcaactaacgcgattaccgcgcacagctattggttgaataataatggctcgatgcaagcgcaaagtattaccagcgatcatggcccggtcaataataccggcagcatctccgcacataatatttctatcaccacttatgcggatattgttaatgaaggaaccatttacagtagcggggatttagttctggatacgcaaaaaagaggcaatatctataactacagtctgatcgatgcggatggcaccctgacgatgacggcgaaaaaggtagtcaacagcggtcgtggttgcggttggtttaaatttaatacctgtgatgtcggcaccatcagcgccaacaagatggtcctcaactcctcgcataaatacgccagtgagatgggtggttatcaatacttcaaggttgcagaaattaataccgtactgtaa

SEQ ID NO: 96741 - DNA, 219 bp, Enterobacter aerogenes
atgatgatttgcccactgtgtggaagtgccgcccatactcgcagcagttttcaggtatcttcattgaccaaagaacgttacaaccagtgccagaacattaactgcagccatacttttgttacccatgaaacttttgttcgttcgattgcaacgccaaaagagtcaaatccggttcagccgcatccaatgaaatcaggacaggtggagctctctctttga

SEQ ID NO: 96742 - DNA, 1101 bp, Enterobacter aerogenes
gtgaatttcagctctgaactgcttaacaaaggcaacaaaactcccgcattcagcatcagtattgagggcagggatatcaccactgtgctggataaccgcctgatgagtttgacgctgacggataaccggggctttgaagcggaccagcttgatctggagctggatgacgctgacggaaaaatcgtgctgccgcgccgtggtgcggttattacgctggcgctgggctggaaggggcagccgcttttcccgaaaggggcattcacagtggacgagattgaacacactggcgcaccggaccgcctgactatccgggcgcgaagtgctgattttcgggaaacgctgaatacccgccgtgaaaaatcgtggcacaagaccaccgtcggggaagtggtgaaggaaatagccgcgcggcacaagctgaagatggcactgggtaaagacctgtcggataagcccgtggagcatatagaccagactaatgagagtgacggcagttttctgatgcggctggcgcgacagtacggtgccatcgcgtcggtgaaaaatggcaatctgttattcatccggcaggggcagggcaaaagcgccactggtaaacctctgccagtgatcactatcacacgcaaggacggcgacagtcaccgatttaccctggcagatcgcggagcctacacgggcgtaattgccagctggttgcatacccgcgaacctgcgaagaaagaaagcaccacggtgaagcgtaagcgcagaactaagaagcagaagaaagagccggaagcgaagcagggcgattacctggtgggtacggatgaaaacgtgctggtacttaatcgcacttatgccaaccggagcaacgctgaacgggcagcgaaaatgcagtgggaacgcctgcaacgcggcgttgcgtcattctcgctacaactggcggaagggcgggcagatctttacacggaaatgccagtgaaagttagtggctttaaacaaccgatagatgatgcggaatggaccattacgactctgactcataccgtcagcccggataatggttttacgaccagtctggagcttgaagtgaggattgatgatttcgaaatggaatga

SEQ ID NO: 96743 - DNA, 486 bp, Enterobacter aerogenes
atgatgatggtgctgggattgtacgtgtttatgctgcgcaccgttccgtatcaggaactgcagtatcaacgcagctggcgacatgcggcaaacagtcgggtaaaccgacgtccgtccacgcagtttctgggaccggaaaacgacatgctgacgctttccggtgttcttatgccggaaataacaggcggcaggctgtcgttgctggcactggagcagatggcagaacaggggaaagcatggcccctgattgaaggcagcggcacgatttacggcatgtatgtgattgagggactgaatcagactaaaacggagtttttccgcgacggtatgccgcgccggattgagttcaccctgtcgctcaaacgagtggatgaatccctgtccgatatgttcggtgatctcagtgcgcaactgaataatctgcaggacacggcaacgtctgccttaagcgatatcagtaaaacggtgggagggctgctgtcgtga

SEQ ID NO: 96744 - DNA, 3078 bp, Enterobacter aerogenes
atgagtgataacaacctgcgtctgcaggtcattcttaatgcggttgacaagctcacccgcccatttcgatctgcgcaggccagttcaagagaactggctgctgctgtcaaaaaatcccgcgatgcaataaagcagcttgatcaggccgggagcagtctggacagcttccgaaagctgcaggcagaaaatcagaaattaggcgacaggctgaactatgcccgccagcgtgcaaatttgctcagtcaggaactgggagcgatggggccgccttcgcaacgtcaggttgttgctctgggccgtcaacggctggctgttcagcgtctggaagaacgccagaaaaagctgcagcagcagacggcgcttgtgcgtgctgaactgtaccgggcgggaatttctgcgaaagacgatgcgggagcaactgcccgtttagcccgtgaaacatcacgttataaccaggaactttcgaaacaggaggcgcggctgaagcgattgggggaagctcagcgtaggatgaatgcagcgcgtgccagttatgcccgttcgctggaggtgcgtgatcgtattgcaggtgccggagccaccaccacggctgcagggctggcaatgggtgcgccagtgatggcggcagtaaaaagctataccagcatggaagatgccatgaaaggtgtggcaaagcaggtcaatggtctgcgtgacgataatggcaaccgcactgcacgtttttatgaaatgcaggatgccatcaaggctgccagcgaacagttgccgatggaaaacggtgcggtggacttcgctgcactggttgaaggtggtgcgcgcatgaacgtcgcaaaccctgacgacagctgggaagatcagaaacgtgacctgctggccttcgccagtacggcagcaaaggcggcaacagcctttgagctgccagcggatgaactgtcagaaagtctggggaaaatcgcccagctctacaaaatccccacccgcaatattgaacagctcggtgatgcgctgaactatctggatgataacgccatgtcgaaaggggcagacatcattgatgtgatgcaacgtctgggcggtgtggctgaccgtctggattatcgtaaagcggcggcgctgggttccaccttcctgacactgggcgctgcgccagaggttgcagccagtgcagcaaacgcgatggtgcgtgaattgtccattgccaccatgcaaagcaagagtttctttgaagggatgaatctgctgaaactcaatcctgaagtgattgaaaagcagatgacgaaggatgcgatgggaaccatccagcgcgtgctggagaaggtaaacgcgctgccgcaggacaagcgcctgtctgccatgactatgttgtttggtaaagagtttggcgatgacgcggcgaaactggcaaacaacctgccggaactgcagcgtcagttaaaactgacagcgggcaatgatgcgcttggctccatgcagaaagaatccgacattaacaaggattcactttctgcgcagtggttgctggtcaaaaccggagcgcagaacaccttcagcagcctgggcgaaacgctgcgccagccgctgatggatattctgtacacggtgaaaagcgtcacgggggcgttgcgtcgctgggtggaagctaacccggaactgacaggcacactgatgaaagcatcggctgttgtggctgcggttaccgtcggcctcggcaccttagcggtggcgctggctgcagtgctggggccgctggcagtgatccgtctgggattctctgtgttgggtatcaaaacgttatcttccgttacggcagcagtaactcgaaccagcagcgcgttgtcctggctggctggcgcaccactggcactgctgcgacgcgggcttgcttcatcgggcaacgccgcaggtttacttactgcgccgttgtcgtctttgcgccgcacggcatcactgacgggaaatgtcctgaaaactgtagcaggtgcgccggttgcacttttgcagtctggattatccggtttacgtgctgttgctgtgatgtttatgaatcctctggcggtactgcgcggtggactggccgccgcaggcacggtgctgcgagtactggcatctggtccactggcgatgctgcgcgttgccctgtatgccatatctggtctgttaggtgctctgctcagtccgataggtcttgtggttactgcactggcgggcgtggcgctggttgtctggaaatactggcaacccatcaccgcatttctcggtggcgtggtggaaggattcaaagcggcggcaggtcccatcagtgcagcgttcgaaccgcttaagcccgtgttccagtggattggcgacaaagtgcaggcgctgtggggctggtttactgatctgctgacgcccgttaagtcgacctctgccgaactgcagagcgcagcggcaatggggcggcgattcggggaggcactggcggaagggctgaatatggtcatgcatccgctggactccctgaaatccggcgtttcctggttgctggagaagctcggcattgtcagtaaagaggccgcaaaggcaaaactgctggaaagcgtgacgcgtcagcaacctgcgacggtgaatgcagacggtaaagtgatgattccatcgggtggttttccgtcatggggatatggctttgcggggatgtatgacagcggcggctatatcccgcgcgggcagtttggcatcgtcggtgaaaacgggccggaaattgttaacggcccggcaaacgtgaccagccggagaaatacagctgcactggctgccgttgtcgccggaatgatgggcgttgctgccgcgccagcagagcttccaccgttgcaccccttggcacttcccgcgaaaggtggagaagcaattgtgagtcgcgcagccactgtgccgctcgttcaacggattgaggcaccgacgcagatcatcattcagacgcagccaggacaaagtgcgcaggatattgcgcgggaggtggcacgccagcttgatgaacgtgaacgcaggctgaaggcaaaagccaggagtaactacagcgatcaggggggatacgacgcatga

SEQ ID NO: 96745 - DNA, 414 bp, Enterobacter aerogenes
atgaatgcgtcatatgcagttattgaaaatgggatggttgtgaatgtcattgtctgggatggcgaggctgaattcacagtgccggataatcagcagctcattgatatttctgatatcagtgagcatccaggaattggctgggggtattcagacggggtatttactgcgccgctccctccggaacgttctcataatgaactggtagctgacgctgaacagaaaaaacagtcgctgatagacgcagcaatggccaatatcagcgtgattcagttaaagctgcaggccgggcgcaaactgacgcaagaagaaactacccgacttaacgttgtgctggattatatcgaggctgtgacggcaacagataccagcaccgcacctgatatcatttggcctgttttccctgcaagcagataa

SEQ ID NO: 96746 - DNA, 1920 bp, Enterobacter aerogenes
atgagcacaaaattttataccctgctgacggatattggcgcggcgaaacttgccagcgccgccgcgcttggtgtgccgctaaaaattacccatatggcggtgggcgatggcggcggagcattgccgacgccggacgcaaagcagactgcactggtaaatgagaaacgccgggctgcgctgaatatgctctatatcgacccgcagaacagcagccagattattgctgaacaggtgatccctgaaaacgagggcggttggtggatacgtgaagtgggcctgtttgatgagtcaggggcattgattgccgtggggaactgcccggaaagctataaaccgcaactggctgaaggcagcgggcgcacccagaccgtgcgcatggtgctgattaccagcagtacggacaatatcaccctgaaaatcgaccctgctgtagtactggcaactcgcaagtatgtggatgacaaaatatcagagcacgaacagtcacgacgtcacccggacgcctcgctgaccgcaaaaggttttactcagttaagcagtgcgaccaacagtgaatccgaaatactggccgcaacaccgaaggctgtgaaggctgcatatgatcttgcagcaggtaaagcatccgccagtcacacacacccgtggaatcagataacaggtgtacctgcagcctcgctgacggtaaaaggcactgtgcaactcagcagcgccactaacagcacatcagaaacgcaggccgccactccaaaggcagtgaaggcggcatatgaccttgcagcaggtaaggcacctgtcagtcacacacacccgtggaatcagataacggatgtgcctgcagcttcactgacggtaaaaggcaccgtgcaactcagcagtgccactaacagcacgtcagaaacgcaggctgccacaccaaaggcagtgaaggcggcatatgaccttgcagcaggtaaggcacctgtcagtcacacgcatccgtggagccagataacggatgtgcctgcagcttcactgacggtaaaaggtaccgtgcaactcagcagcgccactaacagcacgtcagaaacgcaggctgccacaccaaaagctgtgaaggctgtatatgaccttgccaatggaaaacaacctgccgacgccacactgaccgcactggcaggccttgccactgcggcagacaaacttccgtattttacggggaatgatacagccagcctgacaaccctgactaacgttggacggaatattctggataaagcaagtacacaggcggttattcaatatcttggtctgagcgatgcaagtggatacgttggacgctggctgaatacccgggttttcacctcatcaggtacgtacaccccgacgccaggaacaaaacggatcagggtcacaataacgggcggcggtggcggagggggcggctgcaaggctacatccaataatgaaacgtttttcggcgctggcggtggggccggtggaacaataatttcaataatgaccccaacacagaatagttatccagtcactatcggcgcaggtggggccggtggtgttagtgcgacgaacggcaccagtggcgggaatagcgtattcgcatcgttaattgctcctggtggcgcaggtggcgggaaagtgggagttacaaacacaaacggcggtaacggaggtgtgccgagtactggcgatatccgcatcactggtggaaatggaggcgacggtcagtccggaaatatcggcgtcagcggtgaaggcggaacatcgcactggggcggcggtggacgcgcaggcgctggcggtggtgttagtggtaaggcatatggttcaggtggcggtggcgcatacgatgccggttatagcggaaccagtatgacaggcgggaaaggtgctgctgggatttgtattatcgaggagtttgcataa

SEQ ID NO: 96747 - DNA, 606 bp, Enterobacter aerogenes
atgaatagtctgctgccaccgggttcaacttcactggagcgccgactggcgcaaacctgtagcgggatttctgatttgcaggtgccgctgcgtgacttgtggaatccggctacctgtccggtcagtttcctgccttatctcgcctgggcgttctctgtggatcgctgggacgagggctggacagaaagcgtcaagcgccaggtggtgaaggatgctttttatattcatcagcataaagggaccaccagtgccgtgcggcgggtggtggagccgttcggctttctgatccgcattattgagtggtggcagaccggagaggcaccgggcacgtttcgtctggatatcggcgtgcaggaccagggcatcactgaagatacctatctggaacttgagcgactgataagcgatgccaaaccatgtagccgtcacatgagcggcatgtccatcaacctgcagaccagcggcccgcattgggtgggagccgccagctatcttggcgaagaaatcacgatctatccgtatatcaacgaaacaattatttccggcggcaccgcgcatgaaggcggggcggtccatgttattgacacaatgagagtgaatccatga

SEQ ID NO: 96748 - DNA, 909 bp, Enterobacter aerogenes
atggcagtgattgacctttcgcagttgcctgcgccgcagattgtcgatgtgccggactttgagacgctgcttgccgaacgcaaggccgaatttgttgcgcttcatccgaaagatgagcaggaagccgtgatccgcacgctggaactggaatctgaacccgtcaccaaattgctgcaggagaacgcttaccgtgagttgcttctgcgccagcgcattaacgaagccgcgcaggctgtgatggtggcttacgcgatgggcggcgatcttgaccagctcgctgccaactacaacgtgaaacgcctgacggtgacgcctgctgataatgacgctgtgccacccgttgcggctgtgatggaaagcgatgaagcgttacgcctgcgtgtgcccgcagcctttgaagggctttctgttgcggggccaactgccgcttatgaatttcatgcccgaagcgccgacggtcgggtggcggatgccagtgcaaccagtccggcacctgcagaggtggtactgactgtcctgagtcgtgaaggcgacggaacagcagaaaaagacttgctggatgtggtggagaaagccctgaacagtgagaacgtccgcccggtggctgaccgtcttacggttcgcagcgcagaaatcattccgtatcgcgtggaagccaccatttttctctatccgggaccggaagcagagccggtaatggcagcggcaaaagccagtctgcagaagtacattgccagccagacgaggcttggtcgggatattcgccgtagcgccatctttgctgctctgcatgttgagggtgttcaacgtgtggaactggcttctccgctggcggatgtggtcctgaacaaaacacaggcggcatcatgtacgcagtggagcgtaaccaacggaggagcggatgaatag

SEQ ID NO: 96749 - DNA, 360 bp, Enterobacter aerogenes
atgacgctttatatcgggatgaacaataccagcggtaaagccattactgatattgaccatctgcgtcagtcggtgcgggacattctactgacaccgcagggtagccgcattgcccgtcgtgaatatggttccctgctgtcgacactgatagaccagccacaaaatccggcattacgcctgcaggtcatgtcggcagtgtatgtggcgctgagtcgctgggagccacggctgacgctggattccatcaccattaaaagcaattttgacggttcaatggtggtggggctgaccgggcggcgtaataacggtgtgcctgtttccctttccgtatcaacaggagcagagaatggcagtgattga

SEQ ID NO: 96750 - DNA, 579 bp, Enterobacter aerogenes
atgaacgcacaattaaccgaaatcatgcgccttatcaccaatctgatccgcactggtgtagtcaccgaagtggaccgggaacactggctttgtcgggtgaaaacgggcgaccttgaaaccaactggattaactggctgacgctgcgcgcgggcaaatcgcgcacctggtggaaaccgtctgtgggtgagcaggttgtgctgttcagccttggcggcaatctggaaaccgcgtttgccctgcctgcggtctactcaaaccagtttccgccaccttcaggctctgaggacggcaacgtgacggaatacccggacggcggctggtttgaatacgaacccgccaccgggcgctggtatgtcaggggcatcaaatcaatggtcattgaggccgctgacaacatcaccatgaaaaccagtgagtttgtactggaggctgaccgcacgcgcattaacagcgaagtggtgatcaatggtggcgttacccagggcggcggagcgatgagttctaacgggatcgtggttgatgcgcatcagcatactggcgtcctgaaaggcggcgatacaaccggaggcccggtatga

SEQ ID NO: 96751 - DNA, 447 bp, Enterobacter aerogenes
gtggctgaactgcagaaagtggacgactggctgagtgccttgctggcgaatctggaaccagccgccagaagccgcatgatgcgccagctggcgcaggaactgcgccggacacagcagcagaacatcaggatgcaacgcaatcctgatggcagcagctatgaaccgaggcgagtaacagcacgcagtaaaaaaggccgtatcaaacggcagatgtttacaaaacttcgcaccacaaaatacctgaaaaccgccgccagcgaggactctgccagcgtgcagtttgaaggtaaggtgcagcgcattgcccgcgtccaccattatggcctgcgtgatcgcgtcagccgcaaaggaccggaggtccgttacgcagagcgtcgccttctgggcgtaaatgatgatgttgaggcaatgacccgcgacatgattctgcaatggttggcggggtga

SEQ ID NO: 96752 - DNA, 432 bp, Enterobacter aerogenes
gtgaacaaaccacaatccctgcgccacgccctcaataaagcggtgccttatgtccgcaataacccggacaaactgcatctgtttgtggataacggttcgctggttgccacgggggccagctccatgtcgtgggagtaccgttacaccctgaacgcggtgattgaggatttcagcggcgaccagaatctgctgatggccccggttttgctgtggctgagggataaccagcccgatgccatcaataacccggcgttacgggaaaaactattcacctttgaggtggatattctgcgcaacgatgtctgtgatatcagcctgaacctgcaactgacggagcgtgtgctggtcagcactgacggtagtgtgtcgagtgttgaagctatagcggaacctgatgaacctgaagaaatgtggacggtgaaacgtggctga

SEQ ID NO: 96753 - DNA, 429 bp, Enterobacter aerogenes
atgaaccggttgctgctggttgtgctggcgttattactggcggcgctgggctggcagacgtggcggctggctgatgccagccagaccattagcacgcaggcagacgagctgcagagcaaaagccaggcactggcaaagagcaacagccagcttatcagcctgtccattctgactgaaaccaataaccgggagcaggcgcggctctatgccgaagcagaacagaccagcgcgctgctgagacaacgacaacaccggatcgaggaactgaaacgtgagaacgaggatttacgccgctgggctgatactcctttgcctgctgacattatccggctgcgggaacgtccgacgctcaccggaggtgcagcttaccgtcagtggttgtccgcgagtgacgccgtgttggctggatcaggcagcgccgcgcactaa

SEQ ID NO: 96754 - DNA, 378 bp, Enterobacter aerogenes
atgaaaaagaaattaatcagcggactgtttctgatgttatggatggcgctgttaatcgcagcaatggtgtatccgcaggggatttttccggtactggcagcgtccggcgtttgggtagcctgtttgctgacatgggcggtaattccggtagcactggctgcgttaattaagaatggcccgctctggcaggagttaagggcatctttactgaagacaattacccgaaaagaaaacgtatttatcagttgggtgatgcgattgctgattgttgtaagtctcgcctggacggggtgggctattaccctggtcttttatctactgaccgttattgccttctggatcacccgtaatcagatggcgcaacaggtagcagcatga

SEQ ID NO: 96755 - DNA, 216 bp, Enterobacter aerogenes
atgacgcttgagcgaatcagcgcctttatcacgtactgcatcgccgttgtgctggcctggctgggcgatttgtccatcaaggatgcctcaacgctgggcggcctgatgattggtgtgctgatgctggctatcaactggtactacaaacacaaagcctaccagcttctgcgcgacgggcagatctcgcgggaggactatgaatccatcaatcgttaa

SEQ ID NO: 96756 - DNA, 834 bp, Enterobacter aerogenes
atgacagtgaaagcaaagcgttttcgcatcggggtggaaggtgccaccaccgacggacgcgaaatccagcgtgaatggctggaacagatggcagccagctacaacccggcggtgtataccgcgctgattaaccttgagcacatcaagtcttatctgccggacagcacctttaaccgctacggcaaggtgacggcgctgtttgctgaagaaatcacggaaggtccgctggcaggcaagatggcgctgtatgccgacgttgagccaacggagtccctggtggaactggtgaaaaaaggccagaaattattcacctctatggaagtcagcccgaagttcgctgatacgggcaaagcctacctggtcggcctggctgccactgatgacccagccagtctgggcactgaaatgctgacattcagcgccagtgcagcccataacccgctggcaaaccgcaagcagaatcccgccaatctttttaccgctgcagaggaaacggtgatcgaactggaagaaatccaggatgacaaaccgtccctgtttgcccgtgtcacggcgctgtttaccaaaaaagagaagtccgatgacgcccggttctctgatgtgcataaggccgtggagctggtcgccactgagcagcagaacctgagcgcacgcaccgaaaaatccctgtctgagcaggaagaacgcctgtctgagctggagactgccctgcaggcacagcaaaccgcctttaacgaactggtggacaagctgagtcatgaagacagccgccaggactaccgccagcgtgcaacaggcggtaacgcccccgctgacactctgaccaattgctga

SEQ ID NO: 96757 - DNA, 1758 bp, Enterobacter aerogenes
atggcacccctatcaattttagaacgtttacaaaacgctgctaacaggcaagatttggctagtatcttgaatcttaaaactgcttttcttacggatgttatttatcgtttaaaagctgaaacgcagtatacacaatttactatccctaaaaaaaacggagcgccgagagtcatatcagcacctaccactaagctcaaagatattcaacgtagattagctgatgttttatatttatgtcgtgcagaaatttataaaaaatataatattaatccagttttatctcatgggtttgaaaaagaaaagtcaattattacgaatgctgaacggcatagaggtaaaacgctactactaaatatagaccttgaggattattttgatagttttaattttggacgtgttagaggttttttcttatcaaacagagattttagattaaataatactgttgctacaacgatcgcacaaattgcatgttttcagaatggacttcctcaaggaagcccatgctctccaattataagtaacttaatcagtggaattcttgatataagattatcaaagttagcaaagaaatacggatgcaattattcacggtatgctgatgatcttacattttcaactaataaaaaaacatttccaaaagagattgctgatgttggcggagagtctgtaaccctaagtccaactttaattaaagagattataaaggctggctttaaaataaatgataaaaagacaagggtttgttataaaacatcacgacaagatgttactgggttgactgttaataaaaaagtgaatgttggcaaagaatatgcaaaagtaacgcgtgccatggctcattctctttataaagatggttcttttgttattgttactgaatcaggaaagattgaaaaaggtacatgtgctaaattagaaggccgttttggatttattgactcaatagataaatataataatttaaaactaaagaaagcaagacagttggaaaagtaccaaagtgtaaatcatggattaaactacactgcaaaattgaattcgagagaaaaagcctacagttattttctatactataaaaattttcatggaatggaaatgccaacaatactcactgagggtaaaacagaccgtgtatatttaaagtgtgctttgaagtcattggcgaattcatatcctttattgtttaattcttctgatgatagctctaaaaatgagtatcgtgttaatttttttaaagcaactgaaaaaacaagctattttcttgacatttctggcggtgctacagacttcaaaagatttatattaagataccaagaacaaaaaaagaggttcgagaaatttaaaccaaagcaccctgttattatgcttcttgataatgactcaggccctaaagatttattaaatcacttaaaggataaagtaaaaaattgtccaaatgatgttgatactattcgtaaggcaaggtatacccacatatttgacaatctctatttgttattaacaccattgcttcctggagggaaagagtcttgtatggaggatttatttgatagcacggtactatcaaaggtgcttgatggaaagacatttaataaatctaatgatacggatacaaaaacagaatatggtaagcatgtgttttcaacaaaggttataaaggcaaattgtaaaacaattagttttgaaaagtttaaagttatttttgatggtattgaggaaattattgcagattattcaaagaggtgcaaagtataa

SEQ ID NO: 96758 - DNA, 741 bp, Enterobacter aerogenes
atgactgtgcacaagctctctggtgcgtttttccacgatatgcaggttgagtggccctgccctaactgcaatcagaaaaccctacagatcattaaagaaagtttcgtctcgtatgacacacatgatacccgaaaattccgcagtgaagattggtttgaaccagaaatggattcatctattttcagttgcatggcccgctgttcaagaatgcaatgtggtgaagttgtggcctgtactggtaagagtggatgggaacaaggttgggatgaagaaagaaatgatattgagtactatcaatggcacagacctttcaccttttacccatcactgcatcctttcgaaatacctgaaaaatgcccagaagaaattaccgaaccgcttgaagcctcattttccattttcctaatacagcctggcgcagcagcaaacctaattcgaatttcagttgaaagaatgctaaccgctatggatgtagctgaacgtaatgataatggcaaacgcataactctacaccaccgtttagggatgctacctgaattatacggatcgttttcaagacctcttatggcaattaaatttttaggaaatgccggaagccatacctacgatgaagtaaaagtcaaagacattgaggatgcttttgagattatggagtacgtcgtcaatgacttgttctccggtcgcaaagaatctgtcgaagtattgacgaaacgattaagtgaaaaattcaaagaaaactga

SEQ ID NO: 96759 - DNA, 234 bp, Enterobacter aerogenes
atgcgcattgaaataatgatcgataaagagcagaagattagccagtctatcctggatgcccttgaatccgagctttaccgcaatctgcgccccctgtatccaaaaacggtaattcgtatccgcaaaggtagctctaacggtgtggaactgaccggactgcaactggacgaagaaagaaaacaagtgatgaaaattatgcagaaggtgtgggaagacgacagctggctgcattag

SEQ ID NO: 96760 - DNA, 189 bp, Enterobacter aerogenes; identical to SEQ ID NO: 10548

SEQ ID NO: 96761 - DNA, 2415 bp, Enterobacter aerogenes
atgagccatgctgatatgaacaactgcagcggctttaacgaggccgccgcagcattctcatggaacagcccgaaaaaggctattaacccttatctggacccggcggaagttgcgccggtttctgcgctttcaaacctgatcactctgtacgctgccgataacgagcaggaacaactgcgcctcgaggtactgagtgatcaggtctgggagcgttatttctttaatgaatcccgtgatcctgtccaacgcgaaatggagcaggataagctcattagccgggcaaagctggcgcatgagcagcagcgttttaatccggacatggtcatactggcggacgttaacgcccagccttcccatatcagcaagccgctgatgcaacgtattgaatacttcagcagcctgggcaggccaaaggcttattcccgctatttgcgtgagacgattaagccatgtctggaacgactggagcatgtacgcgagagtcagctatccacttcttttcgctttatggcaagccatgaagggctggacggcctgctgaacttgcctgaaatgagtcaggatcaggtgaaacgcctgtctactcttgtcgctgcgcatatgagcatgtgtcttgatgccgcttgtggtgatttgtacgccaccgatgatgttaagccagaagaaatccgcaagacatgggaaaaggtggctgcggaaaccctgcgactggatgtcataccgcctgcgtttgagcaactccgccggaaaagaaaccgccgtaaacccgtgccctatgaactcattccgggttcgctggcgcgtatgttgtgcgccgactggtggtaccggaaattatggaagatgcgttgcgaatggcgggaagagcagttgcgtgctgtttgcctggtcagcaaaaaagcatctccctatgtcagctatgaagccgtgatgcataaacgtgagcagcgccgtaagtcgctggagtttttccgttctcatgaactggtgaacgaagacggcgacacgctggacatggaggatgtggtaaacgccagcagcagcaaccctgcgcatcgccgcaatgagatgatggcctgtgttaaaggtctggagcttatcgcggaaatgcgcggtgactgcgccgttttctacaccatcacctgtccgtcacgtttccattccacgctaaataacggcaggcccaacccgacctggacaaatacgacggtaagacaaagcagtgattatctggtcggcatgtttgctgcatttcgtaaggcgatgcacaaagccggattgcgctggtatggcgtgcgggtggctgagccgcatcatgacggtacagttcactggcacctgttgtgttttatgcgcaaaaaagatcgccgcaccattactgctttgttgcgtaagtttgccattcgtgaagaccgcgaggagctgggtaataacacgggaccacgctttaagtctgagctgataaacccgcgcaaaggtacgccaacaagctacatcgcgaaatacatcagtaagaacattgacgggcgtggtctggctggcgagatcagcaaggaaacgggtaaatccctgcgtgataacgctgaatacgttaatgcctgggcgtctctgcatcgtgttcagcaattccgcttctttggcattccggggcgtcaggcttaccgtgaactgcgattgctggctggtcaggcggcaaggcaacagggggacaaaaaagcaggtgcgccggtactggataacccgcgccttgatgcaatcctggctgctgctgatgctggttgttttgccacctacatcatgaagcagggcggcgtactggttccccgcaaatatcacctcatcagaactgcttatgaaatcaacgaagaaccgaccgcatatggcgatcacggtattcgtatttatggcatctggtcacccattgcagagggcaagatctgcactcatgcggtgaagtggaaaatggttcgtaaggccgttgacgttcaggaggcggcagccgaccagggcgcttgcgccccttggactcgtggcaataactgtccccttgctgaaaatttgaaccagcaggagaaagataaatcagctgatggggacaccagaacggacattacctgcatggatgacaaggagttgcacgattatctgcacagtatgagcaaaaaagatcgccgggaactggcagcaaggttacgcctggtgaaaccgaaacggcgtaaagactacaaacagcgaattacagaccatcagcgacagcagcttgtctatgaactgaagtccagaggatttgatggcagcgagaaagaggtcgagttgctccttcgcggtggcagtattccgtcaggagcaggcctgcgtatcttctatcggaaccagcgtctgcaggaggatgataaatggcggaacatgtattaa

SEQ ID NO: 96762 - DNA, 858 bp, Enterobacter aerogenes
atgagcaccatcctgaaatgggcgggaaataaaaccgccattatgtccgaactgaaaaaacatcttcctgctggcccgcgactggttgaacctttcgcgggttcctgtgcagtgatgatggagacggattatcccagctatctggttgcggatattaatcctgatttaatcaacctctataaaaaggttgctgctgattgtgaggcgtttatatctagcgccagaattttgtttgaggaagcaaacagggaggtggcttattacaacataaggcaggagtttaattactccactgaaattactgatttcatgaaagcggtatatttcctgtatctcaatcgtcacggttaccgtggtttatgtcgctataacaagagcgggcatttcaacattccctacggtaattataaaaatccgtatttccctgaaaaagaaattcgcgcatttgcagaaaaagctcagcgggcaacgtttatctgcgccagctttgatgaaacgctggcgatgttgaaggcgggggatgtggtgtattgcgatccgccgtatgacggcacgttttccggttatcacactgacggcttcactgaagatgaccagtatcacctggcatccgttcttgaacatcggtcatcagaaggacatccggtcattgtttctaacagtgacacatccctgatccgttcgctgtatcgcaattttactcaccactacatcaaggcaaaacgcagcatcggcgtagcagctggtgagagtaaatctgcagcagaaatcatcgctgtttctggggtgcgctgctgggtgggatttgatccttcgcgtggcgtggatagttctgccgtgtacggagtgcgtgcatga

SEQ ID NO: 96763 - DNA, 228 bp, Enterobacter aerogenes
atggctgatgcaatggatctcgtacagcagcgcgttgaagaagaacgccagcgccatatctgtgctgcccgtgctaaaacaccgggcgtgtcccgcgtgctttgcattgagtgtgaagcgccaattccgccagcacgccgccgcgccattccgggtgtgcagctttgcattacctgtcaggaaatcgcagagctgaaaggtaaacattacaacggaggtgctgtatga

SEQ ID NO: 96764 - DNA, 234 bp, Enterobacter aerogenes
atgcgtaatattgaaaccctcacgactaaaaccggaccggatgacgcagggcttaatattttactgacagaggctcgtctggaagaacgccgggcaagggctgaagcaatggcagctcgccttgatagcctggcgtgtcatatcacatcccgccagctaaaccacgtcgaagcggcagaactgctgcgtgtgactgctgaagcaatccagaacgaagcgcaggagatccactaa

SEQ ID NO: 96765 - DNA, 342 bp, Enterobacter aerogenes
atggcaattaatggcgctgcggcgactgttccattaagccccggcgaacgcctgaatggacttaatcacatagcggaattaagggcgaaagtttttggcctgaatattgagtcagagcttgagcggtttattaaagatatgcgtgacccacgggatatcaataatgaacaaaataaacgggcactggctgctatattctttatggcaaaaattccagctgaacgtcatagcatcagcattaatgagctgactactgacgaaaagcgggagctgattaaagcaatgaatcattttcgtgcagtggtgagcttatttcccagacggctaaccatgccgaattaa

SEQ ID NO: 96766 - DNA, 297 bp, Enterobacter aerogenes
atgcttacgaaagaaccatcatttgcatcgctgctggtaaaacaaagcccggcaatgcactacggtcacggctggatcatgggtgaggatggtaaacgctggcatccatgttattcacaagatgaattgctgtctgaagtgaccacgaggaaacggagaaagtccaaatgtatgcggcagaaagtgaagtggtttatcagtttcgttacagaggggatagttattcagtacctgaagatgatttgctctgttgttatccgtcgttgtcgggcgatggcagttactttttcacgttaa

SEQ ID NO: 96767 - DNA, 510 bp, Enterobacter aerogenes
atgtttgattaccaagtttccaaacatccacattttgatgaagcctgtcgtgcattcgcactgcgccacaacctggtgcagctggcaggacgtgcaggaatgaatgtgcagattctgcgaaacaagttgaaccctgctcaacctcatttattaaccgcaccagaaatctggctgcttaccgatctgactgaagattcaacgctggtagatggttttctggctcagattcactgcctgccatgcgtaccgattaatgaggtagcaaaagagaaactgccgcattacgtcatgagtgcaaccgcagagattgggcgtgttgctgctggtgcggtatctggtgatgtgaaaaccagcacaggtcgtcgtgatgcgatcagcagcattaactctgtaacacgactgatggcgttggctgctgtttcattgcaggcccgtttacaggctaatcctgcgatggcgagtgcagttgataccgtgactggcctcggtgcttcattcggtttgctgtga

SEQ ID NO: 96768 - DNA, 204 bp, Enterobacter aerogenes
atgacacctaacatttcaattactctgaatacaccacatgtcacaatcgaacgttatagcgaactgactggcctttctattgatacgattaacgacatgttggctgatggccgactacctcgtcatcgtcttcgtaaagacaaaaaacgtgaaaaggtaatgattaacctggctgctctgactgttgatgctttgtctgcttaa

SEQ ID NO: 96769 - DNA, 570 bp, Enterobacter aerogenes
gtggatttcaatagcggcggtaagaaagccatagaacgtttggttgaagcatacgggttcggtacccgtcaggctctctgtgatcatttaggtgtttctaagagcaccatggcaacgcgttatatgcgtgatatttttccggcagattgggtaatccagtgcgcccttgaaacgggtacctcgcttaattggctaacaacagggcatggttcaaagcaagcatcagcaaatacaaatactatagaagtagtaaaatatttattgtctgatggagcattgcaggaagacggtttttatatttttgataagggatttctaccctctacgtttaaaaaaccttttgtcatcacagataacaattctgaatttatttgtgataaagaatttgatgatatacgtgatggtaaatgggtaataagtattgatggcgaaataacaatccgcgacatcactcgtttacccggtggaagaattttcgttgaaggtggaaacagagccttcgagtgcaagatagaagatgttgaaataattggaaaaattataagcttaacagttaagtatgttagataa

SEQ ID NO: 96770 - DNA, 183 bp, Enterobacter aerogenes
atgcttggtaagtttttttttgtggttttatcatgctctttgctattaaacccactaactacctatgctaaaaattatccttgttctgggaaaaagggaggtgtctctcactgtacctctgatggaaaatttgtttgcaatgatggaaccatcagtaaatccaaaaaaacatgcatcaaataa

SEQ ID NO: 96771 - DNA, 597 bp, Enterobacter aerogenes
atgaccatcatcactaaaaaaagtctggtagcggcgggaattttatctgcgctcatcaccgcaaatgttgctatggcagcggatgttcctgccggggtgcaactggcggataaacaaacgctggtgcgtaataacggggcagaggtgcaatctctggatccgcataaaattgaaggtgtaccggagtccaacgttaaccgcgatctgtttgaagggttagtgattggcgatcttaacggccatcctgttccgggcgttgccgaatcgtgggataacaaagattttaaagtctggactttccatattcgcaaagatgccaaatggtctgatggctcgccggttaccgcgcaagatttcgtttatagctggcagcgtctggccgacccgaaaacagcatcaccgtacgccagctatctccagtacggccatgtcgccaacgtcgatgagattattgccggcaaaaaaccagcaaccgatctcggcgtcaaagcgatcgacgacaaaacctttgaagtcaccctgagcgagccggtcccttatttctataaactccttgtccatccatccgtttccccggtaatgactccaacttattga

SEQ ID NO: 96772 - DNA, 396 bp, Enterobacter aerogenes
atggaaaatatgatgaaaactatgcgtgagcattttcccacgagaacagtggtgatcgagcagtctctggatatgtttggcgtcaaacgaaatgaggacgggacgttactcttcccccgtcactccgataaacgttttcccattgcacgtatccgtaagcgactggcggcttatggctggcgaggcgaacgtctgaataaggaggtagcgcgtatcgtcgcgggccctgatatttacgctgagagaaatgaatacagcattattttcccttacggatgggagaagaagcagctgacgcgtgagatgcggcgaatgtttccccgtaagacgggccgacgtgtgctgattatgctggatgaattacatcatttttctgacttgcgggagaagccgtga

SEQ ID NO: 96773 - DNA, 612 bp, Enterobacter aerogenes
gtgacgctgacagaaaaatcgggccatctggcatggtgtgccctggtggcgcttgcgctggccaggcaggagggtggcgttctctcgccggcacaggaaaatctctttctcatccgctggctggcgactgcgctgaagcaacggcgtttcccccgggagataaatccggacatcgagtggctgttgaaacagaggcgccagctgggcgtcagcgcgaagctggccagcaagctgaattacctctggcgttcctgcaccggcgagttgtccgagcagaacgacctgttccggctgacgtatgctctggaaacagcgaaagatatgcactggaactaccgtctgctgagcgatcgggaatggtcaggccgaaatgctgtggcgctcagtgcgggcgtgaacggcatttatctctcacgggccaacctcgatgtcgcttttgacgacagcggccgacagataaatccgcttacagcacgtctgacgggtaacgtagtgggggtgatgaaggtgtttaatcgctgtggctggcaggcagagcctgagtctggtgcctccctgccccaccagtattctctgatggccggacagggagtgccaggaaagggggattag

SEQ ID NO: 96774 - DNA, 951 bp, Enterobacter aerogenes
atgaagaagaaaccaggtacacccacaccccatgacgcgacatttcgccagttcctggcgaatcccgatgtcgcccgtgacttcatgatgttacatctcccggctgaattacgcgcgctgtgcgatttgaccacgctgaagctggagtccggtaccttcgttgaggacgacttacgtcagtacgccagcgacattctctggagcatgaaaaccaccaccggcgatgacgggtacatccatctgcttctggaacaccagagttcggcggataaaaatatggcctttcgtcagctcagatatgctgtcgccgccatgcaacgtcatcttgaagcgggtcataaaaaactgccgctggtcatcccggttctgttttaccacggcagccggagtccgtacccgttctccacgaactggctggattgtttcagtaacccggaacaggccggaaaagtatacacgacaggattcccgctggttgatgtcaccgtcatcgatgatgatgagataatgaaccacagacggatggccgcactgaccctgctgatgaaacatatccgccagcgggacatgatggaactgctggacaggctaccccgggtaatggtggaatggatttcccccgaacaggtgcgcgttctgataaactacatggtaaatgcaggtgaagcgcctgcacctgaatttatgcgggcgctggcagagcgtctgccgcaacacgaggatgaactgatgaccatcgcacaacagcttgaacagattggcatcgagaagggcctgcagcagggtctgcagcagggcctgcagttaggtgaacaacgcggtattgaaaaaggcgagcgcgaagccacccttaaaattgcacgaaccatgctgcagaacggaattgaccgcaataccgtcatgaaaatgaccggtctgactgaagacgaactagcgcagatccgccactaa

SEQ ID NO: 96775 - DNA, 201 bp, Enterobacter aerogenes
atggctgaaagaatatctcaaagagaacaggagttgttggaggaattcctttgtactgttctggatgatttcagtaaaggcagtataacccaccatcaggctgtcagcggtatcgcgacattatatacagctgccacagaaggacggagagaagaggctttagaatatctgagagagggaagaaagttgctaaggcagtaa

SEQ ID NO: 96776 - DNA, 633 bp, Enterobacter aerogenes
atggcctggatagttggatttatatcgcagaaaggtggcgtcggtaagagcacagagtcaagggcactggctcgagaagctacttcctgtggtatcaaaacaaaactcgcagatctcgaccttgagcaaggaacgagctctgattggcatcgtcggcgcttagctgctggtttgccccctgctgcctctgtcgagttattcgctacagcaaaacaagctatagattcaactggcgatgcagaactcctgatcttagacggacctgcacgtgccagtaaggggactctagaaatcgctaaggtggccgatctcgtagttcagccgactggagcttcacttgatgacctaatccctgcaatcaaggtctttaacgcactggtaaaagatggaattccgcgatccaggctggttttttcattaagcagagtcggaactgaggctgaagaagctgatgctcgtgcttatattagcgaggctggctatgaaacgcttgctggttgtttattcgagaaaccggcttacagaaaggccatgaattctggtttagctgtgactgaaacacgctacaagggactgaacgaaagagccgacgagcttatccaggccctgatcgataaaattggagaagagtaa

SEQ ID NO: 96777 - DNA, 390 bp, Enterobacter aerogenes
gtgagcgaggaacggaagaagtttacagtttatcttcatccggaccaggtggcagacaaaacgtccctggatattatcgactctgtgccgcggaatgaaagaggggaactgtatcggagagcgcttatctctggattagcccttcataagcttgatccgcgacttcctggtttgctttcactgatgcttgatagccatttcactgcggaaagtttggttggtttactcagccagacaacaggatggaaaccatctcaggcaagaatccgggatgttctggaggtactcggagtagggcagtttacaccagtaactgtgccagagagcgtcaaagatgatgagcaactaaggatggaagaggcccggttaaaaatgaaaaaactattctga

SEQ ID NO: 96778 - DNA, 1275 bp, Enterobacter aerogenes
atgtttgccctggctgatgttaacagtttctatgcctcctgcgagaaggtgttccgccccgatctcaaaacccgccccgtcattgtactcagtaacaatgacgggtgcgtcatcgcacgcagcgccgaggcaaaagccctgaatattccgatgggggagccctggtttaagctgaaggccacggctgagaagtcaggcgtggtggtgttctccagcaattattccctgtaccactcgatgtcggagagggttatgcgctgcctcgaggccctctccccccgcgtggagcagtacagcatcgacgagatgtttctcgacgtcgccggcatcgacagctgcgtgacgtttgaggacttcggtcgtcagctgcgcgaatatgttcaccgccatacggccctgaccatcggcgtcggcatggggccgaccaaaacgctggccaaaagcgcgcagtgggcgtcaaagcagtggcgccagttcggtggcgtactggccatcaccccggataatccacgccggacagcaaaactgctcgccttgcagccagtggaagaagtctggggcgtgggcagaaaattatcaggtaagctgaacataatggggataagcaccgcgctgcagctggcgcagacaagcccgtcattcatccggaagcatttcagcgtggtgctggagaggacggtcagggagcttcagggcgaaagctgcatcagcctggaagaagcgcctccgacgaaacagcagattgtctgcagccggagctttggcgaacgtgtttcggacttcttcgcgctgcgtgaggccgtctgcagctatgcagaacgggcggctgagaagctgcgcggcgagcggcagttctgtcggcatatcggggtgtttgtgaaaacctcaccgtttgccgcgaacgagccgtattacagcaatatggcgagcgaaagcctggtggtaccgacgaaggatacccgggatatcatcgccgccgccgtgcgggcgctgaaccgtatctgggttccgggtcatcgttatgccaaagcaggcgtgatgctgaacgacttcacgccagtgggcgttacgcaactgagcctgttggatgacgcacggccacgggaaaacagcgaagccctgatgaaagtcgtggacggtattaaccattcagggctggggaaagtgtggtttgcgggacgaggtatcacgcctgactggcaaatgaaaagagaaatgctttccccagcatatactacacgctggggtgacatccccgtcgccaggatcagctga

SEQ ID NO: 96779 - DNA, 450 bp, Enterobacter aerogenes
atgaagcgtaacgaacctgttttctcccggacgcagctgcaggcatgtccggcgtcacccgcgccggtggctatcccgttgtttggcgaagcctgcccggccggctttccgagcccggctggcgactatgtcgaagcggaacttgatttgaacagcctgtgcatccggcatccgtctgccacctactttctccgcgccagtggagagagcatgcgcgacctcgggttgtataacggcgatattctgattgtcgaccgggcagaaaccgcgcaggaaggcgatatcgttattgcggaaatggacggggggtttaccgtcaaacgtctgcggctgcggccccgcccggcgcttgagccaatgaacccggattacccgacgctgtacccggaaaccctcaccctgttcggggtggtgacgcacttcatccaccggacccgggcgcgcctttaa

SEQ ID NO: 96780 - DNA, 243 bp, Enterobacter aerogenes
atgctacaggtttcagtacgtttttctccggaacaggtaaaggccatgcccgccggggcatttgccgctctgcagcaggaaattgagcgacgcctgacgccgcattacccgtcactgtggctcaacgtcagcaagggatcacagagcagcctcgatgtcagcggcgcgcgcagtgatcgtgagaaggcggatgtgatggaaacgctggaggctatctggcaggacgacagctggctgccgtga

SEQ ID NO: 96781 - DNA, 222 bp, Enterobacter aerogenes
atgaactacgacggacacgaagggctgcggcgcgatatcgccggactggcgaacagcatgtgcgacctgaaaaccaccctgaacgtgctggaagagaaataccactaccggcatgacgggctgccggaacggctggctggcgtgagcctgcgccgtatcagcgtcctgatggacgaggctttcaatatcgccctgttgcttgatgaatcattcagagactga

SEQ ID NO: 96782 - DNA, 411 bp, Enterobacter aerogenes
atgctgtacggaacccgtaaagagctgaacaaaaggctgaaacgcatgtttggcaacgaggagcgcattgccctgctggtctggacgaagcaggacgttatggcgcaggtggaaaatatgacggaggccgaagccgacatgctgctggcacttatcggacgcgcgggaacgggagagcataccgaagacggcgtgtcgttccgcaccgttcaggcgctgtatgccgggatttgcacgaacaccccgcgcgtgagcgtccccgccgatacgctgtcgcgtatcacggatattgccgcaagggctatcagcggggaagacgcacaggcatggccccttgtgcgacagcactacccgagcgttgccgacgctcagaaagatattgcctggctggaaaacgaaatcgccgcttaa

SEQ ID NO: 96783 - DNA, 762 bp, Enterobacter aerogenes
atgagaaatgacaccctgaacgcgctgatactgcgccacggcgaccggatgctacaggatgcgggctggccgtcctgcgtggatatgatgcccgtcgcgcccgaacagatgcccggctggcttgtcgcctgcggctcgctcgatgccgcgcaaatcctcgcgctggtcacgcatctttgccagccgctgacgtatggccgggcggcgctgctgaccgccagcgcccggcgactgacgggaacacctgcccggctgtatctgtaccccgcgaaacgcgatacacacccggaacgcctggccgatgccatgacgattcacctgccgtttgcgcaggaatggctgactgcggcggaatgtgacgacctgctggccttcctcagaggcagcattgatgcgatttgcaacatcgtccggggggacgcccgccgcctcgccgccgcgctcaaaccctccgccacgccgcgactgatggacaggcgcttcggtgactggcgcattctcgccgacgagtacgaccacgaaaactggctcgatgaggacgacgcggaacagctggatgccgtccttgaagcggttctggtgcgcgggacgcggttctgcccggtgctgctcaccgtggttaacgagcgggaagaagatattaaggccgcaggcgttatcacagacgtgctgcgtttccccggcgaccccgcacgccgctggcttgatcgccgcgtcctgcgtgaggtcatgagcgaggcccgggcgatgcccgcgcagtaa

SEQ ID NO: 96784 - DNA, 432 bp, Enterobacter aerogenes
atgttacgcacgcacacctgcccgaccgtttcccccgtcgcccgcgaggcgcgcttttccttcctgcccgtcctgtttggcgcggactacctgaccgcagaagcctgcatttacgcctatgccgctaaatacattcgtgactatgacggcggcgagtggacgtttaacaccctcccgcagggggcgggctatcttgcccccgatgaagaccgcgtgacggtatttaaccccgataacggctttgtgggggaaatgtcgggcgacgcggcgggtattgtcgtcaccgcgctggtacttaatcaccggagctggatgcacgaccaccacgacgagcgggacgcctgtcgccactacatccgccgctatgagcagctcatgagcattgtggccacccaccgcgaaagccgcgccatttatcgcgcccttgactga

SEQ ID NO: 96785 - DNA, 399 bp, Enterobacter aerogenes
atgatgtacggaaccgtgagtgaaatctgcattgcgctgctgaaaacgcacgaaaacaacgaaaaaatcgccgttatcacctggacggaagaagacgtgcgcgaggccggcgcggaatacaaccccaccatcgcagaaacggcgcgagtgcttcaggctatcggggaggctgactgcgacatcatgtatcgctacggcatcggccaggactttgtttcgggagaactgcgtcagattgtcgcagagcgcgcgccgcgtcagatagccattcctgaaaacgaacttcgcttactgctgccgctgataaaaaggggaatgagccacgtcgatgacatatcgggtgaagcctgcgccgcagtggaaacgctgcaactggtgctcggttccccctctgcgtaa

SEQ ID NO: 96786 - DNA, 228 bp, Enterobacter aerogenes
atgcaggctcaggcaatgcggacgtatcagattgcgtttaccggacgggatgaaaagggcgttttgcccatgtttacccgcgtacgggccaccacggggaaaggggctgtcagggcgtttatcgagcgctacagacccgtcagcggctggcttttgggcgaccccgaagacattaccgacaaactgaataaggaggcaaaagaagcagaaagcgtgtcgcagaaatga

SEQ ID NO: 96787 - DNA, 231 bp, Enterobacter aerogenes
atgacggtaagtattgtttcaccttccgctgaggctgtaaagccccgccgccacgtgcgcatcccccgcgcagatatttctgcgccggaaatcgatccggccttaaaggcattcgggcggcatatcgcccgcagcctgcgcaaggggcgcggcgttcacatccccgcgatgaaaaatgctgccttcgggcaggtgctccgcacgctggaactgacgcgcgcatttaactga

SEQ ID NO: 96788 - DNA, 876 bp, Enterobacter aerogenes
atgacacagaccaccacacgggcactcagcgcagacgttcagacccacggcaacgcgggcgacatcatcccgtccgtccccgttgagcgtattgtcgcgcagcgtaaccgcggcgtgacggcgtttctggagggggttgccctgatacgcgaagcacagaccacgctggcggaggtttccgggcgaagctggtttgccgggttatcgcaaatcgtcgaaagcagcctgtgcagcgaccgcagcgaacaacgaaacgccgccattcgccggcgtatctgccgcattgccgaccgggaaatctggacgcggctgatgaatgaaacgggcatgttcacgctgatgagcgaggcgcagcgcaagcagtgggacacgcagctctacagcgacgactgccccgaaatcaccccggacaatgtgatcgccacgttccgggcgctgaatgccagtaaaggggcgacgtttgagcagggcgttatcgacgtattccgcaatctgtcatgggactacaaaaccaacactccgtgcctgctgggaaaacgcatcatcattgatggtgtcctggacaaccatcgcggactgtacttttccgtgcgcacgtatgcgcagagccggatcaacgatcttgcccgcccgttctggattcttgacggaaagaacgtaccggattttcgcgtgtcggagggggccgggctgagcgagtttatcagtcggggcggggcgaacagcgttggggacgtgtttacctgcgaatatttcaccgtacgggcatacaaaaaaggctccgcgcatatcacctttacgcggcctgacctggtggagaaagtgaacgatatcatcgcccggcactatccgggggcgctgccgccgaaagtctga

SEQ ID NO: 96789 - DNA, 360 bp, Enterobacter aerogenes
atgagatactggatactggtcgcgctgttaaatggcctgtttacgctggtcatacattacgcggcgccggagatgttcggaagcacggcgtactatgccggggtggcaatctgtgccctgattgcgctggttatcacctggcgcgatccgccaggtatgctggacaacgtgctcttgtttctccttaagtggggaattgtggcttcaggtctggcgttttttatctggggtatcggatacaagctggaattctggggagatcataaccccgatgaaattggcggtgctgagcggtgttctgcttctggtcagtggctgggtgtactggaggcgaaggtaacaaactatacgccagcgtga

SEQ ID NO: 96790 - DNA, 375 bp, Enterobacter aerogenes
atgaacacacagaacgtcaacgtcaaaaccgccaccaaagaatcttccgaaagatgggtgaaaacctcgtccctgcgtactgatggctttgtgcgcaatatccattcccgtaacccgttcgatgttattcgcgcggacgtggtgctggcccgtatggaaatacaggctaaccggggatgtggcctgcactacgagatttatgagtcccgtctgctgggtatggctatgcattacctggcagaactgccactgaaagaccgtccggcgtttatgggggcggcagcgaaacggggttacatgctgacgactgcggaagaagaacgtgccgatggtgaatgtgctgacctgatgatcgagctggcggcggattactga

SEQ ID NO: 96791 - DNA, 288 bp, Enterobacter aerogenes
atgagcaacagcaacacgaacagtacgttcagctttgacgcatgggagaaaagcgcgctcagcgaacttgataccctgcaaaaccacgtcagtaaagccctgatgaagtaccagagcaatacggacaaaacggcgctgggcgagtctgcaaaccgctatatgggcgaactcagaaccgctgtcacgcgcatcctgaaagccacgccagccattcagcagaaagtcgacgagattgccgacatgctgcacctgatggcgcatttttccggcatcacgttcgacgaataa

SEQ ID NO: 96792 - DNA, 264 bp, Enterobacter aerogenes
atgcaattcagtgaagtttcgattgttacaccgaccgccctgtatgtccagatgcttgaggcggaaaacgcacccgtaaaaaaacaggtgcgtattaaacgcagtgatatcgaccgtgacgacatcagcgccgaaatgcgggcgctgggccgtcacatagcgcactgccggaagaaggggcgcgccgttcgtattcctgccatgcgcgggagtgagtgggggcaggtgttacgcacgctcgaactgaagcgggcatttaactga

SEQ ID NO: 96793 - DNA, 477 bp, Enterobacter aerogenes
atgaaacggattgctcttacgtttttaatgttggctttttctggaatgttgaacgctgctgattgttttgatctggcaggaagggattatcatatagatccggatctgcttcgggcaatctcctggaatgaatcgaacttccgcacatacgtaaaaggctacaatcctgtttcgggttttggctccggacttatgcaggtggactcccagcactttaacgaactggctcgttatggaataaaaccggagcatcttctttccgatccgtgtatgaatatctacaccggggcttactatcttgcaattgcattcaaaaagtggggagtcagctggcaggccgtgggcgcttataatgcaggtttcaggaaaacagaagaacaggcgcagagaagatatgtctatgccagaaaaattgaggcaacatatcgggctataaagaataataaaaatgcagcgcagactcttgcaaaacagtaa

SEQ ID NO: 96794 - DNA, 393 bp, Enterobacter aerogenes
atggccagagttcaggtctatgtaagcgatgaagtgtcagagaaaataagagtaatcgctgaaaaacgtcgcgctgaaggagcgagagataaagatgtaagtttttcgagcattgcatcaatgctggtcgaacttggtcttcgggtctatgaagcgcaaatggaaagaaaagagtcttcctttaatcaggcgctctataataaaactattcttgaaaatgtaatgaaaactcaatttatagtcagcaagctcctggcgatggagtcgctgagtccgcatctcgcaggaaatgaaaaatttgatttcagggatatggttacgtgtatacgtgaagatgtgcaacagattgttgaaaaattcttcccccaggaggaagagtctcaagataattag

SEQ ID NO: 96795 - DNA, 690 bp, Enterobacter aerogenes
atgcacccgcgcgatcctagagatctctcccaatcaagtcaatcattagatgatattgtgaagcgttttgatgcgctctataagtactcacctttgcctttttgcattcggaatcaatccagaaaccccatatataaaaatgatgcatatttagatttctttcacccattatcaaagtgtttttcaggtgtcagttttgatcctgatgaagttgagcttgatttgtcgacaattgagttggaggcctttgttatggggcctgatacagctatttgtagaacttttaatttgaatggtgagttttatcagttacgtgttgaaattcgtatggtaaataaagaattatatgctttatggtttattaattacttcccggattatcaagctttattcaatacctcgaataggataaaaaatgatgagtttgattttgatatttttatatcagggttgacgaataaaaagatgattacgttatgtttttcaattcttggttttcaacttcatacgatggcgcaatatttaggtgtctctgaaaaagcaatttcaagcagactttctagtgtgaagagtgagcttgcgaaatattttattgattacgatgacttcagattctactgcatgagaatggacgtatacagaaaggtgagaatggttgttcttaaggttttgaatgttaaatttatgtaa

SEQ ID NO: 96796 - DNA, 225 bp, Enterobacter aerogenes
atgattagacgtcacaggcttcgtggcccaacggtaactatgtcgatctaccttgacccacaaaccgatcttcttattttgaaggcgaaggacagaagtggtcgttctaaatcagctgaagcgctgattcggttacgtgaccacctggaaaaattccctgatttctataactctgaaatggcggaggtgatcccaaacaatcttgaacccaagtcacaaaattag

SEQ ID NO: 96797 - DNA, 351 bp, Enterobacter aerogenes
atgactgatgtgtctgttattaacgctgtacccgcgacccctgcaaagaaaaaattcagcaaagtcccgttactcaaagcgctgaagtttgccctgcctgtcgcagcccttgctgcgtttttccctgatacggttcttgcctcgactgcgggtaaagatctgatgtccagcggcgatgcaaccgttaaaggaacatttggtaaagactccagcgtggttaagtgggttattcttgccgaagttctggtgggcgccgtgatgtatatgacgaccaagaacctcaagttcctggcgggctttgcgatcctgtccgtattcgtcacggtaggtatgtctgtcgcaggatactga

SEQ ID NO: 96798 - DNA, 306 bp, Enterobacter aerogenes
atggcagatgaatctctcaaaaaatatcgctttcccgaaaccctgacgaatcagagccgctggtttggccttcctgtggatgagcttattccggcgattgtctgcctggggtggggattctggacccagcattatatccccggaattatcgctgccgtactggcctatctcggaattaaaaagctcaaaaaagggcggggcagttcatggctacgggacctggtctactggtatatgccgacctcactgctgagggggatttttcatgatgtacccgactcatgctaccgccagtggattaaatag

SEQ ID NO: 96799 - DNA, 567 bp, Enterobacter aerogenes
atggaacacggagcacgattaagtacacagcgggttattgccatcggctttattgccatgggggtggttattctgggaagcatcaccaccaatgttattcaggccgtcaacaactaccgccttcagaatgagcagaagtctatcgtcacgccaatgcttttcaacgcgccgtttgccgtgtcgcagaaccaggcagatgcctcctacctgcaacagatggccctgtcgcttatcgcccttcgcctcaatgttaccccggaaaccgttgatgcctctcatgagcagctgctgtcctatgtcaaacccgcagcgcagaacgagctgaaaatccggcttgctgaggatgcgaagcgcattaaggacaacaacgttaactcgtctttctatatgaccagcgtgaaggtttacccggcaagcagccgcgtggacgtacgcggccagttgaagacctggataggcgactcgaaaccgtatcccgagctgaaacagtacgttctcaagttcgagcgcgaggacggcatcagctggctcagtcacttcggagaaatcatcgatgaacaaaaatag

SEQ ID NO: 96800 - DNA, 744 bp, Enterobacter aerogenes
atgaacaaaaatagtcgccgtgcgctgctggcgttgctgatgctcgcttccggtcagacggtcgccgcacccgctgcgctttctgccacgattgtcccgttgacgaacggcggacaggccagcatcgcggtcagcaataccgacccgaacctttttacagtcgcaggtgaccgcgtgacggccctgaccagcctcgacggtgagctgacgcgtcaggaacagacggcaagcggtggtgtgattgtcagcaccctcaacaaaaagcctttcacgttcattctggaaaccgaacgcggcctcaacttctcggtacaggccgtgccacgtgcgggcgcggggcgaaccatccggctggtcagcgagctgtccggtacgggtgaagcggcgcgcacctgggaagagtcttccccctacgaggccacgctggtttccctgagccagcatctgctgggcgggcagcttccgtccggctggcaggctatccccgttacgcatgaagccctcaacgctcccgccggactttctgcagtccccgagcgcgtctgggtgggtaatcaccttaaggtggtgcgctatcgcgtcaccaacaataccgggatggcccgcaacatcgcggaaagcgacttctggcagagcggcattcgcggcgtgctgtttggtgaagcctcgcgtcagctgatggcgggcggcgccctgcaggtcttcattatcagcagcggaggtgcggctgatggccagcattaa

SEQ ID NO: 96801 - DNA, 1395 bp, Enterobacter aerogenes
atggccagcattaattcagtggtgaagcgcaagcagtttatctggctgggtatcgtgctggcgaccgtgggcgtggtgggcggcggcggctggtatctggcggatgcacgctacgagggcagcagcgatgcggcagccgccggcgagcctgcgcccgatatgaccggcgtggtggacagcacctttgaccagaaggtgcagcagcatgccacgaccgagatgcaggctacggcctccgagatgcagaagcagtatgccgaaatgcgccgcgagcttgagctgctcagcaaggggcaggcaggctatcagcaccagattgacaaactcagtcaggataatgcggcgctttccgctcaggtcagcgcgctgggggcgaaacccgtcaccgcatcgggtgagccggccccgcagccgccagtgcctgcgccggggcctgaaggtgagccgcagccgaccggtttcccgccgcagacgggggccgtcccgccgccgaccgcgttctatcctggtaacggcgtcacgccgccggcgcaggtgcagtaccagcccatccccgtacccaaccagctgcgccggcagtcttttgcccacagcgacgagagtaaaggtccgtccctgccgtacatcccgtcgggcagcttcgccaaatcgatgctgattgagggggctgacgccaacgcctccgtaaccggtaacgagtccacggtgccgatgcagctgcgcattacgggcagggtggaaatgcccaacagcaaaagctacgacctgaccggctgcttcatcgggcttgaagcctggggcgacgtgtccagcgaacgcgccatcgtacgcacccgcaacatcagctgcctgaagcacggcgtcaccatcgaccagcccattgccgggcacgtgagcttccggggaaaaaacggcatcaagggcgaggtggtgatgcgaaacggcaaaatcctcggctgggcatggggcgcgggatttgttgacggcatcggtcagggcgtgcagaccgcgtcccagccttcggtcggcctcggcgccacggcatcactcggcgcgggtgacgtgatgaagatggggattggcggaggcgcctccaaagccgcccagaccctcagcgactactacatcaaacgcgcagagcagtaccaccccgtcattcctattggggcgggtaacgaagtgaccgttgtctttcaggacggttttcagctgaaaaccattgaagagctggcgcacgagaatgacagaagcaaagcggagggcgacgaccgcagcccggttccgccgccgtcagtcccgcagggcggcatgaacgggttcagtaccgaccagatgctcaaccagctgggcaggcttaaccagagccagtttatgccgaaggccgactcacaataa

SEQ ID NO: 96802 - DNA, 540 bp, Enterobacter aerogenes
atgaacaagacagtgcctgttgcgctcacactggccagtctcctgacgctgtcgggatgtgccggtacaacgagcgattttgagtgtaacgcgacgacatccgatacctgcatgaccatcgagcaggccaatgagaaagccaaacgactggaggaggccagcgcggtaaagccgggtgcgacatcgctgccgcgcctggctgagggtaatttccggacccggtccgtgcagcccctgacgctgccggctgaaccggtgcatgccatcgcatccaggaatgcacctctgacgggtataccgactctcccccgcccgcagccgcactcagcctcacgggcgccgctctccacggtcacgccggttactgtgtcgccgccagggcgcgagtccatcgtggacccgaggccgcttcgcgtcggtgaaaaggcggccgggctgtggatcgcgccctatatcgatacgcaggacgtttatcaccagccgacgcgggtgttttttgttgtgaaaccctcagcgtggggaaccccacgcgttaactga

SEQ ID NO: 96803 - DNA, 225 bp, Enterobacter aerogenes
atggcagacgaactcgatctcctgcaggagcaggacgaattgctgaaccagcttcatatacaggccgcgaggcagcgatcctgcctgcagggcaaaagccgcaaccggtgcgaatgctgtggcaatcgcatccccctcaggcggcagcaggccatcccgggcgtacgtacctgtacggaatgccagcgggttctggaaatacgagaaaaacagtatctgaggtga

SEQ ID NO: 96804 - DNA, 186 bp, Enterobacter aerogenes
atgggaagaagaaaaaccaatgtgatggtcgtggggaaaaccggtagcggtaagacagccatcagcgttgaggttatgcggacctttttatcagaacgacaactccgcgactggcgtgaattgcgcaaagacattcagaacgatggcaaaaaaccaggagacgaacatcatgacaaccaacagtaa

SEQ ID NO: 96805 - DNA, 402 bp, Enterobacter aerogenes
atgacaaccaacagtaacagcggtccgggtaagacccgccaccttaacgatatagcggcctgctgcgaggcgatggggatgcgtgtcatctgtgttaatgccgcagagcgcgacttctggctttcagcgtctcagcagagcgctcccgcccttgacgggaaggctgggatttctcaacacataatgcaacggcagcgtgggcactgtctgttcctgggtaaagcaggctcaggtatgagcgtaacaaaacagcagatgagggttttcctggcgaagtctgacgtcagccggattaaagcgctgtacagcggagaggacggggagaggctggcggaggctatcagacacaactgcagcgtctggtttccgctgaatcccggaggtaaagggaatgatgcttaa

SEQ ID NO: 96806 - DNA, 567 bp, Enterobacter aerogenes
atgatgcttaagcttctgtccgtcctgctgtattgccttagatggcttgcctgggcttttcactatctgattatctggcctgccgccacgctgatgctgctggttgccatgcttttgtggatggataacaccacgcccggagaggcgatggcgcaggaaattatggccgtcacgcataacgtcagcagtggcgagtttcgtattgcggtctgccgtgatgaacctttacaaccctttataccgcctgctccgcagaacaagtcctccggcctcacgctgcatgacgctccctctgccgtctgccatgaccggggcagcgtcgtcaccgatgctaaaggatatgccggtcatgttgacggggcgctgagtgcgtttaagttgctgtggattgtgatggccattgtgttttcaggggcggcgctgcttatgggatgccgtccgtatttctgcctgtacggtcagatgcgctcagtgcgttttcgctacggtatccccgccagccgcccggcccctgcgacggaagcggtcaaaacggccgacaataaaaaggagggggatcatgagtaa

SEQ ID NO: 96807 - DNA, 2631 bp, Enterobacter aerogenes
atgagtaatccgctggactccgtcacccgcacggtcaactcgctgctgacggccctgaagatgcccgatgcgtcctctgaggcgaacgatgtcctcgggcagatgcgcttcccgcagtttagccgcgtgctgccgtaccgcgactacgatgcggaaaccggcctcttcatgaacgaaaagacgatgggctttatgctcgaggcgcagcccatcaacggcgccaacgaaactatcgtttcgtcgctggaaaacctgatgcgcaccaagctgccccgcgaggtgccggtggccgttcacctggtgtccagccatctggtgggtcaggatatcgagtatggcctgcgcgagctctcatggacgggggaaaaggctgatacgttcaacgccatcacccgcgcctactatctcagggccgcagaagaagggttcccgctgcccgatcacctcaacctgccgctgaccctgcgtaactaccgggtgtacatctcctgctgcgtcccccgtaagcgcggaagtaaggccagcgtgatggagatggaaaaccaggtcaaaatcatccgcgcctcgctgcagggggcgcagatagccacccgcagcgtggatgcggatgcctttatccgcattgcgggcgaaatgattaaccacaacccggatgcgctgtatcccaccgaacgggaactggacccgctcaaggatctgaactaccagtgcgtggacgatacctttgacctgaaggtgaaggccgactacatgacgctggggctgcgcggtaacggtcgcaacagcaccgcgcgcatcatgaacttccagctgaccaaaaatccggagctggccttcctctggaatatggccgacaactacagcaaccttctcaacccggaactgtccgtttcgtgcccgtttatcctgacgctggtccttagcgtggaagaccaggtaaaggcgcagaacgaggccaacctgaagttcatggatcttgagaagaagtccaagaccagctacgccaagttcttcccgggcgtggcgcaggaggcaaaagagtggggcgatctgcgccagcgcctgtcgtccgggcagtcctcgctggtgagctattttctgaacgtgaccctcttctgccgcgatgaccaggaaactgcgctgaaggtcgagcaggacgtactgaacagcttccgtaaaaatggcttcgagctgatttccccgcgctttaaccatatgcgcaattttctcgtgaatctgccgtttatggcgggcggcggcctctttaagcagctgcgtgagtccggcgtgctgcagcgcgccgaaagctttaatgtcgccaatctgatgccggtggtggcggacagcccgctggccacttccggcctgctggcaccgacctaccgcaaccagctggcgtttatcgacctgttcagccgcggcatgggtaacaccaacttcaatatggcggtgtgtggcacctccggcgcggggaaaaccgggcttatccagcccctgatacgcagcgttatcgactccggcggcttcgccgtggtgttcgacatgggcgacggctacaagtccctgtgcgagaacatgggcggggtctacctcgacggcgagacgctgaagtttaatccgttcgctaacgtcaccgacgataccatcgatgagatggccgaacgcctgcgggaccagctgtccgtgatggccagccccaacggcaacctggacgaggtgcacgaaggtctgctgctcaaggcggtgaaggccacctggcttacgaagaaaaaccaggcgcgcattgacgacgtggtggactacctgatgatggcccgcgacagcgaggagtacagcggatcgccaaccatccgcagccgcctcgatgagatggtggtactgctgacccagtacacccgcgacggggtgtacggcagctacttcaactccgacgaaccgtccctgaaggacgaagcccggatggtggtgcttgagctcggcggactggaggacaggccgtccctcctggtggcggtgatgttctcgctcattctctacattgagaaccgcatgtaccgcacgccgcgcagcctgaagaagctcaacgtgatagacgaaggctggcgcctgctggacttcaagaacaacaaggtcggggcgtttatcgagaagggctaccgtaccgcccgccgccatacaggttcgtacatcaccattacgcagaacatcgtcgattttgactcggaaacggcctccagcgccgcccgcgcggcatggggtaactcgtcctacaaaattatcctcaagcagtccgccaaagagttcgccaagtacaaccagctgtacccggaccagtattcgcagctgcagcgcgacatgattaaaggttttggcagcgcgaaggacaactggttcagcagctttatgctgtcggttgagcacctgacgtcctggcaccgcctgttcgtcgatccgctcagccgggcaatgtactcctcggacggtccggactttgagtttctgcagcagcgacgccgggaagggctgagtattcacgaagccgtctgggagctggcgtggaaaaaatccgggccggaaatggccgcgctggagcgctggcttcacgagcatgaagggaagaccatctcatga

SEQ ID NO: 96808 - DNA, 348 bp, Enterobacter aerogenes
atgaaaaaacacgtactcattaacgccgcgctgattgccggcacgctggctgcgggcgcaggcatcagctggctggtctgccagcttaaccgtcctgtggttgtggccttcaacatgaaatccacggtggatgccttctttgacagcgccggtcgccgttcactggacgaggcgcagacaaaagcactttcagaccgctttaacgcgtcactggaggccagcctcagggactggcaggtccgccatcgtgccctcatccttgtcgcacctgccgtggtgcagggggcgccggatatcacgcgtgaaatccagactgacgtggcccgccggatgaaggagggggggtga

SEQ ID NO: 96809 - DNA, 648 bp, Enterobacter aerogenes
atgcgcgcccttgccctgggcctgacgctgctgaccggcagcgtgacggccgctgacctcgggacgtggggcgatctctggccggtggcggagccggatatgctgaccgttatcgaaagccggctgcagacgctggcgcagtccggcgagatggacaaaaagatggcggagtttaaggcgcgcgtggtgcgcaacagccagcgcccgcctgccgttgagggaataacccgcgcggtgcgctacgagcggcgctggtttgacccgagcgtgcgggtggacaaggcgcttgccgacgacaggggcaacgtgtttgctcaggcggggcaggtctttaatccgcttgatgtggtgccgtttaacgaaaccctgctgtttatcaacggcgacgatgcggagcagctcgcgtgggtacagcgacagaagcctgacaccctgatcacccgcatcattctggttcagggcaacattccgcagacgtcggagaagctcgacagccgcattttcttcgaccagaacggggtgctgaccgcccggttcggcataagccaggtgccggcgcgggtaacggcggcacccagcggaaagcgcctgcaggtggaaatcattccgcccgatatggcgcagcatgatgcaggaggtgtccggtga

SEQ ID NO: 96810 - DNA, 993 bp, Enterobacter aerogenes
gtgaaaatgctgaccgtctctctgttcgggctgcttctgtggggtaacagccacatggcagcggcggacgccgcctgcgaagggcgcttcgtcaatccgatcactgatatctgctggcgctgcatgttccccctgtcgctcggcagcacaaaagtcacgggcggggatttaccggacacgtccaatcccggtagcccgatacagttttgtcccatgccaccgccggtatttcagcgcgttggcctggcaatagggtactgggagccgatggccatgaccgatgtggcacgttctccgggctgcatggtgaacctcggcggattcaccgttaatctcgggaaaatggggatgggcgccgccaaaaaagatgacaaacaggtcaatggcgcgttctaccacgtgcactggtacaaatatccgctgacgtactggctcaatatcatcacctccctcgggtgtctgcagggcggcgatctggatatcggatacctgtctgaaatcgacccgacatggggggacagcgccctgacctccattctgaatccggaggcggtcatttttgccaaccccatcgcgcagggcgcatgtgcggccgacgcggtggccagtgcagcaaaaacgtcggttgacgcgctgttctggtgtgccggatcgcaggggtcaatgtatccctttaacggctgggtgagcaatgagtccagccccctgcagtcttccgttctggtcagcgagcgcatggcgttcaagctgcaccgtcagggtcagataatggagagcgtcggggaggataaaaaggtctgcttcgagtatccgtcacccattattcccaaaacgcgctggcgctatcagatggtgaatatgtatccggacgtggcgcagtgccatcccttcggccgaacggtcatgcgctgggaaacggggcgtaacccgccgaacacgaagaaaaactacggctatcttctctggcgcaagcgcaactgcgtcttcctctga

SEQ ID NO: 96811 - DNA, 630 bp, Enterobacter aerogenes
atgaaaactctgtccggtctgacggcggcgctgctgctgtcagcatactgttgcactgcgctggcgtcaggggctgatgaggcgaaccgcgagtttattcgtcagcaggagtctttcagccagcagctgagggggcaggacaacgcgccgctgcgccagatgctggagcagcaggtgcgccagaaccctctttcagcagacgacgcccgctttatcggggagctgaaacagcgccagcgcgaggaccagcaggataaacccacgcacggtgccctgtatttcgtctcctttgccatcccgcaggcggggcttaagcgcatgctgaccgaggcccgccgctacgatattcccgccaccctgcggggtatggtcaacaacgacatgaaaacgacggcaaccgccgtgatggcgcttgttcaggacggctcagccagcggcgtcgccatcgacccgacccgctttcgtgagtacgggatcaccagcgtgccgtccctggtggtgtactgcgaggcgggccacgacgtgattcgcggcaatcttcatctgaagcaggcgctggaaaaggtggtggggaagggcgagtgcagggatgaggcgcaacagctgcttaataaaggagatgcccgatga

SEQ ID NO: 96812 - DNA, 1854 bp, Enterobacter aerogenes
atgaaaagagcaatactgatgtcggtgctggccattgccaccacgatggcaagcgtgaatgcatttgccgatgctgacgcgcagtacagggcgggggctgattttgcccgtcaggtacaggggcagggtgagagcagcctgaaaaactttaacccctcagcgtctatccccaactataccgcctcacccggtgagaaaaagtactatggcggtgtgacggcgaccggtgatggtgcgctgaaagcggacggtaccacgggctggactactaatgaggctacaaaagccgtcaccgactcgtttgttaacaacccgaaggagcccatttcgcccgacgcgccgtttattaaggccagccaggatgtccagtcccgcgctgataccatcatcggcaaaacggggcagacgcagtgcgaagcgcagaatatcagccgcagtgagttcaccaactatacctgtgagcgcgacctgctggttgagcaggcctgtacgcgcacggccagcattaccggccactatgaagatacatctgaaacaaaacagattgttatccagtctcagaatatttcgtttgcttcctccgaagcgggatacacaggaacatggactgcgccggtgacagggaaggttgttgctgcaacagccacctattcctggaataaacgtctggcgttcagtaatcctaactggtttatgcgagtaaccacgcctttcgggttgatttccatggataacgataccggtagcctggcgctgagtagcggcatgcagctgaagaaaggcgcagggatggtgttttccattcgtaccaggagaaacaatcccactacagattcaatctggaagcacagcaatatgcgctacagcttcaccgttacgctccagattgaaattcccgccaaaaaatgggtaccagacgtggtctggaacgaatcctgcccgttcagcaagagcgaaggtacgctcaaaaagacggaatgtattgagccggggagcacaaaaacggtggtggttgacggcgtgtcatacccggtcacgcaggcttgctggaagtacaaagacacgtatatgacccaggctgctgacaatggcacctgcaaaacctacatgaacaatccggcctgtacgcttgcctcacgcacctgcgccttcacggcagaagacggcagcggctgcctgcatgaatacgcgacgtactcctgtgaaacacgtacttccggccaggtgatgatatgtggcggcgacaccttctgtctcgatggtgactgtgagcgggcgcagaacggtaaaaacaacgattttgcacctgtcgtttcggcactcgccgcgctggccgctgcgggcaaggacgtggcagccattaacagcgttaacgtacgcgcctttaccggcagcgcgaagttctgcaagaagtttgcggcaggcttcagcaactgctgtaaggacggcggctggggccaggacgtcgggcttgccaggtgcagcagcgaggagaaagcgctgggcaaggccaaagagaataagctcacggtcagtatcggtgagttctgttcaaaaaaagtgctcggcgtctgtctcgagaagaagcgcagctactgtcagtttgactcaaagcttgcccagattgtgcagcagcagggacgtaacggtcagcttcacatcggctttggcaaggccagcagcccggactgtcgcggcatcacccagactgagttgcaacaaatcaagttcgacaaactcgacttctcaaactttttcgacgatctgcaaaagaacaagaaaatcccggataacgacaccctgacgaagcgcgtccgcgaggaaatcgccgcgcaactgaagaacaaacagtaa

SEQ ID NO: 96813 - DNA, 189 bp, Enterobacter aerogenes
atgaaaattaaaggatttactggacgccttatcatcagcctgattgtcgcctcaccggtgctttactggcgcgggaatatcgttgatgaaacaacccgcatcgatgtgttttttatggcgctgatggttgtgcttttcgtggcgggagttctgctggcgtggctgttaaacccgcttttcaaacgataa

SEQ ID NO: 96814 - DNA, 750 bp, Enterobacter aerogenes
gtgaaaaagagaaagacagcgttagcgctgctgcttcttggcagcgtttttaccgccacaggaaaagatgccggctggcagtggtacaacgaaacgcgcagaacgccggaggacgacaaatcctcttcaacacagcctcagcaggcctcgccggacatcatggagaagcttgccacgcttcagcaggccacgaagcgcgccatgtacgaggccattctgtatccgggcgtggagaactttacccgctacttccgcctgcagaactactggacgcagcaggccgggctgttctcgatgagcgccaaaaaagccatgctcgagcaccccgaactggactacaacctgcagcacagccactacaacggtaccgtgcgcaaccagctggcggcggactttgccgaccagcgccgcgccattgaaacgctggctcagcactatggcgtgatgttcttctaccgcggacaggacccgatcgacggccagctggttcaggtcattaaaaacttccgcgaaacgtatcacctcagcgtcattccggtttccgtggacggtatcgtgaatccactcctgccggatacccgaatggacggtggacaggccagccggctgggtattcgttacttcccggcgctgatgctggccgaccctaaaagcggggcggtcaaacccgtctcgtatggctttatcagccaggatgacctggcgaagcagttcctcaacgtttccacagattttgcccccaacttttaa

SEQ ID NO: 96815 - DNA, 249 bp, Enterobacter aerogenes
atgcgtaaatttcgttttcgcctgcctgagttcgacgtgcccggattatgggtgctgagcctcgggatatggtttcacattgtttcccgcctggtccggcgcgagccggagatggccattcttctggcgcagataatcggcgtatcgatggtgctctgggggggctaccgcatcatcaaccgctggattgatgctgcccgtgaggccgaaaaggcccgtgatgccggaggataccgacatgaaccttag

SEQ ID NO: 96816 - DNA, 546 bp, Enterobacter aerogenes
atgaaccttagacataccgtgtttaccgtggcgctcatgaccctcagtctggccacacaggcttccacaatggacgagatcaaatcgttatggcatccacagggggcgcgagcgtctggatctctgccaacatcaccggaagaccctgaagttaagccacttccggcgaagcagccggtctggtaccgcctcagcaacggccgccagattaatctggccgactggaaggtcgtgctgtttatgcagggacactgcccgtactgccaccagtttgatccggtcctgaagtcgctgtcggcacgggtggggtttggggtgatggcctacaccatcgacggtcagggggatgcgtcctttcccgatgcgctgcccgcgccgccggaggtaatgaaaacctttttccctaacctgcccgtggccacgccaaccacctttctcgtcaacgtaaacacccttgaagccgtgcccctgctgcagggcgcgaccgacgaacagggctttatggcccgaatggatacggtccttcagatgcgcggagtgaaatga

SEQ ID NO: 96817 - DNA, 1374 bp, Enterobacter aerogenes
atgataaacctgttcagacaccgcagtcttctgggctgcatgcttctcgtctgttcaacaaccgttagtgcggacgtgaacagcgacatgaacaccttctttaataagctgggctttgactccaataccagccagccacaggtctggcaggggcaggccgctggctacgccacgggtggctcactatatgcccgtacgcaggtgaaaaccgtccagcttatctccatgacgctgcccgacattaacgccggctgcggcggtatcgatgcctatctgggctccttcagctttattaacagcgatcagctgcagcgtttcgccaagcagattatgtccaatgcggccggatacttcttcgatctggcgctgcagactacggtaccggaaatcaagactgctaaagacttcctgcagaagatggccagcgacattaacagcatgaacctcagctcctgccaggcggcgcaggggattgtcggcggtctgtttccgcgcactcaggtctcccagcagaaggtctgccaggacattgccggtgagagcaacatgtttgccgactgggcggcatcccgccagggctgcacggtggggggaagcatggataaggtccgtgataaggccagtgataaggataaagagcgcataacgaagaatatcaatgtcatctggaatgcgctcggaaagaaccgcatgtttgacgggaataaagagcttaaggagttcatcatgaccctgaccggaacaatggtctttgatgagaagggtaatataaccccgcttccggcaagaacgaccgatcgcgaccttattcgggccatgatggagggggggactgcacgggtgtatcactgtaatgacagcgataaatgtctgaaggtggttgccgatgctaatgtcacgatcagccagaaaaatgcactgaaaaatcagataaaagacatcctttccagcattcagaataaagccgttgccgatctaaagttaaccgagaaagagaagggatttatcacaagtactaccatcccggtcttcaagtacctggttgatccccagatgctgggggtttctaacagcctcgtttatcagcttaccgattacatcggctacgacattctgctccagtacatccaggagctggtccagcaggcccgtgcaatggtggcaacgggaaactatgaccaggcggttatcgacagcatcaataataacctcaacgaagccacgcggcagatagcctccttccaggcacaggtgcaggtacagcaggatgcgcttctggttgttgaccgccagatgagctacatgcgccagcaggtctcggcacgcatgctgcagcgctaccagaacaactatcacttcgggggggcgcgctga

SEQ ID NO: 96818 - DNA, 2823 bp, Enterobacter aerogenes
atgcaggaaatctatgtcatcgcgggcggcgactggctgacgcagacgctgaatgccatcgtcacgttcatgtcgacggagaactgggttgttattcggcgtattgcgacggctttctctgtgctggttgtggccatttcgtggatacgacgccacaacattatggatatgctgggctgggcaggcgtcattgtgctgatgtcgctgctggtcagtgttcgcacctccgtacaaataatcgatatcagtaatcagacaaaggtctataaagtcgataacgtgcccgtcgggctggcactgcctgcatcgctgaccaccaaaatcggatatgcccttgttcaggggtatgaaatggtcttttcacagcccgacagcatcacctacagcaaaaccggcatgatatttggggcgaatctggtttcacgcagtacggactttttatcacagaacccagagataacgacgatattcacggactatgtgcagaactgcgtgatgggcgatattttcctgaatggaaaatataccatggaagagctgatgaacagcgcagacccgtatacgctgattttctcaaagccgagtccgctgagggggatattcaacaacaataatcagtttttaacctgtgaagaagccgctgcggtaattaagccaaagcttgccctggatactcagaccggaggaaaaacctggagttactacgtgcgtcagctttttggcggacgtccgaatcccgacattttgttcagccagatgatcggggacagctataactatttctatggggccggtcagagcgccgcgtcgattgtccgtcagaatgtgacgatgaacgcgctgcgaaacggtattatgagctacgccgcccgcaacggtgatacctcaagcctgctgaatatcgccactacgtcatcgatggagaagcagcggctggcgcatgcgacggtcggtcaggtggcattacgctcacttcctatgtctcagacgttgattgtcggtctgaccatcggaatattccccctgatggtgctgggcgggatgtttaacgccgtcacccttaatgtgctgaaggggtacgtgctggctatcatgtgggtgcagagctggccactgctttacgccatcctcaacagctgcatgaccttctatgcgaaggccaacggttcaccagtggttctctcggagttgtcacaggtgcagataaaatactcagacctcgctaccacggcaggctatctgtccatgctaatcccaccgcttgcatggggaatgctgaagggactgggagcggggttctcaaatctctacagccatctggcctcttccgctatcagccctgcagccactgctgcctctggtgctgttgatggtaactattcttatgccaatatgcagacagaaaatgtgagtggttttaactggaacactaacagctcaacgatgtttggccagatgagtcagcaactggctaatggggcaacctcaacacatatgcgtgatggtagtacggtgactgattccacacaggctgctagcaaaacaccgctaaatattaacttttctcgtcagatcgcgtccgctcaacaagcaatggcacgtgaagcgcaggctcaatcggaaagtgcgttgcatggttatagtagtagcttaagcagtgcatggaatacgctcagccagtttggctcaaaccgtggtagcagtgattctatgactaatggtgcggacagtaccatgagtgctcaggattctatgatggccagccggatgcgtagcgcggtggaaagctatgcgaagggacacaacattagtaacgagcaagcgactcaagaattggcttctcgtagtactcgcgcttccactggcctttatggtgacgttaacgcaaatggaggcattggtatcaaggcgttcggaaccggtggcggtatcaactttaaagctggtgcgagagtcggtgttgatggtgaagatcttgattcgcatcaggcatccagtagctcccgatccagccaagatgctcgtcacgatgtggatgccagagctaccaaagacttcaaagaggcaagtgattatttcaccagccgtaaactcaatgagtctggtagccacactgataataatgcaacttcccgagctgaccaactttccatagctctgaattctgcaaaacaaagttacgaccagtatacaaccagtcaagctcgtagccatgagtatgcagaaatggcgtcacgaacagaaactatgagtggtcaagttaatgaagatcttaaccagcagtttgcacaatatgtacgcaaaaactccccgcaggatgctgatatgatacttaccaacactagttcacccgaagtagctgcgcagcggcgagaaatggcttggtcatttgttaaggagcaggtacaaccagaggttgataatgcctattctgatgcaaaaagcacgttgggtcaggggatgacaaatatttctgctggcggtggtaggcaggatgtaatgtcggactttgcgacacataaagcaactgttgagaaagcgaccagcgagtcgggtataaaagacaatgttaagggaaatgttgatggaatgctggatcaaactcgtaatagtatttcagggaaacagagtgatattcagaatgcatctacagtaattaataatcaatattctgaactggaaagtaatcacaggtctcaagatcaaaaacaggataatatgtataataatgagaagtctgctcaaaaatcaattccaggagcggacagcccagaagaacttctggcaaaagcaagagagttggagaataatcagaagaaataa

SEQ ID NO: 96819 - DNA, 477 bp, Enterobacter aerogenes
atgaaagaagttatgcgtgtcctgtgggtggtgtctgtccaatacattgcatgctggttttcaggctgggatgctgcctctacgttctttatgctggtcgtattgtttttgtggcagacaatctttacttacatcaatcatcatctttccagaaggaaagaaggtgatagtagggatgtttcatctttgatatatctattgtgctcttttcctgctctgttttcaccgttgatctcaatgttgatttttatcggtcttacggtttttagagtatgtacaattggtggcgttacagtaggagctaagtcacttaaggaacaatttacctttgatggcgcatacataggccagtccgatactgattgttctgaacctatgcgttcaaatcctgccactggtttaccgatgtgcggagttgttgactcttctggtaacgcttatgggagttccataagagtagatagtcattaccattag

SEQ ID NO: 96820 - DNA, 801 bp, Enterobacter aerogenes
atggttcaacaaaatggaatgaaagtagcaacgttgttggctctttttaccctctcagggtgtagcagtatcagggatgttgagtatatagatccgaaaggatattcggatgtggcaagttatttaagtgaaacttttgaaaaatcgaactgtataggcacaactttctcgtctcaagggcggaaattcataaattcagatggcttaaactatcaattgggcgggaaaaacctacgttgctatgtagcctcaattgaagagtcgatagatagatattgtgttgctaaacaaggggaaatggtacagggaggaacatggtgtgtagtgaataaaatgccattgtttcatgtgaattatagccctgatacctcgttaactaaaatagggcttggatctaggattttttctacagtagagccacctagttctcaggcgaaacagcaatggttgagttcagcggagagacttggatatattagcgagcgagtccagcaacagactgatatagaaaagaaagttgatttggctaatgaaataaatgaaaagcaaaaaaaatatatagagatgaatgctgaagttgctgtcagtattggcgatttgatatgtcgagaggattacgaggcaaaaccttatcaatatcctggggttgcatactacaaagcatacgtggagaaaaaagagaaaaataaactgcagttgcggttggtttggcacggtggtgatgggtttgtagttaacgatataaccaatgtgaataacataatctggtcaagccctaaagggtggcgtcattgcaattga

SEQ ID NO: 96821 - DNA, 2169 bp, Enterobacter aerogenes
atgagttttaatgctaaggatatgacccaggggggtcagatcgcgagcatgcgcatccgtatgttcagtcaaattgccaatattatcgtttactgtctcgttattctcttcggcgtaattgttgctctgactctgtctattaaactgacctggcagacgtttgttaatggcatggtctggtattggtgtcagacgctggcccccatgcgcgatattttcaaatcccagcctgtctataccatccgttattacggccatgagctgaagtacaacgcgcagcaaatactgcaggacaaatatatccagtggtgcgcagaccaggtctggacggcctttattcttgccgccatcatcgcggccgtggtgtgcgttattaccttctttgtcaccacctggattctgggccatcagggtaaacagcagagtgaggacgagataacgggggggcgccagctgactgacgacccgaaagcggtggcgaaaatgctcaggcgcgacggtctcgcatccgacatcaaaatcggtgagctgccgcttattaaggactcggagatccagaacttctgtctgcacggcaccgtcggggccggtaaatcagaagttatccgccgtctgatgaactacgcccgccagcgtggcgatatggtcatcgtgtatgaccgctcctgtgagttcgtcaaaagctactatgatccggccacggataaaatccttaacccgctggatgcgcgctgcgctgcatgggacctgtggcgggagtgcctgacgcagcctgacttcgacaacgtgtccaacacgcttattcctatgggcacgaaggaagaccccttctggcaggggtcgggacgtaccatctttgccgaagccgcttatctgatgcgcaacgacaaggaccgcagctacagcaagctggtcgacacgctgctttccatcaagattgagaagctgcgctcgtacctgaaaaactccccggcggcgaacctggtggaagagaaaatcgagaaaacggccatctccatccgcgccgtgctgaccaactacgtcaaggccatccgctacctgcagggcatcgaaaataacggcgagtcattcaccatacgcgactggatgcgcggcgtgcgtgaggacggtaagaacggctggctgtttatctcctccaatgctgacacccacgcttccctcaagccggttatctccatgtggctgtccatcgccattcgcgggctgctggcgatgggtgaaaaccgtaaccgccgcgtgtggatcttcgccgacgagctgccgaccctgcacaagctgccggatctggttgagatcctgccggaggcgcgtaagtttggcggctgttacgtcattggcattcagtcctacgcccagctggaagatatttacgggcagaaaccggcggaaacgctgttcgatgtgctgaacacccgtgccttcttccgctcgccgtcgcgcaatatcgctgagttcgccgccggtgaaatcggtgagaaagaaatcctcaaggcatccgagcagtattcctacggtgtggacccggtacgcgacggtacctcggtcggcaaggacatggagcgcgtcaccctggtgagttactccgacgtccagacgttgccggatctctcctgctacgtcacgcttcccggaccttatcctgccgtgaagatggcgctgaagtatcagcagcgtccaaaggtggcaccggaattcattccgcgtaccatcgacgggaaagcggaggaacgcctgaatgccgcgctggctgcacgtgaacatgaatcccgcagcatcgccatgctctttgaaccggatgccgacgttatcgcgccagaggccagtgcagagaataccggccagccacagcagccacagcaactgacgcccgcgccccgcgctgcagacgcgccatccgcttcggcatccgcagcgggcgcggcaggcaccggcggcgtggagcctgagctgaagacaaaggcggaagaggctgagcagctgccgcccggcatcagtgaaagcggtgaggtggtggatatggcggcatgggaggcgtggcaggcggagcaggacgaactgtctcctcaggagaggcagcgtcgtgaagaagtgaacatcaacgttcaccgggcgcctgaaaaggatcttgagccgggaggatacatctga

SEQ ID NO: 96822 - DNA, 5241 bp, Enterobacter aerogenes
atgatgagcatcggatcggtaaaatccgccggcagcgcgggcaattattacaccgacaaggacaactactacgttatcggcagtatgggcgagcgctgggccggaaaaggggctgaagcgctggggctcagcggcggggtggaccagaagatctttacgaaggttctggagggacgcctgccggacggcagcgacctcagccggactcaggacggggcgaacaaacaccgtccgggctacgacttcaccttctctgcgcccaaaagtgtctccgtgatggccatgctcggtggcgataaacgtctgattgaggcccataaccgcgcggtggagaccgccattaagcagatagaggcgatggcctccacgcgggttatgacggagggcaggagcgagacgcagctgaccggcaacctggtgatggcgctgtttaaccacgataccagccgcgaccaggagccgcagctgcatacccacgcggtggtggccaatgccactcagcatggagatgagtggcgcacgctcagcagcgacaaagtgggtaaaaccgggtttattgagaatatctacgcgaaccagattgcctttggccgcctgtaccgtgccgcgctgaaggatgacgtcgcggcgatgggctatgagactgaaacggtcggcaaacacggcatgtgggagctgaagggcgtaccgacggagccgtattccagccgcagcaggaccatcagcgaggcggtcggggatgacgcgtccctgaagtcccgcgacgtggcggcgctcgatacccgccagtcgaagcagaaggttgaccccgaacagtgcatggccgagtggatgcagaccctgaaagcgacggggtttgacattaaagcctaccgtgaggcggcagacctgcgggttgtgcaggggaatattcccgcaacgacgcctgaagccattgatattaacagcagcgtcgggcaggccatcgcgatgctgagcgaccggcgggcgcggttcacgtattccgaactgctggcctccaccctcgggcagctgcccgcgcggtcgggcatggtggagatggcgcgtgacggcatcgatgcggcgataaaaaatgagcagctcatcccgctggataaagagaaggggctttttacctcgaacatccacgtgctggatgagctgtcggtgtcggcgatgacccgcgatttacagcggacggggcaggccgacatttttccggataaaagcgtgccccgcagccggtcatacagcgatgccgtaagcgtcctggcccaggaccgtccgccggtggcgatcatttcgggtcagggcggggcggccggccagcgtgagcgcgtggcggaactgacgatgatggcgcgcgaacaggggcgtgacgtgcagattatcgccgccgacaggcgttcgcgcagcgcccttatgcaggatgagcgcctcagcggcgagcatatcaccgacaggcgggggctgacggagggtatggcctttacgcccggcagcacgctgattgtggaccagggggagaagctgaccctgaaagaaacgctcacgctgctcgacggcgcgctgcgccataacgtccagctgctgattgccgacagcggccagcgcaccgggaccggcagcgccctcaccgtcatgaaggaggcgggagtgagcacgctcgcgtggcagggcggtgagaagacgcgggtctcggttatcagcgagcctgaccggcggcagcggtatgaccgcctggccgctgactttgcccgaagcgtccgcgcaggtgaacacagcgtggcgcaggtcaccggtccgcgcgagcaggccgtgctggcaggcgctgtccgcgaggcgcttaaggcggaaaaggtgctgggcgagcgggaggtcagtatcaccacgctggagccggtctggctcgacagccgccatcagcaggtgcgcgaccactaccgggaggggatggtcatggagcgctggaatgccgaagagcgcagccgggaacgctttgtcattgaccgcgtgacgggccgcaacaacagcctgacgctgcgtaacgcccagggtgagacgcgggtgacccgcctgtctgaactcaacagcagctggtcgctgtaccgcaccggcacactgcaggtggccgaaggcgaccgtctggcggtgctgggccaggcgcaggggacgcggctcaggggaggcgatacggtgaccgttaaggcgctcggggaggcggggctcgtcgtcagcctgccggggcgtaaggcggacgtggtcctgcccgccggcgacagtccgtttaccgccgcgaaggtgggtcagggctgggtggagtcgccgggccgctcggtgagcgacagcgccacggtctttgcctcgctgtcgcagcgcgagctggataacaccacgctgaacaaactggcgctcagcggccgggcggtgcggctctattccgcgcagacggcgcagaaaacgacggagaagctgtcgcgtcagtctgcctggagcgtcgtgtctgaacagattaaggatgcggcggggcatgacaggctcgatgatgccctggcgcaccagaaggccgggctgcacacgccggagcagcaggctatccacctggccattccggtgctggagggaaacggcctggcgttcacgaagccgcagctgatggccgccgcgaaagaatttgagcaggacagcctcagcctgcaggtcatcgaaaaggaggcggaccggcagatacgcagcggcgccctgctgtcggtgccggtatcgcctggaaacggcctgcagctgctggtctcacgccagtcgtacaatgcggagaaaagtatcctccgccacgttctggagggaaaggaggccgtcaccccgctgatggataaggttccggacgcgcagctggcgggcctgaccgacgggcagcaaaacgccacgcgtatgatactggaatctcccgaccgctttaccctggtgcagggctacgcgggcgtgggtaaaaccacccagttccgggcagtcatgtcggccatcggcacgctgccggaacgggagcagccgcgcgttatcggcgtggcccccacccaccgggcggtgagcgagatgcgcgatgcgggcgtgcctgaaacgcagacgctggcggcctttattcacgacacgcagcagcagctgcgcggcggcgaacgaccggacttcagcaacgtgctgtttctcgtggatgaaagctcgatggtcggtaacgccgacatggcgaaggcgtacagcctgattgccgggggcgggggacgcgcggtctccagcggtgataccgaccagctgcagtccattgccccgggccagcccttccgcctgctgcagaagcgcagcgccattgacgtggcggtgatgcaggagattgtccgccagacgccggaactaaaacctgccgtctacagcctgattagccgcgatatcggcagcgccctgacgaccattgagagcgtggcgccggcacaggtgccgcgcagggcggatgcctggcagccggacagctccgtcatggagttcagccgcgaacgggaggaggccattgcgaaagccgtggcggccggcgacctgatgcccggcgggcagcccgcgacgctgctggaggccatcgtgaaggactacacggggcgcacgccagaggcgcaggcgcagaccatcgttatcaccgccctgaacgccgaccgccgccaggtgaatgcgatgattcatgacgcccgtcagggtgccggcgaggtgggtgaaaaagaggtcacgctgccggttctcacgcctgccaatatccgcgacggggagctgcggcgcatggcaacgtgggaggcatcccgcgacagcctggttctgctggacagcacctattacagcattgaggcgctggacggggaggcgcacctggtgacgctgaaggatgcgcagggcaacacccgcagcctgtcgcccgcgcaggcggcgacagagggcgtcacgctctaccgtcaggacaccattaccgtgtcggaaggcgaccggatgcgcttttcgaaaagcgacaacgagcggggcttcgtggccaacagcgtctggtcggtcagtgagataaaaggtgacagcgtcacgctgtcggacgggaaacagacgcgtacgctcacgccgtcagcggagcaggcagagcagcacatcgacctggcctatgccgtcaccgttgaaggctcacagggtgcgagcgaacccttctccatctccctgcagggcacggacggcggacgtaagcggatggtgagcttcgagtcagcctacgtggcgctgagccgcatgaagcagcacgcgcaggtctataccgacaaccgggataagtgggtggccgcgatggaaaaatcgcaggcgaaaagtacggcgcatgacattctggagccgcgcggcgaccgcggcgtcgcgaatgccgctcgcctgacggcgacggcaaaagcgctgggtgaggtgcctgccggtcgcgctgcgctgcgccaggccgggctgcagccagagggctcgatggcgaaatttatctcgccggggcgtaaatacccgcagccgcacgtggcgctcccggccttcgaccgcaacggcaggcaggcgggcgtctggctgagtgccctgacctccggagacgggcagcttaaggggctcgctggcgaaggtcgggtgatgggcagcggggacgcggcgtttgcgggtcttcaggccagccgtaacggcgagtcgctgctggcgcgggatatggaagagggcgtgcggctcgcgcgggagaatccgcagagcggcgtggtggtgcggctcgcaggtgaggcgaggccgtggaaccccggcgccattaccggcggtcgggtctgggccgacagcctgcccgacagcaccggtacgcagcccgcagaaacggtgccgccggaggtgctggcacagcaggcccgggaggctgaggtgcagcgggagctggataagcgtgctgaagaggcggtccgcgagatggcccgcagcggcgacgggccggccggtggggctgacgttgccgtccgggatgtagtgcgggatatggagcggataaaagaaacgccggcatctcccctcacgctgccggatgcgccggaagaacgccgccgggatgaggcggtgtctcaggtggtgcgcgagaacgtgcagcgggaccgcctgcagcagatggagcgcgaaacggtgcgagaccttgagcgtgaaaagaccctgggaggcgactga

SEQ ID NO: 96823 - DNA, 738 bp, Enterobacter aerogenes
atgcgcgctgaaaaccatccgctgttccctcttgtggtggtggccgactgctggctgcagcgtctgcttgtgtggacgccgggccagaccgaccttatcaaaaccgtggcgctgctgctgatggtggccgaccacatcagcatgctgtgcggactggataatgactggctgcgtcttgccggtcggggagcgtttccgctctttggcctggtctgggccatgaaccttgcccgccatccgcagatccagcagcgcgccctgaaccggctctggatatgggccggggtggcgcagggaggctggatactggccgggcttcgcccggacctgggcaatatcctgtttgcctttgcggtcagcggacaggcgctggcgctgatgcagcgggacgggccgcgcgcgtggccgctctccctgatgctggttctggcctggctgccgttttcggcgggaagctacgggctggcgggggtagtgatgctgatgctggcctgcggcgtatgtatgacgggccggcgcaccacgcgcacggggctggcgctgtgtctggcgctggcgatactcgcgctgaatgccgcggacagccccgcctttgccatcgcgggtctggtaatacccggcgttaccctgacggtgctgagtcggacctgttgccgcgtgccgaggttctggccacgcgaatttttcccgctgttctacgcggtgcaccttgccgtcatcggactgatggtgatgtga

SEQ ID NO: 96824 - DNA, 720 bp, Enterobacter aerogenes
atgaaagagcaggggcgccccacgctgacgctgcgccgtaagacagagccagaaggtcagcgtgccataaacaacagtgaaccggacggtgtgggtccgggccgggtcacgcgtaaaaagaccgtggtggtgaacacgacgcctgcctggaaggtcaggaagcaggcggtggatgagagcgcgaaaaaggcgcaggcggacgagaaggccgccagaaaagcagagaaagcccggcagtgggctgagcgacaggcccaggagagggaggccatgcgggcggccaggcgcaaacctgccccggaaccggtgtaccggaaggtcatgccgcttgcggacgcgctcgcgctcctgaagcgttgctggccagccctggtgacagacggccagccgcagctcctggcggtcaacatccgggaggcaatggtcaatgacattcgccggcgcgggctggagatttccgtgaagacgctgaaacgctgccttgccgccgtcacccgctcggatgcgtatctgggcgccatgacggtgggcgcgtggcgtaaaaaccttgccggtgaaccggtcgcagcggtgagtgcggaggaggcggcgtatgccgtggagcgcagggctcaggagcacgctaaacgacagcgcagggcggtcagaagcgtcgccacccgtgcacggaacgaactgataacaaccgagaagagaaaaacacaggatgaacatgaataa

SEQ ID NO: 96825 - DNA, 792 bp, Enterobacter aerogenes
atgaataaaaccctttcagtcatgcttgccgcaggccttctggtctccggcgtggcgggggcagcagagaaacctgccgttgcctttaccccggagcaggaagcccgcattggtgaaatcgcgaaagactacctgctggctcatccggaagtgctggttgaggtcagccagaagctgcaggcccaacagcaggagaagcagcagcaggcgatgacggccgccgtggttcagaatcaggcagcgctgctgaacgataaaggcacaccatcatatggtcctgctgatgcgaaagtgacggtcgttgaattctttgattaccagtgcatctactgtgcccgcctggcgccggaactggagaaggtaataaaagctaacccggacgtgcgctttgtgttcaaggaattcccgatatttggccagcgctggccggcgtcgctcagtgcggcgaaaaccgggcttcagatctggaagcagaagggggccgatgcttaccttaactatcacaacgcgatttacgctaccgcccacaacgagggtaagctgaccgatgctgatatcagcgcggccgcaaaagccgtgaagttcgatgcgaaaacagccccagatgttcaggggaccctggatggcataaacacacttgcgcagcagctgggcttcagcggtaccccggccctggtggttctcccgtcagccggcgccagtgctgataacgtgacggttatccctggatacaccagcgcggaggccctgcagcaggccatcagtcatgctgccggtgataccaaaaaataa

SEQ ID NO: 96826 - DNA, 273 bp, Enterobacter aerogenes
atgtataccgtagtcattgcttcggtgatattaaatatattattgctatttgccgtcattaaactttaccggagaaacagggttgactatgaaccctctttcctgccgacaattttttaccacatgactaaatatataaggcattctggctcatggaatgaaatggagttcatgcgtgacgaattacgccgtgtattaaatgagatagatattatcagacatgatgcaggtaatgtccggctgcggaaaacaaagcctgttcgtgatgcctga

SEQ ID NO: 96827 - DNA, 321 bp, Enterobacter aerogenes
atgtcagtagaaattaaatgctccggtgtgaatgaagaagcaagggatataattaaagggacggtgaagcaactgattggggacggtcgcattcattcgcgggatgacattatccggcatctctgcggtgcgaactttgatatcacagacgtgacggaagagagtattacgatttgcgcacctgatgaacccgccaacaccctcatcctgagcggctggctgttctctgaacggttcgggctggaccgggataaatccctctcgggtgatggcgggcagttatccgagggcgtgcgaagcgaagggagcgtgggttcatga

SEQ ID NO: 96828 - DNA, 609 bp, Enterobacter aerogenes
atgaatgccggtgtggtgttatttatcatttcgttgctggcactgattttcctgctctcccgcgtgctgaagcagaaacggccgcaggcaccgcttatcaggcggctgagagaggctggcgtcagggtgggcgatacagagcaactgatggcgggcggcgtgttctgggagcggcaggcgcagctgatgaccgaccgtgaggtgcactttatgcaggggctgttccggtcggtggacatgaggcggtggtatctgtgcccgcaggtcagggtggctgatatcgtgcagataacgccgcgcgtcaggggccggagccggacgtggtggaagcttttccatatggcggcccagtggcactgcgacgtggttatcgttgaccgcaggacgtttcgcgttgtggcggccgtggagctggacgatgcgtcccacctgaagaaaagccgctgccggcgtgacatcctgctggatgaggtcatgcgccaggcgggcatgccgctgctgcgaagccgtgatgcccgggagctgcagaggatgatacgggactttctgacggcacttgaggccgggtccggggtgtcagatgccatcactcaacaaaaagcgggttaa

SEQ ID NO: 96829 - DNA, 543 bp, Enterobacter aerogenes
atgcgggtttataaatataccgggctggcatttgtctgctgcctgatttatctgtttgcttatctggcaataaataacgttcagtcggagggggccagcctgaaaacatgtgcgctgataacaatgccgttatttatctggatggtttatcagcgcattactgcgatgagtgaaaaagcgcgtgcccgtgaaagcgatgaggtcattttcatgagaatgatggagcagatacatcattacgaagagctggagcgcgtggccggtggcgtgcggctcatgaaaggtattcttgagtgtcgtgaggtggctcaggcgataaggcgcccggagtccgaagacgcatccctgacgctgagccggctggcgtacattgagcacctgctgagtgtcctggcaccggggctgtgccggaggatgtcggaaggtgagcgccagagatggatgcagatgatgaacgaaccggcgcccggtgaaaacacggcaggtgaatgccacaccgaaacgcccgtcagtcagtccgtgccgggggaggtcagaggatga

SEQ ID NO: 96830 - DNA, 309 bp, Enterobacter aerogenes
atgattgtgcctgttaccgcagagcgtgatgagcaggggtactggtcgcatccggcgtatgcccgcagtggctgcgaaaccgcggcggagttcagctactggctgaggatccacgggctgcagtgctttgtaatgaccatgcgcgatgaggctcctgaggtttttgctgccggatttaccgatgaagcgccggacgcacggggctggatacccgaaccgccggatgatgacggctggtttctgggctcagtccatgataccgacgacgggcctgtctgctactggttccgttataccagaacgtcctga

SEQ ID NO: 96831 - DNA, 237 bp, Enterobacter aerogenes
atggcatgttttgagtgcagcagcagtgcaatggttatcaaccagctcgttccctggataactgtcggcatttttgtggccagcgtggcgctgttttgtcagctcctgaaacgcgatcggcgggcgtggacgtcactggttgctgttgtggttctgatggaagagctgaccctgagcctctggctgctgattaatgacgtacagatactctccccgcactttatggacggtatgtaa

SEQ ID NO: 96832 - DNA, 258 bp, Enterobacter aerogenes
atgtcgcaggtcggaaatgcagtaacttcctcatcgaaagaaaagaggccttatcgaaaagggcaaccattgtcatccggtgaacgcaaacagcgttcggtatcccgtaaaaaggatacgcataaagctgttacggtattcattcagaatgctaataagcacacgcttgatactctttgctccgagtacggtatgactcaggctgagttatttgagttcctccttgaacaggaagaactgcgtaaactaaaaaagtaa

SEQ ID NO: 96833 - DNA, 864 bp, Enterobacter aerogenes
gtgactgacgctcagaccctgttctcccattatcgtcaggtcaaaaacccgaatccggtattcacgccgcgcgaggggaaaaagaccctgccgttctgtcgtaagctgatggcgaaagctgagggcttcacgtcccgttttgacttttccgtccatgtggcgttcgttcgctcgctgggtaaacgtcatcgcatgccgccgttgttgcgtcgtcgagccatcgatgcgctgctccaggggttgtgcttccactatgacccgctggccaatcgtgcacagcgctctattaccaatctggccatcgagtgcggtctggccaccgagtcaaaaagtggcaatctgtctatcacccgtgccacacgggcactgaagtttatggcggagctggggctgattacctaccagaccgagtatgacccgcagataggctgcaatataccgacagatatcaccttcacgccggcactgttctcggcgctcgatgtctctgacgtggctgttgtggctgcacgccgcagccgcgtcgaatgggaaaatcagcagcgtaagaagcagaacctgaagccactggagatggacgagctgatagcgaaggcctggcgttttgtgcgcgaacggttccgcagttaccagtccgagcgtaagctacatggcctgaaacgcgcccgtgcacgtcgtgactcggacagaacccgtaaggacattgtgacactggtgaagcaacagctgacgcgggaatacgccagcgggcggttcaccggcggtcttgatgccatgaagcgggagctggagcggcgcgtgaaagagcgcatgctgatgtcgcgtgataacaactacacgcggctggccaccgtccccatataa

SEQ ID NO: 96834 - DNA, 147 bp, Enterobacter aerogenes
atgaacaggatactgacggtctgtggtatcgatacccggcatagccgtaaacacaacttctatattcgtattgtgaatgccgagcagcgcgcaggcattctaggaatgcgccaggggcgcatagaggcgccctcagaagtggactag

SEQ ID NO: 96835 - DNA, 870 bp, Enterobacter aerogenes
atgttatgttggggtatggttatgtttcgagcaaatgaagaagctgaaaaactcaaagctgaggcaatcaattactttcttattaaagagatcgcaccatggcgaaaggataatatcgacgctatctctgaaactgacaggaaacgagctgaggatgctttaagcgttatttgcacgaaacttgggcctgtagtgtcttcttatcctgaatggcatccagttatagcgcttggccgtgataagtcgataccctgttacagggacacgcagacgacgccatcatttccgcgccttgatcatacgcgttatatggctaacggtattattacatgcccctatggggatactgatgagctaatcgctgctgtaaagcgttcctactgggatttaatgcaatatctgagcagtgatgacatgcgttttagtagcctttccggatggttgcgtatggcatcggactccatcgagttgcgggcttcttatatcactgacgaactcattaccgcgtttaaaaatagtgattttgactacgatgggagcgatgttctttctgatgtatcgggcttgatccctctgtatgcgaatacagcaaaaccagtgctaatctggtggagctggaataatcatgcccttgaatctgatggcacgatacctcctgcggtggcggttcctttaatgttgtccaggacgctggcggatctgtcatatgcccagttgtcagagtcatgggaaaatatgcgttacctgcttctcgggtctcctcatggggcaaggtcgtcgctacttctgaaccagctaacggttaagcagttacgcacaatgtttaatggattaatggattccggggcttttgggccgaaaaaaggatga

SEQ ID NO: 96836 - DNA, 285 bp, Enterobacter aerogenes
atggattctttaacgaaatttgctctggatattttacgtgaccgaaacttttcccggctggatgaggaggtcagggaagaagtgctgttcctgtttattgatgatcagcgtaaaccatcaaaagaggggcggagaacgctggcacttaatgctggcctgctggcaaagcaaatgggagagccacgactggaggtgctttcaatggatgtacttatggcctgtgacaaagcggaagtacgtgaggttctggcacaaattacagacattcttcagggacaggcttag

SEQ ID NO: 96837 - DNA, 294 bp, Enterobacter aerogenes
atgaaaaaatcactgcttattctgggcgttctgtcgctttccatcagcggaatctctcaggctgcaggtcagatgaatgaaaaggctctgcgggaaaaggctgcttttgcgctgggggtgacccaggatcgtgtcacgcttgaacaatctgatcgtactcctgaacccaacagttatttttttaatgcccgttatcaggggaaactgtatcagtgttacgttggcaccattcagcagcagatcatgtctgacgccgtctgtcgtccaaccgatggttcagatttaccccgttaa

SEQ ID NO: 96838 - DNA, 483 bp, Enterobacter aerogenes
gtggttgtcaccgaaaccccatccggcgacacgcagctgcgcccgtacgttaaagaccctgtggaactgaacaaagatattgtggcgctggttgctcaacagatggctgatgcgttgattgagcacgccggcaggcaacctgatggtaccattccttcaccaccggctcccattcccggcacgaagctccttgagaacaccatgttcccctgctcccgctgcgggcgaattactgcccggctggtttttgccccggagtgcgcgtctgaggctgatatgctctctctgggtgaacgtctccggaatgacgtcaggtatgccccctacccggtctggctgattggtgcgccggacagtgaggacgatagcgttgcccggcatctgacgctacagctggcaccgatcaggggcgaggtatatcgggaacatcccgacaagatgaacagccgactgatggaactggatgataaacatcattgctga

SEQ ID NO: 96839 - DNA, 615 bp, Enterobacter aerogenes
ttgctgaaggacagcccccgggctggtgatgatatgagaaatatggaaaaaacgggtcacctggcatggtgtgctcttatcgccctgctgacagccagggaagatggcctggttgagtctgagtcgcaggaaaacctgtttatcacccggtggtttgcgcaggtgaaaaaacagcgccgtttttcacgtgacgtggccaccgatgttgactggatcctcaaccagggccgtacgctcggcgttcgtgcgcggctgcgccataagctggattatctctggcgtagctgcaccggcgaactgtctgagcagaacgacctttttcgcctgacctacgcactggagctggcgaagcagtacgactgggggtatcacgtcctcagcgacagtgagtggagcggtcgaaataagattctgccatcggcatcggtgaacagtatctgtctgctgaaaagcgcgctggatatcggttttaatgatgacgggacgcaggtgctacctgtgcctgcgagaattggcgggcgcgccgaggggcttaatgcgctgctgaaaagctgtggctgggaggccgtcagtaatgacgatcactggaaactggtgaccatcagcgctggttga

SEQ ID NO: 96840 - DNA, 564 bp, Enterobacter aerogenes
atgacagtggctaagtaccatattgaatctgtgcaggaatgggcgccgtttactcacaacggccagagttactctttgtcacatttgaatgcacatgagattacctacaaaggtaagatgcaagattttaagtttgtcgtaacttatggcatgcactgcttcactaaagacggtacgccttacaacatcccctttaaatatcaagatgcgagagagtcgatctccgtttgtcttgaacggtatgaagcatcaaagcaactgcaacacattctgcccaaccttccatcgttgatgctctatcagaccactgaagaaaagtatttcacgcttcagatgatgaatagtgctacgaaccagcttgagccatacaagatctgcgttgcattcttcaaagagaaccgtttgatgcgtatacacgttctttcggcattttttgctcgtactggacctggtgcaccgggcgagcctatcccgcaaaagccagttagcttatttaaggttgctgtggatacggcaaaaaagccaagaaacagtggacgaccgaaggaagttaacaacaggtga

SEQ ID NO: 96841 - DNA, 1056 bp, Enterobacter aerogenes
gtgcgcattcacgcctcttccggcaccaccggcaaaccgacggtggtgggatatacgcaaaacgatattgataactgggccaatattgtcgcccgttcgctgcgtgcggccggtggttcagcaaaagataaaattcacgtcgcctacggctacggcctgtttaccggcggccttggcgcgcactacggcgcggagcgtttaggggcgacggtgatcccgatgtccggcggacagaccgaaaaacaggcgcaactgatccgcgactttcagccggatatgatcatggtgacgccgtcttattgtctgaatctgattgaagagctggagcgccagatgggcggcgatgcccgcggctgttcattgcgggtcggcgtctttggcgctgagccgtggacgctggcgatgcgcgcggaaatcgagcgccgcctgggtatcaccgcactggatatttacggtctgtcagaggtgatggggcctggggtggcaatggagtgcctggaaaccgttgacggcccgaccatctgggaagaccacttcttcccggaaatcgtcaacccggacgacggtacgccgctggaagatggcgagcatggcgaactgctgtttaccacgttgaccaaagaggcgctgccggtgatccgctatcgtacccgtgatctgactcgcttgctgccgggaaccgcgcggaccatgcgccgcatggatcgcatcagtggacgcagcgacgatatgctgattatccgcggggttaacgtcttcccatcacagctggaagaggagatcctcaagtttgaacacctggcgccgcactatcagttagaggtcaatcgccgcggtcatcttgattcgctggcggtacgcgttgagctgaaagagagcgggctggcgttaagtcatgaacaacgctgccagatttgtcatcagttgcgtcaccgtattaagtcgatggtcgggatctccaccgatattactatcgtcaactgcggcagcattcctcgctctgaagggaaagcctgtcgggtattcgacctacgtaaagcggtggtcagcggttaa

SEQ ID NO: 96842 - DNA, 411 bp, Enterobacter aerogenes
atgaaaaagagcattgcactgacgatggtggcgctggcctgcctggcggctaacgtccaggcagcagagaaacttgctggtaatgaaatacttgccgtacagaaaggcggggtgccggataaagtctatacccaacatcagccgaaattacgtatagcaacctataatatcggcaagaatgaagcgtctgataatgtggccgattttacggcacttaattcagcgattaaaaaaattaacgccgatattattgccgtcccggaagtcgatcacaaaactcagcgcagccagaaaatcgatcagcttaagacgattgccgatgctaacaatatgcattatgcctttggtaaagcgttagatttcgacggtggcgaatacggactggggctgctgtcaaaatggctttgttga

SEQ ID NO: 96843 - DNA, 1647 bp, Enterobacter aerogenes
atggaaatattcttcaccatactcatcatgacccttgtggtctcactctccggggtggttacacgcgtactgccctttcaggttccactaccgttaatgcaaatcgccatcggcgcgctgttagcctggccgacctttggtttgcacgtcgagttcgaccctgaactcttcctcgttctgtttattccgccgctgctatttgccgatggctggaaaacgccgacccgcgaatttatcgagcacgggcgggaaatcttcggcctggcgctggcgctggtggtggttaccgtggttggtatcggcttcctgatttactggattgtgccggggatcccgctggttccggcgttcgccctggcggcggtgctgtcgccgaccgatgccgtggcgctgtctggtattgttggcgaagggcggataccgaagaaaatcatgggcatcctgcagggcgaagcgctgatgaacgacgcctctggcctggtgtcgttaaaatttgccgttgccgtggcgatggggacgatggtgttcaccattggcggcgcaaccgttgagttcttgaaggtggcgattggcggcatcctggccggttttgtggtcagctggttgtatggccgctcaatgcgtttcctcagccgctggggcggcgatgaaccggcaacgcaaattgtgctgctgttcctgctgccgttcgcttcctacctgattgccgaacatatcggtttctcggggatcctggcggcggtggccgcgggtatgactatcacccgttccggggtgatgcgtaccgcgccgctggctatgcgcctacgcgccaacagtacctgggccatgctggagtttgtgtttaacggcatggtgttcctgctgttgggcctgcagctgccggatatcctgtcgagctcgctggtggcggcggaagccgatccgaacgttgaaacctggatgctgttcaccgatatcgtgctgatttacgccgcgctgatgctggtgcgtttcggctggctgtggacgatgcgtaagcttagccagcgcttcctgaagaagaaaccgatggagtttggctcctggaccacccgcgagctgctgatctcctccgtcgccggggtgcgcggggcgattaccctcgccggtgtgctatcgattccgctactgctgccggacggcaacgtcttcccggcgcgttacgagcttattttccttgccgccggggtgattcttttctccctgtttgtcggggtgatcgcgttgccgattctgctgcggcgtattgagtccaccgaccacgtacagcagcgcaaagaagagcgtctggcgcgcgccgcgacggcggatgtggcgattgtcgcgattcagaaaatggaagaacgcctggcggcggataccaaagagaatatcgacaaccagctgctgaccgaggtgagttcgcgtgtcatcggtaatttgcgtcgccgcgtagatgggcgtaacgatgtcgaaacctcgatgctggaagagagccttgagcgccgtttccgtctggcggcgctgcgttcggaacgcggcgagctgtaccacctgcgcgcgacgcggcaaatcagcaacgagacgttgcagaaactgctgcacgatctcgacctgttagaagcgctgttaatcgaagatcagtaa

SEQ ID NO: 96844 - DNA, 294 bp, Enterobacter aerogenes
atgaaactaccaactggtgttgaaatacacggaaagacaataaggattagttttatctttcgtggcaaacgctgccgtgaagttctgcggggttgggagattacaaactctaatttgaaaaaagcacataatctacggtctgttattttgggagaaattcaggcaggtaaatttgattatgccgaacgatttcctaactctaggaacgctgataaatttggctctaccaaaatacttaaaacatttaaagacctgacaaccctttatctttcatcaaaggagaggctttgttga

SEQ ID NO: 96845 - DNA, 1305 bp, Enterobacter aerogenes
atggggtgtggttacgttcactgtcatgagacaccgcccgtgtacgccttaatcgatgtcaattcgatgtactgcagctgcgaagaagcgttccgccctgatttacgaggtcgccctgtggtcgttctcagcaacaacgacggggcgcttgttgcggtcaatcgcgcggcgaaagcgcttggcgtgcgccgcggggagccctatttccgctgccgccgcctgctggaacagcataacgttgccgtattcagttccaactacaccctttacgcctcattctccgccagatttgcaaccgtggtggagagtctggcgccgcggacatttgtttactcaattgatgagctctttgcggatgcctctcatatggagggagtgatgacgccgcaggcgtttggccagcttttgcgggctgaagtgctgcgccagacaacgctcacctgtggagtcggcgtcgcgccaacgaagacgctggccaaactgtgcaaccacgccgcgaagacgtggcctgccaccgggggggttgtggcgctcagtgatcctgtaagactgaaaaggctgatgagcctggtgtcggccggcgatgtgtggggggttggccatcgtaccgaaaaagggctggcgacaatggggatcaaaacggcgctggcgctcgcagagatggatatccgactggcacgccggctgtacggtgtgacgctggaacgcaccatccgtgagctgcgtggcgaggcctgctttgccctggaagaaggtaccggcgcgaaacagcagcttgttgtatcccgttcgtttggatcgcgggtcacgcaactggcgcagatgcagcaggcggtgactaaatatgccacacgggcaggagaaaagttgcgccaggaaaaccgtctggcgaaggtggtaacggtctttatccgcagcagtgcttatgacgccggcggtgtgccctacagtaaccaggctacggaagtgcttcccgtgccaagccaggatacccgcgacatcatcgccgcggcgcagctgggactgtcgcgtatctggcgtgagggcgtgcggtatgcaaaagccggcgtgatgctcagcgatctgcagggatatgaaacccagctggatctgttttcgccggctgctgtgcggccgggcagcgaaaaactgatggccaccatcgacaaaataaacagggaaggaaggtcaaggatcttcttcgccggagaaggtattgatccggaatatgccatgcgccgtgaaatgttgtccccggcctacaccacgcagtggaaggatattcccgcggcgtttatgcgataa

SEQ ID NO: 96846 - DNA, 885 bp, Enterobacter aerogenes
atgttcgcggctttgctgcatgcgagaaagatgctttctctccagcctgagtgcgtgcgttttgacgtttatcgcaccgctacggtgctggagcaaaatcagggcagtcaacgagccaatgcttttttaatcagtttctgcaaaaaggcattgccacgtcttgaactggtcgcaaaaaaatacgagagcgcgggtatcaacagcaatgtatcaaccgccgttttcggtggtcattttgacactcgactaatgcaatatctggcttcacgtatggttaatctggtcgccagatataaccgcctccctgacatgtcgcgcgcagatgttgacttgctggccggtgacattgctaatttcattcgttctgagctggcaaatattgatgattcaggttttggtgagctcaaaacgctatacacctggtacatgcacgctggttttatttctctgcaattcaatgtcacccctccccattgggagcgcgtggcaaataaatacttcaacaaagatgatatcgcccccgcagtaatccgtatgtttactgagtcatggtggcgtaatcgcctgcgtcgtgtcgcgtcggcatggcgcgaacacatacaaattgcagtcggcaacgtcagcaagaaaaagcacgcctacgcgagtaaaaactgcgtaacagactggcgcgagcagaagcgccgaacgcgtgagtttctcaagggactggatctcgaagacgaagacggcaaccgcatcagcctgattgaaaaatacgacggttcggtcgctaatcctgcgatacgccgctgcgaactgatgacccgcatccgtgggtttgaaaatatctgcaatgaactcggttatgtcggggagttttacaccctgactgggctttgttga

SEQ ID NO: 96847 - DNA, 681 bp, Enterobacter aerogenes
atgagtattattaaactatacaaacgatatcaggataaatggtgggcactaccgctcatcctccctacgctgctgttgccgctggcgcgcgccgcgaatacatttgcaaatcttaacggtcacaccgtctttctgttttatcttccgctggcgttagtattgagcctgatgctgtttttcggctgggcggcgattccgggcattatagtcggcttgctgctgaccattacgcgcggaatgaccttcgagcaatctatcggcgtattgtttcattttttgatcccttcagtgctgtgctggggcggttatcgcattttcgttccacgccgtcagcagatttcacatggtaatgttgccctgatgccgtatcggctgttctggcaaatgctgctgccctcggtaatttttctcattatttcgcagattgctgagtatcttggcctgcatccgcgggcggcggaactggtgggttcaacgccatttagtttacgatcgttaatcacttttcaggcgctgatggtggggtgcttgaccggtgtgccactgtgctattttttgctgcgtgttattcgtaacccgctacacttacgcggttttatatcccaggtgcgtttacaaatcgaccaaaaaataaaaccgctggaaattattgtctgggcaatagtattgttaataaggtga

SEQ ID NO: 96848 - DNA, 672 bp, Enterobacter aerogenes
atgaataccaaaccttcagttttttctttcgagtcaagcagtcaaatccgtgcagttattatcaacggcgagccatggttcgtagcagcagatgtcatcaaagctctgcagctgacgaacccaacgatgtcaatgaaagctcttgatgaagatgaacgatctaagttgaacttaggccgtcaggggactgcaaacataatatccgagtccggactctacaccttaatccttcgctgccgagacgccgttacgcctggcaccatcccctaccgtttccgcaaatgggttaccagtgaagtgcttcctcagatccgcaagacaggccgttacgtgcgggaggagctatcaccggcggataaagctcagaaggttgtggccagttttatgccagccattctggaggcaatgaaagaaggggataagccttcatacagctacccactcaagccgggataccgtgagatgatccattgcccggagggtgttgtcggcctggcggagaagtcactgctgatgaacctgctgcagcagcttgatgaagatggtcatgatgtcgccggcgccgcggcggaattcacaacaatggtgagctatattgttggtgttagccgctgcctgcaggacatacgcagccacgcgcagtacatcaacaagaacgcctctgagttctga

SEQ ID NO: 96849 - DNA, 180 bp, Enterobacter aerogenes
atgcgtatcagcgaaagagaaaaagtgcgtaaagcgcgtgctgccgcaagacgtgttgaaagtaaaagtgccgcgtacacaagggtgacgatggataaggaacattctgttcggatttctcgcgctttttacgacgggcttaaagataaggagaatttcgagtttgtctgcgcctcctga

SEQ ID NO: 96850 - DNA, 540 bp, Enterobacter aerogenes
ttgtctgcgcctcctgaaaaagagaaacctgaacaaatctacaagggtcgagtacttcatacaatgaaattctcggccctttgtctttccgatgctaaggtaaaggaagttgccgatgcattcaaagaatactggttcacaggttatcatcctgatattggtaaagatgcagcatttgccaggcctaaagagatattagatctccatgttaggcatagtcatgttgatgtgggtgactatacttcagaagaaagcagcacagatattctgggtaagaagtcatcttgggatatgtggaaaaagatcgcatcagtaaaagtaaaatataccccaacaagcaatagttttttagtctattcagttaatcataaccgagacgctctcgttatgtttttcatagacgctgatgctcataaagtgtccgaacaagaagagtttaaagaagcggcaattgagatcagttacaaatttttcgaaggaacgaagactcaaccaatgccattagacgaagatttgttttcagagaaatggaaaaactaa

SEQ ID NO: 96851 - DNA, 297 bp, Enterobacter aerogenes
atgcaagctattggctttatcgtttacatcgtggtgggacttttccaactagcggcaatcatggcaggccttgaatcatggtggggagttcattggcttatcgccgcgccagtggcattcattatcagctacataccattgttaggatcaatcgttggtatggttggcgctatggatgtttggcggtgggaatggtggcaggctggtcttcttttctttggtgggctggtttttgctattgcctgcggaggaatgtcttcgttcttcgaatggctatctttcaggaaaagagcgtga

SEQ ID NO: 96852 - DNA, 309 bp, Enterobacter aerogenes
atgaaaaatattggccttgtttttattttgattcctttttttgcgcaggcagatctttctgcaaattcgtattacaagtgcattaaagacaatgtggtaaaatatagtaagactaacgaatcggctgattccattgcttctgctgctgttacttcatgcggcagtgttttgggtgaagtgctacaaagtagcgccccgttcatgaacgctagtgctgaagcaaaatcaaaatttatttctgatatgaaagcccaagggaaggaagctggaataaaatatgcgatggatgaaaagcttaataataaatag

SEQ ID NO: 96853 - DNA, 2475 bp, Enterobacter aerogenes
atgagacaggaatgtattcaggcagtacagcaggcggcacagcggaccctgacagcaagagaaatacaggatatcgaggatcgcatataccgtaacatgcggtctctggcgcgtgatgatccagcatcgtggcggcaactaaccgatgcggagcgactgcgccgtgccgggcagttagctgcagatgaactgcagcaggaggcagcacttaagaagcgccgcgttgcactgaccatagcggcacgtcaacggctggataagtttatcaatagctatcagggggctgatgggaagctgggggctctgaatcgtacgatcgcgtttaccgctgatggaaaatccaattttctttctgttgagtcgagaaccaaggcgacgcgtgactatgcccttagccagttacaggaagcatttgaagctgttgatcctcgtttctttggcctttttgaagatgagaaaggggtgcgtgatctgatattcgaaatccgcggacagaatactggcaatgccaaagcgcgaaaaggtgctaaggcatggggagaagtaaccgaacttctgcgccgtcggttcaatgacgctggcggtgatatcggatacctggaaaactgggggatcccacaacatcactcgatggaaaaggtggggaaggtatcacgcgataaatgggttagtgatgtcattggcaaacttgaccgcaaatattatacccgcgccgacgggcaactaatgagcgaagctgagttatcaacattccttggtgaagcgtataacactatcgctacgggcggcctgaacaagctcagtgatacaggaatgcggatatcaggtgcgcgagctaaccgcggtaacgcgtcgcgccagattcattttaaggacgctgattcataccttgagtaccaacaacagtatggagaccgttcgctgtgggaaatcatggttggccacctggaaggaatcagtaaagatattgcattggtggaaacttacgggcccaatccggatcatgtattccgttcacttctggaccagacaaaatcggagacggcaacagcgaacccgagcaaaaccggtagcgtagagcgcctggcaaataacactgaaaatctctataactttatttccggaaaaactcagccgatcgctaatccacatatcgctcgatggtcagataatatccgtaactggatggttgccagtcgtcttggttctgcgctgctggcgtcgttctcagatcttggcacaatgtacctttcagctaaggttacgaatctgcctatgaaccaacttttccgcaaccagctcgaagcgatggatccaacaaatcgcactgagttggcccgggcccgccgggcgggcctggctatggagtcgcttctcggcagcgtgaaccgttgggcgatggataatatggggccgtcagtgtcccgctgggcggcaaccgcagtgatgcgagcaagtggccttactgcatggtcagatgcccataagcgcgcttatggcgtaactatgatgggtagcctgggtgatgttgttaccagaacgcctgatctgcgcagtctagatgatgctgattaccgcatactgaaaagtaaaggcatcacagaaacagactggagtgtgtggaaacttgctcagcaggaggactggggaaaaggaaacaatacgatgctgactccagaaagcatcatgcgcattcctgattctgctgttcagcatcttggttcacctgagcgaattaagttcgaggccatgcgaaaactgcttggtgctgtaactgaagaagttgatatggcggtgatcacgccaggtgcgagagagcaaatgcttactggttcaggaatacagagaggaacgtggaaaggggaattaacgcgcagcgtattcctgttcaaatcattcccgatctctgtggtcatgcgccactggtcgcgtgctatgggtatgccttctgctggtgggcgtgcagcatatattgctacatttattgcaagcacgactatccttggcgcgctttctcagcagcttaacgatatggcgtcagggcgaaatccacgcgatatgactggtgaagatgcggcaaaattctggctcggcgcgttgcttaaaggtggcggtcttggtttatatggcgattttctactatcagatcacaccagatatggcagcggtgctttggcgtcaatgcttggcccagttgcaggcctggttgatgatgtcattaagatcggtcagggtatccctttaaacgcagtagagggtaagagcgaacaaactggcggtgaccttgttaaacttggcaaaggactgacgccaggtgctaatatctggtatctgaaagcagctgtagaccatatgattttcaaccagatgcaggagtatttttcacccggctatctgcgtaagatggagcagcggtcaaagaaagaattcaatcaaacatactggtggcggccgcaggacgttacaccacaataa

SEQ ID NO: 96854 - DNA, 1803 bp, Enterobacter aerogenes
atgagttacttcggcctgaacccggtaaatcaaaaccaacaactggatgatgctgtttcaaacccggcagggtttaacagtgatgttggtttctttgataatacttttggtgcagcagtatctggtctttattccggtctggtggccaagccagatcagcttctctgggctggaatggataagttggtgtcacctatcgcgcagtttgttaatgaaaacacaccaatcaatgacacttcagcagcttacattgcggagcagagaagcctggcgcagcagcaagtaaagcgccttacgccagatgctgctactaccggcactgcaggtcaggttctttatggcctgtttgatatgggcgggcaggcagtggtaggtactgctcttgccggtcctgctggtggtgctgccgctgttacatcacttcaggggttttcagagtttgagaggctgaaagccgagggagtagattttgggacagctcaggaagctggcttgatacaagggatcactgctggcgccggcacacttatcccaatgagtctaggcttgcgcgctggtggttctttagctgaaagtgttggcgcgcagctggccagaaccggtgaaagcgctatcagaaatgcagcggctactgcagccagggctgcgccagatattgcctatgccgccggaacaaacatcgctttcggaatggcccagcgaggactgacggcacaaactttgcgggctggtggttatgatgaaatggctagccaatatgatgtttttgacaagcaggctatagcgattgatgccgttttaggtgtcgctttcggtgggattggaagattcatgaattctcgtggtgaatcaatgagcgccccggaattctcaccaattgaagtagatgcagcattatcggctaatgcctctcaccatgcagaaattgatgttgctcctggcgtaccagtcaatgtgctttcccgtgatgcgcacatccaggctttgcagaaagctatgcgtgatgtcagtgaggggcgcccggtagatgttgctaacatcgcagagccagcatccttcagtgatatccctgggcgcaaaaaccttatagcccaaacgattgatgaagcgttatttaatgcagatgaggggagcgcatccagagcagttgaaacgcgcattctcgaagagcaagcatcacaagttattagccgaggagagcggaaggctctgcaatccgagatcgctaatagcgagagagtgctgcaaaagttaagggataagagaaatgctgttgtggctgaagaggtttcaggaagtggtgctgctctctccaaggccagggcagaaaaacaatcacgcttacgcagtttagataagcagataaacgaaacatctacccgcctacaaaccgctaaagagagtctggcaccgcatgagcctggcggcgctaattatgaggcgcgagcagaattggctcgtcgccagcaggcagagagcgatctcaatgcccaggcgctttcattctataaaaccgctgaggttcgaaccgctgatgaggtggcgccgtttgatacagccacattacttcgacaagtagagcagaaaccgacggccgatcaggctggagatatggatttacgcattgccgaggattctctaagcgaatcgccagacatgatgattactgttcttgatgacgatggtaacccgcagtctcgtagtgcgcgcgaggtgcttgacgaggccaatagagaaagcgaacaggcaatgcaggactcaagcctattcgatgtggctgtgacatgtttcttgagaggttaa

SEQ ID NO: 96855 - DNA, 468 bp, Enterobacter aerogenes
atgcctaaagattctgagttgatgccagattttactggcattgtaaaagatgcttttgctggtgatgccaatggtgcatcaatggcctatgacatcgccaaagactactacgccggggttatggaaaaaaaaggaactatatctggagattacgataaaacagtatggcagcaggctgttaacgtagcaacgggcggagtgcatgactataacggcatgggaagcgttttattgccgtggggtatgtcagctgaccaattcgataagcaggtagatcaggcatggaaagcacaggtgattggtgcgggtataaaagctccgccaggtcaatatggcctgcagagttatggcgatagtcagtaccttgtaaagctaggtacaggctacttgctgaagagtgatgggacgcctgttgtcattgacctcacgcagcagaaacaacgcttctcgggagatattccgcaatga

SEQ ID NO: 96856 - DNA, 456 bp, Enterobacter aerogenes; identical to SEQ ID NO: 25798

SEQ ID NO: 96857 - DNA, 276 bp, Enterobacter aerogenes; identical to SEQ ID NO: 25796

SEQ ID NO: 96858 - DNA, 426 bp, Enterobacter aerogenes; identical to SEQ ID NO: 25795

SEQ ID NO: 96859 - DNA, 1680 bp, Enterobacter aerogenes; identical to SEQ ID NO: 10332

SEQ ID NO: 96860 - DNA, 225 bp, Enterobacter aerogenes; identical to SEQ ID NO: 31777

SEQ ID NO: 96861 - DNA, 267 bp, Enterobacter aerogenes; identical to SEQ ID NO: 31778

SEQ ID NO: 96862 - DNA, 546 bp, Enterobacter aerogenes; identical to SEQ ID NO: 31780

SEQ ID NO: 96863 - DNA, 327 bp, Enterobacter aerogenes; identical to SEQ ID NO: 31781

SEQ ID NO: 96864 - DNA, 177 bp, Enterobacter aerogenes; identical to SEQ ID NO: 31782

SEQ ID NO: 96865 - DNA, 345 bp, Enterobacter aerogenes; identical to SEQ ID NO: 31783

SEQ ID NO: 96866 - DNA, 510 bp, Enterobacter aerogenes; identical to SEQ ID NO: 79465

SEQ ID NO: 96867 - DNA, 213 bp, Enterobacter aerogenes; identical to SEQ ID NO: 33452

SEQ ID NO: 96868 - DNA, 129 bp, Enterobacter aerogenes; identical to SEQ ID NO: 31785

SEQ ID NO: 96869 - DNA, 1014 bp, Enterobacter aerogenes; identical to SEQ ID NO: 5004

SEQ ID NO: 96870 - DNA, 333 bp, Enterobacter aerogenes
atgctcacggcgggtattttccctctgaccgtattctgcaagaacggtgatatcacgaatcccgagctgtctggcggtaaaatgccggacgccggaaggaatatgattcatatcggtgaggaaggtgcccagaaaacggacacatccaatttgcagggcaatgcccagacggttgtgatcacctctgctttttccgataaattccttgtctgcttcatcaaggtgaaaatatcgtgccagctgaagctcatccggttcaccggtgaatctgccatagctttcagtctgctcagtggtcagaaagtcaacgggcatatcggcctccctgcctga

SEQ ID NO: 96871 - DNA, 825 bp, Enterobacter aerogenes
atgaaaaaaattttgctgctgcatatgttggtgttcgtttccgccactctcccaatcagttccgtggcttctgatgaggttgaaacgcttaaatgcaccatcatcgcagacgccattaccggaaataccttatatgagaccggagaatgtgcccgtcgtgtgtctccgtgctcgtcttttaaacttccattggcaatcatggggtttgatagtggaatcttgcagtcgccaaaatcacctacgtgggaattgaagccggaatacaacccgtctccgagagatcgcacatacaaacaagtctatccggcgctatggcaaagcgactctgttgtctggttctcgcagcaattaacaagccgtctgggagttgatcggttcacggaatacgtaaagaaatttgagtacggtaatcaagatgtttccggtgactcggggaagcataacggcttgacccagtcatggctgatgtcgtcgctcaccatatctcccaaggagcaaattcagtttcttctacgctttgtcgcgcataagctgcctgtatccgaagcggcttatgacatggcgtatgccacaatcccgcagtaccaggcagccgaaggatgggctgtacatggaaaaagcggcagcggctggcttcgggacaataacggcaagataaatgaaagtcgtccgcagggctggttcgtgggctgggctgaaaaaaacggacggcaagttgttttcgcccgattggaaataggaaaggaaaagtccgatattcccggcgggtctaaagcacgagaggatattctcgtggaattacccgtgttgatgggtaacaaatga

SEQ ID NO: 96872 - DNA, 1230 bp, Enterobacter aerogenes
gtgcgctcaaagaactgtaattggcggtattcccttgccgtcactgtgttgttgttatcacctttcgatttactggcatcactcggcatggacatgtacttgccagcggtgcctttcatgccacatgctcttggtacgacagcgggcacaattcagcttacgctgacaacgtatttggtcatgataggggccggtcagcttttgtttgggccactgtcggaccggctgggacgtcgtcccgtgctactggcgggcggtgccgcctacgttgcggcctcaatcggcctcgtcgtcacgtcatcggctggagtatttctgggttttcggattctccaagcttgtggtgcctcggcatgccttgttgccacatttgcaacagtgcgtgatatctacgcaggtcgcaaggaaagtaacgtcatctacggcttgcttggctctatgcttgctatggttccggcgataggcccattgctgggagcggtcatagacacctggttcgggtggcgggcgatctttgcgttcttgggattgggaatgatcgctgcattgacagcagcgtggcggctctggcctgagacccgggtgcagcgaccagcagctttgcaatggtcacaacttctgcttcccatcaagcaccttaacttctggttgtacacagtgtgttatgccgcaggaatgggcagcttcttcgtcttcttctccatagcgcccggattgatgatgggtaggcaaggcatgtcccagtttggcttcagtctgttgttcgcaacagtggcaattgcgatgatgcttgcggcccgcttcatggggcgcgtaatcgccaagtggggcagcctgagtgccttgcgaatggggatgggctgcctgatagcaggcgcagtcttgcttgtcatcaccgagctatggattccgcagtccgtgttgggctttattgccccaatgtggctagtgggcgtcggcgtcgcgacagcggtatccgttgcacccaatggtgcgcttcgagggttcgaccatattgcaggagccgttacggcagtctacttctgcttgggggggctgctgctggggagtgttggaacgctcatcatttcgctgttgccgcgcgacacggcctggccagttatcgcgtattgtttggttcttgcaacaatcgtgcttggactgtcgtgtgtttcccgagcgagagaccttcgcggtcacggggagtatgatgcggttgcacgcacatag

SEQ ID NO: 96873 - DNA, 333 bp, Enterobacter aerogenes
gtgaagaactggatatttctggctgtttcaatctttggcgaggtcatcgcaacttccgcactgaagtctagccatggattcactaggttagttccttccgttgtagttgtggctggctacgggcttgcgttctatttcttgtctctcgcgctcaagtccattccggtcggtattgcttacgctgtatgggctgggcttggcatcgtgcttgtggcagctattgcttggattttccatggccaaaaactagacttctgggcgttcattggcatgggacttatcgtcagtggcgtcgccgttctaaacctgctatccaaggtcagcgcacattga
